United States Patent Application Publication US 2012/0070457 A1 - sequence listing, part 6

SEQ ID NO: 40463 - DNA, 2274 bp, Neisseria meningitidis
atgaacattacccgaatcctctcccaagaactttccgcgactaccgcgcaaatcaatgccgctatcgagcttttggacgacggcgcaaccgtgccctttatcgcccgctaccgcaaggaagccacgggcgggttggacgatacgcagctgcgccggcttgccgagcggctgcaatacctgcgcgagttggaagagcgcaaagccgttgttttaaaaagcattgaagagcaaggcaagctttcagacgacctcagggcgcaaatcgaagccgccgataacaaaaccgcgctggaagacctgtatctgccctacaaacccaaacgccgcaccaaagcgcaaatcgcgcgcgaacacggtttgcagccgctggcggacgtgttgcttgccgagcagtcgcaggacgtggaagccgccgcacaaggctacctgaacgaaaacgtccccgatgccaaagccgcgttggacggcgcacgtgcgattctgatggagcagtttgccgaagacgcggaactcatcggcacgctgcgcgacaagctgtggaacgaagccgaaatccacgcgcaagttgttggaggcaaagaaaccgaaggcgaaaaattcagcgattatttcgaccaccgcgaacccgtccgcactatgcccggccaccgcgcgttggcggttttgcgcggccgcaacgaaggcgtgttgaacatcgcgctcaaataccggcccgacgacacgccgattacgcagcaaagcgaatacgagcaaatcatcgcccgccgtttcaaggtttcagacggccacaaatggctgcgcgacaccgtgcgtctgacttggcgcgcaaaaatctttttgtcgttggaactcgaagctctcaatcgtttgaaagaagccgccgacaccgacgcgattaccgtgtttgcccgaaatctcaaagacttgctgctcgccgcacccgccggacggctgaccactttgggtctagaccctggatacaagaacggcgtgaaatgtgccgtggtggacgacacgggcaagctgctggataccgtcatcgtctatttgcatcaagaaaacaatatgttggcaacgctgtcgcgcctgattaaacagcacggcgtgaagctcatcgccatcggtaacggcaccgccagccgtgaaaccgacaaaatcgcgggcgaactggtgcgtgaaatgtcgaaaatggggctgcataaaatcgtcgtgtccgaagccggcgcgtcgatttattccgcgtccgaactggcggcgcgcgagttccccgacttggacgtttccctgcgcggcgcggtgtccatcgcccgcaggctacaagacccgcttgccgagttggtcaaaatcgaccccaaatccatcggcgtggggcagtatcagcacgacgtgaaccaaagccagctcgccaaatcgctggacgcggtggtcgaagactgcgtgaacgccgtcggcgtggacgtgaacaccgcctccgccccgctcttggcgcgaatttccggtttgaatcaaacccttgcccaaaacattgtcgcctaccgcgatgaaaacggcgcgttcgacagccgcaaaaaattgctgaaagtaccgcgtttgggcgaaaaaaccttcgagcaggcggcgggctttttgcggattaacggcggcaaagagccgttggacgcgagcgccgtccaccccgaagcctatcccgtcgtcgccaaaatgctggcgcaacaaggcattagcgccgccgaactcatcggcaaccgcgagcgcgtgaagcaaatcaaagcgtccgacttcaccgacgaacgcttcggcctgccgaccattttggacatcctgtccgaactggaaaaacccggccgtgatccgcgcggcgagtttcagacggcatcgtttgccgaaggtatccacgaaatcagcgacttgcaagtcggtatgatactcgaaggcgtggtttccaacgtcgccaacttcggcgcgttcgtggacatcggcgtccatcaggacggcttggtgcacatctccgccctgtccaacaagttcgtccaagacccgcgcgaagtggtgaaagctggcgacgtggtgaaagtgaaagtgctggaagtcgatgctgcacgcaaacgcatcgcgctgaccatgcgcttggatgacgaaccgggcggcgcaaaacataaaatgccgtctgaaaaccgcagccgcgaacggacagccggccgcaaaccccaacgcaacgaccgcgccccgaccaattcggcaatggcggatgcgttggcaaagttgaagcggtag

SEQ ID NO: 40464 - DNA, 132 bp, Neisseria meningitidis
atgcaaaaccaaaatacacgccccgtcaaaatcgagcttaaaggcgaagcaggcaaacgcgtactgcttaccgccgcccgccgcattgccaaaacccatcaaaaagccgtcaaggcacttgccgacaaatga

SEQ ID NO: 40465 - DNA, 321 bp, Neisseria meningitidis
atgggtatgaatcaacaacgtttgactcaagtgattttggcacctatcgtttctgaaaaaagcaacgtattggctgaaaaacgcaaccaaatgacgtttaaagtcttggcaagtgcaaccaaacctgaaatcaaagcggctgttgagctgctgttcggtgttcaagttgcttctgtaactaccgttacaactaaaggcaaaactaagcgttttggtcgtactttgggccgccgcagcgatgttaaaaaagcttatgtaagcttggctgccggtcaagagttggatttggaagccgctgctgcagctgcagataaggaataa

SEQ ID NO: 40466 - DNA, 384 bp, Neisseria meningitidis
atgactttcgcctattggtgcattctgattgcctgcctattgccgcttttttgtgcggcatatgccaaaaaagcgggcggattccggtttaaagacaaccacaatccgcgcgattttctggcgcgcacgcaaggtgccgctgcccgtgcccatgccgcgcagcaaaacagttttgaagcatttgcaccatttgcagccgccgttttgacggcacacgcaaccggcaatgccggacaagcaaccgtcaacacgcttgccggcctgttcatcctgttccgcctcgcctttatctggtgctacatcgcagacaaagcagcattgcgctcgctgatgtgggcgggcggatttgcctgcaccgtcgggctgtttgtcgcggctgcttga

SEQ ID NO: 40467 - DNA, 756 bp, Neisseria meningitidis
atggattcttttttcaaaccggcagtttgggcggttttgtggctgatgtttgccgtccgccccgcccttgccgacgagttgaccaacctgctcagcagccgcgagcagattctcagacagtttgccgaagacgaacagcccgttttacccatcaaccgagcccccgcccggcgggcgggcaatgccgacgaactcatcggcagcgcgatggggcttaacgaacagcccgttttacccgtcaaccgagtccccgcccggcgggcgggcaatgccgacgaactcatcggcaacgcgatggggcttaacgaacagcccgttttacccgtcaaccgagcccccgctcggcgggcgggcaatgccgacgaactcatcggcaacgcgatgggacttttgggtattgcctaccgctacggcggcacatcggtttctaccggttttgactgcagcggcttcatgcagcacatctttaaacgcgccatgggcatcaacctgccgcgcacgtcggcagaacaggcgcggatgggtacgccggttgcccgaagcgaattgcagcccggggatatggtgtttttccgcacgctcggcggcagccgcatttcccatgtcggactttatatcggcaacaaccgcttcatccacgcgccgcgcacggggaaaaatatcgaaatcaccagcctgagccacaaatattggagcggcaaatacgcgttcgcccgccgggtcaagaaaaacgacccgtcccgctttctgaactga

SEQ ID NO: 40468 - DNA, 3834 bp, Neisseria meningitidis
atgaccacgactaccgcccctcagcgtattcgggaaatcccctacaactatacttcctacaccgaccgcgaaatcgtcatccgattattgggcgacgaagcgtggcaaatcctgcaagacctgcgcggacagcgtaaaaccgggcgttcggcacggatgctgtttgaagtattgggcgatatttgggtggtcgtacgcaatccgtatctggtcgatgatttgctggagcatcagaaacgccgcgccgcgctggtacgcgaaatgcgccacaggttgaacgaaatccgcaaacgccgcgacgacaaccgccaagtcgatgtcttggttgcggcggcggaaaaggcggtcgggcgttttgatagcagttttgatgaaaccagccaaaagcggcggcagattttggagcgtttgagcaaaatcaccaagccgcacaatattatgtttgacggcttggctcgcgtaacgcacgttaccgatgcaaccgactggcgcgtggagtatccgtttgtcgtcgtcaatcctgataccgaggcagagatcgcgcctttggtgcgcgccttaatcgagctggatttggttattatcccgcgcggcggcggcacgggttataccggcggcgcgattcctttggacgcaatgagcgcggtcatcaatacggaaaagctggacaaacatcgcggcgtggagtttgtcgagctggcgggcttggacggcaaacatccgattatccggtgcggcgcgggcgtggttacgcggcgggtggaagaaaccgcgcatcaggcaggtttggtgttcgccgtcgatccgacttctgccgacgcgtcctgcgtgggcggtaatgtagcgatgaacgcgggcggtaaaaaagccgtgctgtgggggacggcgttggacaacctcgcctactggaacatgattaaccctcaaggcgaatggctgcgcatcgagcgcgtgcgccacaattttggcaaaatccacgacgaagaaaccgccgtattcgacgttcacacgctggattcagacggcctcaatgtcgttaaaaccgaacgcttggaaatccccggccacaaattccgcaaagtcggtttgggcaaagacgttaccgacaaattcttgagcggactgcccggtgtgcaaaaagaaggcacggacggcatcattaccagcgtcgcctttgtgttgcacaaaatgccgaaatacacgcgcaccgtgtgtatggagtttttcggcacggtcgccaccgccacgccttctatcgttgaaatccgcgatttcctgctcgcccacgacagcgttcggctggcaggtttggaacatttggactggcgttatgtccgcgccgtcggctacgccaccaaagcagcgggtaaggggcggccgaaaatggtcttactggcggacgtggtttcagacgacgaagccgccgtagaggcagccgccgagcacatctgtgaacttgcccgcgcccgcgacggcgaaggctttatcgccgtatcgcccgaagcgcgcaaaaccttctggctcgaccgcagccgcaccgccgccatcgccaaacataccaacgcctttaaaattaatgaagacgtagtaatcccactcgaaaggctcggcgagtattcagacggtatcgaacgcatcaacatcgagctttccattcaaaacaaactcaaactctgtgccgccttggagcaatatctgtccggcaaactccccatcgacaaaatgggaaccgacctgccgaccgccgaactattgggcgaacgcggcaaacacgccctgtcccacgtttccgccgtcaaagcgcgttgggactggttgctcgccaatctcgacacgccgcttgccgactacaaggcccgctacggcgcagccgtccacgccgcgcccgaagccaaagacgatgaaagttgctttattgccttccgcgatttccgcctgcgcgtgtctgtcaaagcagacgtaatgaagccgctttctgaaatcttcagcggcaaaaccgataccaaaattatccaaggcttgggcaaaatccacgccaaaaccgtacgcagccgcgtcttcgtcgccctgcatatgcacgccggcgacggtaacgttcacaccaatattccggtcaattcagacgatgccgacatgcttcagactgcctatcgttcggtcgaacgcattatgaaaatcgcccgttcgctcggcggcgtgatttcgggcgaacacggcatcggcatcaccaagctcgaatttttgaccgatgaagacttgcagccgttttgggactacaaaaaccaagtcgatccgaaacacaccttcaaccgtcacaaactgatgaaaggctcggacttacgcaacgcctacacgccgtccttcgagctgttgggcgcggaatcgctgattatggaaaaatcaaacctcggcacgattgccgattccgtcaaagactgtctgcgctgcggcaaatgcaaacccgtctgctctactcacgttccgcgtgccaacctgctgtacagtccgcgcaacaaaatcctcggcgtgggcttgctgaccgaagccttcttatacgaagaacaaacccgccgcggcgtttccgtcaaacactttgaagaactcatggacatcggcgaccactgcaccgtgtgccaccgctgcgtcaaaccctgccccgtcaacatcgacttcggcgacgtaaccgtagccgtccgcaactaccttgccgattccggccacaaacgatttgcgcctgccgcagctatgggtatggcgtttttgaacgccaccggcccgaaaaccatcaaagcccttcgcgccgccatgatacagaccggcttcccagcgcaaaactttgcctacaaaatcggcaagcttcttccgatcggcacgaaaaagcaaaaagccgaacccaaggcaaccgtcggcaaagccccaattaaagaacaggttatccatttcatcaaccgtcctttgccgaaaagcgtacccgccaaaacaccgcgctccttattgggcatcgaagacggcaaaagcatccccatcatccgcaaccccgccgcgcccgaagatgccgaagccgtgttctacttcccgggttgcggttcggaacgcctgttcagccaaatcggacttgccgttcaagccatgctctggcacgtcggcgtacaaaccgtcctgccgcccggctatatgtgttgcggctatccgcaagacgcgggcggcaacaaggctaaagccgaagaaatgagcaccaacaaccgcgtggctttccaccgtatggcgaacaccctcaactacctcgacattaagaccgtcgtcgtcagttgcggcacttgttacgaccagctcgaaaaataccgctttgaagaaatcttccccggctgccgcatcatcgacatccacgaatacctgctcgaaaaaggcgtgaaactcgacggcgtgaaaggtcagcaatacctctaccacgacccctgccacacccccatcaaaaccatgaacgccacccaaatggccagcagcctgatggggcagaaagtcgttttaagcgaccgctgctgcggcgaatccggtatgtttgcagtcaaacgaccagacatcgccactcaggtcaagttccgcaaacaagaggaaatcgagaaaaacctcaaagagctgccgcagggcgaacccgtcaaaatgctgacttcctgccccgcctgcctgcaaggtttgagccgctacgccgacgacaacaatatgcctgccgactacatcgtcatcgaaatggcgaaacacatcctcggcgaaaactggctggatgagtttgtgaaaaaagccaataacggcggcgtggaaaaagtattgctgtaa

SEQ ID NO: 40469 - DNA, 1380 bp, Neisseria meningitidis
atggcaaaaacgcttaaaaccctttaccaatgcaccgaatgcggcggcacttccccgaaatggcagggcaaatgcccgcattgcggcgagtggaacacacttcaggaaagcttggccgcgcccgagccgaaaaacgcccgcttccaatcttgggcggcggatacctcgaccgtccaatccctctcctccgtgaccgccaccgaagtgccgcgcaatccgaccggcatgggcgaactcgaccgcgtattgggcggtggtttggtcgatggtgcggtcatcctgctcggcggcgaccccggcatcggcaaatccacgctgctgttgcaaaccatcaccaaaatggcacaaagccgcaaagtgctgtacgtttccggtgaagaatccgcccaacaagtcgccttgcgtgcgcaacgtttggaactgcccacagaaggcgtgaacctgcttgccgaaatccgcatggaagcgattcagacggccttgaaacaacaccagcccgaagtcgtggttatcgattccatccaaaccatgtattccgaccaaatcacttccgcccccggctccgtgtcgcaggtgcgcgaatgtgccgcccaactgacgcgcatggcgaaacaaatgggcatcgccatgatactggtcggacacgtgaccaaagacggcgcgattgccggcccgcgcgtattggagcatatggtcgataccgtgctgtatttcgagggcgaccagcattctaattatcgaatgatacgcgccatcaaaaaccgtttcggcgcggcaaacgaattgggcgtgttcgctatgaccgaaaacggtttgaaaggcgtgtccaacccgtccgccatcttccttgccagctaccgcgacgacacgcccggctcgtgcgttttggtcacgcaggaaggcagccgcccgcttttggtcgaaattcaggcattggtcgatgacgcgcacggctttacgcccaaacgcctcaccgtcggactggaacaaaaccgcctcgcgatgctgcttgccgtattaaaccgacacggcggcatcgcctgtttcgatcaggatgtgttcctcaacgccgtcggcggcgtgaaaatcggcgaaccggcggcggatttggcggtcatcctcgcgatgctttccagcttccgcaaccgccctatgcctgaaaaaaccgtggttttcggcgaaatcggcttaagcggcgaagtccgccccgtcgcacgcgggcaagagcggctcaaagaagcggaaaaactcggcttcaaacgcgccatcgtccccaaagccaatatgccgcgcaacgccaaagagtttccgaacctgaaaatctacggcgtttcgagtttgcaggaagccatcgatatttgccgcgacagcagggaataa

SEQ ID NO: 40470 - DNA, 819 bp, Neisseria meningitidis
atgaaaaaagaccatttaaacacaaccggtttcgacctctggcacaccatccgcgaagaaaccgccgccgctgccgccgccgaaccgatgctggcaagttttttgcaccaaaccgtgttgcgccacgagtccctcggctccgtccttgcctaccacctttccagcaaactcggcagcccgattatggacgtgcgcgcgctgtttgaaatctaccagcaggcgttgggcagcgacacccaaatcggcaaatgcgtcgaagcagacttaaaagccatctacgaacgcgatcccgcctgcgacgaatattcgctgccgcttttatatttcaaaggcttccacgcgattcaggcacaccgcatcaaccaccggctgtatctcgacgggcgcaaaacgctggcgtatttcctgcaaaaccgtatgtccgaagtattcggcgtggacatccatcccgccgcccgtttcggatacgggctgatgctcgaccacgccaccggctttgttgccggcgaaaccgccgtgttgggcaacaatatttcgattttgcacggcgtaacgctcggcggttcgggcaaagaaggcggcgaccgccaccctaaaatcggcgacggcgtgatgatcggcgcaaacgcctcgatattgggcaatatccgcatcggcagcaatgccaaaatcggggcgggcagcgtcgtggtttcagacgtgccgccgtccatcacggttgtcggcgtacccgccaaacccgtggcgcgatcgctcaaaacaccgtcggcggatatggatcaaaatatccagtttaccgaaatcgactttatgatttga

SEQ ID NO: 40471 - DNA, 445 bp, Neisseria meningitidis
atggcgcgttatcgcagaaacttcattgccggcggcacattctttttcaccgtcaaactcgccgacccgaaatcgcgcctgcttgtcgaacatatcgacttcgcgggcggcttatatggatgtgcaaaaacaatatccctttgaaaccgtcgccgtatgcgtgctgccaaaccacattcacgccatttggacgctgccgcccgacgatgcggattattccctactccggcggctgattaaaaccaaattctccgcatattccccttatactaaaaacttatccgccggcaaacagcggcagcacgaacgcggtatttggcaacggcgtttttacggacacaccgtgcgcgacgaaacggatttgcagcgttgcgcggactacatccattccaatcctatcaaacaaaaaatgtcgcgtgctaaaacagaatcctgcaaaaaataa

SEQ ID NO: 40472 - DNA, 219 bp, Neisseria meningitidis
atggtcgtaaatatacagtttcatcaaaatattcctcgtcaacctgtcggtaccggctaccttaacaccccgcgccgcccgaaacaagtttatagtggattaaatttaaatcaggacaaggcgacgaagccgcagacagtacagatagtacggcaaggcgaggcaacgccgtactggtttaaatttaatccactatatcttcccgcctatgcaccgtaa

SEQ ID NO: 40473 - DNA, 774 bp, Neisseria meningitidis
atgaaaccgaaaatccaaaggcacggagagattttaagccttgtccgccggcatcagtttatgtcggtggacgagcttgccgccgcattggacgttaccccgcagacgatacgccgcgacatccgcgagttggaggagggcggcagcctgaaacgccatcacggcggcgcatcttcgggcggaaacttgccggagggtctgtccgccgaccgccaaacccggtgtcaaaacgaaaaaaacgccattgcccggctgattgcggaacacatccccgacggttcgtcgctgtttgtcagtatcggcacgacgatggaagccgtggcatcggagctggtcaggcggcgcggcagcctgcggattattaccaacaatatccacgtcgcctccatcgtttcggcgcggacggattacacggtcattatcacttccggagtcgtccgccctttggacggcggtattaccggcgtggcaaccgtcgattttatcaaccagttcaaagtcgattatgccgtgatgagtacgcacggcgtggaaagcgacggttcgcttttggacgacgactacaaagaagtcagcgtgatgcaggcgatgattgccaatgcgcgcgtccgcttcctcggcgtggaccacagtaaattccgcagcaacgcgctggtcaggctcggcgacattacggcgtttgacaaagtatttaccgaccggctgcccgataccgcgatgcagaagatgctgaaagaggcgggggtggaatgcctgattgccgatgccgtctga

SEQ ID NO: 40474 - DNA, 1095 bp, Neisseria meningitidis
atgaaaaccaatctgctcaactacgaccttcaagggctgacccgacattttgccgatatgggcgaaaaacccttccgtgccaaacaggttatgcgttggatgcaccaatccggcgcgcaaaattttaacgaaatgaccgatttggcaaaatcgttgcgccataaactgaacgaacaggcaggcatcgaaattcccaagctgatgatgtctcaaaaatcttcagacggcactcgaaaatggcttttggatgtcggtacgggcaacggggtggaaaccgtcttcatccccgaatcggatcgcggcacgctctgcatttcctcacaagtcggctgcgctttggaatgtacattttgttcgaccggccggcagggcttcaaccgcaacctgactgctgccgaaatcatcggacagttgtggtgggcaaacaaagcgatgggtgttacaccaaaaaacgaacgcgtaatttccaatgtagtgatgatgggtatgggcgagccgatggcgaacttcgacaatgtcgttaccgccttaagcatcatgctggacgaccacggctacggtttgagccgccgccgcgtaaccgtttccacttcgggtatggttccccaaatggacaggttgcgcgatgtcatgccggtggctttggcggtttcccttcacgcttccaatgacgaagtccgcaaccaaatcgtaccgttgaacaaaaaatatcccttgaaagaattgatggctgcatgccaacgctatctagtcaaagcacccagggatttcatcactttcgaatacgtcatgttggacggaataaacgataaggcgcaacatgcgcgcgaactgatcgaactggtcaaagatgttccctgcaagttcaatctgattccgttcaatcccttcccaaactccggatacgaacgctccagcaatgagaacatccgtgtgttccgcgatattttgcagcaggcaggatttgtcgttaccgtacgaaaaacgcgcggcgacgacatcgatgccgcctgcggacagttagcggggcaggttcaggataaaacgcgccgccaacaaaaatggcagcagattttaatcggacaacaggggtaa

SEQ ID NO: 40475 - DNA, 1203 bp, Neisseria meningitidis
atgaagaactaccacgcgcccgacgagaagggctttttcggcgaacacggcgggctgttcgtgtccgagaccctgattcccgctttgcaagagctggcggatgcctataaggcagcgaaaaacgacccgtcgttttgggaagaattccaccgcgatttgaaacattatgtcggcaggcccagccccgtttaccacgccgcgcggttgtccgagcatttgggcggtgcgcaaatctggttgaagcgcgaagacttgaaccacaccggcgcgcacaaagtcaacaacaccatcggtcaggcactgttggcaaaacgtatgggtaaaaaacgcgtcatcgccgaaaccggcgcgggtcagcacggcgtggcgagtgccaccgttgccgcccgcttcggcatgacttgcgacgtgtacatgggtgcggacgacatccaacgccaaatgcccaacgtgttccgtatgaaattattgggcgcgaatgtcgtcggcgttgacagcggcagccgtactttgaaagacgcgatgaacgaagccatgcgcgaatgggtcgcccgcgtggatgacacattctacatcatcggtaccgccgccggccccgcgccgtatcccgaaatggtgcgcgactttcaatgcgtgatcggcaatgaagccaaagaacaaatgttggaagccatcggcagacagcccgacgttgccgttgcctgcgtgggcggcggatcgaacgccatcggtttgttccacccgtatatcggcgaagaaaacgtgcgcctcgtcggcgtggaggccggcggtttgggcgtgaacactcctgatcacgccgcgccgattacttcgggcgcaccgattggcgtactgcacggtttccgcagctatctgatgcaggacgaaaacggtcaggttttgggtacgcactctgtttccgcaggcttggattaccccggcatcggcccggaacacagccatctgcacgacatcaagcgcgtcgaatacaccgccgccaaagacgaagaagcactcgaagcctttgatttgctctgccgcttcgagggaatcatccccgcgctcgaatccagccacgccgttgcttgggcggtgaaaaacgcgccgaaaatgggtaaagaccaagtgattctggtcaacctctcaggtcgtggcgacaaagacatcaataccgtcgcgaagctcaaagggattaaactgtaa

SEQ ID NO: 40476 - DNA, 405 bp, Neisseria meningitidis
atggccgaagggcaggatgtcgatttggtagagatttccccaactgctaaaccgcctgtgtgcaaactgatggattacggtaaatacaaataccagcaggccaagaaacgcgacgaagccaagaaaaaccaaaagcaggtgcaaatcaaggaaatcaaattccgtccgggtacggatgagggcgattatcaaatcaagatgcgcaacattaaccgcttccttgccgacggcgataaagtcaaagtgacattgcgtttccgcggccgtgaaatggctcaccagcaactcggcgcgcaacttttggaacgtgtaaaagaagatttggctgaagtggcgcaaatcgagtcctttcccaaaatggaaggtcgccaaatggtgatgatgattgcgccgaagaaaaaataa

SEQ ID NO: 40477 - DNA, 1173 bp, Neisseria meningitidis
atgaaacgccaagccttagctgcaatgattgcttccttattcgcattagccgcctgcggaggcgaacaagctgctcaagcccctgccgaaacccctgccgcttccgcagaagccgcaagctccgccgcacaaaccgccgccgaaacaccgtccggcgagttgcccgttatcgatgcggttaccacccacgctcccgaagtacctcccgcaatcgaccgcgactatcctgccaaagtccgcgtaaaaatggaaaccgtcgaaaaaaccatgaaaatggacgacggcgtggaataccattactggacatttgacggcgatgttccgggccgcatgatccgcgtacgcgaaggcgatacggttgaagtggaattttccaacaatccttcttctaccgtaccgcacaacgtcgacttccacgcggctaccggccagggcggcggcgcggccgcaacctttaccgctccgggccgtacttccacattcagcttcaaagccctgcaaccgggtctgtacatctaccactgcgccgtcgcaccggtcggtatgcacatcgccaacggtatgtacggtctgattttggtcgagcctaaagaaggcctgccgaaagtggataaagagttctacatcgtccaaggcgacttctacaccaaaggcaaaaaaggcgcgcaaggtctgcaaccgttcgatatggacaaagccgttgccgaacagcctgaatacgtcgtattcaacggtcacgtaggtgctatcgccggcgataacgcgctgaaagccaaagcaggcgaaactgtacgtatgtacgttggtaacggcggtccgaacttggtatcttccttccacgtcatcggcgaaatcttcgacaaagtttatgttgaaggcggcaaactgattaacgaaaacgtacaaagcaccatcgttcctgccggcggctctgccatcgtcgaattcaaagtcgacatcccgggcagctacactttggttgaccactccatcttccgcgcattcaacaaaggcgcgttgggccaattgaaagtagagggtgcggaaaaccctgaaatcatgactcaaaaattgagtgataccgcttacgccggtaacggtgcagctcctgctgcttccgctcccgcagcttctgctcctgcagcctctgcatccgaaaaaagcgtttattaa

SEQ ID NO: 40478 - DNA, 876 bp, Neisseria meningitidis
atggaagaaggtttgatcgacaggctgcttgaaacgctgtggttggacaggcggctcagtcagaatactttaaacggttaccggcgcgatttggaaaaaatcgcccgccgcctgtcccaatcgggcagaatgctgaaggatgcggacgaagcggatttggcggcggcggtttatgttgacggagagcaacggagttcgcaggcgcgcgcattatcggcgtgcaaacgcctgtatatatggatggagcgtgaaggcataaggacggacaatcccacccgtttgctgaaaccgcccaaaatcgacaagaatattccgacactgattacagaacagcagatttcccggctgcttgccactccggatactgatacgccacacggtttgcgggacaaggcactgctcgaattgatgtacgcgaccggcttgcgcgtcagcgaggcggtcgggctgaatttcggcagtgtggatttggacaggggctgtattaccgcgctgggcaagggcgataagcagaggatggtcccgatggggcaggaatcggcgtattgggtgggacgctattacacggaggcgcgtccggccttgttgaagggcaggagttgcgatgccttgtttgtcagtcagaaaaaaacaggtatttcccgtcagttggcatggatgattgtcaaagaatatgcaggtagggcaggcatcgggcacatcagcccgcacagcctgcgccatgccttcgccacgcacttggtgcagcacggattggatttgcgcgtggttcaggatatgttgggacatgccgatttgaatacgacgcagatttatacccatgttgccaatgtatggttgcagggtgtagtgaaggaacaccattcccgaaactga

SEQ ID NO: 40479 - DNA, 276 bp, Neisseria meningitidis
atgacagaacatacgcctgaaaaaaagaacgttaaagtggatcaactggttgttcaagataaagaatctgcatctaattccggtaaggaagggttttttgcatatttctcaaattcttggtccgaattcaaaaaggtggtttggcctaagcgtgaagatgctgtcagaatgactgtatttgttatagtgtttgttgctgtgctttctatatttatctatgcggcagatacagcaatttcgtggttattttttgatgtattgctgagaagggaaggt

SEQ ID NO: 40480 - DNA, 495 bp, Neisseria meningitidis
atgaacaacagacattttgccgtcatcgccctgggcagtaatcttgaaaaccctgcccaacaggtacgcgccgcattggacacgctgtcgtcccatcctgacatccggcttgaacaggcttcctcactgtatatgaccgcccccgtcggttacgacaatcagcccgatttcgtcaatgccgtctgcaccgtttccaccactctggacggcattgccctgcttgccgaactcaaccgtatcgaagccgatttcggacgcgaacgcagcttccgcaacgcgccgcgcacattggatttggacattatcgactttgacggcatctccagcgacgacccccgcctcaccctgccgcatccgcgcgcgcacgaacgcagtttcgtcatacgccctttggcagaaatcctccctgattttgttttaggcaaacacggaaaagttgccgaattgtcaaaacaactgggcaatcaaggcatccgtcttttaccggataagtaa

SEQ ID NO: 40481 - DNA, 2829 bp, Neisseria meningitidis
atgatggacgaaaaactcaatttctcttacctgttcggttcgaacgcaccctacattgaggaattgtacgaggcttttttggaaaaccccgatacggttgatgaaaaatggaagcagtatttcaccgatttgagcaaacagccggggacggttgctgtcgatgtcgcacacacaccgattcgcgaatcatttgttactttggcgaaaaagaaaattgcatctgccgttgcgggcggtgcggatgaggcaatgctgaaaaagcaagtcagcgttttacgactgatttctgcctatcgtatccaaggcgtgggtgcagcccaacttgatccgctcaaacgtatccccccgcgagatattgaagccctcgatccgaaattccacggtctgtcagatgccgatatggcgcttcaattcaatatgggcgagggcgattttgccaatcgcggcaaactgcctttgtcccaaatcatcagcaacctcaaacaaacctactgcggccacatcgcattggaatatatctatattcccaataccgaagagcgccgctgggttcgcaattattttgaaagcgtactgtctacgccaagctacaacgttgaacaaaaacgccgtatcttgaaagagatgactgctgccgagactttggaacgctacctgcataccaaatatgtcggtcaaaaacgctttggtgtagaaggcggcgaaagcgcgattgccggtttgaactacctgattcaaaacgccggtaaagatggcgtggaagaagtcatcatcggtatggcacaccgtggccgtctgaatgttttggtgaacattttgggcaaaaaacccggtgatttgttcgctgagtttgaaggccgtgccgaaatcaaactgcctagcggcgacgtgaaataccacatgggcttcagctccgatattgctaccccgcacggcccgatgcatgtttctttggcgttcaacccgtcacacttggaaatcgtcaacccggtggtggaaggttctgcgcgcgccaaacaaaaacgtttgggcgaaaacggccgcgacaaagtcttgcccgtattgattcacggcgactccgcatttatcggtctgggtgtcaaccaagcaacattcaacctgtctaaaacacgcggttataccaccggcggtacggttcatatcgtcatcaacaaccaaatcggctttaccacttccgatatccgcgatacccgttcaaccgtacactgtaccgatatcgcaaaaatggtttccgccccggttatccatgtgaacggcgatgatcctgagcgtgtttgctttgctatccaagccgctttggattaccgcaaaaaattccataaagacatcgtgattgacgttgtctgctaccgtaaatggggtcacaacgagggcgatgatccgaccttgacccaaccgatgatgtacaaaaaagtatcgcaacaccccggtgcgcgtgctttgtacaccgagcaactgattgccgaaggcgtggtaacccaagccgaggcagacggttacatccaagcctaccgtgatgctttggacaaaggcgaacacgtcgagcaaacaacgttgagcaactttcaacgcacgcaaatcgactggagcaaataccaaggcaaagattggcgcgaacacatcgaaaccggtttgcctgccgcagatattgagcgtctcactgagaagtttaccgccgtaccggaaggctttgccctgcatccgactgcaaaacgtgtgattgaagcgcgtaaagccatggcatccggcaaacaggccatagattggggtatggccgaaaccttggcatacgccagcctcgtaaccaaaggtcatggcgtgcgtatctccggtgaggactccggccgcggtacgttctcgcaccgccacgccgtattgcacgatcaaaaacgcgaaaaatgggacgacggtacttatgttcctctgcgccatatgggcgaaggaatgggcgagttcctggttatcgactccattttgaacgaagaggccgtgatggcgttcgagtacggctttgcctgctccgcacctgacaagctgaccatttgggaagcgcaattcggcgatttcgccaacggcgcgcaagtgacgattgatcaattcctgtcttcaggcgaaaccaaatggggtcgcttgtgcggtctgaccaccatcctgccgcacggttacgacggtcaaggccctgagcactcttctgcacgcgtagaacgttggttgcaactgtgttctgagaacaatatgcaagtcatcatgccatctgaagcgtcgcaaatgttccacctcttgcaacgtcaagtcttaggttcataccgcaaaccgctagtgattttcatgtccaaacgcctgttgcgattcaaaggggcaatgagcccgctggaaaacttcaccgaaggttcgactttccgtccggttatcggcgataccgccgaacgcgcaagcaacgacagcgtgaaacgcgtggtattgtgtgccggtcaggtttactatgacttggaagccggtcgagccgaacgtaaactggaagatgatgtcgctattgtccgcgttgagcagctgtatccgttcccatacgacgaggttaaagccgaactggcgaaatatccgaacgcaaaatctgtggtttgggcacaagaagagccgaaaaaccaaggcgcgttctaccaaatccgccaccgcatcgaagacgttatcagcgaagagcaaaaactgtcttatgccggtcgtccaagcagcgcatcgcctgcagtgggctactcaagcaaacacattgctcaattgaaacaattggttgaagacgctttggcattgtaa

SEQ ID NO: 40482 - DNA, 1044 bp, Neisseria meningitidis
atgcagattaccgacttactcgccttcggcgctaaaaacaaagcatccgaccttcacctgagttcgggcatatcccctatgattcgggttcacggcgatatgcggcgcatcaaccttcccgaaatgagcgcggaagaggtcggtaatatggtaacttcggtaatgaacgaccaccagcggaaaatctaccagcaaaacttggaagtcgacttctcgttcgaactgcccaacgtcgcccgattccgcgtcaacgccttcaacaccggccgcggtcccgccgccgtattccgcaccattcccagcaccgtcttatcgctggaagaattgaaagccccgagcattttccaaaaaatcgcagaatcgccgcgcggcatggtattggttaccggccctaccggttcgggcaaatcgaccacgcttgccgcgatgatcaactacatcaacgaaacccagccggcacacatcctgaccatcgaagacccgatcgaattcgtccaccaaagcaaaaaatccctgattaaccagcgcgagctgcaccagcacaccctcagcttcgccaacgcgctgagttccgcattgcgcgaagaccccgacgttatccttgttggcgagatgcgcgaccccgaaaccatcggcttggcactgaccgccgccgaaaccggacacttggttttcggcacgctgcacacgaccggcgcagcaaaaaccgtcgaccgtatcgtggacgtattcccagcgggagaaaaagaaatggtgcgctctatgctgtccgaatcgctgaccgccgtcatctcccaaaacctgctgaaaacgcacgacggcaacggccgtgtcgcctcgcacgaaatcctgattgccaaccccgccgtccgcaacctcatccgcgaaaacaaaatcacgcagattaactccgtcctgcaaaccgggcaggcgagcggtatgcagacaatggaccaatcgctgcaatcgctggtgcgccaagggctgatcgcaccggaagtcgcacgcagacgcgcgcaaaacagcgaaagtatgagtttctga

SEQ ID NO: 40483 - DNA, 1269 bp, Neisseria meningitidis
gtgaaaccgctgcgcagactgacaaacctccttgccgcctgcgccgtagcggcggccgcactcatacagcccgccctcgcggcggacttggcgcaagacccgttcattaccgataacgcccaacggcagcactacgaacccggcggcaaataccacctcttcggcgacccgcgcggcagcgtctccgaccgcaccggtcaaatcaacgtcatccaagactatacccaccggatgggcaacctgctcatccagcaggcaaacatcaacggcacaatcggctaccacacccgcttttcgggacacggacacgaagaacacgccccctttgacaaccatgccagccgcagcgcaagcaaagaacaaggcaacgttgacgaaggctttaccgtgtaccggctcaactgggaaggacacgagcaccatcccgccgatgcctacgacggcccgaagggcggcaattaccccaaacctacgggcgcacgcgacgaatacacctatcacgtcaacggcacagcacgcagcatcaaactcaatccgaccgacacccgcagcatccggcaacgcatatccgacaattacagcaacctcggcagcaatttctccgaccgcgccgatgaagccaacagaaaaatgttcgagcacaatgccaagctcgaccgctggggcaacagcatggagtttatcaacggcgtcgccgccggcgcgctcaacccctttatcagcgcgggcgaagccgttgaccagtggatgcaggaaaaccccaatgccgccgaaaccgtcgaagccctggtcaacgtcctgccatttgccaaagtcaaaaacctgacaaaggcggcaaaaccggggaaggctgcggttagcggggatttctcagactcctacaagcataacactgcttcaagattatctcagtctgtagatggagaaatgtttcaaacccgcaatgttgattttaaagcaaaatctattgggactaaaattcatgatggagctcaagggaaacatatttcaggacatagaaactacattgaaggtaagagtactttaaatcaaaacattaatcctcaagaattgttgaacggaatacattcaggtgcttatccagttatttctaaaggagcaagaggaaatcctgttgttgattttgggtatcctataggcagcgatgggaaatcaggattaagtaccaattttggtacgattcattcaggtaaaaatggagttcacattgttccggctaaccctaaaaccattaaaaaggtgcaatag

SEQ ID NO: 40484 - DNA, 315 bp, Neisseria meningitidis; identical to SEQ ID NO: 37950

SEQ ID NO: 40485 - DNA, 294 bp, Neisseria meningitidis
atgacagctaaaggacaaatgttgcaagatcccttcctgaacgccctgcgtaaagagcacgttccggtttcgatttacctggtcaacggcatcaaactgcaaggtcaggttgaatctttcgaccaatacgtcgttcttctgagaaacacttccgtaacccaaatggtttacaaacacgccatttccaccatcgtaccggctcgctccgtcaacctccaacacgaaaacagaccccaagccgcaccggcttcgacccttgtccaagtggaaaccgtccagcagcctgccgaataa

SEQ ID NO: 40486 - DNA, 1188 bp, Neisseria meningitidis
atgaataccttactcaaccaactcaaaccctatccctttgcccgactgcgtgaagcgatgcagggcatttccgcccccgaaggtctggaagccgtcccactgcatatcggcgaaccgaaacatccaacaccgaaagtcattacggatgcgctgaccgcctcattgcacgagttggaaaaatatccgctgacggccggtttgcctgaactgcgtcaggcgtgtgcgaactggttaaaacgccgttatgatgggttgacgctgaattccgacaccgaaattctgccggttttgggaagtagggaggcgttgttttcttttgtccaaaccgtgttgaaccctgtttcagacggcctcaaacccgtaatcgtcagcccgaatcccttttatcagatttatgaaggtgcgacacttttgggtggcggtgaaatccattttgctaattgccccgcgccgtctttcaaccccgattggcgcagtatttccgaagaggtttggaaacgcaccaaactggtgttcgtctgctcgcccaacaaccccagtggcagcgtgctggatttggatggctggaaagaagtttttgatttgcaagacaaatatggtttcattattgcctcggatgaatgctattccgaaatctatttcgacggcaacaaacctttaggatgtctgcaagctgcagcgcaattgaaacggggcagggaaaaactggttatgtttaccagtctttcgaaacgttccaacgtacccggtttgcgttccggatttgttgcgggagatgcgggattacttaaaaatttcttgctttaccgaacttatcacggcagcgcaatgagcattcccgtacagcgtgccagtattgccgcctggaatgacgaacagcacgttattgacaaccgccgcctgtatcaggaaaagtttgaatgggttattcctatcctgcaacaggtatttgacgtcaaattaccggatgcctcgttttacatctggttgaaagtccccgatggcgacgatttggcatttgcacgcaatttatggcaaaaagccgctatccaagtattgcccggacgctttttggcacgggataccgaacagggcaataccggggaaggttatgtgcgtattgctttggttgccgatgtcgcaacttgtgtcaaagctgcggaaaccattgtttccctatatcggtaa

SEQ ID NO: 40487 - DNA, 726 bp, Neisseria meningitidis
atgagacatatgaaaaataaaaattatttactagtatttatagttttacatatagccttgatagtaattaatatagtgtttggttattttgtttttctatttgatttttttgcgtttttgttttttgcaaacgtctttcttgctgtaaatttattatttttagaaaaaaacataaaaaacaaattattgtttttattgccgatttctattattatatggatggtaattcatattagtatgataaatataaaattttataaatttgagcatcaaataaaggaacaaaatatatcctcgattactggggtgataaaaccacatgatagttataattatgtttatgactcaaatggatatgctaaattaaaagataatcatagatatggtagggtaattagagaaacaccttatattgatgtagttgcatctgatgttaaaaataaatccataagattaagcttggtttgtggtattcattcatatgctccatgtgccaattttataaaatttgcaaaaaaacctgttaaaatttatttttataatcaacctcaaggagattttatagataatgtaatatttgaaattaatgatggaaacaaaagtttgtacttgttagataagtataaaacattttttcttattgaaaacagtgtttgtatcgtattaattattttatatttaaaatttaatttgcttttatataggacttacttcaatgagttggaa

SEQ ID NO: 40488 - DNA, 1395 bp, Neisseria meningitidis
atgaacaaacaacccctttccctcgccgtcgtcggacacaccaacaccggcaaaacctcgctcctgcgtacccttttgcgcgacagcggtttcggcgaagtcagaaacgccccatcgaccacgcgtcatgtcgaagaagccgccatcagcgacggcgcagacacgctggttttcctgtacgacacgcccggactcgaagacgcgggcggcgtgctggaatggctggaaaaccatacggacaatcgttcagacggcatcgaacggctgcaacagtttctcggcagccacggcgcgcaccatgatttcaatcaggaagccaaagtcttacggcaagtcttgcaaagcgatatggcaatgtacgtcatcgacgcgcgcgaacccgttctcgacaaatatcgggatgaattgattatcctttcatggtgcgccaaaccggttatgcccgtgttcaactttaccggcggacagcctcccgaatcgtggacaaccatgctggcgaggagaaacctgcacgttttcgcagggttcgacaccgtcgcctttgattttgaaggcgaactgcgcctgtgggaaaacctcgccaccatgttgcccgaacgcagcacactcgaccgcctgacagccatgcgccggcgcgaatggcagcggctggacggcgaagcgcgccgcgaaatcgccgatttcctgctcgatgccgccgccttcaggcaggaagtggacgaaaacgaggataccgccaccgtgctgcaaaccatgcaggcggaaatacgccaactcgaacggcagatgcagcagcggctgtttgccctctaccgtttctaccacagcgaaatcgacggcggcgactggatgccgcaagccttccgccaagacccgttcgacagcgaattgctcaaacaatacggcatccgcaccggcacgggcgcggcaaccggcgcgctcatcggcttggggctggacatcgccacactcggcggctcgctcggattgggtacggcaatcggcggctttttgggcggcatcctgcccaatacccgcaccatttccgacaaactctccggccgccaaaccttgcacaccgaccctgaaaccttgaccctgctcgccgcccgcgccctcgatttgctccacgtcctgcaaacgcgcggacacgcggcacagtcggatatcgagctgcacagccgcaaagccccgtgggacgccaccagactcccgcccgaactcaacaaagcccgcagtcattggaaatggtcgtcgctcaatacgcaccgccccgaaaccagccgcgccgaacgcgccggatatgtggagaaacttcaaatccgcctgtcgggaaaatatagtgaattaaatttaaatcaggacaaggcggcgagccgcagacagtacaaatag

SEQ ID NO: 40489 - DNA, 1893 bp, Neisseria meningitidis; identical to SEQ ID NO: 38453

SEQ ID NO: 40490 - DNA, 435 bp, Neisseria meningitidis
gtggcaaagaaaattatcggctatattaaactgcaaattcctgcaggtaaagccaatccatctcccccagttggtcctgctttgggtcaacgtggtctgaatattatggaattttgtaaggcatttaatgctgcaacccaaggtatggaacctggtttgccgattccggttgtgattactgcatttgcagataaatcattcacttttgtgatgaaaaccccgccggcttctattttgttgaaaaaagctgccggtctgcaaaaaggcagttctaatcctctgactaataaggtgggtaaactgacccgtgcccagttggaagaaattgctaaaactaaagatcctgatttgactgctgctgacttggatgcggctgtccgtactatagcaggttctgctcgctcaatgggcttggatgtggagggtgttgtataa

SEQ ID NO: 40491 - DNA, 702 bp, Neisseria meningitidis
atgagcgcgcgtgaaaatattttggcaaaactgaaaaaagccgatgccttgccgatggaagagcctgcggttttcgattattaccgcgaaaagggcgtttcttgggacagcgaagccgagcgtctgaaacattgggctgccgcaatgcgcgcggtcaaaaccgaaatttattgggtgacgaaaagcaattggatgcaggttttccgcgaagcggcagaaggcaagggtttgaaaaacatcctgctgcccttggcgaccgaacacggacaaattgcccgtgccgcattggcgggcagcaatatcgaaccgattgtcttcgagcgcgaaatcgatacttggaaaaccgagtttttcacgaacatcaatgcgggcttcagcggcgcgcaatgcggcatcgcccgcaccggcacgctgatgctgttttccagccccgaagaaccgcgtactttgagtctcgttccgcccgtgcatttctgcctgttcgatacgtccaagatgtacaacgagtttcataatgccgtcgaaggcgaaaaactggtggaaaacggtatgccgaccaatgtattcctgatttccggcccgtccaaaaccgcagacatccaactgacgcttgcttacggcgcgcacggcccgcgcgatttggtcatcctcgccatcctgcccgaccacatttcccctgccgatttggaggaaaacgcatga

SEQ ID NO: 40492 - DNA, 360 bp, Neisseria meningitidis; identical to SEQ ID NO: 38354

SEQ ID NO: 40493 - DNA, 780 bp, Neisseria meningitidis
atgaatcaaaagtatattttatctgcaaacaataatagtttgatagaagaaattcacaatacagtacagagtattgggtattgtattgttcgcggtcttaatctaaaccatcttgatgacagccggagaaacaagaaattatttgactttctatctcaattaggaatgctgacaaaccacaaagacgatggttttaaatctatattttgggatattaaatatcgcggcgatgactatgtaataaataatgatataactttctcggaagatgttggagaatgtccacttcatagtgattcatcttttagtgaaaacccggaaagttatttggttatgtatgtagtaaaatcagccaatgatggaggtaattccctatttttaagttcatcagatattgtcaatcagttatctaaaacagaaaccggtaaaaaacacttaaaaacattaacgggcaatttatatccatttaaaacgccaacatcatttgataaaaaacaaggtgtgatatggggtaatatcttatcgctcaatacacaaatgattagatttagaagtgattgtatctataaaggtattgaagaaaatagaaataaagtatcaaaggaaatggtacttgcacttgattatcttgtaaatgttataaaaaatgcgagtgatattcaagaattttctgcacaagatgatgatttgattattattgacaatgtcaatggtttgcatgccagaactgattatacggataaaaacaggcattatattagagcaagaattactgtataa

SEQ ID NO: 40494 - DNA, 267 bp, Neisseria meningitidis
atggactttgaatttggtttcagaaccctgtggccgattgcgacggcggcattttggttttgggtcaacggcatttcaggccgtctgaaagaagcggacaagcgtatcgacgacctgaaagaggagctgcatgcggtcaagctctcttatcacaccaagcaagatgccaaggcagaccgcgacaatattgcggcttcgttgggacgcatcgaaaacaagttggaaaaagtaaacgaaaaactggacaggaaagcagacaaatcatga

SEQ ID NO: 40495 - DNA, 1083 bp, Neisseria meningitidis
atgccgtctgaagccgcttcagacggcattttgccgcgttaccctacccgcactatttttcagaaaccgatcatgctcccattccttccagaaccctccctttcctatacgcaacaaaaccgtaccgccgttttgctgttgaacctcggcacgcccgacgcgccgaccgcgcaggcggtacgaccttatctgaagtcctttctgaccgaccggcgcgtcgtcgaactgcccaaatggctgtggtatcccattctgcatggtctggtactgacgctccgcccaaaaaaaagcgcgcacgcctatgaaaaaatctggtttaaggaaggttcgcccttagaagtttacacagcacgccaagctgccgcgcttgccaaacgtatgcccgacctcatcgtccgccacgccatgacctacggcaatccttcggttgcagacgtattgtcggaactgaaggcgcaaggcgcgggcagactgctggtcatcccgatgtatccgcaatatgccgcttccagcagcggagcggcagtagataaagtgtgcgaacaattactgctgcaacggaaccaaatgagcgtccgcaccgtttcgcgcttttatgacgataccggctacattgatgcgatgaaaaaccacatcctccgatattgggcggaacacgggcgcgggaaaaaactgatgttgagttttcacggcgtaccgcagaagcaccacgacctcggcgacccctatcccgacgagtgccgccacaccgccaaactgcttgccgaagcactggaactgaccgaagaccaatatgtcgtatcgttccaaagccaattcggcagggcaaaatgggttacaccgagcacgcaggatttgttcggcaaactgcccaaacagggggtaaccgagctggacgtattctgcccgggctttttggcagactgtttggaaaccatggaagaaatcgccctgatggggcgggaacagttttacgaagcaggcggcaaaagctaccgctacatcccctgcctcaacgacaaccccgactggatagacgcactcgtcgcacttgccgaagaaaaccttggcggctggcgttga

SEQ ID NO: 40496 - DNA, 600 bp, Neisseria meningitidis
atgagcgagttggataacatccttgcccataaccggcagtttgtcgagtcgggcgaatatgaaaaatactttaccgacaaataccccgaacgcgggctggcagttttgtcctgtatggatgcgcggattatcgggctgctgcccgacgcgttgggtttgaaaaacggcgatgccaagctgattaaaaatgccggcgcgctggttacgcacccgtggggttcggtgatgcggagtcttttggttgccgtgtttgaattgaaggtcagagagattatggtcatcgcccatcacgattgcggtatgcaggggctgaatgccgaagaatttctcgggcgcgtccgggaaagccggattcccgaagaccgtatcgaaaccctgcgttatgcaggtgtcgacctcgacggctggctgaccggtttcgacaacgtcgaagacagcgtgcgccatactgtcgaactcatccgccgccatccgctgatgccgcgccatattgccgttcacggactggtcatccatcccgttaccggcaaactgacgctggttgtggacggcagtgtttcagacggcatggacttatcggaaggaatggaaacatcatga

SEQ ID NO: 40497 - DNA, 552 bp, Neisseria meningitidis
atgaaagcgtatctggctctgatttctgccgccgttatcggtttggctgcctgctctcaagaacctgccgcgcctgctgccgaggcaactcctgctgctgaagcacccgcttccgaagcgcctgccgccgaagctgctcctgcagatgctgccgaagcccctgctgccggcaactgtgcggcaactgtcgaatccaacgacaatatgcagttcaacaccaaagacatccaagtcagcaaagcatgtaaagagttcaccatcactctgaaacataccggtacgcaacccaaagccagcatgggtcacaatctcgtgattgccaaagctgaagacatggacggcgtatttaaagacggcgtaggtgctgccgataccgactatgtcaaacctgatgatgcacgcgttgttgcccataccaaactgatcggcggcggcgaagaagcttccctgactctggatcctgctaaattggccgacggcgaatataaattcgcttgtaccttcccaggtcacggtgctttgatgaacggcaaagtgactttggtcgattaa

SEQ ID NO: 40498 - DNA, 1233 bp, Neisseria meningitidis
atgcagacttacctcgtcggcggtgccgtccgcgattatcttttgggcttgcccgtcaaagaccgcgattgggtggtcgtcggcgcagacgcacaaaccatgctggcgcaaggcttccagcctgtcggcaaagattttcccgtgtttctccatcccgaaacgcacgaagaatacgccctcgcccgcaccgagcgcaaaaccgccaaaggttacgtcggtttcagtttccacgccgacaaagacgttacgctggagcaggatttgatgcgccgcgacctgaccatcaacgcgatggcgcaagatgcggacggcaagattatcgaccctttcggcggacaacgggatttggcggcaggcattttgcgccacgtttcccccgcctttgccgaagaccccgtccgcatcctgcgtactgcccgctttgccgcgcgctacggatttgaaatcgccgaagaaaccatgaagctgatgcggcagatggtggcaaacggcgaagcggacgcattggttgccgaacgcgtctggcaggagtttgcgaaaggtttgatggaaaaaaatccgcgcaaaatgattgaagtgttgcgcgaatgcggcgcgctcaaagtcttgctgcccgaagtcaatgccctcttcggcgtgccgcaacgcgccgactaccatcccgaaatcgacagcggcatccataccctgatgacgctgcaacgcgccgccaatatgggtttgagcctgcccgaacgctatgccgccctgctgcacgacttgggcaaagccaaaacaccgtccgacatcctgccgcgccaccacggacacgacctcgccggtgtcgaacccgtgcgcgaagtcaatcagcggctgcgtgcgccgaaacattgcgccgagcttgccgaattggtttgccgttggcacattattttccaccaagtcggacagcttaaaagccaaaccattctgaacgtattgaaaaaaaccgatgccttccgccgtcccgaacgctttcagacggcattgaacgtctgcattgccgacacgcaaggccgtctgaaccgcgaacacacgccctacccgcaacgcgcacactggctcgccctgctcgaagccgccaatcaggcggattcgggcaaaatcgccgccgaatgccgcgcacagggaaaagcgcaccttatcgccgaacaaatcgaccgggcgcggctggcacaaatcgccccattgcaaaaagcgtttcgagcggcgtaa

SEQ ID NO: 40499 - DNA, 555 bp, Neisseria meningitidis
atgaaacccaaattcaaaaccgttttaaccgcgctgcttttggcggtttccctgccgtctatggcggcaacccatgttttgatggaaaccgatatgggcaatatccgtttggttttggacgaatccaaagcacccaaaaccgttgccaatttcgtgcgctatgcccgaaaaggcttttacgacaatacgatttttcaccgcgtcatcggcggcttcgttatccaaggcggcggatttaccgaggacttggcacaaaaggcaagcgataaggccgttgccaacgaatccggcaacggcttgaaaaacactgtcggcaccatcgccatggcgcggacggccgatccggattccgccaccagccaattctttatcaatctggcggacaatgattcgctcaactacaaaaacggacaatacggctataccgttttcggcagggtcgaaagcggtatgaacgccgtttccaaaatcgcccgcgtcaaaaccgccacgcgcggcttttatcaaaatgtacccgtacagcccgtcaaaatccgtcgcgttgttgtcgagtaa

SEQ ID NO: 40500 - DNA, 648 bp, Neisseria meningitidis
atgaaagcattacttttaggcgcgccgggcgcgggcaaaggcactcaggcgcaattcatcaccgccgcgttcggcattccgcaaatctctaccggcgacatgctccgcgccgcgattaaggctggcacgcccttgggtttggaagcgaaaaaaatcattgacgaaggcggcttggtgcgcgacgacatcattatcggcatggtcaaagaacgcatcgcgcaagacgactgcaaaaacggtttcctgtttgacggtttcccgcgcacgctggcacaggccgaagcgatggttgaagcaggcgtggatttggatgcagtcgttgaaatcgacgtgcctgacagcgtgattgtcgaccgcatgagcggccgccgcgtgcatttggcttccggccgtacttaccacgttacctacaacccgcccaaagttgaaggcaaagacgacgtaaccggcgaagatttgattcagcgcgacgacgacaaagaagaaaccgtgaaaaaacgccttgccgtttaccacgagcaaaccgaagttttggttgatttttacagcaaactggaaggcgaacacgcgcctaaatacatcaaagttgacggcactcagccggtagaagccgtgaaagccgaagtattgggcgcattgggcaaataa

SEQ ID NO: 40501 - DNA, 1545 bp, Neisseria meningitidis
atgtgcggcgtattaggtttggtcagtcatgaacccgtgaaccagcttctgtacgacggcttgcagatgttgcagcacagggggcaggatgcggcgggcattgcaacggcggaaggcggtaccttccatatgcacaaaggcaaaggcatggtgcgcgaagtgttccgcacacgcaatatgcgcgatttgaccggcaacgccggcatcgcccacgtccgttatcctactgcgggcaacgcaggcagcagcgcggaggcgcagcctttctacgtcagctcgccgttcggcatcgttttggcgcacaacggcaacctcaccaacactgccgaactgtatgaaaacgtgtgtaacaaacacctgcgccacgtcaacaccagctccgattccgaagtcttgctcaacgtattcgcgcacgaattacgccgcgaagtctctaaaaacgccgacccgcaccggctcaatgccgacaatattttcaacgccgttgcccaagtccaccgcctggtgcgcggcgcatacggtgtgattgccatgattgcgggctacggtatgctcgccttccgcgacccttacggcatccgcccgctggtattgggttcgcaaaccgacagcgaaggcagaaaatcctatgccgtcgcctccgaatccgtcgccttcaacgcgcttacctacgatttggaacgcgacatccggccgggcgaagcggtatttgtcggctttgacggcacaatgattgcccgccaatgcagcgaccgtgccaaactcagcccctgcctttttgaatatgtttattttgcccgccccgactctgtgattgacggcgtatccgtttaccaatcgcgcttggatatgggcgtgtcgctggcggaaaaaatcaaacgcgagctgcccgtggacggcatcgatgtcgtgatgcccatccccgacaccagccgccccagcgcgatggagcttgccgtccatctcgacaaaccctaccgcgagggtttgattaaaaaccgctatatcggccgcacctttattatgcccggacaggcgacgcgcaaaaaatccgtgcgccaaaaactcagcccgatggaaaccgaatttgcaggcaaaagcgtgttgctggtggacgactccatcgtgcgcgggacgaccagccgcgaaatcgtcgaaatggtacgcgcggcgggtgcgcgcaaagtctatatcgcctccgccgcccccgaagtgcgctatcccaacgtatacggcatcgatatgcccacgcgcgaagagttgattgccaacgggcgcagcgcggcggaaatcgccgccgaaatcggcgcggacggcatcgtgttccaaaatttgagcgatttggaagccgtcgtcaaagcactcaatccgaaaatcgaatccttcgattcgtcctgtttcaacggcatttatcagaccggcgacatcgatgatgcctacctcgaccgcctgtctgccgagaaatccggctgcggcggcctgaaaatccacccgagcagggtggaacacagcatcagcatcagcgatgcgggcgacgaagaataa

SEQ ID NO: 40502 - DNA, 810 bp, Neisseria meningitidis
atgacaccgctcaaaatcgccatcgccggcgtcaacggccgcatggggcgcgtattggttgaagccgtcaacaaccatcccgacaccgtcctttccggcgcgctcgaacactcgggttcggaagccctcgggctggacgcaggctacgccgtcggactcaaaaccggcatcgccatttcagacgacgttgacgccgttctcgcacaaagcgacgtactcatcgactttacccgccccgagccgaccctcaaacacctgcaaaaatgcgtggaaaaaggtgtctgcatcatcatcggcacaacaggcttcgacgatacgggcaaagccgccatccgcactgccgccgaacaaacaggcatcgttttcgccgccaacttcagcgtcggcgtcaacctcaccttccacatcctcgacaccgtcgcacgcgtattaaacgaaggctacgacatcgaaatcattgaaggccaccaccgccacaaagtcgacgcacctagcggcaccgcgttacgcatgggcgaagtcatcgccggcgcgctcggcagagacctcaaacaatgcgccgtttacggccgcgaaggccacaccggtccgcgcgatccgtcgaccatcggctttgccaccgtccgcgcaggcgacatcgtcggcgaccacaccgccctcttcgccaccgacggcgagcgcgtggaaatcacccacaaagccagcagccgcatgacctttgccgccggcgccgtccgcgccgcagtttgggtaaacggcaaaacgggtttgtacgatatgcaggacgtactcgggctgaacaaccgttaa

SEQ ID NO: 40503 - DNA, 408 bp, Neisseria meningitidis; identical to SEQ ID NO: 36981

SEQ ID NO: 40504 - DNA, 1251 bp, Neisseria meningitidis
atgttttcaaaaagcgttaccctcgcacaatatgaccccgatttggcagcagccattgcccaagaagaccaacgccagcaagaccacgtcgagctgattgcctctgaaaactacgtcagctgcgccgtaatggaagcgcaaggttcccagctgaccaacaaatacgccgaaggctaccccggcaaacgctactacggcggctgcgaatacgtcgatattgtcgaacaattggcaatcgaccgcgtcaaaaaactgttcggcgcgcaatacgccaacgttcaaccgcactccggctcgcaagccaaccaagccgtgtacgcttccgttttaaaaccgggcgacaccattttgggtatgtctttggcgcacggcggccacctgacccacggcgcgagcgttaatatttccggcaaactctacaatgccgttacttatggtttggatgaaaacgaagtgctcgattatgccgaagtggaacgcttggctctcgaacacaaacctaaaatgattgtggccggtgcgtctgcctacgcgttgcaaatcgactgggcaaaattccgcgaaatcgccgataaagtcggcgcatacctctttgtcgacatggcgcactacgccggactgattgccggtggcgaatatcccaaccccgtgccattctgcgacttcgtgaccaccaccacccacaaaaccctacgcggccctcgcggcggcgtgattctgtgccgcgacaatacccacgaaaaagcactgaactcttccatcttcccaagcctgcaaggcggtccgctgatgcacgtcatcgccgccaaagccgtagcgtttaaagaagcgttgcaacccgagtgcaaacaatacgcaaaacaagtgaaaatcaatgctgccgccatggcggaagaactggtcaaacgcggtttgcgcatcgtttccggccgcaccgaaagccacgttttcctcgtcgacctgcaaccgatgaaaattaccggcaaagccgccgaagccgctttgggcaaagcgcacatcaccgtcaacaaaaacgccattccgaacgatccggaaaaacccttcgttacctccggcatccgcatcggctccgctgccatgaccacacgcggttttaacgaagccgacgcacgcgtattggcgaacttggttgccgacgtattgtctaaccccgaagacgaagcgaatctggaaaacgtccgcaaacagattaccgccctctgcgacaaataccccgtttacggcgcgtaa

SEQ ID NO: 40505 - DNA, 2472 bp, Neisseria meningitidis
atgaaaaaaacctgtttccactgcggtctggatgttcccgaacacctccacctgactgtccgttacgaaaatgaagaccgcgaaacctgctgcgccggctgtcaggcggtcgcacaaagcattattgacgcgggcttgggcagttattacaaacaacgcaccgccgacgcgcaaaaaaccgagctgccgccccaagaaatcctcgaccaaatccgcctgtacgacctgcccgaagtccagtccgactttgtggaaacccacggcggcacgcgcgaggcggttttaatgctcggcggcatcacctgcgccgcctgcgtctggctgatcgaacagcagcttttgcgtacagacggcatcgtccgcatcgacctcaattacagcacgcaccgctgccgcgtcgtctgggacgacggcaaaatccgcctttccgacattctgttgaaaatcaggcagataggctacaccgccgcaccctatgacgcgcaaaaaatcgaagccgccaaccaaaaagaacgcaaacaatacatcgtccgcctcgccgttgccgggctggggatgatgcagacgatgatgttcgcgctgccgacctacctttacggcggcgacatcgaacccgatttcctgcaaatcctccattggggcggctttttaatggtgctgcccgtcgtattctattgcgccgtcccgttttatcaaggcgcgctgcgcgacttgaaaaaccgccgcgtcggcatggatacgccgattaccgtcgccatcatcatgacctttatcgccggcgtttacagccttgcgacaaatgcggggcaggggatgtatttcgaatccatcgcgatgctgctgtttttcctgctgggcggacgctttatggaacacattgcccgccgtaaggcaggagatgccgccgagaggctggtgaagctgattcctgcgttttgccatcatatgcccgattaccccgatacgcaggaaacctgcgaggcagctgtcgtcaaattgaaggcgggcgatatcgtgctggtcaaaccgggcgaaaccatccccgttgacggcacggtgctggaaggaagcagtgccgtcaacgaatctatgctgaccggcgagagcctgcccgtcgccaaaatgccgtctgaaaaagtaaccgccggcacactcaacacgcaaagccccctgattatacgcaccgaccgcaccggcggcggcacgcgactgtcgcacatcgtccgcctgctcgaccgcgccttagcgcaaaaaccgcgcactgccgagttggcggaacaatacgcctcgtctttcatattcggcgaactcctgcttgccgtccccgtcttcatcggctggacgctgtacgccgacgcgcacaccgcattgtggattaccgtcgccctgctggtcattacctgcccctgcgccttatcgcttgccacgccgaccgcgctggcagcttctaccggtacgctggcgcgcgaaggtattttaatcggcggaaagcaggcaatcgaaaccctcgcccaaaccaccgacatcatcttcgacaaaaccggcacgctgacccaaggcaaacccgccgtccgccgtatctcattgttgagaggcacagacgaagcctttgttctcgcggtggcgcaggctttagaacaacagtccgaacatccccttgcccgcgccatcctcaactgccgcatttcaggcggcagcgtccccgacattgctattaaacaacgcctcaaccgcatcggcgaaggcgtgggcgcgcaactgaccgtcaacggcgaaacacaggtttgggcattgggcagggcatcctatgtcgccgaaatttcaggtaaagaaccgcaaacagaaggcggcggcagcgcggtttacctcggcagtcaaagcggtttccaagccgtgttctacctgaccgaccccttgaaagacagcgcggcggaggcggtgtggcagttggcaggcaaaaacctgaccctgcacatcctcagcggcgaccgcgaaaccgccgttgccgaaaccgcccgcgccctgggtatcacgcactaccgcgcccaagccatgcccgaggacaaactggaatacgtcaaagccttgcaaaaagaagggaaaaaagtactgatgataggcgacggcatcaacgacgcgcccgttttggcgcaggcagacgtatccgccgccgcagcgggcgggacggatattgcgagggacggcgcggacattgtgttattgaacgaagatttgcgtaccgtcgcccacctgctcgatcaggcgcggcgcacccggcagattatccggcaaaacctgatatgggcgggcgcgtacaatatcattgccgtaccgcttgccgttttgggctatgtccaaccgtggatagccgcactgggtatgagtttcagttcgctggcggttttgggcaatgccttgcgccttcacaaacgggggaaaatgccgtctgaaaaaatgccgtccgaacaatga

SEQ ID NO: 40506 - DNA, 600 bp, Neisseria meningitidis; identical to SEQ ID NO: 37200

SEQ ID NO: 40507 - DNA, 867 bp, Neisseria meningitidis
atggcaggtgaaaccattaccgctgccgactacatcaagcaccacttgcagagcttgaccagtttgtcggatgttactcagggtcagggactgaaaaacattgctgatttttcgtttattaaccttgatgccgtcttttttgccgtcctgttgggcgtaatcggcagcttcctgttgtggcgcggtgcgaaaaaagcaacggcaggcgttcccggacgtttccaggctgccgtggaaatcttgtttgagtttgtggacgatatgtgtaagagcatcattcacaacgaaaagtctagaaaagccgtcgcgccgttgggtctgacgctgtttgtctggatttttctgatgaacgcgatggatatgctgccggtcgatttgctgccgatggtatggcagggcattaccggcaaccatcacgccctgctgcgcgtcgtaccgactgccgatttgaacaccactttggcactcgctgtcggcgtgttgctgatttgtatctattacaacatcaaaatcaaaggattgggtggctggtttcacgagttgttcagcgcgccgttcggtgcaaaactcgcacctgcgaactttctgttgaatttggtcgagtttctttctaaaaccgtatcccacggtatgcggttgttcggcaatatgtatgcgggcgaattggtattcttgctgatagccttgcttggcggtgcttgggcggcttccggcagcgtcgaagtaatggatccgattctgtttgtattccacattattgccggtttggcatgggcgattttccatattttggtgattaccctgcaggcgtttattttcatggcgttggcgttcgtctatatcggacaggcacatgatgcgcactga

SEQ ID NO: 40508 - DNA, 435 bp, Neisseria meningitidis
atgactgagccgaaacacgaaatgctgacgaaagagcaggttgccgcgcgcaaaaaagcaaaagccaaaatccgcaccatccgcatttgggcgtgggtcattttggcgttgctcgctttaaccgccctgctctcccaatgcgcgatgtccaaaccgcaggcaaaacagaaaattgtcgagtcttgcgtgaagaatattccgtttgccgaaaaatggcaaaacgatttgcgggcccgcggtttagattcaaacaatacccgccttaccgtcgactactgcaaatgtatgtgggagcagcctttggacagattgagcgagaaacagattagttccttcggcaaactcggcgcacaagaacagcttgacctgctcggcggcgcaaatgcctttgaaacgcgagacaagcagtgtgttgccgatttgaaatcagaataa

SEQ ID NO: 40509 - DNA, 891 bp, Neisseria meningitidis
atgagcgtattgattaataaagacaccaaagtattggttcaaggtttcaccggtaaaaacggtactttccactccgaacaagctctggcttacggcactaaagttgtcggcggcgttaccccgggcaaaggcggtcaaacccacctgaacctgcctgtattcaacaccatgaaagaagctgttaaagaaaccggcgcggatgcatctgtaatttacgttcccgctccgtttgtgttggattctatcgttgaagccgttgattcaggcgtaggcttggtcgttgtgattaccgaaggcgtaccgactctggacatgctcaaagccaaacgttatttggaaaccaacggcaacggtacccgtttggtcggccctaactgcccaggcgtgattactccgggtgagtgcaaaatcggcattatgccgggccacatccacactccgggccgcatcggcatcatttcccgttctggtacattgacttacgaagccgtggcacaaaccaccaaactgggcttgggtcaatcaacctgtatcggtatcggcggcgacccgattcctggtatgaaccaaatcgacgcactgaaactcttccaagaagacccagataccgacgccatcatcatgatcggtgaaatcggcggtactgcggaagaagaagcagccgaatacatccaatccaacgtaaccaaacctgttgtaggttacattgctggtgttaccgctcctaaaggcaaacgcatgggccatgccggtgcgattatctccggcggtaaaggtactgccgaggaaaaattcgccgcgtttgaaaaagccggtatcgcttacacccgcagccctgccgaattgggcactaccatgctggaagtgttgaaagcaaaaggtttggcataa

SEQ ID NO: 40510 - DNA, 915 bp, Neisseria meningitidis
atgaaacacctcaaactcacccttattgccgcattgctaaccaccgccgcaactgccgcccccctgcccgtcgtaaccagcttcagcattttaggcgacgttgccaagcaaatcggcggagagcgcgtatccatacaaagtttggtcggagccaaccaagatactcatgcctatcacatgaccagtagcgacattaaaaaaatccgcagtgcaaaactcgtcctgctcaacggcttaggacttgaagctgccgatgtacaacgtgccgtcaaacagagcaaagtatcctatgccgaagcgaccaaaggcatccaacccctcaaagccgaagaagaaggcggacaccatcatgaccacgaccatgaccacgaaggacaccaccatgaccacggcgaatttgacccgcacgtctggaacgaccccgtccttatgtccgcctatgcccaaaacgtcgccgaagccctgataaaggccgaccccgaaggcaaagtttattatcaacaacgcttgggcaactaccaaatgcagcttaaaaaactgcacagcgacgcacaagccgcatttaacgccgtccctgccgccaaacgcaaagtcctgaccgggcacgatgccttttcctacatgggcaaacgttaccatattgaattcatcgccccgcaaggtgtgagcagcgaagccgagccttcagccaaacaagtcgccgccatcatccgacaaatcaaacgcgaaggcatcaaagccgtctttaccgaaaacatcaaggacacccgtatggttgaccgtatcgccaaagaaaccggtgtcaacgtcagcggcaaactgtattccgacgcactcggcaacgcgcccgcagacacctacatcggcatgtaccgccacaacatcaaagccttgatcaacgcgatgaagcaataa

SEQ ID NO: 40511 - DNA, 1569 bp, Neisseria meningitidis
atgaaacaccgtactttcttttccctttgcgccaagttcggctgcctgcttgcgctgggtgcttgttcgcccaaaatcgtcgatgccggagccgcgaccgtgccgcacactttatccactttgaaaactgcggacaaccgccccgccagtgtttacttgaaaaaagacaaaccgacgctgattaaattttgggcgagctggtgtcctttgtgtttgtccgaattgggacagaccgaaaaatgggcgcaagatgcaaaattcagctccgccaacctgattaccgtcgcgtctccgggctttttgcacgagaaaaaagacggcgacttccaaaaatggtatgccggtttgaattatcccaagctgcccgtcgtaaccgacaacggcggcacgatcgcccaaagcctgaatatcagcgtttacccttcgtgggcgttaatcggtaaagacggcgacgtgcagcgcatcgtcaaaggcagcatcaacgaagcgcaggcgttggcgttaatccgcgacccgaatgccgatttgggcagcttgaaacattcgttctacaaacccgacactcagaaaaaggattcaaaaatcatgaacacgcgcaccatttacctcgccggcggctgcttctggggcttggaagcctatttccaacgcatcgacggcgtggttgacgcggtatccggctacgccaacggcaacacgaaaaatccgagctatgaagacgtgtcctaccgccatacgggccacgccgaaaccgtcaaagtgacctacgatgccgacaaactcagcctagacgacatcctgcaatatttcttccgcgtcgttgatccgaccagcctcaacaaacagggcaacgacaccggtacgcaataccgcagcggcgtgtactacaccgaccccgccgaaaaagccgtcatcgccgccgccctcaaacgcgagcagcaaaaataccaactgcccctcgttgttgaaaacgagccgctgaaaaacttctacgatgccgaggaataccatcaggactacctgattaaaaaccccaacggctactgccacatcgatatccgcaaagccgacgaaccgctgccgggcaaaaccaagaccgccccgcaaggcaaaggcttcgatgcggcaacgtataaaaaaccgagtgacgccgaactcaaacgcaccctgaccgaagagcaataccaagttacccaaaacagcgcgaccgaatatgccttcagccacgaatacgaccatttgttcaaacccggcatttatgtggacgttgtcagcggcgaacctttgttcagctccgccgacaaatatgattccggctgcggctggccgagcttcacgcgcccgattgatgcaaaatccgttaccgaacacgatgatttcagctacaacatgcgccgcaccgaagtgcgcagccacgccgccgattcgcatttgggacacgtcttccccgacggcccgcgcgacaaaggcggactgcgctactgcatcaacggcgcgagcttgaaattcatcccgctggaacaaatggacgcggcaggctacggcgcgttgaagagtaaagtgaaataa

SEQ ID NO: 40512 - DNA, 981 bp, Neisseria meningitidis
atggcaatggcagaaaacggaaaatatctcgactgggcgcgcgaagtgttgcacaccgaagcggaaggcttgcgcgaaattgcagcggaattggacgaaaacttcgtccttgcggcagacgcgttgttgcactgcaagggcagggttgttatcacgggcatgggcaagtcgggacatatcgggcgcaaaatggcggcaaccatggcctcgaccggcacacctgcgttttttgtccaccctgcggaagcggcacacggcgatttgggcatgattgtggacaacgacgtcgtcgtcgcgatttccaattccggtgaaagcgacgaaatcgccgccatcatccccgcgctcaaacgcaaagacatcacgcttgtctgcatcaccgcccgccccgattcaaccatggcgcgccatgccgacatccacatcacggcgtcggtttccaaagaagcctgcccgctggggcttgccccgaccaccagcaccaccgccgtcatggctttgggcgatgcgttggcggtcgtcctgctgcgcgcacgcgcgttcacgcccgacgatttcgccttgagccatcctgccggcagcctcggcaaacgcctacttttgcgcgttgccgacattatgcacaaaggcggcggcctgcctgccgtccgactcggcacgcccttgaaagaagccatcgtcagcatgagtgaaaaagggctggggatgctggcggtaacggacgggcaaggccgtctgaaaggcgtattcaccgacggcgatttgcgccgcctgtttcaagaatgcgacaattttaccggtctttcgatagacgaagtcatgcatacacaccctaaaaccatcgccgccgaacgcctcgccaccgaagccctgaaagtcatgcaggcaaaccatgtgaacgggcttctggttaccgatgcagatggcgtgctgatcggcgcgctgaatatgcacgacctgctggcggcacggattgtatag

SEQ ID NO: 40513 - DNA, 228 bp, Neisseria meningitidis; identical to SEQ ID NO: 40081

SEQ ID NO: 40514 - DNA, 336 bp, Neisseria meningitidis
atgaaagaattaaatatttctgacctggaaatagtttcaggtggttcggaaccaaagtattttagtcctcttgatgttattggtgtaactagtgcagcgacaggtggatggagagctgtttcagctactgcaactggggatatgatagcaagaagtgctgctcgaggtggattaattggtttggcaggcatagcaggctggaatacaggtacttatttatatcatgaaacgccattaggcgattggttaagttcaggagttgataaattaacaggactagaccaaaattttaatgatgcatctggtaatgattatggcgatggaacagggtattaa

SEQ ID NO: 40515 - DNA, 780 bp, Neisseria meningitidis
atgcttaaaatcatttccgccaacgtcaacggcatccgctccgcctacaaaaaaggtttttacgaatacatcgccgcatcgggcgcggacattgtctgcgtgcaggaactcaaagcgcaggaggctgatttgtctgccgatatgaaaaatccgcatgggatgcacggctattggcattgcgccgagaagcgcggttacagcggcgtggcggtgtacagcaaacgcaaacccgacaatgtgcaaatcggtatgggcattgaagaattcgacagggaagggcggtttgtgcgttgcgatttcgacaggttgagcgttatttcgctttacttgcccagcggcagcagcgcggaagaacgccagcaggtgaaataccgtttccttgatgcgttttaccctatgctcgaagcgatgaaaaacgaaggacgcgacattgtcgtttgcggcgactggaacatcgcccaccaaaacatcgacctgaaaaactggaaaggcaatcagaaaaattcgggcttcctaccggaagaacgcgagtggataggcaaggttatccacaagctcggttggacggatatgtggcgcacgctttatcccgatgtgccgggctacacgtggtggagcaaccgcgggcaggcgtatgcgaaagatgtcgggtggcgcatcgattatcagatggttacgcccgaacttgccgccaaagccgtgtccgcacacgtttataaagatgaaaaattttccgaccatgcgccgctggtcatggagtatgactatgctgccgaataa

SEQ ID NO: 40516 - DNA, 882 bp, Neisseria meningitidis
ttgttaattcactatatcgacatcgccaaacgaaacttcgtcatcgccgtttcgtctttgtctaaaaccaaaaccgaaaccaacaaccccaaaggtatcgcccatactatcgaataccttaaaaaacacaaggtcgccctcgtcgtgacggaaagtaccggcggtctcgaaatccccgccgccaaagccatccgccgagcaggcatagccgtgattatcgccaacccgcgtcagacgcatcagtttgcccaatcgcagccgctgaccaaaaccgacgccaaagatgccaaaatgcccgccttcttcgcacagatgacggcacagaaagaagattcgcaaaccatgccctaccaaccgcccaccgaagcggaagaagtgttggaagccttggttaaccgccgcaaccaatcggcggatatgcggactgccgagaaaaaccgtctgcatcaggttcacgaaacgcaagtcggaagcgtcaaacaactgattgcccattttgaccggctgattgacgaattggacaaacaaatcgacgaccacacccacacgcattttgacggcaaagcccaagtggcagaacaaatcaaaggcatcggttcgataacgacggctacgctgatggcgatgttgcccgaattggggcggctgagccacaaacggatagcgagtctggtcggcattgccccgcacccgagggagagcgaggaaaccaaattcaaagccgctgctttggcggaaggtctgcggtgcgtaaggcactgtatatggctaccgtggcagcgacacgttttgaaccgcttattcgggatttctaccaacgcctgctgtccaagggtaagccgtataaggttgctgttgcggcatgtatgcgcaaactgctga

SEQ ID NO: 40517 - DNA, 921 bp, Neisseria meningitidis
atgcctaatccgctttacagacagcatatcatctccatttcggatttgtcgcgcgaacagttggaatgcctgcttcagacggcattgaagctgaaggcgcatccgcgcggcgatttgttggaaggcaaacttatcggttcgtgtttctttgaaccgtccacgcgcacgaggctgtcgtttgaaacggcggtgcagcggctgggcggcaaggtcatcggcttttcggacggcgcgaataccagtgccaaaaaaggcgagacgcttgccgataccgcccgcatcatttccggctacaccgacgcaatcatccaacgccaccccaaagacggcgcggcgcgcgtggcggcggagttttcgcgcgtccccgtcatcaacgccggcgacggcaccaaccagcaccccagccagaccttgttggatctggtaacgatttatgaaacgcaggggcgtttggacaagctcaaaatcgccatggcgggcgacttgaaatacgggcgcaccgtgcattcgctttgtcaggcgttgaaacgctggggctgcgaatttgcctttgtttcgccgcccagcctcgcgatgcccgactacattaccgaagagttggacgaagccggctgccgataccgtatcctcggtagtttggaagaagcggcggaatgggcggatatcctgtatatgacccgcgtccagcgcgaacgtttcgacgaacaggaatttgccaaaatccaaggcaaattcaatctcgacgcatccatgcttgcccgcgccaaaccgaacctgcgcgtgctgcaccctttgccgcgcgtggacgaaatccatcccgatgtcgatgctacgccgcatgcctattatttcgagcaggcgaccaacggcgtttatgcgcgtatggcgatattgtcgctggtgttgaacgaagaagtgtga

SEQ ID NO: 40518 - DNA, 1311 bp, Neisseria meningitidis
atggacacttcaaaacaaacactgttggacgggatttttaagctgaaggcaaacggtacgacggtgcgtaccgagttgatggcgggtttgacaacttttttgacgatgtgctacatcgttatcgtcaaccccctgattttgggcgagaccggcatggatatgggggcggtattcgtcgctacctgtatcgcgtctgccatcggctgttttgttatgggttttgtcggcaactatccgattgcactcgcaccggggatggggctgaatgcctatttcacctttgccgtcgttaagggtatgggcgtgccttggcaggttgcgttgggtgcggtgttcatctccggtctgattttcatcctgttcagcttttttaaagtcagggaaatgctggtcaacgcactgcctatgggtttgaaaatgtcgattgctgccggtatcggtttgtttttggcactgatttccctgaaaggcgcaggcattatcgttgccaatccggcaaccttggtcggtttgggcgatattcatcagccgtccgcgttgttggcactgttcggttttgctatggtggtcgtattgggacatttccgcgttcaaggcgcaatcatcatcaccattttgacgattaccgtcattgccagcctgatgggtttgaacgagttttacggcatcatcggcgaagtgccgagcattgcgccgacttttatgcagatggattttaaagggttgtttaccgtcagcatggtcagcgtgattttcgtctttttcctggtcgatctgttcgacagtaccggaacactggtcggtgtatcgcatcgtgccggacttctggtggacggtaagctgccgcgtttgaagcgcgcactgttggccgattcaaccgctattgtggcgggtgctgctttgggtacttcttcgacgacaccctatgtggaaagtgcggcgggcgtatcggcaggaggccggacaggcctgacggcggttaccgtcggcgtattgatgcttgcctgcctgatgttttcacctttggcgaaaagtgttcccgcttttgccaccgcgcccgccctgctttatgtcggcacgcagatgctccgcagcgcgagggacatcgattgggacgatatgacggaagccgcacccgcattcctgaccattgtcttcatgccgtttacctattcgattgcagacggcatcgctttcggcttcatcagttatgccgtggttaaacttttatgccgccgcaccaaagacgttccgcctatggtatggattgttgccgtattgtgggcactgaaattctggtatttgggctga

SEQ ID NO: 40519 - DNA, 1032 bp, Neisseria meningitidis
atgtcctatgaaattttccgcgcagggacgcgcaccgatgcaaacggcaatacggtaacgattacgcacgccgaccttgccgccgccgcgcaagcctacgatccgaaggtgcatgaggctcctattgtggttggccacccgaaggcggacgcgccgacttacggctgggtcagcggactgaaagctgagaacggcgtactgacggcggactttgaccaagtcgatgaaggctttgcggatttggttaaagccggacgatataaaaaagtgtcggcgagtttttacccgccgaccagcccgaacaatcccaaaccgggcgtttggacgctgcgccatgtgggctttttgggcgcgcaaccgcccgcagtcaagggtttgtcccccgtcagttttgccgaaggcgaagtttatgtcgagtttgccgaagaaccgcaagaaatcggcttattgcgccgattactgagcatggcgggtttgaaacctgccgaatttaccgaatcacccccacccccggaaaaccatgaaaacaaggagactcctatgtcgctggaacaagaacttgcagcagaaaaggccgcccgcgaagctgccgagaagaaggctgccgaatcgcaggcggaattgaaaaagctgcaagacgagcagcatgccgccctgcgcgatggtgcgcatgagcagaatgccgaatttgccgaaggcttggtcaaggcaggccgtctgaaacctgccgacaaggatttggtcgtcaaggttttggattttgccgaataccctgacgacgtaaccgccgacttcggcgaaggcagtaagaagcagcctttgtctgccgcactgcgtgcattttttaccgccgtgctgcccaagcagattcagggcggtgagatggcgaaaggtgaaacgccgtcgggattggcggcagactttgccgaagcggcggacccggaagccttgagccatcaccaacgtgcatcggcattggcggcgaaggaaggcatcccttacgaagaggctgcccgccgtactattgcttaa

SEQ ID NO: 40520 - DNA, 1134 bp, Neisseria meningitidis
atggatttgagcaaactcaagcgtgaagaagtcaaggcggtttcagacgaccttgccgagattttggcgcagaccattgccgactatgaggcaaaaagcggcaaaaccctgcaacccgcccacatcgagcgtctgattatcaatacctatgcttaccgcgaaatgttgacccgtaaagccttgaacgaagcctaccgccagcagcacccgcgttttgcaacggggttgatgttggatttgtgcggcgatgatgtgaacacgccgcgccttgaggcatcggccgcccgctgcaccgtccgctttacccttgcagcttcccacagcgaacccgtcgtcatcccgcaaagtacgcagattgccgcaggtgcgaccgtgtttcagacggcatcggaaggcacgctctcaccagccggccgaactttggatttagaggctgtctgcacgcagacaggtgtgtctggcaatggttttgccgcaggacaaatcaataccttggtcagtcctattgacggcgtatctgccgccaatatcgaagtatcggcaggcggtgcggacgaagagtcggacgatgcttatcggcaacgcatcctgctcgccccggaaagtttcagcgtggcggggcctgtcggcgcatacgaatactttgcacgacgtgtcaatcctgtcatttgcgacgttcatgtcggcaacctgaaaacggcaggcggcgagccggtcggcggccgggtacgggtaacggtgctgactaaaaacggactgccgtctcccgaactcatcggcgaagtgcagagggctttgtctgacgaacgtgtccgcccgctttgcgacacggtaagcgttgccgctccttctgttatcgattacacgctggatgcggaactcacgctgtttacaggcgcggatgccgccgaagttttggcggcggcaaaacaggcttgggcagattacgaagcatcacgccgcgaaaaactgggcgcagacatcgtgccgctggacattcagacggcattgaaggcggccggcgtatacaacgtcgttttaaagtcgcccgcgctgaccgtcgtccaacccgaccaatgggcaagatgcacttccgtcaatatccgcatatcgcctgaaacggcggagggttag

SEQ ID NO: 40521 - DNA, 291 bp, Neisseria meningitidis
atgaacatccaacttcaaggccacatcgtcggcgttaaaaaattcaacggacaaatcgaaggcaagagcttcgactattgccgcctgattgtcgccacacccttagacagctcccaaggcaacgcattgggcagctctactactgaatacgatttcggcggctctgccaatttcgagcagttccgaaacgcccaatttccgatcgaagcaaacctgaacgtagaaatcgtcactacgggcaaaacccaaaaactgaaagtcatcggttttcaactcgtgaagaaaggctga

SEQ ID NO: 40522 - DNA, 810 bp, Neisseria meningitidis
atgattcaagacacccgaccccttatccgcgtcgttgccggcatcctgctcaaccgagacggcgactacctgctcagttcccgccccgaaggcaaaccctatgccggatattgggaatttgccggcggcaaggtcgaagcgggcgaaaccgacttccaagccctgcggcgcgagtttgaagaagaactcggcatccgcatcctcgccgccacgccttggctgaccaaaatccattcctacgaacacgcccgcgtctgcctgaaattcctatgggtcaaccccggccaatggacgggcgaaccgcaatcccgcgaagggcaggaatggtcttggcagaaggcgggtgattttaccgttgcccccatgctgcccgccaacggcgcgcttttgcgttcgctgtccgttccgcgccgtttgtacggcagcctgaaaacgggtttgcacggggagaacagtatgggcgcgtaccgcgtcctgcctttgggttcggcagagggaagcggtgcgaacgttttgatggaggcggcgcaatggcaggacagacccgaacacgccgacagcgtgtggatggtggtgcagacccgcgaacaatggcggcaggcgcaggaaaagggcgcggatgcggtcgtttggcgcgtgtgcgatgatgttcaggcacaagaggcggcagaagccctgcggcagggcgtatccgtgccgctcgtacttgcagcaaacggacagacggttgcacgttatggaaaactatggctcggattgggggcgcacgtggtggtaagggatgaaacaatagggaagaatcatgaataa

SEQ ID NO: 40523 - DNA, 393 bp, Neisseria meningitidis
atgcccacttccaccaaaccctacatcctccgcgcactttgcgaatggtgcagcgataacagcctcacgccgcacattcttgtctgggtcaacgaacacacgcgtgtccccatgcagtacgtccgcgacaacgaaattatgctcaacatcggcgcgaccgccacgcaaaaccttcaaatcgacaacgattggatcagcttttccgcccgcttcggcggacaggcgcacgacatatggatacctgtcggacacgtcctcagccttttcgcacgggagaccggcgaaggtatggggtttgaattggaagcgtatcgccccgacacgccgcctgaaaacacctctgccgaaaccgcgccccggcccgccaaaaaaggcttgaaattggtcaaataa

SEQ ID NO: 40524 - DNA, 693 bp, Neisseria meningitidis
atgaacgaaatcctcaggcagccgagcatcctgcttttcctcacgcttgccgtgtacgcgcttgcgattatcgtgcgcacgcgcacgggtaatatcttctgcaaccccgtactcgtcagcactatcgtgctgattgcctacctgaaaatcctcggtatcgattatgcggtgtaccacaacgccgcgcaattcattgatttttggctaaaacccgccgtcgtcgtgcttgccgtgccgctctaccaaaaccgccgtaaaatcttcaaccaatggctgcccgtcatcgtttcacagcttgcgggcagcgttacgggcattgttacggggatgtattttgccaaatggctgggcgcggaacgcgaagtcgtcctctcgctcgcgtccaaatctgttaccaaccccatcgccattgaaatcacccgctccatcggcggcattcccgccattaccgccgccaccgtcatcattgccggtctggtcggacagattgccggttacaaaatgctgaagaacacggtcgttatgccctcatctgtcggaatgtcgctcggcacggcttcgcacgcgatgggcattgccgcctcgctcgaacgcagccgccgcatggcggcatacgcggggctggggctgacgttcaacggcgtactgaccgcgctgattgcgccgctgcttatccccgttttgggattttga

SEQ ID NO: 40525 - DNA, 1041 bp, Neisseria meningitidis
atgcaacccatccgataccgaaccgaccttaccccctacaacactttcggcctgcgcgcccaagcccgagcctttattgcgcttgaacacgccgacgggttgcgcgacatcgtccggctacccgagttcaaccgagatactgttttatggctgggcggcggcagcaatatccttttgatggaggactacgccggtctggtcgtacatatggaaaacaaaggcatacgcgaaattgctcgttcagacggcatggttctgattgaagcgcaggcgggcgaaatctggcacgattttgtcctgcacgccgtcgcgctgggtttgaacggtttggaaaacctgagcctgattccgggtacggtcggcgcgtcgcccgtgcagaacatcggcgcatacggcgtagaggcgaaagatgtgattcacagcgtgcgctgctttgatttggatacggaggcctttgtcgagcttgccaatgccgactgccgcttcgcctaccgcgaaagcctgttcaagcaggaaggtaaagggcgttatgtgattgtttcggttgtgtttgcattaaaagagcattttgtgccgaacttgggctacggcgatttggcggcagcggttgccgaacggtgcgccggcagggaaataacggcgaaagaagtttccgatgcagtgtgcgccgtccgccgccgcaaactgcccgacccgggcattttgggcaatgtcggcagtttctttaaaaaccccgtcgtcggcgcgggaaaagccgccgccctgttgcagcagcatcccgatatgccgcattatccacagccggacggttcggtcaaacttgctgccggctggctgatcgaccaatgccgtctgaaaggcttccaaatcggcggcgcggcggtacacgacaaacaggcattggttttggtaaacaaaaacaacgcctcggcaaacgatgtccggcaattggcgcaacacatcaaatttacagtatttgctcagtttcaggtagaattgcacgccgaacctaattggctgcctgcttcgttcagcctgtaa

SEQ ID NO: 40526 - DNA, 1644 bp, Neisseria meningitidis
atgaatgcttttacccgtgcatggtatgcgctcgaacgccattatcaggatacgcgtcatgtccttttgcgcgaccgctttgcctgcgaacccgaccgttttgagcgtatgcatgagcgtttggacgggatgttgttcgattacagcaaaaaccgtttgggcgaagatacgctgcaactgctctgccgtcttgcggagacggcggatttggaagggaaaatgcgtgctttgcggacgggtgcgaaagtcaacggcagcgaggggcgtgccgcgctgcatacggctttgcgcctacccgacggtgcggatgccgtttatgcggacggcagggacgtgttgcccgaaatccgccgcgagttaaatcgtgcgttggagtttgcacacagtttggacgacggttcgtatcaggggacaaccggaaaacggattacggattttgtccacatcggcataggcggatccgacctcgggccggcaatgtgcgtgcaggcacttgagccgttcagacggcatatcgccgtccattttgccgccaacgccgatcctgcctgcctggatgcggttttatgccgtctgaaccccgaaacgacagtgttttgcgttgccagcaagtccttcaaaacgcctgaaaccctgctcaatgcagaggcggtcaaggcttggtatcgtggtgcggggttctcggaatcggaaacgggatgtcatttttgcgcggtatctgccgatacggaagcggcgcaaagtttcggcattgcggcggaacgcgtgtttgcgatgtacgactgggtgggcggacgctattccgtctggtcgcccgtcggtttgcccgtgatggttgcggtcggcggggcgcgtttccgcgagttgttggcgggggcgcacgcgatggacagccattttttccacacgccgccgcgccgcaacattcccgttctgatggcactgattgccgtgtggtataacaatttccaacacgcggacgggcagaccgccgttccgtacagccacaacctgcgcctgctgccggtgtggctgaaccagctcgatatggagagtttgggcaaaagccgcgcttcagacggcagtcccgccgtgtgcaaaacgggcggcatcgtgttcggcggtgaaggggtcaactgccagcacgcctatttccaactgctccaccaaggcacacgcctgattccctgcgactttatcgtcccgatgacggcgcagggcgtggaggacggacgcagccgttttaccgttgccaacgcctttgcccaagcggaagccctgatgaagggcaaaaccttggacgaagcacgcgccgaactggcagatttgcccgaagcggaacgcgaacgcctcgcgccgcacaaagaattccccggcaaccgccccagcaacagcatcctgctcgaacgcctcacgccctacaatctgggtatgctgatggcggcttacgaacacaaaacctttgtgcagggtgtaatttgggacatcaatcccttcgatcagtggggggtggaatacggcaaacagttggcgaaaaccatcatcggcgaactggaaggcggcacgtccgtacgcgatgcctcgaccgaagggctgatggcgttttaccgtgaatgccgtctgaaaggcggcggcgcggcataa

SEQ ID NO: 40527 - DNA, 375 bp, Neisseria meningitidis
atgcagtatctgattgtcaaatacagccatcaaatcttcgttaccatcaccattttggtattcaacatccgtgttttcctactttggaaaaatccagaaaagcccttggtcggcttttggaaggcactgccccaccttaacgacaccatgctgctgtttacgggattgtggctgatgaaaattacccatttctccccgttcaacgcgccttggctcggtacaaaaatcctgcttctgctcgcctatatcgcattgggtatgatgatgatgcgcgcccgtccgcgttcgaccaagttctacaccgtttacctgctcgccatgtgttgcgtcgcctgcatcgtttaccttgccaaaaccaaagtcctgcctttctga

SEQ ID NO: 40528 - DNA, 711 bp, Neisseria meningitidis
atgaatgcagccatcgaacacgtccaagccgtcgccttcgatttggacggcacactgtgcgattccgtccccgaccttgccgccgccgcagaagcgatgttggaacaactcggtatgaaaccgctgcccgccaaagtggtcgaaagctatgtgggcgacggcatcggcaaactggttcaccgcgtcctcaccaacgaccgcgaccgcgaagccgattccgaactgtgggaaaaaggtttcgtatcctatatgaaatactaccgcgaccatttgagcgtcttcacccgcccctatcccgaaaccgaagccgggctggcattgctcaaatctttgggcatcccgctggcagtcattaccaacaaaaacgaaatccttgccgtcgaactgttgaaacagctcggacttgccgactacttcagcctgatactcggcggcgacagcctgcccgagaaaaaacccagccccctgccgctgcggcatgccgccgaagttttgggtatcgatgttgcaaacatggttatggtcggcgactcgcgcaacgacatcatcgccgccaaagccgtcggctgcctgagcgtcggcgttaccttcggttacggcgatatgacgctgctctcgcaagacgatgcgacccgccccgactggattatcggctcgctgcccgaaatttacgaaaacctgcaaccgcagaaaaataaagacgaagaataa

SEQ ID NO: 40529 - DNA, 1389 bp, Neisseria meningitidis
atgaacactcgcaccgaacacgacaccatgggcaatgtcgaagtcccgtccgaagcctattggggcgcgcagacccagcgcagccgcaacaatttcaaaatcggcggcgaaaccctgccgcagccgctgatttatgctttggcgttggtgaaaaaagccgctgccgcgaccaatgtttccctcggcaggattaagccggaacaggcggatttgattacgcaggcggcggatgatgtgttgaacggcaagctcgacggacagtttcctttagtggtttggcagaccggctccggcacgcagtccaatatgaacatgaacgaagtgctggcaaaccgcgccaacgaaatcgccggtacgggtttggcggcttatcagcccgtccatcccaacgaccatgtgaaccacgcgcaatcgaccaacgacgcattcccgaccgctatccacgttgccgccgcgattgaaatcaaccgccacctcatccccgccgtaaaagccctgcgcgataccttggacaaaaaagcccaagctttcgcccctatcgtcaaaatcggccgcacccacttgcaagacgcgacgccgctgactttgggacaggaattttccggctacgtttcccagcttgatcacggtttaggccgtctgaacgatgcgcttaaagacttgtatgaacttgctttgggcggtacggcggtcggcacgggtttgaacagccatcccgaatacgccgaaaaagccgccgccaaactcgccgaactgtccggcttgccgtttgtcagcgcgccgaacaaatttgaagccttaggcggacgcgatgccgccgttgccgcttcgggcgcattgaaaacactggcggcaagcctgaacaaaatcgccaacgacatccgctggctggcaagcggcccgcgttgcggtttgggcgaaatcaaaatccccgaaaacgagccgggttcgtccatcatgccgggcaaagtcaacccgacccaatgcgaagcaatgacgatggtgtgctgccaagtgttcggcaacgacgttaccatcggtatggcgggcgcgtcgggcaatttcgagctgaacgtctatatgcccgttatcgcctacaacctcttgcaatccatccgcctcttgggcgacgcgtgcaacagcttcaacgaacactgcgccgtcggcatcgaacccgtaccggaaaaaatcgactatttcctgcaccattccctgatgctcgttaccgcgttaaaccgcaaaatcggttacgaaaacgccgccaaagtcgccaaaaccgcctacaaaaacaacaaatcgttgcgcgaaaccgccgttgagttgggcttgctgacgggcgaagaatttgacgaactggtcgttcctgccgatatggttcatccgcgctaa

SEQ ID NO: 40530 - DNA, 1329 bp, Neisseria meningitidis
atgaaaaaagtatttatccgcaccttcggctgccagatgaacgaatacgacagcgacaaaatgctcgccgtcctcgccgaagaacacggcggcatcgaacaggttacccaagccgacgaagccgacatcatcttgttcaacacctgctccgtgcgcgaaaaagcacaggaaaaagtgttctccgatttggggcgcgtgcgtccgctcaaagaaaaaaaccccggcctcatcatcggcgttgccggctgcgtcgcctcgcaagaaggcgaaaacatcatcaaacgcgcgccttatgtggacgtggttttcggcccgcaaacactgcaccgcctgcccaaaatgattgtggacaaagaaaccagcgggctgtcgcaagtcgatatttccttccccgaaatcgaaaaattcgaccaccttccgcccgcccgcgtcgaaggcggcgcggcattcgtgtcgattatggaaggctgttccaaatactgctccttctgcgtcgtcccctacacgcgcggcgaagaattctcccgcccgctcaacgacgtattgacagaaatcgccaaccttgcccagcaaggcgtgaaagaaatcaacctcttaggccaaaacgtcaatgcctatcgcggcgaaatggacgacggcgaaatctgcgacttcgccaccctgctgcgcatcgtccacgaaatccccggcatcgaacgtatgcgcttcaccaccagccacccgcgcgagtttaccgactcgattatcgagtgctaccgcgacctgcccaaattggtttcccacctgcacctgccgattcaaagcggttccgaccgcgtattgagcgcgatgaaacgcggctacaccgctttggaatacaaatccatcatccgcaaactgcgtgccatccgtcctgatttatgcctgagcagcgatttcatcgtcggcttccccggcgagaccgaacgcgagttcgagcaaaccttgaaactggtgaaagacatcgccttcgacttgagcttcgtgtttatttacagtccgcgccccggcacgcctgccgccaacctgccggacgacacgccgcacgaagaaaaagtgcgccgcctcgaagccttgaacgaagtcatcgaagccgaaaccgcgcgcatcaaccaaaccatgatcggcacggttcaacgctgcctggtcgaaggcatctccaaaaaagaccccgaccagctccaagcccgcaccgccaacaaccgcgtcgtcaactttaccggcacgcccgacatgattaaccaaatgatcgatttggaaatcaccgaggcctacaccttctccctgcgcggcaaagttgtcgaagcctaa

SEQ ID NO: 40531 - DNA, 1044 bp, Neisseria meningitidis
atgagtaaaaaaatcaaagtcggcattgtcggcgcgacgggctacacgggcgtggaactgctgcgcctgcttgctgcccatcccgatgtcgaagtcgccgccgtaaccagccgcagcgaagcgggaaccgcagttgccgattactttccgagtttgcgcggcgtgtacggcctcgccttccaaacgcccgacgaggcaggtttggaacaatgcgacatcgtcttcttcgccacgcccaacggcatcgccatgaaagacgcgccgcgcctgattgaacagggcgtgcgcgtcatcgacctttccgccgacttccgcatacgggacattccgacctgggaacactggtacggcatgacccacgccgcccccgacctcgtttcccaagccgtgtacggattgagcgaactcaaccgcgaagccgtcgcacaggcacgcctcgtcgccaaccccggctgctacccgacctgcgtatccctgccgctcgtgccgctgttgcggcaatgccgtctgaagcccggtatgccgctgattgccgactgcaaatccggcgtgtccggcgcgggcaggaaaggcaatgtcggttcgctgttgtgcgaagctggcgacaacttcaaagcctacggcatagccggacaccgccacctgcccgaaatcaggcagaccatcgccgggcttcaggacggcatcgccgaaggattcgtgttcacgccgcacctcgcgccgatgatacgcggtatgcacgccaccgtttacctccacctttcaaacggcatctgccccgaaaccgtcctgcgcgactattaccgcgacagcctgttcgtggacatcctgcccgccggttcgacaccagaaacccgcagcgtgcgcggcgcaaacctctgccgcatcagcatccaacaggcggcgcaatccgatgtgtgggtcgtcctttccgtcatcgacaacctcgtcaaaggcgcggcgggtcaggcagtccaaaatatgaacatcatgttcggactgaaggaaacacacggcttagacgcaatccccctgctcccctga

SEQ ID NO: 40532 - DNA, 978 bp, Neisseria meningitidis
atgaattattttaatatgcgccggttcaatatgccgtctgaagcccccatggattccattatcgaattgcgccacctcaaaaccctgctggcacttgaagaaaccggcagcgtctcccttgccgccaaacgggttttccttacccaatccgccctttcccaccagatccgtatgctcgaaaaccactacggcacgccgctgttcgaacgcaaatccacgcccttgcgctttaccccggtgggcgaaaggctgctgcgcctcgcccacgaactgatacctcaagttgctgttgcagaacgagatttggcgcgaatcacggaaggggaggcgggagagctgcggattgccgtcgaatgccatacctgtttcgactggctgatgcccgccatgggcgaattccgcccgatgtggccccaagtcgaactggatatcgtatcgggattccaagcggatcccgtcgggctgctgctgcaacaccgcgccgaccttgccattgtttccgaagcggaaaaacaaaacggtatttctttccaaccgctgtttgcctacgaaatggtcggcatttgcgcaccagaccatccgcttgccgccaaaaacgtttggacggcggaagactttatcggggaaaccctgattacttatcccgttcccgacgagatgctggatttgcccaaaaaaatcctgattccgaaaaacatcaacccgccgcgccgacacagcgaactgaccatcgccattatccaactggttgccagcagacgtggcattgccgcctttccctattggacagtcatgccctaccttgaaaaaggctatgtcgttcaccgccaaattactgccgacggattgcaaagcaaactgtatgccgccatccgtaccgaagatacggacaagagctatctgaacaatttttgccaaatcatacgcgaacgcggttttgcagatttgcccggactgagcgaattggaaccggtctga

SEQ ID NO: 40533 - DNA, 402 bp, Neisseria meningitidis
atgcagcaacatattgaaaaatggcaacacttgagccgggaagaacagaaaatccttgctgaagtatggggtctcgtgcaaaacgacgatcaggaggttcactatgaaatgctcaaattgaacgcacccgacgaagccagtggcgaattttggttcagaatggcagaaacactcagcaccctgccgcccaaccgttccctcgaccttagaatgaacggcggcaggctggcgaccgccgtatccatcctttccgtcatgattgaagacaatcccgacataccgcagctttgggcgcaaaaaattaccgcgctcaattatagtggattaaatttaaaccagtacggcgttgcctcgccttgtcgtactatctgtactgtctgcggcttcgtcgccttgtcctga

SEQ ID NO: 40534 - DNA, 231 bp, Neisseria meningitidis; identical to SEQ ID NO: 38834

SEQ ID NO: 40535 - DNA, 693 bp, Neisseria meningitidis
atgctcggtacaaccgcattggcttttatcatgccattgtctaaggttgttgccttggtggcattaccaagcctgttaatgagcttgttggttctatgcagcaataacaaaaaaggtttttggcaagagattgtttattatttaaaaacctataaattgcttgctatcggcagcgtcgttggcagcattttgggggtgaagttgcttttgatacttccagtgtcgtggctgcttttactgatggcaatcattacattgtattattctgttaatggtattttaaatgtatgtgcaaaagcaaaaaatattcaagtagttgccaataataagaatatgattctttttgggtttttggcaggcatcatcggcggttcaaccaatgccatgtctcccatattgttaatatttttgcttagcgaaacagagaataaaaatcgtatcgcaaaatcaagcaatctatgctatcttttggcgaaaattgttcaaatatatatgctaagagaccagtattggttattaaataagagtgaatacggtttaatatttttactgtccgtattgtctgttattggattgtatgttggaattcggttaaggactaagattagcccaaatttttttaaaatgttaatttttattgttttattggtattggctctgaaaatcgggcattcgggtttaatcaaactttaa

SEQ ID NO: 40536 - DNA, 780 bp, Neisseria meningitidis
atgaagaaaacattgacactgctcgccgtttccgccctatttgccacatccgcccacgcccactgcgtctgggtcgaaaccgcccacacgcacggcggcgaataccttaaagccgacttgggctacggcgaatttcccgaactcgaacccatcgccaaagaccgcctgcacatcttcagcaaaccgatgcagctggttaccgaaaaaggcaaggaaaacatgattcaacgcggcacatacaactaccagtaccgaagcaaccgtcccgttaaggacggcagttacctcgtcatcgccgaatatcagcctactttctggtcaaaaaacaaagcaggctggaaacaggcgggcatcaaagaaatgcctgacgcaagctattgcgaacaaacccgaatgttcggcaaaaacatcgtcaacgtcggacacgaaagcgcggacaccgccatcatcaccaaaccggtcggacaaaacttggaaatcgtcccgctggacaatcccgccaacattcacgtaggcgaacgcttcaaagtccgcgttctgttccgtggcgaaccgctgcccaatgccaccgttaccgccacctttgacggcttcgacaccagcgaccgcagcaaaacgcacaaaaccgaagcacaggctttctccgacagcacagacgacaaaggcgaagtggacatcatccccttgcgccaaggcttctggaaagccagtgtcgaacacaaagccgacttccccgatcaaagcgtgtgccaaaaacaggcgaactactcgactttatag

SEQ ID NO: 40537 - DNA, 258 bp, Neisseria meningitidis
atgacgaaaaggagttttgcgagaactgccttttcattgatcgccgtcgagtttgatattcagcttgacggcgatttctctgccctgaccgtacaaacatttggatttgccgttcagaacacgggaaacatcaacggaattaaaaccgttttcacgcgcccattgggcagcggttttgttttggtctttcagccattgcttggcttcatctcgagtacgcttttccataaaaaacctttaaaaacaatgaagacatga

SEQ ID NO: 40538 - DNA, 483 bp, Neisseria meningitidis
atggctatcgtgaaaaattccgtggtttcgctgcattatgagatgtatgatgccaacaatcagcttttggacaaaaccgaagaaccgattgcgtatctgcacggcggttacgacggcattttccctttggtggaagaggcgttgcacggtaaggatgccggcgatacggtcgatgtggcgctttcgcccgacgatgcgttcggcgagcaggatccggagttggtccgtatcgaagatgcgggcgtgttccctgttgaagtcgaagtcggcatgatgtttgaagccgacgatcctgaaaccggcgatgttgtcgtctatcgtgtaaccgatgttgccgacggtaaggcggtggtggacggcaaccatcctttggcaggcatgaaaatccgctttaaggctacggttgaaagcgtgcgcgatgcatccgatgaggaaatcgcacacggtcatgtccacggcccgcacggtcatcaccaccactga

SEQ ID NO: 40539 - DNA, 840 bp, Neisseria meningitidis
atgcggaaaaaaacacccaaattggctataatcccgacaaacacactcaaggacaacaacatggcagcctcgcccgaagcaaaattcactgaagaaaagattttgtgggtcaaacaccacacgccgaaactcatcactttcgccatcagccgtcccgaatcctaccgttttaaagccggacagttctcccgactcggtttctacgaaggggaaggctttatttggcgtgcctactccatcgtttccgcagaatatgcagacacgctcgaatattttgccgtactcatccaagacggccccatgtcggcccgtttcgccaaaatgcaacagggcgacaccatcctgctcgataaaaatgccaccggcttcctcctgcccgaacgcttccccgacggcaaggatttggtgatgctctgcaccggctccggcatcgcccccttcctttccattctcgaacaacctgaaatccgacagcgtttcgataccgtcaacctgatacattccgtatcttttcccgaagaattgattttcaacgaccggctcgccgcattgtccgaacatcccctggtaggcgaatacggacactcgttccatttcgtccctgttaccacccgtgccgccaacccctcgggcttaagcggaaaacgcattccggaactcttaaaaaacagcagcatcgaacaggcgctgcataccaagttcaccccggaatccacacggtttatgatttgcggcaacccggaaatggtcaaagatactttccaaacgctgcttgacatgggttacgccatgcaccgcaaccgcattcccggtcaaatcatgatggaaaacggcttctaa

SEQ ID NO: 40540 - DNA, 531 bp, Neisseria meningitidis; identical to SEQ ID NO: 39309

SEQ ID NO: 40541 - DNA, 771 bp, Neisseria meningitidis
atgaaaatcaccacttggaacgtcaattcgctcaatgtgcggctgccgcaggtgcaaaacctgcttgccgacaatccgcccgatattttggttttgcaggaactcaaactcgatcaggacaaatttccggccgccgctttgcaaatgatgggctggcactgtgtttggagcgggcagaaaacctacaacggcgtggcaatcgtcagccgcaacgcgccggaagacgtgcatatcgggctgcccgcgctgccggacgatccgcaacggcgcgtgattgcggcaaccgtcggcggcgtgcgcgtcatcaatgtctattgcgtcaacggcgaagccctcgacagcccgaaattcaaatataaagaacaatggtttgccgcgttaaccgaatttgtccgcgatgaaatggcacgccacggcaaactggtgctgttgggcgatttcaatatcgcgcctgccgatgcggactgttacgaccctgaaaaatggtatgaaaaaatccactgttcgaccgtcgaacggcagtggtttcaaaacctgctggatttgggattgaccgacagtttgcgccatatccatcccgaaggtgcgttttacacatggttcgactatcgcggcgcgatgttccagcgcaaactgggcctgcgtatcgaccatattttggtgtcgcctgcgatggcggcggcgttgaaggatgtccgcgtcgatttggagacgcgcgcgctggagcgtccgagtgaccacgcgccggtgacggcagaattcgattggtaa

SEQ ID NO: 40542 - DNA, 1869 bp, Neisseria meningitidis
atgcaagctgtccgatacaggcctgaaattgacggattgcgggccgttgccgtgctatccgtcattattttccacctgaataaccgctggctgcccggagggtttttgggggtggacattttctttgtcatctcgggattcctcattaccggcatcattctttctgaaatacagaacggttctttttctttccggggtttttatacccgcaggattaagcggatttaccctgcctttattgcggccgtgtcgctggcttcggtgattgcctctcaaatcttcctttatgaagatttcaaccaaatgcggaaaaccgtggagctttctgcggttttcttgtccaatatttatttggggtttcagcaggggtatttcgatttgagtgccgacgagaaccccgtactgcatatctggtctttggcggtagaggaacagtattacctcctgtatcctcttttgctgatattttgctgcaaaaaaaccaaatcgctacgggtgttgtgccacatcagtatcatcctgttcctgattctgactgcctcatcgtttttgccggccgcgttttataccgacatcctcaaccaacccaatacttattacctttcgacactgaggtttcccgagctgttggcaggttcgctgctggcggtttacgggcaaacgcaaaacggcagacggcaaacagcaaatggaaaacggcagttgctttcatcactctgcttcggcgcattgcttgcctgcctgttcgtgattgacaaacacaatccgtttatcccgggaatgaccctgctccttccctgcctgctgacggcactgcttatccggagtatgcaatacgggacacttccgacccgcatcctgtcggcaagccccatcgtatttgtcggcaaaatctcttattccctatacctgtaccattggatttttattgctttcgcccattacattacaggcgacaaacagctcggactgcctgccgtatcggcggttgccgcgttgacggccggattttccctgttgagttattatttgattgaacagccgcttagaaaacggaagatgaccttcaaaaaggcatttttctgcctctatctcgccccgtccctgatacttgtcggttacaacctgtacgcaagggggatattgaaacaggaacacctccgcccgttgcccggcgcgccccttgctgcggaaaatcattttccggaaaccgtcctgaccctcggcgactcgcacgccggacacctgagggggtttctggattatgtcggcagccgggaagggtggaaagccaaaatcctgtccctcgattcggagtgtttggtttgggtagatgagaagctggcagacaacccgttatgtcgaaaataccgggatgaagttgaaaaagccgaagccgttttcattgcccaattctatgatttgaggatgggcggccagcccgtgccgagatttgaagcgcaatccttcctaatacccgggttcccagcccgattcagggaaaccgtcaaaaggatagccgccgtcaaacccgtctatgtttttgcaaacaacacatcaatcagccgttcgcccctgagggaggaaaaattgaaaagatttgccgcaaaccaatatctccgccccattcaggctatgggcgacatcggcaagagcaatcaggcggtctttgatttgattaaagatattcccaatgtgcattgggtggacgcacaaaaatacctgcccaaaaacacggtcgaaatatacggccgctatctttacggcgaccaagaccacctgacctatttcggttcttattatatggggcgggaatttcacaaacacgaacgcctgcttaaatcttctcgcgacggcgcattgcagtag

SEQ ID NO: 40543 - DNA, 1350 bp, Neisseria meningitidis
atgttgaatccatcccgaaaactggttgagctggtccgtattttggacgaaggcggttttattttcagcggcgatcccgtacaggcgacggaggctttgcgccgcgtggacggcagtacggaggaaaaaatcatccgtcgggcggagatgatcgacaggaaccgtatgctgcgggagacgttggaacgtgtgcgtgcggggtcgttctggttgtgggtggcggcggcgacgtttgcgttttttaccggtttttcaggaacttatcttctaatggacaatcagggtctgaatttctttttggttttggcgggcgtgttgggcatgaatacgctgatgctggcagtatggttggcaatgttgttcctgcgcgtgaaagtggggcgttttttcagcagtccggcgacgtggtttcggggcaaagaccctgtaaatcaggcggtgttgcggctgtatgcggacgagtggcggcaaccttcggtacgttggaaaataggcgcaacgtcgcacagcctgtggctctgcacgctgctcggaatgctggtgtcggtattgctgctgcttttggtgcggcaatatacgttcaactgggaaagcacgctgttgggcgattcgtcttcggtacggctggtggaaatgttggcatggctgcctgcgaaactgggttttcccgtgcctgatgcgcgggcggtcatcgaaggtcgtctgaacggcaatattgccgatgcgcgggcttggtcggggctgctggtcggcagtatcgcctgctacggcatcctgccgcgcttcttggcttgggcggtatgcaaaatccttttgaaaacaagcaaaaacggcttggatttggaaaaaccctattatcaggcggtcatccgccgttggcagaacaaaatcaccgatgcggatacgcgtcgggaaaccgtgtccgccgtttcgccgaaaatcgtcttgaacgatgcgccgaaatgggcggtcatgctggagaccgaatggcaggacggcgaatggttcgagggcaggctggcgcaggaatggctggataagggcgttgccaccaatcgggaacaggttgccgcgctggagacagagctgaagcagaaaccggcgcaactgcttatcggcgtgcgcgcccaaactgtgcccgaccgcggcgtgttgcggcagatcgtccgactttcggaagcggcgcagggcggcgcggtggtgcagcttttggcggaacaggggctttcagacgacctttcggaaaagctggaacattggcgtaacgcgctggccgaatgcggcgcggcgtggctggaacccgacagagcggcgcaggaaggccgtctgaaaaccaacgaccgcacttga

SEQ ID NO: 40544 - DNA, 1713 bp, Neisseria meningitidis
atgaaagccagccaattctttatctctactttaaaagaagcccctgccgaagccgcgcttgccagccacaagctgatgattcgcgccggtctgattaaagccaacgcgtccggcctttatacttggatgccgatggggctgcgcgtgttacgcaaagtcgaaaacgtcgtgcgcgaggaaatggcgcgtgcgggcagcgtggagttgctgatgccggtggtgcagcctgccgagctgtggcaggaatccggccgctgggagttttacggtaaagagttgctgcgcctgaaagaccgccacgaccgcgatttctgcatgggtccgacctgtgaagaagtcatcgccgacatcgtgcgcaaagaaatcaacagctacaaacagctgccgaaaaacttttaccacatccaaaccaaattccgcgacgaagtgcgcccgcgtttcggcgtgatgcgcgcgcgcgagttcgtcatgaaagacgcttattccttccatgccgactacgcctcgcttcagacgacctatgatgccatgtatgacgcttactgccgcatcttcacccgtctgggcttggcattccgccccgtcgccgcagacaccggcagcatcggcggtacgggttcgcacgagtttcaagtgttggcggaaagcggcgaagatgtgattgcgtacagcgacacttccgattacgccgccaatatcgagttggcaccgaccttgccgcttaaaggcgaacgcaccgctgctcaggccgagttgaccaaagtacatacaccaaacgtcaaaaccattgagtctttggttgaattcctgaatattccggttgaacaaaccctcaaatccatcgtggttgaaggcgaaaacgaaggcgaaatcgttttattgctgttgcgcggcgaccatgagttcaacgacatcaaagccgaaaaactcgcaggtgtgaaatcgccattgacgatggcaagccctgccgcgattgtcgaacagttcggcgcaaacggcggctcgctgggtccggtcggctttgcaggtaaagtttatgccgatttcgccactgaaaaaggcgcggactgggtcatcggtgcgaacgaagacggctaccactataccggcttcaacttcgggcgcgatgccgccgagcctgaattcgtcgatttgcgtaatgtggtcgaaggcgacgaaagccccgacgggcaaggccgtctgaaactcgcgcgcggcattgaagtcggacacgtcttccagttgcgcgacaaatacacccaagccatgaacgtaagcttccttgacaacaacggcaaatcgcaaattatggaaatgggctgctacggcatcggcatcacccgcgtcgttgccgccgccatcgagcagaataacgacgaaaaaggcatcatctggaccaaagcaatggcgccgtttgaagtcgttatcgtgccgatgaactacaaaaaatcagacaccgtacgcgaagccgccgacaaaatctatgccgaattgctggcggcaggcgcggatgtgctgctggatgaccgcgacgaacgcgcaggcgtattgctgaacgattccgagctgttgggtattccgcaccgcatcgtcatcggcgaccgcgctttgaaagaaggcaatgtcgaatacgccgaacgccgcaacaacgaagcgcaggcagttgcaatcggagaaattgttgcgcgtgtaacagctttattaaatgggtaa

SEQ ID NO: 40545 - DNA, 2427 bp, Neisseria meningitidis
atgtcggcacaaaccgatccgggctactttttcatgcccaaccacattattctgataggcgcgagcgaacgtccgtacagcctgggcgaacgcgtactcagcaacctgctgagtacgccctttcaaggaaaaatcacccccgtaaacccgcgccaccacaccatagccgggcttcccgcctacaccagcctcaacaaaatccccggcaatgcagacctgattattgccgttaccctacccgacagttacgacaccctcttcaaaacctgccgcaaaaagcagctccgacacatcatcctcatacaggactgggacagcctgtctgccgcagaactgcacaccgccgaaactgccatccgcaaacaccacggcaacggactcaacatcaccgcctgcaccaccgcaggcatccaactgccctcactcggacttaacatcagtacccaagacggatacgccgcaggccataccgccatactgaccggcaatgccgccgtcagccgccaaatcgacaacatcctgaacaaactccgtcaaggcacatcccgccacatcagcctgcatcccggcatcagccccatcacatccgccgattggctcaaccgcttcggacacagcctgcacaccaaaaccgccgtcctacaccacaaccctgaagaagaccagcgcaaactgttcagcgcaatccgccaatttacccgccatacgccgctgattctccacatcacctgccgcacgacagaaaccgaccgtgccgtactgcactgcctcgcccgacactgcaacttcctcatcagtttcaacgccgacgacctcgaagccgcactgcgcgcccaactgtccgaccttccacccctgtcccgactcgacatcctgtccgacacgcctgccgaatggctgaacgcgcacgcgccaaaaaccctcgccctccactttcccaaccttccccaccacatccgcaacggacacctgaccggcacacccacaccctcaatctgccacgacatcgcctcacgtcagcttgcccgccccgacacccaagccgtcctgaccatcctcagtccctccggacacgaggattacaaaaaaacagcacgcgcccttatccgcctgtccgaacagaccgccaaacccctgctcgtcagcagccccttttcagacggcataacccatttcgacacccccactcaggcaatccgcaccctttcctaccgcaacaccgccgccgccctgaaacaggcacagctcgacattgcaccgccgcagccatgccgtctgaaaacaccgcaaccccaaaacatcaaaaaagcccttgcagcggcaaatccctccctgctcgccgaagccctgcacctccccccctaccggcacactacccataacgccgtccaattccaattcggcagccaccccatttacggcaatattctgaccgtacggtacgcagggcaaaccacggccgcccttcccccgtttaccacacaggacagcctccatatcgcccagtttgccgaattggaagacccgcaaacccttaaccagttccttcacatactgaccaccctttccgaccacaacctgcacatcggcaaaatcaccctcaacctaaacggcggacaatacagcagcgatttcatcttaaagacacccgaaacacacgacacgcccaaacgcaagaacacaggcaaagccgcccaaaccctcgaacatgccgccgcaaaaatgcagagtgccgccgcatacctgaaacacaaaaacccgacagccgccgaatttctccgccacacaagcgaagccgccgcagaactgctcggcagcaaaaccgaaaccggagcagccgtacccaacgtacttgccccctatcccgcagcacaccccaaaacactgtccctaaaaaacaacacgaccgttaccattaccccccttttgcccgaagacgcagaagccaaacagcagttcgtccgcagcctcggtcccgaagcacggtacacacgcttcatgacccacaccaacgaactgcccgcagccacgttggcacgcctgtgcaaccccgattaccactgtgaagccgcatggacggcaaaggatgccgacagcaacatcgtcgccgtcgtccgccacagccgcctgaaccgcaacgaatgcgaattcggcatcacactggcggaacatatgcgcggcagcggactggcacagaaaatgatggaactcatcatccaaaccgccgcacagcaaggctaccggactatgagtgccgacattctcaaaaccaatacccccatgatcaaacttgctgaaaaatcaggatttaccctcaaggaatcggacaccgaaaaaaacctgtaccgcgcatatctgaaccttgcggcagacaaaacaacagaaaaaacaaataaaaacttgcgcaccgaccacaaaataacctaa

SEQ ID NO: 40546 - DNA, 492 bp, Neisseria meningitidis
atgaaataccgtcgtttttaccgcaatggcggcacttacttttttacggttgtaaccaataaacggcagaagattttgaccgatgatgcggtgcgtttggctttacggcaggcggtaatggcggtgcgcgaacggtatccgtttgaaattttggcatgggtgttgatgcccgaccatctgcataccatatggcggctgccggacaatgattctgcttattcggaacgctggcggcaaatcaagcggcacagccaatatttaatcggcggcaatctcaggctttggcaaaaacgcttttgggaatatactatccgcgatgaggccgattttgcctgccattttgattatctgcatttcaatccggtcaaacatggctatgtaggacaaatttccgattgggggttttctacgtttcaccgttatgtcaaacagggtatttatccgcataattggggtggcggcaatgcggacttttctattggatacgattga

SEQ ID NO: 40547 - DNA, 822 bp, Neisseria meningitidis
atgtctttgcaaaacatcatcgaaaccgcctttgaaaaccgcgcggacatcaccccgaccaccgttactcccgaagtcaaagaagccgtgttggaaaccatccgccagctcgattccggcaaattgcgcgtcgccgaacgcttgggcgtgggcgagtggaaagtcaacgaatgggcgaaaaaagccgtgttgctgtccttccgcatccaagacaacgaagtcctcaacgacggcgtgaacaaatactttgacaaagtgccgaccaagtttgccgactggtctgaagacgagttcaaaaacgcaggcttccgcgccgttccgggtgcggttgcccgacgcggcagctttgtggcgaaaaatgtcgtgctgatgccgtcttatgtcaacatcggcgcatacgtcgacgaaggcgcgatggtcgatacttgggcgactgtcggctcttgcgcgcaaatcggcaaaaacgtccacttgagtggcggcgtcggtatcggcggcgtactcgaacccctgcaggccgcccccaccatcattgaagacaactgcttcatcggtgcgcgttctgaaatcgttgagggtgtgattgtcgaagaaggcagcgtgatttcgatgggcgtgttcatcggtcaatccaccaaaatcttcgaccgcaccacaggcgaaatctaccaaggccgcgtaccggcaggttcggttgtcgtatccggcagtatgccttccaaagacggcagccacagcctttactgcgccgtcatcgtcaaacgtgtggacgcgcaaacccgtgcgaaaaccagtgtgaacgaattgttgcgcggcatctga

SEQ ID NO: 40548 - DNA, 1419 bp, Neisseria meningitidis
atgccgtctgaaaaatgtttcagacggcatttttacccatccgcaaaccacccccatcctcacaaacccttaaaaatcagctataatgcccaactatttgattttcgcttatcccatattgaaatggcacaaaaaattcaatctgtaaaaggtatgaacgaccttttacctgtcgaacaaaaagatttcaaactgacggctgcgttttggcaggcgtttgaagatacggtaaaccgctggacacgcgcttacggctatcagcaaatccgtacgccgattgtcgagcaaaccggtttgtttgtccgctccatcggcgaggaaaccgatgtggtcggtaaggaaatgtacaccttctccgattcaaacgattctttgagtttgagcctgcgtcctgaaggtacggcgtcttgtctgcgtgcggtggtcgaacacaaccttttgtacaacagcccacaaaaactgtggtatatggggccgatgttccgccgcgagcgtccgcaaaaaggccgttatcgtcagttccatcaggtcggtatcgaggctttgggttttgaagggccggatattgatgcggaaatcatcgcgatgtctgccgacttatgggaaaaattgggtattcgtgaatacctgactttggaaatcaacagcttgggcaatcgtgaggaacgcgcggcacaccgtgcggcattggttgaatatctgacccgttatgaagataaattggatgaagacagcaaacgccgtctgaaaaccaatcctttgcgcgttttggatacgaaaaaccctgatttgcaggaaatctgcaacgccgcgccgcgtttggtggattatttgggcgaggcttcgcaaaaccactatgcacgcttcaaggcgatgttggacggtttgggtatccaatatattgaaaatccgcgcttggttcgcggtttggattattacaatcagacggtttttgagtggacgaccgacaaactcggcgcgcaggcaactgtgtgcggcggcggccgttacgatggtttgattgaggaacttggcggcaaacctgcgccgtccatcggctttgcgatgggcatcgaacggctgctgcttttggtgagcgaatacggctcgctggaagtgaacgctgcgcctgatgtctatgcaatgcaccaaggcgaaagggcggacttgcaggtgatgaaatacgcgcaagccttgcgcgcgcaaggtttcaatgtaatgcagcattccggctatcaaagcctgaaagcgcaaatgaaaaaagccgacaacagcggcgcgcgctttgccctgattgtcgcgcaagacgaactggcgaacggtacggttacgctcaaagacatgaacggcgcacacggtcagcaaactgtcgccgccgaggatttaacccatactttacaacaatggaagaacgcataa

SEQ ID NO: 40549 - DNA, 1311 bp, Neisseria meningitidis
atgatcgtgcccgacctctttgtcgcccacttccgcgaagccgccccctatatccgccaaatgctcggcaaaacgctggtcgccggcatagacgaccgcctgctcgaaggcgataccttaaacaagctcgccgccgacatcgggctgttgtcgcaactgggcatcaggctcgtcctcatccacggcgcgcgccacttcctcgaccgccacgccgccgcgcaaggccgcacgccgcattattgccggggcttgcgcgttaccgacgaaacctcgctcgaacaggcgcagcagtttgccggcaccgtccgcagccgttttgaagccgcattgtgcggcagcgtttccgggttcgcgcgcgcgccttccgtcccgctcgtatcgggcaacttcctgaccgcccgtccgataggtgtgattgacggaaccgatatggaatacgcgggcgttatccgcaaaaccgacaccgccgccatccgtttccaactcgacgcgggcaatatcgtctggctgccgccgctcggacattcctacggcggcaagaccttacatctcgatatgcttcaaaccgccgcctccgccgccgtctcgcttcaggccgaaaaactcgtttacctgaccctttcagacggcattgcccgccccgacggcacgctcgccgaaaccctctcggcacaggaagcgcaatcgctggcggaacacgccggcggcgaaacgcaacggttgatttcgtccgccgttgccgcgctcgaaggcggcgtgcatcgcgtccaaatcctcaacggggcctccgacggcagcctgctgcaagaactcttcacccgcaacggcatcggcacgtccattgccaaagaagccttcgtctccatccggcaggcgcacagcggcgacatcccgcacattgccgccctcatccgcccgctggaagaacagggcatcctgctgcaccgcagccgcgaatacctcgaaaaccacatttccgaattttccatcctcgaacacgacggcaacctgtacggttgcgccgccctaaaaacctttaccgaagccgattgcggcgaaatcgcctgccttgccgtctcgccgcaggcacaggacggcggctacggcgaacgcctgcttgcccacattatcgataaggcgcgcggcataggcataagcaggctgttcgcactgtccacaaataccggcgaatggtttgccgaacgcggctttcagacggcatcggaagacgagttgcccgaaacgcggcgcaaagcctaccgcagcaacggacggaactcgcatattctggtgcgtcgcctgcaccgctga

SEQ ID NO: 40550 - DNA, 480 bp, Neisseria meningitidis
atgaacaaactgtttcttactgccgcagtgctgatgctgggcgcgtgcggtttccacctgaaaggtgcagacggcatttctccgccgctgacctaccggagctggcacatcgaaggcggacaggcattgcagtttcctttggaaaccgcgctgtatcaggcttcgggcagggtggacgatgctgccggcgcgcagatgaccctgcgtatagacagcgtttcccaaaacaaggaaacctacaccgttacccgtgcggcagttatcaacgaatatcttttaatcttgacggttgaagcgcaggtattgaaacgcggcgagccggtcggcaaaccgatgaccgtgtccgtccgccgcgtccttgcttatgccgacaacgagatcttgggcaaacaggaagaggaagcggcattgtgggcggaaatgcggcaggatgccgccgaacagattgtccgccgcctgacctttctgaaggcggaatga

SEQ ID NO: 40551 - DNA, 939 bp, Neisseria meningitidis
atgcttgaactgaacggactctgcaaacgcttcggcggcaaaacggttgccgacgatatctgcctgactgtcgggcgcggcaaaatactcgccgtactggggcggtcgggctgcggaaaatccaccctgctgaatatgattgcgggcatcgtccggccggacggcggcgaaattcagctgaacggggaaaacattacccgtatgccgcccgaaaaacgccgtatttcgctgatgtttcaagattacgcgctgtttccccatatgagtgcgctggaaaatgcggcattcggtttgaaaatgcaaaaaatgccgaaagccgaagccgaacgccttgccatggcggcacttgccgaagtcggactggaaaacgaggtgcaccgcaagcctgaaaaactttccggaggcgagaaacaacggttggcactggcgcgcgctttggttgtccgcccttccctgctgttgctggacgaatcgttttccagtttggacacgcatttgcgcgaccggctgcgccgcatgactgccgaacgtatccgaaacggcggcatccctgccgttttggtaacgcattcgcccgaagaagcctgtacgacggcggacgaaatcgccgtgatgtatgaagggaggattctacaatacggcacgcccgaaacattggtcaaaacaccgtcctgcgtgcaggtcgcccgactgatggggctgcccaataccaacgatgaccgccatattccgcaacatgcggtgcgtttcgaccaagacggcatggagtgccgcgtattatcccgtacctgtttgcccgaatcgttcagcctgtccgtcctccatccggaacacggcatcctatggctgaacctcgatatgcggcacgccggggcggtatcgggcaaggatacggtacgcatccatatcgaagaacgggaaatcgtccgcttccgctga

SEQ ID NO: 40552 - DNA, 303 bp, Neisseria meningitidis; identical to SEQ ID NO: 37201

SEQ ID NO: 40553 - DNA, 750 bp, Neisseria meningitidis
atggttttgcgcagagattttttagcctggtgcgacgaaacgttgcagacggcatcgtttaaagattacgcccccaatggtttgcaggttgaagggagggaatatatcgggaaaatcgttacgtcggtaacggcaagcagggcagcgattgattttgctgtggagcagaaggcagatttgcttttggtacatcacggtatgttctggaaaaacgagttgccgaccgttactggttggaaaaaagaacggattgccgcactgttacggcacgacatcaatatggcaggctaccatctgcccctggatgcacatcccacactgggcaacaatgcccaactcgccgacagattgggttttgcgacagaaaaacggttcggcgaacaaaacctgctcaactcgggcagcctgaaacaagccaagacactcggcgcattggcggcgcatattgaaacagttttgcaacgtaagcctgtcgtcatcggcaaacccgaacgcgaaatccgacgggttgcatggtgcagcggcggggcgcaggggttttttcagacggcaatagacgaaggtgtcgatctgtatttgacgggggaaatctctgaagcccaataccaccttgccaatgaaacgggtacggctttcatttcggcagggcatcacgcgacggaacgttacggcgtacgcgcgctggcagaatcggcggcagaggttttcgggttggaagtgtgccattttgacgaaaacaatccggcttga

SEQ ID NO: 40554 - DNA, 969 bp, Neisseria meningitidis
atgactgccaaacctttttccctcaacctgaccaacctcctgctgctggcggtgttgtttgccgtcagcctgtcggtcggcgttgccgatttccgctggtctgatgtgttttccctgtcggacagcaccgaactgatgctggtcagccgcctgccgcgcacgtttgcgattgtgctgacgggcgcgtctatggcggtggcggggatgattatgcagattttgatgcgcaaccgttttgtcgagccttctatggcgggcgcgggtcagagtgcggctttgggtttgcttctgatgtccctgctgctgcctgccgcgccgctgccggtcaaaatgtcggttgccgccgttgccgcgctaatcggaatgctggtgtttatgctgctgatacgccgcctgccgccgacggcgcaactgatggtgcctttggtcgggattatttttggcggcgtggttgaggcagtggcgacctttatcgcgtatgaaaacgaaatgctgcaaatgctcggcgtgtggcagcagggcgatttttcgagcgtgctgctggggcggtacgagctgctttggattacgggcggtttggcggtgtttgcctatctgattgccgaccggctgacgattttggggctgggcgaaacagtaagcgtgaatttgggtttgaaccggacggcggtgttgtggtcgggtttgattattgtggctttgattacgtcgctggttatcgttacggtcggcaatattccgtttgtcgggctggtcgtgccgaacatcatcagccgcctgataggcgacaggctgcgccaaagcctgcctgcggtggctttgttgggcgcgtctttggtgttgctgtgcgatattttgggacgcgtgattgtgtttccgtttgaaattccggtatcgaccgtcttcggcgtattgggtacggcgttgtttttatggcttttgttaaggaaacctgctcatgccgtctga

SEQ ID NO: 40555 - DNA, 303 bp, Neisseria meningitidis
atgaaaacatctaaaattattgcggggttgatgctggctgtggcggttcagacggcatctgcggcagtgtatgaatgccgtcaaaacggtaaggtcagttacagccaaactccgggaaaacattgtaccaacgcgggtttggggcgggacctggtgtacagttcggttagaccggcagtaaaagacagggcggaagacgcaggagtgggcgattattcggacacggtgagggacgaagccgcccaaaatccgaaaggaaatgcacagaaagacggttcggctgccggcatcaagccgcactga

SEQ ID NO: 40556 - DNA, 288 bp, Neisseria meningitidis
atgcacggcatgtactaccaagtcggaaataaatgtcttgagaagcaccaggctgaaaacctttatttcagcttggtagtaccaagaatcaaagaaaacggacagattgtcaggccggaatataacggcagcctgtggaagatgtcggacggtcagccgctaaggcttttattggcggaatgcagtccgaaagacaacctgcaaagcggtcttgaaacaggctggatagtattcggcatcctcgcgtccgtttactttgtttccctgctgaaaaaggttttgaaatga

SEQ ID NO: 40557 - DNA, 441 bp, Neisseria meningitidis
atgaacatccgccgcgcctcaccgtccgactgcgccgcactcgccgcgctcgatgccgtctgcaacccgtccgcgtggacgcaacgccaatttgagtccgcattggtttcgccgtccgaacaggttttccttgcggaaaaagacggcgggattgccgcctttatcgtttggcagaacctgcccgacgaatccgaactgcacctgattgccaccgcgcccgaatgccgccgccaaggaattgcgtccgccctgctcgaatattggttcacacatctgcccgaagacacgcaacgcctgctgctcgaagtccgtgcaggcaacaccgccgcacaggcactgtacacggcgcacggcttcagcattacgggcaggcggaaaaactattaccgtacagccgacggtaaaaccgaagatgccgtcttaatggagaaaatatgttaa

SEQ ID NO: 40558 - DNA, 864 bp, Neisseria meningitidis
atggcggtttgccgcctgtttggatattgggggaatcgggtgattaagaagacaatcggcggcatcataccgatttttatggcggttttcatccctgcatcggcaggcgcggcggatttgatgttggcgcaggaatacaaagaccaagagattgcaggctgggcaatgagcgagaaactcgacggcgtgcgcgcctattgggacggaaagcacctgataagccgtcagggctacgcgtttacgccccccaaaggctttaccgcgcagtttccgccttatcctttggacggcgaattgtatagcggacgcggtcagttcgagcagatttccgctaccgtgcgttctgtttcttcagactggcgcggcatccgcctgcacgttttcgatgtacccaaggcgcagggcaatctctaccaacgtttggcagtcgcaacgcagtggctgaaaacgcatccgaacgcgccgattaccatcatcccacaaatcaaagtgcgcgaccggcagcacgcgatggactttttaaaacaaatcgaagcgcagggcggcgaaggcgtgatgctgcgtcagcccgaatcccgttatagcggcggcaggagcagccaattattgaagctgaaaagccaatacgacgacgaatgcacggtaacacggcactatgagggcaaagggcgaaacgccggacggctgggcgcggtcggctgcaaaaaccgacacggcgaattccgcatcggcagcggtttcaaagacaaagaccgcgacaacccgcccaaaatcggcacactgattacctaccgctaccgtggttttacgcggaaaggcacgccgaaatttgccacatttgtgcgcgtgcgtaccgaccgctga

SEQ ID NO: 40559 - DNA, 843 bp, Neisseria meningitidis; identical to SEQ ID NO: 37032

SEQ ID NO: 40560 - DNA, 258 bp, Neisseria meningitidis
atgcagaccgttaccatgtacacaggtccgttttgtccctactgcgcgatggcgaaaaggctgctgcacgcggcaggtgtcggacatatcgacgaaatccgtgtcgatgcaagccccgaagcctttgccgaaatgcagcagctttcgggacagcgcagcgtgccgcagattttcatcggcgaaacgcacgtcggcggatttaccgacctctaccgcctccagcaggaaggcgggctggacggactgctgaacccttaa

SEQ ID NO: 40561 - DNA, 1185 bp, Neisseria meningitidis
atggctaaggaaaaattcgaacgtagcaaaccgcacgtaaacgttggcaccatcggtcacgttgaccatggtaaaaccaccctgactgccgctttgactactattttggctaaaaaattcggcggtgctgcaaaagcttacgaccaaatcgacaacgcacccgaagaaaaagcacgcggtattaccattaacacctcgcacgtggaatacgaaaccgaaacccgccactacgcacacgtagactgcccggggcacgccgactacgttaaaaacatgattaccggcgccgcacaaatggacggtgcaatcctggtatgttccgcagccgacggtcctatgccgcaaacccgcgaacacatcctgctggcccgtcaagtaggcgtaccttacatcatcgtgttcatgaacaaatgcgacatggtcgacgatgccgagctgttggaactggttgaaatggaaatccgcgacctgctgtccagctacgacttccccggcgacgactgcccgatcgtacaaggttccgcactgaaagccttggaaggcgatgccgcttacgaagaaaaaatcttcgaactggctgccgcattggacagctacatcccgactcccgagcgtgccgtggacaaaccgttcctgctgcctatcgaagacgtgttctccatttccggccgaggtacagtagtaaccggccgtgtagagcgcggtatcatccacgttggtgacgagatcgaaatcgtcggtctgaaagaaacccaaaaaaccacctgtaccggcgttgaaatgttccgcaaactgctggacgaaggtcaggcgggcgacaacgtaggcgtattgctgcgcggtaccaaacgtgaagacgtagagcgtggtcaggtattggccaaaccgggtactatcactcctcacaccaagttcaaagcagaagtgtacgtactgagcaaagaagagggcggccgccataccccgttcttcgccaactaccgtccccaattctacttccgtaccaccgacgtaaccggcgcggttactttggaagaaggtgtggaaatggtaatgccgggtgagaacgtaaccattaccgtagaactgattgcgcctatcgctatggaagaaggcctgcgctttgcgattcgcgaaggcggccgtaccgtgggtgccggcgtggtttcttctgtaattgcttaa

SEQ ID NO: 40562 - DNA, 228 bp, Neisseria meningitidis; identical to SEQ ID NO: 36999

SEQ ID NO: 40563 - DNA, 861 bp, Neisseria meningitidis
atggcaaaagtaaaaggcggattggggcgcggtttggattcgctgctcgccaacggcgcagacaacagcagcggcgaccgattgaccacggttgcggttaaagatatccggcccggccgctatcaggcgcgtgttcaaatcgatgacgaagccttgcaggagctggcggattcgattaaagcacagggagtgatacagcccgtcatcgtgcgcgaacacggactgtcccgatacgaactgattgcgggggagcggcgttggcgtgccgcacagattgccggcctgaccgaaatccccgccgttatcaaaaccatcagcgacgaaaccgcgttggcaatgggtttgatcgaaaacctccagcgcgaaaacctcaaccccatcgaagaagcacaaggcttgaaacgccttgccgacgagttcggactgacccacgaaaccatcgcccaagccgtcggtaaaagccgaagcgcgatttccaacagcctgcgccttttaagcctgcccgaacccgtgcaggaaatgctttaccaacgccgcctcgaaatggggcacgcccgcgcactgctgaccctgcccgtcgtcgaacagctcgaattggcgcaaaaggccgtcaaaaacggctggtcggtgcgcgaagtcgaacgccgcagccaagccgcccttcaaaacaaacgtcccgagcccaaaaagactgccgccgccgacatcggccgcctgaatgatttgctgactgaaaaactgggtgtcaacgccgaaatcaaaaccgccaaccataaaaaaggcaaaatcatcctgcatttcgacacgctcgaaaccttcgaccatatcttgaagcagttgggcatagattaccgaccttaa

SEQ ID NO: 40564 - DNA, 297 bp, Neisseria meningitidis
atgaatgaagccaagaaattgcaagaagatttgggtgtaaataccgttgtaaaactgaaatatccggtacggctggcgacgggtcagatgttggaacaggtaacgctccgtcgtttgcgcgtgggcgatttgcgcgccgtgtcgcacctgacgaatgaggcggagcaagaactggccctgtttgcacgtatggcaagcatgattcccgaagactttgattgcttggatttggcggattggaaacagttgcaggagacgtttcgccgcttcacggaatccgagccggacggcaaatag

SEQ ID NO: 40565 - DNA, 795 bp, Neisseria meningitidis
atgaccttacctatgcaggaaacccgtttttctatactgctggacgaactggcggcaaaacaggaggcagccatcgctccccacctgcttgccgacggaaccaaggtatgggtacgcaaagcaggcaggcacaatgcgcggtggcgttacgcgctgctcggtatggttgcccgatatttgaaactgggggtgttgaagccggttcccagcctcggcggcgagcctgccattgcaaccgaatcaaaacgcctgtacgaattgcgcgcggcggggatagccgttcccgaattgctcgccgtcaggaaaaatgcccttatgttcggaaatttggaaggtatcccgctcgatacgcaaatccgccaagaagccgaagccggaaaggcggacgcttggcttgccggtttggaagccattgcacgcgtgcataaaaaacagcagttcctcagtcaggcgtttgcacgaaatatgatgtcggacggaaaaaacatcagctttttggattttgaagacgacccttccgaggtcctgaccatagcgcaatgccaagcccgcgattggctctgctacattcattcgaccgcgctgatattgaaaaacggcggactgctggaagcggctgcggaaaaatggggcggcgtattgtcagatcagcctgccgaaatacaaaagctgattgccgccaccgtcaaaccgatcctcccgatacgcaggctggaacacccccgctggggacgggacgcgctcaggctggcagcctcgatttccctgatttcccttgccgatatgccgccgtaa

SEQ ID NO: 40566 - DNA, 195 bp, Neisseria meningitidis; identical to SEQ ID NO: 37083

SEQ ID NO: 40567 - DNA, 612 bp, Neisseria meningitidis
atgaaattacaacaattggctgaagaaaaaatcggcgttctgattgtgttcacgctgcttgtagtcagtgtcggtctgttgattgaagttgtgcccttggcctttaccaaggcggcaacacagccggcgccgggcgtgaagccttacaatgccctgcaggttgccggacgcgatatttacatccgtgagggctgttacaactgccactcgcaaatgattcgtccgttccgtgcggaaaccgagcgttacggtcattactctgttgccggagagtcggtttacgaccatccgttccaatggggttccaaacgtaccggtcctgatttggcacgtgtgggcggtcgctattccgacgaatggcaccgtatccacctgctgaatccccgtgatgtcgtgcctgagtccaatatgccggcattcccgtggcttgcacgcaataaagtcgatgtcgatgcaaccgttgccaacatgaaggctttgcgtaaagtaggtactccttacagtgatgaggaaattgcgaaagcacctgaggctttggcaaacaaatccgagctggatgctgtagtcgcctatctgcaaggattgggtctggctttgaaaaacgtaaggtaa

SEQ ID NO: 40568 - DNA, 2094 bp, Neisseria meningitidis
atgaacaatccattggtgaatcaggctgctatggtgctgcctgtgtttttgttgagtgcttgtttgggcggaggcggcagtttcgatcttgattctgtcgataccgaagccccgcgtcccgcgccaaaatatcaagatgtttcttccgaaaaaccgcaagcccaaaaagaccaaggcggatacggttttgcaatgcgcttcaagcggcggaattggtatcagagggcgaatcctaaagaagatgagataaaactctctgaagatgattgggaacaaacggatgatggtgatatcaaaaacccttccaaacaaaaaaatattattaatgccttacctggaaataatgaaggagcattattgcaagattccagtcaagaaaatcagggtatatctaaggttaaggactatcacaatttccaatacgtatggtcgggttttttttataaacagattaaaaatacaattgaaaaaaacggctcatctataaccgcagccagaaatggtcctgacggttatattttttataaaggcaaagatccctcgagacaactccctgtattgggacaggttacgtataaagggacttgggatttcttaactgatgtgaaaataaatcagaaatttatagatttagggaatacttctacgaaacccggcgaccgatatagtgctttttccggggagttggattatatcgtcaataaagatagcgataagaaagacgggcacgtaggtttgggattaacaacggaaataacggttgattttgagaaaaaaaccctcagcggaaaattaattaaaaacaacagtgtcactaataacgataaatacaccacccaatattacagccttgaggctcaagtaacaggcaaccgtttcagcggcacggcaacggcaactgacaaacctgaaaaagacggaaccaaggaacatccctttgtttccgattcgtcttctttgagcggcggctttttcggcccgcagggtgaggaattgggtttccgctttttgagcgacgataaaaaagttgcggttgtcggcagcgcgaaaacccaagacaaagacgcaaatggcaatactgaggcggcttcaggcggcacaggtgcggcagcatcgggcggtgcggcagctatgccgtctgaaaacggtaagctgaccacggttttggatgcggtcgagctgacgcacggtggcacagcaatcaaaaaactcgacaacttcagcaacgccgcccaactggttgtcgacggcattatgattccgctcctgcctcaaaattcaacaggcaaaaataatcagcccgatcaaggtaaaaacggcggaacagaatttacccgcaaatttgaccacacgccggaaagtgataaaaaagacgcccaagcccaaacagtcacgggcggcgcacaaaccgattcgggtaaggcggacgttaacggcggtaaggcagaaacaaaaacctatgaagttgaagtctgctgttccaacctcaattatctgaaatacgggttgctgacgcgcaaaactgccgacaatacgggggaaggcggcaacggcagccaagccgccgcccaaacggacgcgcaaagtatgttcctccaaggcgagcgcaccgatgaaaacaagattccaaccgaccaaaacgtcgtttatcgggggtcttggtacgggcatattgccagcagcacaagctggagcggcaatgcttccgataaagagggcggcaacagggcggaatttactgtgaattttgccgataaaaaactcgacggaacgctgacggctagggagcgtacgtctcccacgtttaccattaccgccacgattcaggacaacggtttttccggtacggcgaaaactgctgacttaggttttgatctcgatcaaagcaataccaccggcacacctaaggcatatatcacagatgccaaggtgcagggcggtttttacgggcctaaagccgaagagttgggcggatggtttgcctatccgggcgataaacaaacgaaaaatgcaacagctacatccagcgatggaaaatcagcaagcagcgcgaccgtggtattcggtgcgaaacgccaacagcctgtgcaataa

SEQ ID NO: 40569 - DNA, 1434 bp, Neisseria meningitidis
atggacacacaaacttacaactacaaagtggtgcgccagttcgccatcatgactgtagtttgggggattgtgggtatgttggtcggcgttatcgtcgccgcccagctttttgctcctgccctcgacttgtctaatatcggaccttggttccacttcggccgcctgcgtccgctgcacaccaatgcggttattttcgcatttggcggttgcggcctgatcggcacatcatactacgttgtccaacgtacttgtaatacccgtcttttcggcggttggctgccggcatttaccttttggggctggcaggcggtaatcgttgccgccgtcgtcagcttccctatgggttggacccaaggtaaggaatatgccgaactggaatggccgatcgatattctgattactttggtttgggtggcttacgccatcgtattcttcggtacgattgccaaacgtaagattaaacatatttacgttgccaactggttctacggcggctttattttggcggtcgcacttttacacatcgtcaacaatatcagcatcccggccggtttgatgaagtcataccccgtctattccggtgcgattgatgctatggttcaatggtggtacgggcataatgccgtgggcttcttcctgactgccggcttcttgggtatgatgtactatttcgtacccaaacaagcagcccgccccgtttactcctaccgcctgtccgtcgttcacttctgggcgttgatttttacctatatgtgggcgggtccgcaccatcttcactacactgcgctgcctgactggacgcaatctttgggtatggttctgtctttgattctgttcgcaccctcttggggcggtatgattaacggcatcatgaccttgtccggcgcgtgggacaaactgcgtacagacccgattcttaaattcctgattgtatccttgtccttctacggtatgtctacctttgaaggcccgatgatgtcgattaaaacggtcaatgcattgagccactatacggactggaccgtcgcgcacgttcatgcgggtgcgttgggctgggtaggctttgtaaccatcggttccgtctattacatgattccccgtctgttcggcaaagaacagatgcacagcaccaagctggtagaagcacatttttggattgcgaccatcggcgtggttctgtatatcgctgccatgtggattgccggtgtgatgcagggtttgatgtggagttctttgaacgatgacggtacgctgacctactcgtttgtcgaatccgtaaaacgcaccatgccttactacgtgatccgttttgcaggtggtttattgtatctgagtggtatgtgcattatggcgtacaacgtgtaccgcacagccatcggtggtaaagcagtcgatgccgaaatccctgcggtttcccaaacacagcaccactaa

SEQ ID NO: 40570 - DNA, 564 bp, Neisseria meningitidis
atgcgccatttggaaaacaacggttatgcgaacgttgccgggttggaacgcatcctcgccgtcaaaaccgacaattacaaagaaaaagaaaacctgctccatgaaattttcagtaaaagcaggataggcgataccgaattgttcgccgtggacgaaaaccttgtgaaacgtttgtttttatcacttcgcggcgaaatcgtattcccgaaaaacgaaacggcggaatcggaatttgaaaaaagcgtccacgaacgcaggcaggaagggaatgccgggtccggccgcaaacaactgcttgatttggtacggcgcggacaccgggaatacccttacgcgctgccccggcttttggcgggcgcggcatcctacaagccgaaaaaatcgaaaatccgcctttttaaagaagcatatttcggcaaaagcggcacgaggctgaccgacgaaattgcagacggcatccatatttacacctgtttttcgcgggcggatttggaaaaagcctattccgaatatttggaacttttcaaatccgaatcggatgccgaaagcagaaaaccacggtaa

SEQ ID NO: 40571 - DNA, 849 bp, Neisseria meningitidis
atggacttcaaacaatttgattttttacacctgatcagtgtttccggttgggagcatctggctgaaaaggcgtgggcgttcgggctgaaccttgccgccgcgctgcttatttttttggtcggaaaatgggcggcgaaacgcattgtcgccgtgatgagggcggcgatgacgcgcgcgcaggtcgatgccacgctgattagttttttgtgtaatgttgccaatatcggcttattgattttggtgattattgccgcattgggcagattgggcgtttccacaacatccgtaaccgccttaatcggcggcgcgggtttggcggtggcgttgtccctgaaagaccagctgtccaattttgccgccggcgcgctgattatcctgttccgcccgttcaaagtcggcgattttatccgcgtcggcggttttgaaggatatgtccgagagattaaaatggtgcagacttctttgcggacgaccgacaacgaagaagtcgtgctgcccaacagcgtggtgatgggcaacagcatcgtcaaccgttccacactgccgctgtgccgcgcccaagtgatagtcggcgtcgattacaactgcgatttgaaagtggcgaaagaggcggtgttgaaagccgccgtcgaacaccccttgagcgttcaaaacgaagagcggcaggccgccgcctacatcaccgccttgggcgacaatgccatcgaaatcacattatgggcttgggcaaacgaagcagaccgctggacgctgcaatgcgacttgaacgaacaagtggtcgaaaacctccgcaaagtcaatatcaacatcccgttcccgcaacgcgacatacacatcatcaattcttaa

SEQ ID NO: 40572 - DNA, 819 bp, Neisseria meningitidis
atgaacaccattttcaaaatcagcgcactgaccctttccgccgctttggcactttccgcctgcggcaaaaaagaagccgcccccgcatctgcatccgaacctgccgccgcttcttccgcgcagggcgacacctcttcgatcggcagcacgatgcagcaggcaagctatgcgatgggcgtggacatcggacgctccctgaagcaaatgaaggaacagggcgcggaaatcgatttgaaagtctttaccgaagccatgcaggcagtgtatgacggcaaagaaatcaaaatgaccgaagagcaggctcaggaagtcatgatgaaattccttcaggaacaacaggcaaaagctgtagaaaaacacaaggcggacgcgaaggccaataaagaaaaaggcgaagccttcctgaaagaaaatgccggcaaagaaagtgtgaaaaccactgcttccggcctgcaatacaaaatcaccaaacagggcgaaggcaaacagccgaccaaagacgacatcgttaccgtggaatacgaaggccgcctgattgacggtacggtattcgacagcagcaaagccaacggcggcccggttaccttccctttgagccaagtgattccgggttggaccgaaggcgtacagcttctgaaagaaggcggcgaagccacgttctacatcccgtccaaccttgcctaccgcgaacagggtgcgggcgacaaaatcggtccgaacgccactttggtatttgatgtgaaactggtcaaaatcggcgcacccgaaaacgcgcccgccaagcagccggctcaagtcgacatcaaaaaagtaaattaa

SEQ ID NO: 40573 - DNA, 1758 bp, Neisseria meningitidis
atgtgtaaagatgtaaagccgaatttcgcagaagaagccgccccgttgggcgatatggcagaatttgccgcgccgtttgcacaaccgcgctatgacgtggacggcgcgggcgtatggtatatcggcgttaagaccgatagggagggcaacacgcaggaagccacgccggtaaaactctcatcccccattgaaatcataggcaggggcacggacaacgacggcgcatattaccgcgtgatacgctggcaggacgctaacacacggcgaaccaaaatcgccgccatcccgcaatcggaaatcggtacagttcaaggctggcagcgtttgcagtcttacggcttggctgtcttatcgggcagggttaagcgtgagcggctttccgactatttgcagacacagggcagcggcgatatttacaccattaccgaccgcgcaggctggcacggcaacgcctatatcctgcccaatggcgaaaccatcaacgcagagggcgcaaacatcctatacaacggagacaccagccaaagggagggctatacggaatcgggcagccttgaagaatggcggcaggaagccgcccgatacgcagagggcaacagccgcctatgccttgcattgggtttgagtcttgccgcaccgttcttggcactcttgcacgaagagggcggcggcgtacacttggcgggcagttcgtccaaaggcaaaaccacagccgccaaccttgcattaagcgtatggggcagctatgaagccacaaaaagcaactgggacactaccgcattaggtttgcagaatgccgccttagcgcgtaacgacggctttttagcactggacgaaatcggacagaccgcagacccgcgaagaatcccccaaatggtttacagcgtgattaacggcatatcgaaaacacagggcgcgaaagacggcggcaaccgcaaacaaaagacatggcgcaatttgatactctcaacgggcgaaaccaaccccgaaagcctaatcggagaccgcgcccaatggagggcaggtaaccgcgcccgattgcccgatatacaggcagaagccaaacacggcatatacgacacgctgcacggcttcacagacggcgcgaaactgtcggagtatatcaacagggcggccgccaagaaatacggcacggcagggcgcgcccttatccgccaaatcctttcagacggcaaagaagccgccgccgaaaccatagaagcaacacgcgcccggtaccttgaagccttgccgcctatggaagggcaggcacggaggatagcccgccgttttacccttttagccgccgttttagaatatgccgcgcccatcacaggattaaaggcaggcggggcggcggttatgcagtgctttcacgaatggctggaagagaacggcacaggagaccgcgaagcagaagcgatatgcagtcagttggacgactttatcgcacaatatgccgattccccgcgcttcctgtcgtggagcgaaagagacgcgccatacaccatgacaggcggcaaaggcaaagggcacgcaggctttaaagtgcaggctggcggcaatgacgagttttatatcctgccgctggtgtttagagaagaaatcgcccaatcgttcccgattcataccgtgtgtaaggtactatcggaaaaaggacgcttgaagccgtccaaaacaggctaccagcaccaaatcaaagtgaacaagaagccgatacgccattatttaatcattgagccgctagaacttgattga

SEQ ID NO: 40574 - DNA, 1497 bp, Neisseria meningitidis
atgaccacggaaaaccaagccggcagtccggcatccggaatcggcacgtccgaacaaacaaaagccgcgccgaaagcaaaaaaaacattcgatccgcgagccagcgtgattcaaatccatcccgaaggcgaacgcatccatcccaaaaaggcggaaggacggttcgccaaactgcgtatcgccgccgtattggcgacgcagtttgtgttttacgtcattccgtggttcaactggagcggcaggcaggctgtcgttttcaatatccccgaacggcatttcttcattttcggattgtcgttgggggtgggcgatttgatttaccttgccttgctgctgatgatttgcgccttcgggctgttttggtggacgacgattgccgggcgactgtggtgcggctattcctgcccgcaaacggtttacaccgaaattatgctgtggatcgacaacctggtcgaaggcgataggaacaaacggctgaaactggaaaaatcgccgtggaatttcactaaaatccgcatcaaagccaccaaatacctgctgattttccttgtctgcgcgtggacgggcatcacgtttgcaggctggtttgtccctatccgccagttcgttcccgatttattcactggagcagcaggcggcggcgcgatgtttgccacagcgttttacggctttatgaccttcttcttcgcccacattatgcgcgaaaaagtatgcctgcatatgtgtccgtatgcacgtttccaaagcgcgatgttcgacaaggacacgctgattgtttcttatgacgcggaacgcggcgaaccgcgcggcgcgcgcaagaaaacggtcaataaggaagaggcgggtttgggcgactgcatcaactgtgcgatgtgcgtccaagtctgccccgtcggcatcgacatccgcaacggtctgcaataccaatgtatcggctgcgccgcctgtatcgacgcgtgcgatgagattatggacaaaatgggctatccgcgcggattaatccgttatacgaccgaaagcgcgctggaacacgaatattctgaaaaagacattaaaaaacggctgctcagaccgcgtgtggcaggttacggcgcggtgttggcgttagttatcattgccttcctggccggtttgtccacgcgcaaaatggtcgaggtcgatattttgaaagaccgtggcgtactggtgcgcgaaaacgccaaaggctggctggaaaacgcatacagcctgcgtatcatcaacaaaagtgaaaaagaacagctcattaccgcaagtgtcaaaggctttgacgaaatcgccctgaccgggctgcccgaaggcggtatcaaggttgccccgcgcgaaacggtaacccttcccgtccaagtgtccaccattccggaatacgcggacaaaggcagccaccctatcgaatttaccttccaataccgcgaaagcggcgcgcccgacggcaagccggtcgtcttggaagaagatgcaacctttatcggagaataa

SEQ ID NO: 40575 - DNA, 522 bp, Neisseria meningitidis
atgtcctgtttttcaatcaaacgtatgtccgcgtttcgggcgcggataacggcgttttttgccgcctttgtctttttgacggcggcactgcccgcttatgcggagcgtctgcctgattttctggcgaaaatacagccttcggaaatttttccgggtgcggaccgttacggcaagccggaaggtaagcctatggttgcccgcgtttacaaaggcgatgagcagttgggcttggtctatatcacgaccgatgcggtcaatacgcgcggttattcgagcaaaccgattgatacgctgatggcgttggctaaagacggtacgatagccggagcgaaattggttgatcaccatgagtcgattatgctgatcggtatcccgcatttgcccgcgcccgggcgggcgatacgctcaaactggcttccggcgtatatcaaaccaaacttcacatcgacaaaccgattacgattgaagggcctgccgaccgttccgcaaccatcgaaggggacaggagcgggcgtaccatag

SEQ ID NO: 40576 - DNA, 1071 bp, Neisseria meningitidis
atggcggcttgcccgaacgagagtgtaaaaatggatatttcagattttgattttaccctgcccgaaaagctgattgcccagcatccgcccgaagtgcgcggcagcagccgccttttggttgcgttgcccgatatgccgctgcaagaccgggtgttcggcgatttgccggattatgtcgaggcgggcgacgttttggtgttcaacaacaccaaagtcatgaaggcgcggctgtttgggcagaaagacagcggcggcaggatcgaagccctgattgagcgcgtgttggacaaccataccgcactggcgcacatccgttcgtccaagtcccccaagcccggtatggggctggtgtttgaaggcggcatccgtgccgtgatggtcgggcgtgagggcgaactgttctgcctgagttttgaaggcggagagaccgtttacgaacttttggaacagaacggacacctgcccctgccgccttatatcgaacgcgccgccgatgcggatgacgacagccgttatcaaaccgtttatgccaaatatcagggcgcggtcgccgcgccgacggcgggcctgcattttacggaagaacttttgcaccgtctgaaagacaaaggcgcggtaaccgcagaagtaactctgcacgtcggtgcggggacattccaacccgtgcgtgtggacaaaatcgaagagcataaaatgcacagcgaatggtttgaagtgccgtctgaaaccgccgccgccgttgaggcggcaaaagcccgggggaacaaagtctgggcggtcggcacgacttccatgcgcgccctcgaatctgccgcgcgtgcgacgggtcgtctgaaagcggggcagggcgacaccgatattttcatcacgccgggctaccgttttaatgttgccgacaggctggttaccaatttccatctgccgaaatcgacgctgctgatgcttgtcagcgcgttttcgggtatgggtcatatccgcgccgcgtatcgttatgcggtcgaacgcgaataccgtttcttcagctacggcgatgcgatggttttggggcggaacgaaggggtggtacgttag

SEQ ID NO: 40577 - DNA, 747 bp, Neisseria meningitidis
atgatgtccgaacaccgagtcaaccacgaacccgtcttcctgttggcttcctcgccatggcgcgaaagcagcctgcgggtcgaagccttcagccgccgttacgggcgtgtggctttgctggcacggagcgcgcgcaaacgtcagagcgaattgcgcggcgtattggttccgttcgtccctgtcagtgcgtcgtggtacggcagtcaggaactcaaaaccctgcaccgtgccgaatggatcggcggatggcggcagccgcagggcagggcgttgttcagcggtctgtatgtgaacgaactggtgttgaaactgaccgcgcgcgaagatccgatgcccgaactgtacgacgcgttggcaaaagtgatggaggcggtgtgtcgtgaagccaaccacattgccgatttgcgccgcttcgagtggaagctgctcaatgccttgggcgttgcccccgatttgcacgccgacggcacgggcggcgatattttggcggacaaaacctaccggctgatgcccgaagaggcggtcatgcccgtatgcgaggacgcagacgcgctttcgcacgaagccggcgcaattgtcgaagggcaaagcctgatcgatttgcgcgaaggcagtttccgcaccgccgaaagcctgcaacaggcattgaaaattacacggctttttatccgccacctgttgcccgaagggctgaaatcgcggcaggtgttggaacagatacggcagtttgaccgcaataccgcgtag

SEQ ID NO: 40578 - DNA, 429 bp, Neisseria meningitidis
ttggggaattttgcaaaggtctcagggtatacctacaataagagcaggtataggaatgcagccgaagtcaacgccgaacgccttgccaaaaattccagtgcagacccgtacaacttcagcaatttcacacccgtgcacatattccgtttcggaacgagcttccatataccgaatacggggctgaccgtcggcggcggcgtgtccgcacaaagcggcacaagcagcctgtacaacatccgtcagggcggctacgggctgatagacggtttcgtccgttacgaattgggcaaacacgccaaattgagcctcatcggtacgaacttaaacggacgcacttattttgagaacaactacaaccgtacgcgcggcgcaaacaacttctatggagagccgcgcactgtcagcatgaaactggattggcagttttaa

SEQ ID NO: 40579 - DNA, 309 bp, Neisseria meningitidis
atgaccctgaaaaccgatttattgcctaaaatcaacaacgaagattatcaacgcctcatcctcaaacacagtgcggaatttagcggtggcgaaatccgcctgttgaacgaaatcctcgaaaaattcaatttcgacgttgttcaggcgcaggcattggcgcaggcggtaatgcagcaaatccgcttcgaccccaacgcctaccacatcgacagcgacgacgaagacaccaccggcatctgcccccactgcatcaacccgcctatgccgcccctgcgcgactatctcgtttggcgcgaaacccgcggataa

SEQ ID NO: 40580 - DNA, 621 bp, Neisseria meningitidis
atggctgtacgttccaaatcctcaaaagcgtggctgcacgaacacgtcaacgaccactacgtccatatggcgcaaaaagacggctaccgcgcccgtgccgcatacaaacttttggaaatcaacgacaaagacaaattaatcaaacccggcacggtacttgccgacttgggcagcgcgccgggaagctggtcgcaggttgccgccaagctgacgggttcttccggagcagttttcgccttggacatcctgcctatggaagccatagggggcgtctccttcattcagggcgacttccgcgagaacgacgtactggcacaattcgaaaccttgttggacaaccgcccgctcgaccttgtaatttgcgatatggcgcccaatatgtcgggaaacgccgtaagcgatcaggcacgcagcttttatctgtgcgaactggctttagacttcgcctcgcaacacctgaaaaccggcggcagctttttggtcaaagtctttcagggtgcaggctatcaggaatacatggcagccatgcgcgaaattttcggcacggtgcagacgcgcaaacccgaagcctcgcgcaatcgctccagtgagatttatttattgggcaaaaataaacgctga

SEQ ID NO: 40581 - DNA, 999 bp, Neisseria meningitidis
atgagcagacccgtacccgccgtattcggcagcgtttttcacagtcaaatgcccgtcctcgcctaccgcgaaggcaaatggcagccgaccgaatggcaatcttcccaagacctctccctcgcaccgggtgcgcacgccctgcactacagcagcgaatgtttcgagggactgaaagccttccgtcaggcagacggcaaaatcgtgctgttccgtccgactgccaatatcgcgcgtatgcggcaaagtgcggacattttgcacctgccccgccccgaaacccaagcctatctcgatgctttggtcgaactggtcaaacgtgccgccgatgaaattcccgacgcgcctgccgccctgtacctgcgcccgaccttaatcggtaccgatcccgtcatcggcaaggcaggctcgccgtccgaaaccgccctgctgtatattttggcttcccccgtcggcgactatttcaaagtcggctcgcccgttaaaatcttggtggaaaccgaacatatccgctgcgccccgcacatgggccgcgtcaaatgcggcggcaactacgcttctgccatgcactgggtgctgaaggcgaaagccgaatacggcgcaaaccaagtgctgttctgcccgaacggcgacgtgcaggaaaccggcgcgtccaactttatcctgattaacggcgatgaaatcattaccaaaccgctgaccgacgaatttttgcacggcgtaacccgcgattccgtactgacggttgccaaagatttgggctataccgtcagcgaacgcaatttcacggttgacgaactcaaagctgcggtggaaaacggtgcggaggcgattctgaccggtacggcagccgtcatctcgcccgttacttccttcgtcatcggcggcaaagaaatcgaagtgaaaagccaagaacgcggctatgccatccgtaaggcgattaccgacatccagtatggtttggcggaagacaaatacggctggctggttgaagtgtgctga

SEQ ID NO: 40582 - DNA, 918 bp, Neisseria meningitidis
atggttttggacgggtttgcggcgcattttgacgcttatttggaaaacatcgtgcgcgagggcaagtcggagcacacggtggcggcataccggcgcgatttggaagaactgtttgcgctgttggcacaaatgccgtctgaagatgcaggcggcgtgccgcaggacttgtcgcggcgcgattttacggcggcgttgcggcggctgtcgcagcgcggtttgaatgcgcggacgctggcgcgcaagctgtcgtcttggcggcagtattgtgtttggctggtggaacgcggtctgctgcataccgacccgaccgccgacatcaaaccgccgaagcagcccgagcgcgtacccaaagcactgccgcaggaatggctgaaccggatgctggatttgcccgtggacggcggcgacccgctggcggtgcgcgatcacgcgctgttcgaactgatgtacggcagcggtttgcgcgtgagcgagatacacggcttgaatgcagatgatgtctatttggacgaggcgtgggtacacgttaccggcaaagggcgcaagcagcggcaggtgccgctggtcggcaaaagcgtggaagccctgaaaaactatctgccgctgcgtcagacggcatcggacggcaaagccctgtttaccggcaggaacggcacgcgcctgagccaacgccaaatccaaaaacgtttggcgcaatgggcggcgcaaaacggcgacggcaggcacgtttcgccgcatatgatgcgccacagctacgccggacacctattgcaggcttcgcgcgacatcagggcggtgcaggagctgctcgggcacagcagcctttcgaccacgcagatttataccaagctcgatttcgaccacatcgcccgcctgtatgacgaagcccacccgcgcgccaagcggcaggacgaatga

SEQ ID NO: 40583 - DNA, 393 bp, Neisseria meningitidis; identical to SEQ ID NO: 37839

SEQ ID NO: 40584 - DNA, 756 bp, Neisseria meningitidis
atgattaaaatccgcaatatccataagaccttcggcaaaaataccattttgcgcggcatcaatttggatgtgtgcaaagggcaggtggtcgtcatcctcgggccttccggctcaggcaaaacgacgtttctgcgatgcctaaacgcgttggaaatgcccgaagacggacaaatcgagttcgacaacgagcgaccgctgaaaatcgatttttctaaaaaaccaagcaaacacgatattttggcactgcgccgcaaatcaggcatggtgtttcaacaatacaacctctttccgcacaaaaccgccttggaaaacgtgatggaaggaccggttgccgtacagggcaagcctgccgcccaagcgcgcgaagaggctctgaaactgctggaaaaagtcggcttgggcgacaaagtggatttgtatccctaccagctttccggcggtcagcagcagcgcgtcggcattgcccgagcattggcgattcagcccgagctgatgttgtttgacgaacccacttccgcgcttgaccccgagttggtgcaagacgtgttgaacgccatgaaggaattggcgcgggaaggttggacgatggtcgtcgttacccacgaaatcaagttcgcgctggaagttgccacgaccgttgtcgtgatggacggcggcgttatcgtagagcagggcagcccgaaagagttgttcgaccaccccaaacacgaacggacgcggagatttttaagccaaatccaatctaccaagatttga

SEQ ID NO: 40585 - DNA, 1179 bp, Neisseria meningitidis
atggcatttttaaaactgaccgaacaaaacgtgcagggcaaaaccgtcctcatccgcgccgatatgaacgtgccgttcaaagacggcaaaatcagcgacgacacccgtatccgcgcctcgctcgcgtccatccaatactgcatggacaacggcgcatccgttatcgtgatgatccacttgggtcgcccgactgaaggcgagttccaccccgaagacgacgttgcgcccgttgccgcgcatttgggcggtctgttgggcaaagacgtgaaagtattgaacgactggcgcgaaaacaaaccggctttgaacgcgggcgatgtcgtgatgctgcaaaacgtgcgtatcaacaaaggcgagaagaaaaacgatttggaactgggcaaagcctacgcttctttgtgcgacgtgttcgtcaatgacgcgttcggcaccgcccaccgcgcccaagcctcgaccgaagccgtcgctcaagccgcgcccgttgcctgcgccggcgtattgatggcgggcgaactcgacgctttgggcaaagccctgaaacagcctgcacgcccgatggttgccatcgttgccggcagcaaagtgtccaccaagctgaccatcctcgaatcgctggcggacaaagtcgaccaactcatcgtcggcggcggtatcgccaacaccttcctgttggcagaaggcaaagccatcggcaaatctttggcggaacacgatttggtggaagaatccaaaaaaattatggcaaaaatggcggccaaaggcggttctgtgccgctgccgaccgatgtcgtcgttgccaaagcctttgccgctgatgaggaagcggtggtaaaagacattgccgacgttgccgaagacgagatgattttggacatcggcccgaaatctgccgccgcgcttgccgatttgcttaaagccgccggtacggtcgtttggaacgggccggtcggcgtgtttgagtttgaccagttcgcaggcggtacgaaagcccttgccgaagccattgcccaaagcaaagcgttctcgattgcgggcggcggcgacacgctggcggcgattgccaaattcggcgttaccgaccaaatcggctacatctccaccggcggcggcgcgttcctcgaattcttggaaggcaaagagctgcctgccgtagccgctttggaaaaacgcggcgagtaa

SEQ ID NO: 40586 - DNA, 423 bp, Neisseria meningitidis
atgaaaaaaatgttcctttctgccgtattgcttctgtcggctgccgcccaaacggtgtgggcggatacggtgttttcctgtaaaacggacaacaacaaatatatagaagttcaaaaaatcaaccgcaatctttacgaatattcgttcggcagtgcggcaaaaaaagaaattgccatacgcaacagcaaagctgatctgtcggggcgttccgacaggtggcaaggtatgggcagcggtcgttgggcaacgatgaaattccaaaacggcgaatttatgtacaccatatggacaggcttcgattccgtgactcatacggaaagcagcggtgtcgttgtggagcgtaggggcaaggaagtcgcacgggtcggctgtacgccgcaaaccgcgcaggcgaatttcaacgatgctgatttttcccggtaa

SEQ ID NO: 40587 - DNA, 1434 bp, Neisseria meningitidis
atgtctcaatatgatgtagtagtgattggtgcaggcccgggcggatacgttgccgccatccgtgccgcacaactgggtttcaaaactgcctgtgtcgatgcaggcgttaacaaagcaggcaatgcccctgcattgggcggtacttgcttgaacgtaggttgtatcccttctaaagccctgttgcaatccagcgaacatttccacgctgcgcaacacgattttgccgaacacggtatcactgtcggtgacgtaaaattcgacgcggccaaaatgattgagcgcaaagatgccatcgtgaccaaactgaccggcggcgtgaaattcctgttccaaaaaaataaagtaaccagtctgttcggtacggcttcctttgccggtaaaaatggcgatgcttaccaaatcgaagtcgataacaaaggagagaaaaccgttatcgaagccaaacacgtcatcgtagcgaccggttccgtaccgcgtccgctgccacaagtcgctatcgacaatgtgaacgtattggacaacgaaggcgcattgaacctgaccgaagtacctgccaaactcggcgtgatcggttccggtgtgattggtttggaaatgggttccgtatggaaccgcgtgggtgcagaagttaccattcttgaagctgcgccgaccttcctggctgccgccgaccaacaaatcgccaaagaagccttcaaatacttcaccaaagagcaaggcttgaacatcgaactgggcgtgaaaatcggcgacatcaaatctgaaggtaaaggcgtttccgttgcctaccaaaccgctgccggcgaagccaaaaccgaagtattcgacaaactgatcgtcgccatcggccgtattccaaacaccaaaggcctgaatgccgaagacgtaggcttggaaaaagacgagcgcggctttatcaaagtagatggcgaatgccgtaccaacctgcctaacgtatgggcaatcggcgacgtggttcgcggcccgatgttggcacacaaagccagcgacgaaggcgttgccgttgccgaacgcattgccggtcaaaaaccgcatatcgacttcaacaacgtaccgttcgtgatttacaccgatcctgaaatcgcttgggtgggtaaaaccgaagagcagctcaaagccgaaggcgtggagtacaaaaaaggtacttcaggttttggtgcgaatggtcgcgcattggcaatgggcaaagccaaaggtacggttaaagtgttggcagacgccaaaaccgaccgcatcttgggcgtacacatgattggtccggttgtcagcgaattgcttaccgaaggcgtgactgcgctcgaattcttcgccagcagcgaagacatcgcccgcattatccatgcccacccaaccttgtccgaagtggttcacgaagctgcattggcggccgacaaacgcgctttgcacggttga

SEQ ID NO: 40588 - DNA, 291 bp, Neisseria meningitidis
atggcgcgcattggtacgaataagggtttttttgaactcttggagggcgagactctgttggaaggcttggaacggacggggcatatggtggaatatcagtgccgaagcggatattgcggatcgtgccgtgtgaagattttggagggaagcgttacttatcgggagccgcctttggcttttttggggcgggacgagatactgccgtgctgctgttgcgtcgagggggatgtcaggctggattgcggtttgtcgggggaggatgaggggctgtctgacagtttgttgaaataa

SEQ ID NO: 40589 - DNA, 579 bp, Neisseria meningitidis
atggcaaaactctcctacgcatccgttatcgaacacgaccgacgttacaaaatgttggcggatttaggcttgagaataaatgaggtcgatgcggtcagactactgccgaggttggtagatttggttgctccggaacacttggcgctgctggcggagggtcgcagcattttaggtgcggacggctactggttagctgaaagcgaccagacgcgccgcaagctgattaagggcgcgtaccagctgcaccgtatgaaaggcacgccgtgggcaatacgcgaaatcgtgcggcggctcggtttcggagaagtcgaaatcaccgaaggcttgggcaataaggaacacaacggcgaaatcaggcgggacggaacctacgcgcacggacggtccgaccactgggcgcattaccgtatcaccatgaacggcgcgctaaccaacgatcaggcggctttgctgcggcataccctgcaagccttcgcgcctgcacgatgcgtattggcggcattggattaccggcacgccgccgtccggcataacggacgggtatcgagagacggaacatttaaccgaggaactgcataa

SEQ ID NO: 40590 - DNA, 1008 bp, Neisseria meningitidis
atgagcaccttctttcaacaaaccgcgcaagccatgattgctaaacacatcgaccgtttcccgctattgaagttggaccaggtgattgattggcagccgatcgaacaatacctgaaccgtcaaaaaacccgttaccttagagaccaccgcggccgtcccgcctatcccctgttgtccatgttcaaagccgtcctgctcggacaatggcacagcctctccgatcccgaactcgaacacagcctcattacccgcatcgatttcaacctgttttgccgctttgacgaactgagcatccccgattacagtactttatgccgttaccgcaactggctggcgcaagacgacaccctgtccgaattgctcaaactgattaaccgccaactgaccgaaaaaggcctaaaaatagagaaagcatccgccgctgtcgttgacgccaccattattcagaccgccggcagcaaacagcgtcaggctatagaagttgacgaagaaggacaaatcagcggccaaaccacaccgagtaaggacagcgatgcccgttggatcaagaaaaacggcctctacaaactcggttacaaacaacatacccgtaccgatgcggaaggctatatcgagaaactgcacatcacccccgccaatgcccatgagtgcaaacacctgccgcctttgctggaagggatagccgaaggtacgaccgtctatgccgacaaaggctacgacagtgcggaaaaccggcaacatctggaagaacatcagttgctggacggcattatgcgcaaagcctgccgcaaccgtccgctgtcggaaacgcaaaccaaacgtaaccgatatttgtcgaagacccgttatgtggtcgaacaaagcttcggtacgctgcaccgtaaattccgctacgcccgggcagcctatttcggactgattaaagtgagtgcgcaaagccatctgaaggcgatgtgtttgaacctgttgaaagccgccaacaggttaagtgcgcccgctgccgcctaa

SEQ ID NO: 40591 - DNA, 696 bp, Neisseria meningitidis
atgaaactgaaaaccttagctttgacttcattgaccctgttggcgttggccgcttgtagcaaacaggctgaaaccagcgttccggcagacagcgtccaaagcagctcatctgctccggcagcccctgctgagttgaacgaaggtgtgaactacactgtattgtctacgcctattccgcaacagcaggccggtaaaatcgaagtattggaatttttcggctacttctgcccgcattgcgcccatcttgagccggtcttgagcgagcacatcaaaacgtttaaagacgatacctatatgcgccgggagcatgtcgtgtggggtgatgaaatgaaacctttggcacgtttggcggccgcagtggaaatggccggtgaatcagataaagccaacagccatattttcgatgcgatggttaatcaaaaaatcaatctggccgataccgataccctgaaaaaatggctgtccgagcaaacagcgtttgacggcaaaaaattattggctgcatttgaggctcctgaaagccaagcgcgtgcggctcaaatggaagagttgaccaataaattccaaatcagcggcacaccgactgtgatcgtcggcggcaaataccaagttgaatttaaagactggcagtccggtatgaccacgattgaccagttggtggataaagtacgcgaagagcagaaaaagccgcaataa

SEQ ID NO: 40592 - DNA, 624 bp, Neisseria meningitidis; identical to SEQ ID NO: 37310

SEQ ID NO: 40593 - DNA, 723 bp, Neisseria meningitidis; identical to SEQ ID NO: 38771

SEQ ID NO: 40594 - DNA, 867 bp, Neisseria meningitidis
atgaaagcaaaaatcctgacttccgttgcactgcttgcctgttccggcagcctgtttgcccaaacgctggcaaccgtcaacggtcagaaaatcgacagttccgtcatcgatgcgcaggttgccgcattccgtgcggaaaacagccgtgccgaagacacgccgcaactgcgccaatccctgctggaaaacgaagtggtcaacaccgtggtcgcacaggaagtgaaacgcctgaaactcgaccggtcggcagagtttaaaaatgcgcttgccaaattgcgtgccgaagcgaaaaagtcgggcgacgacaagaaaccgtccttcaaaaccgtttggcaggcggtaaaatatggcttgaacggcgaggcatacgcattgcatatcgccaaaacccaaccggtttccgagcaggaagtaaaagccgcatatgacaatatcagcggtttttacaaaggtacgcaggaagtccagttgggcgaaatcctgaccgacaaggaagaaaatgcaaaaaaagcggttgccgacttgaaggcgaaaaaaggtttcgatgccgtcttgaaacaatattccctcaacgaccgtaccaaacagaccggcgcgccggtcggatatgtgccgctgaaagatttggaacagggtgttccgccgctttatcaggcaattaaggacttgaaaaaaggcgaatttacggcaacgccgctgaaaaacggcgatttctacggcgtttattatgtcaacgacagccgcgaggtgaaagtgccttcttttgatgaaatgaaaggacagattgccggcaaccttcaggcggaacggattgaccgtgccgtcggtgcactgttgggcaaggcaaacatcaaacctgcaaaataa

SEQ ID NO: 40595 - DNA, 1650 bp, Neisseria meningitidis
atgaaacaatccgcccgaataaaaaatatggatcagacattaaaaaatacattgggcatttgcgcgcttttagccttttgttttggcgcggccatcgcatcaggttatcacttggaatatgaatacggctaccgttattctgccgtgggtgctttggcttcggttgtatttttattattattggcacgcggtttcccgcgcgtttcttcagttgttttactgatttacgtcggcacaaccgccctatatttgccggtcggctggttgtatggtgcgccgtcttatcagatagtcggttcgatattggaaagcaatcctgccgaggcgcgtgaatttgtcggcaatcttcccgggtcgctttattttgtgcaggcattatttttcatttttggcttgacagtttggaaatattgtgtatcgggggggggggtatttgctgacgtaaaaaactataaacgccgcagcaaaatatggctgactatattattgactttgattttgtcctgcgcggtgatggataaaatcgccagcgataaagatttgcgagaacctgatgccggcctgttgttgaatattttcgacctgtattacgatttggcttccgcgccggcacaatatgccgccaagcgtgcccacattttggaagcagcaaaaaaagcgtcaacatggcatatccgtcatgttgcgcccaagtataaaaattatgttgtggttatcggtgagagcgcgcgttcggattatatgaatgtttacggtttcccattgcccgatacgccttttttgagtcagaccaaagggctgttgataaacggttaccaatcgaccgcccacgcgacgaatctttcgctgccgcagactttggggctgccgggagaaccgaataataacatcgtcagcttggcgaagcaggcgggttttcggacggcgtggctgtctaatcaaggaatgttggggcattttgccaacgaaatttccacctatgccctacgcagcgattatccgtggtttacccaaaggggtgattatggcaaaagcgcggggttgagcgaccgccttttgttgccggcgttcaaacgggttttgataggaaatgcaggcacgaagcctcggctgattgtgatgcacctgatgggttcgcacagtgatttttgcacacgtttggataaggatgcgcggcggtttcagtatcaaactgaaaaaatatcctgctatgtttccaccatcgcgcaaaccgataaatttttagaagatacagttaagatattgaatgaaaataaagaaagctggtctttggtttacttttccgaccacggtttgatgcatgtcggtaaaggcggcgagcgaacgttgacacatggtgcgtggaagcgtcaaagctacggcgtgccgctggttaaaatttcgtccgatgacacgcggcgcgaaatgattaaagtgaggcgcagcgcgtttaattttttacgcggattcggcagttggacgggtatcgaaaccgacgagttgcccgatgacggctatgatttttgggggaatgttcccgatgtgcagggcgaaggcaataaccttgcctttatcgacggactgcccgacgaccccgcgccgtggtatgcgggaaaaggcaaatcgactaaaaatacgtctaaaaaatga

SEQ ID NO: 40596 - DNA, 345 bp, Neisseria meningitidis
atgcggcgaaaagcgttattatatagcaaacggcatgactttttgacacggtcggacaagcagcccgatgcgatgaaacatccgtccctatgccgccgcaaccgatccatactttttcagacagccctaaccccgcttcccgatatgataggcagacttttccgtatttttttctttttcgcacttgccgcgctgattatcaaccgcctcttcagccgcaggcagaaacgcgccctgcgcgatgtcgccaaaatcagcgcatgggtactgctcggtgcagccgccgcgatgctgttttggtatctgtttatgctgtatttcaaacacattccggattcgtattga

SEQ ID NO: 40597 - DNA, 2208 bp, Neisseria meningitidis
atgtttcccgaccaatccgcccccaatctgctgcaaggcttgaatccagaacaactttccgccgtaacctggccgccgcaatctgcccttgtgctggcgggcgcgggcagcggcaaaacccgcgtgctgaccacgcgtatcgcatggctgttgcaaagcggtcaggcaagcgtgcacagcattatggcggtaacgtttaccaacaaagccgccaaagaaatgcaaacccgtttgggcgcgatgattcccgtcaacgtccgcgccatgtggctcggcacgttccacggactctgccaccgttttctacggctgcaccaccgcgacgcaggcctgccgtcttcctttcaaattctcgacagcggcgaccaactttccctgattaaacgcctgctcaaaagcctcaacatcgccgaagaaatcatcgcaccgcgttcgctgcaaggctttatcaacgcgcaaaaagaatccggtttgcgcgcttccgtcttgagcgcgcccgacccgcacacaagccgcatgatcgaatgctacgccgaatacgacaaaatctgccaacgcgaaggcgtggtcgattttgccgaactcatgctccgcagctacgaaatgctgcaaagcaacgaaatcctgcgccagcattaccaaaaccgcttcaaccacattctcgtcgacgagttccaagacaccaacaaactgcaatacgcctggctcaaactcatggcgggcggaaacgcagcggtatttgccgtcggcgacgacgaccaaagcatttaccgtttccgtggcgcaaacgtcggcaacatgaccgcgctgatggaagaattccacatcgacgcgcccgtcaaactcgaacaaaactaccgctccgtcggcaacatccttgccgccgccaatgccgtgattgaaaacaacgacgaacgactcggcaaaaacctgcgcaccgacgccgaagcaggcgacaaaatccgctactactccgcctttaccgacctcgaagaagcccggttcatcttggacgaaaccaaagccctcgaacgcgaaggctgggatttggacgaaatcgccgtcctctaccgtagcaacgcccaatcccgcgttatcgaacaaagcctgttccgcagcggcattccctacaaaatctacggcggcttgcgtttttacgaacgccaagaaatcaaacacgcgctcgcctacctgcgcctcgccgtcaatcccgacgacgacaacgccctcttgcgtgtcatcaacttcccaccgcgcggcatcggtgcacgtaccgtcgaaaatcttcagacggcctcaaacgaacaaggcatcaccctctggcaagccgcctgcaacgccggcgcgaaagccgccaaagtcgtcgccttcgtccgcctgattgaagccctgcgcaaccaagtcggacaactgtccctgtccgaaatcatcgtcggcatcctcaaagacagtggcttgaccgaacactaccgcacccaaaaaggcgacaaccaagaccgtctcgacaaccttgacgaactcgtcaacgccgccatcgagttcaaacccgaagacagcaacttcgaaatcctgcctgaaaacatttcagacgatcccgccttccccatcctcgctttcttgagcaacgccaccctcgaatccggcgaaaaccaagcaggcgtgggcgaaaaagccgtccaactcatgaccgtccacgccgccaaaggcttggaatttaacgccgtcttcctcaccggtatggaagaaggccgtttccccagcgaaatgagccttgccgaacgcggcggcctcgaagaagaacgccgcctcatgtacgtcgccatcacccgcgcccgcaaacgcctctacatcaccatggcgcaacaacgcatgctgcacggacaaacccaattcggcatcgtctcccgcttcgtcgaagagatcccacccgaagtattgcactacctgtccgtcaaaaagcctgcctacgacagttacggcaacacgcgccaaaccgccgcatccaaagacaaaatcatcgacgactacaaacagccccaaacctacgcaggtttccgtatcggacaaaacgtccgccacgccaaatttggcaccggcgtgattatcgatgccgcagataaaggcgaatccgcccgactgaccatcaatttcggcaaacagggcgtgaaagagttggacaccaagtttgcgaaattggaagagatgtag

SEQ ID NO: 40598 - DNA, 870 bp, Neisseria meningitidis
gtgaaaggactcgactattgccgtcaaaaagcagaagaaagccgctccagttttttatcgggcttccgtttcctgactcagaaaaaacgggatgcggtaacggttttatatgctttttgccgcgaattggacgatgtggttgacgaatgttccaaccccgatgttgcacaggcaacattgaactggtggcgcggcgatttggacaaggtgttcggtggcgagatgccggaacaccccgtcaatcaggccttgcagcaggttaaggaaaccttcaagctgccgaaatatgaactggaagccttaatcgacgggatgcagatggatttggctcaggcgcgttacggcagttttgaagaattgaaactgtattgccaccgcgtcgcgggcgtggtcggctgcctgattgcgcggattttggggttttcagacggcaaaacgctggaatacgccgacaaaatggggcttgcgctgcaactgaccaacatcatccgcgatgtcggcgaagacgcccgtaatgggcggatttacctgccgatggaggaaatgcagcggtttgatgtccccgcaagtgtgattttgcagtgccggccgacagaaaatttcaccgaattgatggcattccaaataaagcgtgcgcgtgaaacctaccgtgaagccgtatcgctgctgcctgatgccgataaaaaagcccaaaaagtcggactggttatggcggcggtttattacgcgcttttaaacgaaatcgaccgggacggcgcgcaaaacgtcctcaaatacaaaatcgccctcccttcgccgcgcaaaaaacgcattgccctgaaaacctggttattcggattcaaaccgcgccccggcacgccggaacgggca

SEQ ID NO: 40599 - DNA, 387 bp, Neisseria meningitidis
atgagcaacaacatcccggcagaactgaaatacgttgccagccatgaatggctgcgccttgaagaagacggtaccatcaccgtcggcattacccaccacgcgcaagagctgttgggcgacatcgtgtttgtcgagctgcccgaagtcggcgcaaaccttgccgctgaagagcaagccggtgtggttgagtctgtaaaagccgcatctgacgtgtatgcgccgattgcgggcgaagtcgttgccgttaacgaagatttgccaagtgctccggaaactgccaacagcgatccttacggtgcaggctggttcttcaaactcaaaccggcaaacgttgccgattacgacgttctgctgactgccgaacaatacgcgggcgaagtggattaa

SEQ ID NO: 40600 - DNA, 762 bp, Neisseria meningitidis
atgatgggcgattccgtcatttattatgtagaacaggcagacgaaccggtaaaccgtgccggcgaacgcgcccgtaaaacattcaaatatttttggcgcgagcttttttgggaacgccgccgcatcattcccgccttagattttgccatggtcaaagccccttttttccaagacggcgaagacggcgaaatttgcgaacatatgtggatcgacgatatttattttgacggtctttacatttatggcgtgctgaacaatgaacccggcgaactgaccaatgtcgaacaaggcgaaagcgtttgcattccggttgacgacatcagcgactggatgttcgtgtgcaacggcattccctacggcggctttaccatacaggcaatgcgtggacagatgacggaagaggagcgtaccgaacacgatgccgcatggggaatcgatttcggcgatcccgggcaggtattgctggtgtatgaagaaaaagaacatcccgaaaatctggaagagcatccgatgtgccggaactgtattgacgattttcggcaacagttgtcccaaaatccggattttctgcatgagcaggacgaagacggctatacgccgcttcatcatgacgccatcgcaggaaatgcacttatggttaaagctatgcttgaatacggcgcaaatcctgcctcaacgacatcggaaggctataccgccctcgattttgcccgcctgacgggctggcaaaatgttgccgacctgcttgaaccgcgacattag

SEQ ID NO: 40601 - DNA, 240 bp, Neisseria meningitidis
ttggcaaacggtaaaaatggaacactctatatcggtgttaccatgaatttgccggaaagggtttggcagcacaaaaaccatgtcaatattgatggctttactgcccgatatgatgtgcatgatttagtttggtatcagttttttgagaatatgcctgaagcagttgccaaagaaaaaacgatgaaaaaatggcgacgtgaatggaagattaaactgattgaagaacaaaatcctgaatga

SEQ ID NO: 40602 - DNA, 258 bp, Neisseria meningitidis
atgaaacccagaaatctcttttttgcaggctgcctgctgacttcggcgacgtttgccgaggatatcggcgtacctgtcgaactgattaacgtcggtaatcggattgcgatgccgtctgaaggggaaagcctcgccctcctgccgtttgccgaggatgtaccgccggttcgcgatgcaatgccgtctgaagttcctaaaagcgcggcaggcggcgatgttcggggtaaccggatgggaatgccgattaacatcggatga

SEQ ID NO: 40603 - DNA, 1863 bp, Neisseria meningitidis
atggctcttttgcagatttcagaaccgggtatgtccgccgccccgcaccgacaccgtttggcggcaggcatcgatttgggtacgaccaacagcttggttgccaccgtccgcagcggcagtgcagcctgcctgcccgataccgacgggtgcgttaccctgccttccgtcgtccgttatttggaaaacggcggcattgaagtcggcaaaaccgccctgtccgcgcaaaaatccgacccgctgaacaccgtcagctctgccaaacgccttatcggacggacgcttgccgatctgcatcaaaatacgcattacctgccttaccgtttcggcgacaatcaacgcgttatcgaactgcatacgcggcagggggtgaaaacgcctgtcgaagtgtcggcggaaatcctcaaaacccttaaatcgcgcgccgaagaaaccttgggcggcgatttggtcggcgtggtgattaccgtccctgcctatttcgatgatgcccaacgccaagccaccaaagatgccgcgcgtctggcgggtttgaacgtattgcgcctgctcaacgaacccaccgctgccgcaatcgcctacgggctggacaacgcctcggaaggcacgtttgtcgtgtacgacttagggggcggcacattcgacgtatccgtattgcaactgaccaaaggactgtttgaagtcaaagccaccggaggcaacagcgcgttgggcggcgacgatttcgaccatcgtttgttctgctatctgctcgaacaaaacggactctcccaactcaacgaacaagacagccaactcctgctctcgctcgtccgcgccgccaaagaacaattaaccacgcaaaccgaagcgcgcattcaggcgacgctttcagacggcatggcaatcgacacaagcatcagtcgcgccgagttccacaacctgacgcagcatttggtgatgaaaacgctcgagccggtcaaacaggcgttgaaagatgccggtgtcggtaaaaacgaagtcaaaggcgtgattatggtcggcggttcgacccgtatgctgcacgttcaacaggcagtcgccaccttcttcggacaaaccccgctgaacaacctcaatcccgacgaagtcgtcgcgctcggcgccgccatacaggcaaacgtcctcgcaggcaacaaaaccgacggcgaatggctgctgctggacgttacacctttgtcgctcggtttggaaacctacggcggcttggcggaaaaaatcatcccgcgcaattccaccatccccaccgcgcgcgcgcaggactttaccaccttcaaagacggtcagaccgcgatgacgatacacgtcgtacaaggcgaacgcgaactggttgccgactgccgcagccttgccaaattcaccctgcgcggcattccgcctatggcggcgggtgcggcgcgtatccgcgtaaccttccaaatcgatgcggacgggctgctgtccgtttccgcccaagagcaaagcaccggcgtacacgcgcaaatcgaagtcaaaccttcctacggcttggacgacgacaccatcacccaaatgctcaaagacagcatgagcaatgccgccgaagatatggcggcacgcgcccgtgccgaagccgtggtcgaagccgaaagcctgaccgatgccgtcaacgccgccctcgagttggacagcgatttgctggatgccgaagaattgcaacagattcggcaaggcatcgccgatttgcaaggccgtctgaaagacggaaaagccgaagacatccgtgccgccgccgccaaactcggcagcatcaccgacaatttcgccgccaaacgcatgaaccgcaacatccaacgcgcgctgacaggccagagtgtcgataatatttga

SEQ ID NO: 40604 - DNA, 1836 bp, Neisseria meningitidis
gtgaacactactcctatccactccaaactcgccgaaatcaccgggcgcattattgaacgcagccgtccgacgcgtgaaaaatatctggcgaagatccgcagtgccaaacaaatgggacgcttagagcgcaaccagctcggttgctccaacttggcgcacggctatgctgccatgcctaaaagtatcaaaatcgaaatgcttcaggaaaccgtccccaacttaggcatcatcaccgcctacaacgacatggtttccgcacaccagccgtttaaagacttccctgaccaaatcaaagacgaagcgcagaaaaacggcgcgaccgcccaagtcgccggcggcacacccgccatgtgcgacggcatcacgcaaggctacgccggtatggaactgtcgctgttctcccgcgacgtgattgccatgagtaccgccgtcgggctgtcgcatcaaatgtttgacggcagcctgtttatgggcgtatgcgacaaaatcgttccaggtttgatgatcggcgcgctttcgttcggtcatattccgggtatcttcgtccccgcaggcccgatgtccagcggcatcggcaacaaagaaaaagcccgcacccgccagcttttcgccgaaggcaaagtcggacgagacgaacttttgaaaagcgaaatgggttcttaccacagcccgggcacctgcactttctacggcacggcaaactccaaccaaatgatgatggaaatgatgggcgtacacctgcctgccgccgccttcgtccacccttacaccgacctgcgtgaagccctgacccgctatgccgccggacacctcgcgcgcggcatcaaaaacggcacgattaaaccattgggtgaaatgttgaccgaaaaatctttcatcaacgccctaatcggcctgatggcaaccggcggctcaaccaaccacaccatgcacctcgttgccatggcacgcgccgccggcgtgattttgaactgggacgactttgacgaaatttcttccatcatcccattgctgatccgtgtgtaccccaacggcaaagccgacgtaaaccactttaccgctgccggcggcctacctttcgttatccgcgaattgctgaatgcaggcctgttgcacgacgatgtcgataccgtcgtcggacacggtatgcgccactacaccaaagagcctttcctcatcgacggcaaactcgaatggcgcgaagcccccgaaaccagcggcaacgacgacatcctgcgcaaagctgacaacccgttctcccccgacggcggtctgcgcctgatgaaaggcaacatcggacgcggcgtgattaaagtgtccgccgtgcgcgaaggctgccgcattattgaagcgcctgccatcgtgttcaacgaccaacgcgaagtattggctgcgtttgaacgcggcgagttggaacgcgatttcgtctgcgtcgtccgctaccaaggcccgcgcgccaacggtatgcccgaattgcacaaactgaccccgcctttgggcatcctgcaagaccgcggcttcaaagtggcgctgctgaccgacggccgtatgtccggcgcgtccggcaaagttccagcctccatccacatgacacccgaagccctgatgggcggcaacatcgccaaaatccgtaccggcgacctgatccgcttcgactccgttagcggcgaactcaacgtcctgattaacgaaaccgaatggaatgcccgcgaagtcgaaagcatcgacttgggcgcgaaccaacaaggctgcggccgcgaactcttcgccaacttccgcagcatgaccagcagcgcggaaaccggtgccatgagtttcggcggcgaatttgcctga

SEQ ID NO: 40605 - DNA, 711 bp, Neisseria meningitidis
atgtctcctgttttgtatttgattcctacgcctttgggtacgcctgacacgccgtgcctgttgccgcatgaacaacaggcgattgtcgggctgacggattttgtcgtggaagcggaaaaaacggcgcgcgcgcatttgaaacatttgggcgtgacaatgcctatccgcgaactgaatttgcaaacgctgaatgaacacacggatttgaagactttgccggaattgctgaaacctttgcaggaagggcgcagtatgggcatcgtcagcgaggcgggttgcccggctgttgccgatccgggtgcgaatctggtggctttggcgcataaacacggttttgaagtgcgtccgctggttgggccttccagcctgctgctggctttgatggcttcgggtgcgaacgggcagagttttgcgtttaagggttatctgccgtctgaaaaaaacgagcggattcagagtttgaaggctttggagcaacgttcgcgccagcagaatgaaacgcagctgtttatcgaaacgccatatcgcaacgatgcgttgttggcggatgcggtggaaaacctgcattctgaaacgcgcttgtgtgtagctgcggatttgacgttgccgactcaggaaatcatcagccagacggttgtgcagtggcgaaaaagaaaagaaatgcccaatctgaaaaaacgcccgacgatttttgtgatgtatgcaggttga

SEQ ID NO: 40606 - DNA, 573 bp, Neisseria meningitidis
atgatggtacggcgtttgataatcggcatcagtggggcgagcggtttccaatacggcgtgaaggctttggaacttttacgtgcgcaagatatcgaaacgcaccttgtggtatcgaaaggtgcggagatggcgcgcgcttcggaaacggcttatgcgagagatgaggtatatgccttggcggacttcgtgcatccgatcggcaatatcggggcgtgcattgccagcggtacgtttaaaacggacgggatgctggtcgccccctgttcgatgcggacgcttgcctcggtcgcgcacggcttcggcgacaacctcttgacgcgtgcggcggatgtggttttgaaggaaaggcggcggctggtgctgatggtgcgcgaaacgccgctgaaccttgcccatttggacaatatgaagcgggtaacggaaatgggcggcgtggtgtttccccctgttcctgcgatgtaccgcaaaccgcagacggcggacgacatagtggcgcacagtgttgcacacgctttgtcgctgttcggaatcgatacgccggattcggcggaatggcagggaatggcggattaa

SEQ ID NO: 40607 - DNA, 816 bp, Neisseria meningitidis
gtggcaaaaattattgtagtaacttcaggtaagggcggtgtcggtaaaacgactaccagtgccagtattgcgacaggtttggcattacgcggatataaaactgcggtaattgattttgatgtgggtttgcgtaacctcgacctcattatgggttgcgagcgtcgtgtcgtttatgacctgatcaatgtcattcagggggaggcgacgctcaaccaggctttgattaaagataaaaattgtgaaaacctgtttattttgccggcttcccagactcgggataaagacgctttgacacgcgagggcgtagaaaaagtgatgcaggagctgtccggcaagaaaatgggctttgagtatattatttgcgactctcctgccggtattgagcagggtgcattgatggcgttgtattttgctgatgaagccattgtaacgaccaatcctgaggtttccagtgtgcgtgactccgacaggattttgggaattttgcaaagcaaatcccataaggcagagcaaggcggttcggttaaagaacatctgttgattacgcgttattctcccgaacgtgtggcaaaaggcgaaatgctgtctgtacaggatatttgcgatattctgcatattcctttgctgggtgtgattcctgaatcccaaaacgtcttgcaggcatccaattccggagaaccggtcatccatcaggacagcgtggcggcttccgaggcatataaggacgttattgcccgtcttttgggcgagaaccgtgaaatgcgtttcttggaagctgagaaaaaaagcttcttcaaacgtctgtttggaggataa

SEQ ID NO: 40608 - DNA, 2058 bp, Neisseria meningitidis
atgcccgaacaaaaccgcatcctctgccgcgaactaagcctgctggcattcaaccgccgcgtgttggcacaggcggaagacaaaaacgtcccccttttggaacgcctgcgcttcctgtgcatcgtgtcgtccaatcttgacgagtttttcgaagtccgcatggcgtggctcaagcgtgaaaacaagctgcacccccggcgcaggctggacaacggcaaaatgccgtctgaaaccatcgccgacgttaccgaagcggcgcgctccctgatacggcaccagtacgacctgttcaacaacgtccttcagcccgagttggcgcgggaaagcatccatttttaccgccgccgcaactggacgggcgcgcagaaaaaatggatcgaagactatttcgaccgcgaactgctgccgatcctgacccccatcggactcgacccgtcccaccccttcccgcgaccgctgaacaaatcgctcaacttcgccgtcgaactcgacggcacggacgcattcggcaggccttcggggatggcgattgtgcaggcaccgcgcatcctgccgcgcgtcgttcccctgccgtccgaactgtgtggcggcggacacggcttcgtcttcctgtcgtccatcctccacgcccacgtcggcaaactcttcccgggcatgaacgtcaaaggctgccaccagttccgcctgacgcgcgacagcgacttgaccgttgacgaagaagacctgcaaaacctccgcgccgccatccaaaacgaactgcacgaccgcgaatacggcgacggcgtgcggctcgaagtcgccgacacctgtcccgcctacatccgcgactttctgctcgcgcaattcaaactgaccgccgccgaactctatcaggtcaaaggcccggtcaacctcgtgcgcctcaacgccgtccccgacctagtcaaccgccccgatttgaaatttcccacacacacgccgggcagactgaaagccttgggcaaaaccgcgtccatattcgatttggtgcgccaatcgcccatcctgctgcaccacccctaccaatcgttcgaccccgttgtcgaaatgatgcgcgaagctgccgccgaccccgacgtgcttgccgtcaaaatgacgatttaccgcaccggcacgcgttccgaactcgtccgcgccctgatgaaggcggcactcgccggcaaacaagtaaccgtcgtcgtcgaactgatggcgcgttttgacgaagccaacaacgtcaactgggcgaagcagctcgaagaggcgggcgcgcacgtcgtgtacggcgtgttcggctacaaagtccacgccaagatggcactggtcatccgccgcgaagacggcgtactcaagcgttacgcccacctcggcacgggtaactaccaccaaggcacatcgcgcatctacaccgacttcggcatcattaccgccgacgaacaaatcaccgccgatgtgaacacattgtttatggaaatcacaggcttgggcaaacccgggcggctgaacaaactctaccaaagcccgtttaccctgcacaaaatggttatcgaccgcatcgcacgcgaaaccgaacacgcaaaagccggcaaaccggcgcggattaccgccaagatgaattcgctcatcgaaccgaccgtcatcgaagccctgtatcgggcaagcgcggcaggcgtacaaatcgatttgattgtgcgcggtatgtgcaccttgcgcccgggtgtaaaaggcttgtccgaaaacatccgcgtccgctccatcatcggcaggcagctcgaacacgcgcgcgtgtattgcttccacaacaacggcgcggacgatacctttatctccagcgcggattggatggggcgcaacttcttccgccgcatcgaaaccgccgcgccgattaccgcgcccgaactcaaaaaacgcgtcatccgcgaaggtttggaaatggcattggcagacaatacgcacgcgtggctgatgcagcccgacggcggctatatccgcgccgcacctgccgagggcgaatccgaagccgacctgcaaaacgatttgtggacactgctcggaggctga

SEQ ID NO: 40609 - DNA, 843 bp, Neisseria meningitidis
atgattcaacacgcaggcttgggctaccgccgcgacttggcggaagactttctctcgctttccgaaaacagcccgatatgctttatcgaagccgcaccggaaaactggctgaaaatgggcggctgggcacgcaaacagtttgaccgtgtggcggaacggctgccgctggcgttgcacggattgtctatgtcgctgggcgggcaagcaccgctggatactgatttgatagacggcatcaaagaaatgatgcgccgttacgattgcacgtttttctccgaccatttgagctactgccacgacggcggtcatctttacgatttgttgccgctgccctttaccgaggaaatggtgcatcatacggcgcggcgtatccgcgaagtgcaagaccgtttgggctgccgcatcgccgtggaaaacacgtcctactatctgcattccccgcttgccgagatgaacgaggtcgagttcctcaacgcggttgcacgtgaggccgattgcggcattcatctggacgtgaacaatatctacgtcaacgccgtcaatcacggcctgttgtcgccggaggcttttttgaaaaacgttgacgcagatcgcgtgtgctatatccatattgccggacatgacgtggaaacgccggaattgttgattgatacacatggcgcggcagttttgccgactgtttgggacttgctcgaacttgcctatgccaagctgccgacgattccgcccaccctgttggaacgcgattttaatttcccgccttttgccgaactcgaagccgaagtcgccaaaatcgccgattatcaaacgcgtgccggaaaggaatgccgccgtgcagcctga

SEQ ID NO: 40610 - DNA, 1065 bp, Neisseria meningitidis
atgttggtattaggaatcgagtcttcttgcgacgaaacaggtgttgcgctttacgatacggaacgtggattgcgggcgcactgcctgcacactcaaatggcaatgcacgccgaatacggcggggttgtgccggaattggcaagccgcgaccatatccgccgccttgttccgttgactgaaggctgtttggcgcaggcaggcgtatcgtatggcgacattgacgcggttgcctttacgcagggacccggtttgggcggtgcgctgctggcgggttcgagctacgccaatgcactggctttggcattgggcaagcccatcatccccgtccatcatttggaaggacatctgctgtcgccgctgttggcggaggaaaaacccgactttccttttgtcgcgctgttggtttcgggcgggcatacgcagattatggcggtcaggggcataggcgactacgcgcttttgggcgagagcgtcgatgatgcggcgggcgaggcattcgacaaaacggcgaaactgctgggcttgccgtatccgggcggtgcgaaactgtcggaacttgcggaatcgggcaggcccgaagcgtttgtttttccgcgcccgatgattcattccgacgatttgcagatgagtttttcaggtttgaaaaccgccgtattgaccgccgttgagaaagtgcgcgcggaaaacggggcggatgacattcctgagcagacacgcaacgacatctgccgtgcgtttcaagatgcggtagtcgatgtgttggcggcgaaagtgaaaaaagccctgttgcagacagggttcagaaccgtagtggtcgccggcggggtcggtgcaaaccgcaaactccgtgaaactttcggcaacatgacggtgcaaatcccgacccccaaaggcaagccgaaacatccgtccgaaaaagtcagcgtgtttttcccgccgacggcatactgcacggacaacggtgccatgattgcctttgccggtgcgatgcacctgggcaagggcagggaggtcggtgcgttcaatgtccgtccgcgctggccgctgtcggaaatcgtcagatga

SEQ ID NO: 40611 - DNA, 873 bp, Neisseria meningitidis
atgcccattttgaaccatattgccctcatcggtgtagggctgatcggcggttcgttcgttctcgacctcaaaaggcagggactcgtccgcaccgttaccggtatcgacaccgaccgcgacaacctcgaacgtgcattggaacgcggcgtgattgaccgggcttccgttgccatcgacgcggacagcatcggtggtgcagacttggtactgattgccacgcccgtcgccacctttcccgccattttgaccgcgctgcgccccgttttgccggaacacacttggatttccgatgtcggcagcaccaaatcttcggtcatcgaagccttccgccgctgtctgcccgaccgcctgcaccgctgcatcgccgcccacccgattgccggttcggacagaagcggtgcgcaagccgcgcagttcgggctgttccgccacagaaaactcatcatcacgccacacggcggcgaacattcagacggcattgccttgatagaaaacctgtggcacgcggtcggtgcggaaatttatacgatggacgcgcaacgccacgacgcggttttcgccgccgtctcccatatgccccacctgaccgccttcgcctatgtccaccagattctcgaccaccccgacggacaggaatatctgaaattcgccgccacgggctttcgggacttcacccgcatcgcctccggtcatcccgccgtgtgggcggacatctgccttgccaacaaagacagcctgctgcaactggttcaaggcttgggcaaacagttggacgttttggcagacatcctgaccgccgacgaccgcgaagccctgtaccgctattttgaagaagccaaaaccacacgcgaccgctggctggacggcaactga

SEQ ID NO: 40612 - DNA, 824 bp, Neisseria meningitidis
ttgttaattcactatatcgacatcgccaaacgaaacttcgtcatcaaaggtatcgcccatactatcgaataccttaaaaaacacaaggtcgccctcgtcgtgacggaaagtaccggcggtctcgaaatcctcgccgccaaagccatccgccgggcaggcatagccgtgattatcgccaacccgcgtcagacgcatcagtttgcccaatcgcagccgctgaccaaaaccgacgccaaagatgccaaaatgcccgccttcttcacacagatgatgacgcagaaagaagattggcaaaccatgccctaccacccgcccaccgaagcggaagaagtgttggaagccttaaacaactgattgcccattttgaccggctgattgacgaatcggacaaacaaatcgacgaccacacccacacgcattttgacggcaaagcccaagtggcggagcaaatcaaaggcatcggttcgataacgacggctacgctgatggcgatgctgcccgaattgaggcggctgtcgcacaaacggatagcgggtttggccggcattgccccgcacccgagagagagcggggaaaccaaattcaaaagccgctgctttggcggaaggtctgcggtgcgtaaggcactgtatatggctaccgtggtagcgacacgttttgaaccgcttattcgggatttctaccaacgcctgctgtccaagggtaagccgtataatgttgccgttacggcatgtatgcgtaaactgctgacgatatcgaatgcccggatgcgtgattattttgccgaaaacgataccgccgaaaacggtatccggacggcttga

SEQ ID NO: 40613 - DNA, 966 bp, Neisseria meningitidis
atgagctacacgcaactgacccaaggcgaacgataccacatccaatacctgtcccgccactgcaccgttaccgaaatcgccaaacagcttaaccgccacaaaagcaccatcagccgcgaaatcagacggcaccgcacccaagggcagcaatacagcgccgaaaaagcccagcggcaaagccggactatcaaacagcgtaagcgacaaccctataagctcgattcgcagctgattcagcacatcgacacccttatccgccgcaaactcagtcccgaacaagtatgcgcctacctgtgcaaacaccaccagatcacgctccaccacagcaccatttaccgctaccttcgccaagacaaaagcaacggcagcacgttgtggcaacatctcagaatatgcagcaaaccctaccgcaaacgctacggcagcacatggaccagaggcaaagtacccaaccgtgtcggcatagaaaaccgacccgctatcgtcgaccagaaatcccgtatcggcgattgggaagccgacaccattgtcggcaaaggacagaaaagcgcattattgaccttggtcgaacgcgttacccgctacaccatcatctgcaaattggatagcctcaaagccgaagacactgcccgggcagctgttagggcattaaaggcacataaagacagggtgcacaccattaccatggataacggcaaagagttctaccaacacaccaaaataaccaaagcattgaaagcggagacttatttttgtcgcccttaccattcttgggagaaagggctgaatgagaacaccaacggactcatccggcaatacttccccaaacaaaccgatttccgtaacatcagtgatcgggagatacgcagggttcaagatgagttgaaccaccgaccaagaaaaacacttggctacgaaacgccaagtgttttattcttgaatctgttccaaccactaatacactag

SEQ ID NO: 40614 - DNA, 432 bp, Neisseria meningitidis
atgagcagcaacgcatggctgttttgggcattggcatcggcaggcttcgcctcattgaccgccatcttcgccaaaatgggtttacagggtatagattcggatttcgctaccttcatccgcaccttggtcatcctcgccgctttgttattgtttttgacctacaccggcaaatggcagggcgtgaacggctttacggggcacaactggacattccttatcctatccggccttgctaccggcgcatcttggcttgcctacttcaaagccctgcaactgggtaacgcctcgcaagtcgcccccgtcgataaattcagcctggttctggtcgccctgatggcagtagtcttcctcaacgaacgccccagcacgcaggaatggataggcttggggctggtaacggcgggcgtgttggtgctggcgttgaaacgttaa

SEQ ID NO: 40615 - DNA, 822 bp, Neisseria meningitidis
atgaaaccctattccgccaatcccaacctgaccgaaccgcgccggctgcgcgtgttgctgattgccgccgcgctgggctttctgctgctgatgctggtcgtgccgctcgtcgccgtgttttacgaagccttaaaaggcggttgggatttgtacctaaaatccttaaacgatcccgaagcgtggtctgccatcaaattgacgctgattaccgcgctgattgtcgtccccgtcaatgccgtcttgggcgtggcgatggcgtggctgctgacccgttttgattttcgcggcaagcagttgctgactaccctgctcgatttgccgttttccgtatcgcccgtggtggccggtttaatgttcgtcttattgttcggcgcgcacacggcattgggcggccggctcgaagcgcaaggcatacagattatcttcgccatccccggtattgttttggcgacgctgttcgttaccttcccctttgtcgcacgcgaaatcatcccgctgatgcaggcacagggcgacagcgaagaacaggcggcattgatactcggcgcaagcggctggcagatgttttggcgcgttaccctgcccaacatcaaatgggcattactctacggcatcatcctcaccaacgcccgcgcgatgggcgagttcggcacggtcagcgtggtatcgggacacatacgcggcgaaaccaacaccgtcccgcttttggtcgaaatcttctacaacgaatacaacttcaccggcgcattcgccctctccggcgtattggcacttttagcactggcgacgctggcggtgcagaacatcatcaccaaattatag

SEQ ID NO: 40616 - DNA, 666 bp, Neisseria meningitidis
atgagaaaaagtcgtctaagccggtataaacaaaataaactcattgagctatttgtcgcaggtgtaactgcaagaacagcagcagagttagtaggcattaataaaaataccgcagcctattattttcatcgtttacgattacttatttatcaaaacagtccgcatttggaaatgtttgatggcgaagtagaagcagatgaaagttattttggcggacaacgcaaaggcaaacgcggtcgcggtgctgccggtaaagtcgccgtattcggtcttttgaagcgaaatggtaaggtttatacggttacagtaccgaatactcaaaccgctactttatttcctattatccgtgaacaagtgaaacctgacagcattttttatacggattgttatcgtagctatgatgtattagatgtgagcgaatttagccattttagcttcgctgaaacttcgttttcgtatcaatcacagcacacattttgccgaacgacaaaaccatattaatggaattgagaacttttggaaccaggcaaaacgtcatttacgcaagtttaacggcattcccaaagcgcattttgagctgtatttaaaggagtgcgaatggcgttttaacaacagtgagataaaagttcttgttccattttaaaacaattagtaaaaccgagttta

SEQ ID NO: 40617 - DNA, 807 bp, Neisseria meningitidis
atgaaaagctcttttgtgcaaacgcttaccatcgccggttcggattcgggcggcggtgcgggcattcaggcggatttgaaaacgtttcagatgcgcggcgtgttcggaacgtgcgtcatcaccgccgttaccgcgcaaaataccttgggcgtgtcggcggttcatctcgtcccgaccgaaaccatcaccgcacaaatccaagcaatcagggaagactttgacatccgcgcctacaaaataggaatgctcggcacggcggaaatcatcgaatgcgttgccgacaagctgaaacactgcgacttcggcaggcgcgtactcgaccctgtgatgattgccaaaggcggtgcgccgctgttgcaggattccgccgttgcggcactgacgcgcctgctgcttcccgatacggatgtattgacccccaacctgcccgaggcggaagccctgaccggcgtgcatatcgaaaaccgtaaagatgcggaacgtgcggcaaaaatcctgcttgattacggtgtcaaaaatgtcgtcatcaaaggcggacatttgaatggcagcagcagcggacgctgcacggattggctgtttacgcaaaacgaaacgctggaattggacaacccgcgctttccgaccgcccacacgcacggcacgggctgcacgttttctgcctgcattaccgccgagttggcaaaaggcttagacgtttgcaaagccgtacagactgccaaggcctacatcacggcggcaatctcaagccctttggaaatcggcgcgggacacggcccggtcaatcattgggcctatcgggactaa

SEQ ID NO: 40618 - DNA, 405 bp, Neisseria meningitidis
atgaacaccaagccctgccccatctgcacggcacaagatgaagatattttgctgcaaacccccaagctgcgcgtcatcgccgtccataacgacagcggttcgccgacattctgccgcgtcatttggcgtaagcatattgccgaaatgaccgacctttcggcagcggaacgcggcgaattgatggaaatggtgtacaaagtcgaagccgctatgcgccaagtgtttcaacctgccaagattaacctcgccagcttgggcaatgtcgtgccgcacctgcattggcatattatcgcccgctttgaaaacgatgcgtctttccctgcaccgatttgggcaaaccccgtccggaaacacggtatgaccctgccgcaagattggacggaacagcttaaaaagctgctttaa

SEQ ID NO: 40619 - DNA, 519 bp, Neisseria meningitidis
atgactacgcattttgtcgttatgggcgtatgcggctgcggcaagaccaccgccgcgctgtccctgcagaaacacctcggtcaatgtccctatgccgaaggcgacgagttccacacccaagccaaacgcgacaagatgggcgcgggtattccgctgaccgatgaagaccgctatccgtggttgggcaatctgcgcgactggatgacgaaacaggcgcaaaacggtgcgaaccacaccatcgtaacctgttccgccctcaaacgcggctaccgcgacattctgcgcggagccgaaggcaaagctgccttcatccacctcagtccgccgcaagacatcaacctcgagcgcatgatgtcgcgcaaaggacattacatgaaagcagggatgctcgattcgcaactggaaatcctcgaggaactgggcgaaggcgaatacggggtcaaaatcgccaaccccggcacgcccgaagcggtcgaagccgatattctgaactgggttgcctcggaaaacctgctttga

SEQ ID NO: 40620 - DNA, 465 bp, Neisseria meningitidis
atgaaagaactagataaaatcgatttccgcattcttaagatccttcaacagaatgcccgcatcccgatgacggagcttgccgagaaggtaggcttgtccaccacgcccgttacagagagggtgcgccgtttggagcgggaacattatatttccggctatcacgcccatctcaatccccatctgttgggcaaaccgctattggtttttgtcgagctgaagctgcaatccaaatcgggcaatattttcgaagatttcaaaaaagaagtgctgaaaattccgcaaattatggaatgccacttggtgtcgggcgaatacgactatctgattaaagtacgtttgcccgatatgtctgcctatcgggatatgctaggcaatatcctattgcaactgcctgccgcttcggagagtaggagttatgttgtgatggaggaggtcaaagaaaatccagttttggatttggattga

SEQ ID NO: 40621 - DNA, 477 bp, Neisseria meningitidis
atggaaacccgtgcgcagaaaaaacagcggttgatacggctcatccatgtggcgaaatcgcagttgatgatggacgacggcgaataccgcgcactgcttgccaacctctcttgcggcaagacgagcagcaccaagctgtcggtcggggagctggagctggcggtcaaggcgttgcagatgcgcggctttgtggttgccactaaggcgcaggctgcatccggcaagagggatttgccggtgcatatgcccaaccgcatgatggaggcgcaggtcaaaaagatacgcgcgctttggttggagcagcaccatttgggcgcggtacgcaatccgtcggaattgggcctgtcgcggtttgtgaagcggatgacgggcatcgattatcacggatggttggggacggatgacgcggtacgcgttatcgaacatttgaagaagtggaaagcgagggtggaaaatggcggacgaaagagtgcctga

SEQ ID NO: 40622 - DNA, 435 bp, Neisseria meningitidis
atgtgcgggttgtggctgctgcgcgccctgactgcccaattgccccaacagcgttatgcggctttgtttattacactgttttttgccgcagtattggtgttcgggcggcatgattcgatgtattggtatcccgtcctcgtcaatctgatgatgttggcggtgttcggcggcagcctgtttgccggacagacggtcatagaaaggctcgcgcggctgcaacagcccgacctgcctgaaaaagccgtgcgctatacccgccgggtaacgcaggtttggtgcgtattttttataatcaacgggacgcttgccgctttgttggcacggttggggcgatatgattggtgggcggtttataccggcgtgattgcctatgtattgatggggatgccgtttgccggcgaatggctttaccgcaaactcgttttgaaagtctga

SEQ ID NO: 40623 - DNA, 936 bp, Neisseria meningitidis
atgagcgtattgattattgtcgaacacgacaacaaacagttgaatcctaccactttgcatgctgttaccgctgccgctaagctgggtaaaatcgatttattgattgccggaagcggtgcatctgctgtagtagagttcgcaaaacaagtggcgggtgtggaaaaagttttggttgcagatgctgcccattatgccgaaggtttggctgaagagttggctccgctggttgtcaaattggcagcggattactgctatgttgcagcaacggcaactacattcggtaaaaaccttttgcctcgcgtagcagccttattagacgtaccgcaaatttctgatttgaccgaaattgtggataacacgacttttgtgcgccccatttatgcgggtaatgcatttgaaaccgtgcaagctgattcagaaaaattggtgctgaccttccgtgcgacggtttttgacgcagtggcggcgcaaggtggtaatgctgaggtaattaatgttgaagcaacccctgcccaaaacctgagtcgttttgttaaccgtcagctttcccattccgatcgtcctgaactgactcaggcaaaagtgattgtttccggtggtcgtgcgttgggtagtgcggaaaaattcaatgaagtgctgacaccgttggcggatgttttaggtgcggcaatcggtgcatcccgtgcagcagttgatgccgaatatgcgccaaacgatgctcaagtcggacaaaccggtaaagtagttgcgccgcaactctattttgcaatcggtatttcaggtgcgattcaacacgttgccggtatgcaagacagtaaggtgattgttgcaatcaataaagatgctgatgcgccgattttcaatgtagccgattacggattggttggcgatttatttgaaatcgttccacaattaacagaagtattgaaaaattaa

SEQ ID NO: 40624 - DNA, 258 bp, Neisseria meningitidis
ttgccgtactatttgtactgtctgcggcttcgtcgccttgtcctgatttttgttaatccactatatctgcatcagtttcatgaaacgcaagtcggaagcgtcaaacaactgattgcccattttgaccggctgattgacgaattggacaaacaaatcgacgaccacacccacacgcattttgacggcaaagcccaagtggcggagcaaatcaaaggcatcggttcgataacgacggctacgctcggggcgcggggctaa

SEQ ID NO: 40625 - DNA, 471 bp, Neisseria meningitidis
atgtacgatgtcaatacccacgatgtccgccgctttttcgcccgcgtgtggcagcagcggctcaatccgctgcaactgagcgcactggaacagaaagccctccgcattgtcgaagcccatcccgaataccaccgctatctcgaacgcatcgaagaccatctggacaccgactggctgcccgaaaacggcgaaagcaaccccttcctgcatatgtcgctgcatctgtccgtccaagaacaggcgggcatagaccagccgcacggcatacgcgccatccacgacaccctgtgcgccaaacacggctggctggaagccgaacacgaaatgatggaggcactggcggaaacactgtggacggcgcaacgctacggcaccggtttggatgtcaatttctacatgacccgactgcgcaaactcatcggcttgggtgcagaaaatcaagccaggttgaacccgcatgaaatcgcctga

SEQ ID NO: 40626 - DNA, 459 bp, Neisseria meningitidis
atggaaaccccgaaactcagtgtcgaagccattgaaaaaggtacggttatcgaccatattcccgccggcagggggctgaccatcctgcgccagttcaaacttttgcactacggcaacgcggtaaccgtgggcttcaacctgcccagcaaaacccaaggcagcaaagacatcatcaaaatcaaaggcgtgtgcttggacgacaaagccgccgaccgcctcgccctgttcgcccccgaagcggtggtcaataccatcgaccatttcaaggtcgtgcagaagcggcatttgaacctgcccgatgaaattgccgaagtgttccgttgcccgaacacgaattgcgccggccacggcgagccggtcaaaagccggttttatgttaaaaaacacaacgggcagacgcggctgaaatgccattactgcgaaaaaacctacagccgggattcggtggcggaagcctga

SEQ ID NO: 40627 - DNA, 2178 bp, Neisseria meningitidis
atgcaacaaaaaatccgtttccaaatcgaaggcatgacctgccaggcctgcgcttcgcgcattgaaaaagtgttgaacaaaaaagattttgtcgaatcggcgggggtaaacttcgccagcgaagaggcgcaggtagtgtttgacgacagcaaaacctcagtagccgacattgccaaaatcattgagaaaaccggttacggcgcgaaggaaaaaacggaagatacattgccgcaacccgaagcagaacaccatatcggctggcggctgtggctgctgttcaccatcaacgtcccgttccttatcggtatggtagggatgatgctaaaagggctgaattggacacggcacgattggatgttgtcgcccttgttgcagtttgcattggcaagcgtggtgcagctttggctggcaatcccgttttacaaaagcgcgtgggcgagtatcaggggcgggctggcgaatatggacgtgctcgttaccatcggcacggtgtcgatttatctgtattccgtttatatgctgtttttcagcccgcacgcggcgcacggcatggcgcatgtgtattttgaagcgggcgtgatggtgattggttttgtgtcgctgggcaaatttttggaacaccgcaccaaaaaatccagcctgaacagcttgggcttgctgctgaaactcacgccgacccaagtcaacgtgcagcgcgatggcgaatggaaacagcttcccatcgaccaagtgcaaatcggcgaccttatccgcgccaaccacggcgaacgcattgccgccgacggcgttatcgaaagcggcagcggctgggcggacgaaagccatcttaccggcgaatccaatcccgaagagaaaaaggcaggcggcaaagtattggcgggcgcgctgatgactgaaggcagcgtggtgtaccgcgccgcgcagctcggcagccaaaccctgctcggcgacatgatgaacgcactctctgaagcgcaaggcagtaaagcaccgattgcgcgcgtggcggacaaggcggcggcggtgttcgtgcctgctgtcgtgggcatcgcgttgttgacttttattgttacttggctgattaagggcgattggacggttgcgctgatgcacgccgtcgccgttttggtgattgcctgcccgtgtgcgctcggtctggctacacccgccgcgattatggtcggcattggcaaagcggtgaaacacggtatttggtttaaagacgcggcagcaatggaagaagccgcccacgtcgatgccgtcgtgttggacaaaaccggcacgctgaccgaaggcaggccgcaggttgccgccgtctattgcattcccgacagcggctttgacgaagacgctttgtaccgcattgccgccgctgtcgaacaaaacgctgctcacccacttgcccgagccatcgtttccgccgctcaagcgcgcagtttggatattcctaccgcacaaaacgctcaaaccgttgtcggctcaggcattgccgccgaagtggaaagcgtgggtttggtgaaagcaggcaaagccgaatttgccgaactgaccttgccgaagtttttagacggcgtttgggatattgcaagcattgttgcggtctcagtcgataacaaacccatcggcgcattcgcacttgccgacgcgttgaaagccgataccgccgaagccataggccgtctgaaaaaacacaatatcgatgtctatattatgagcggcgacaaccaaggcacggtcgaatacgtcgccaaacaactgggcatcgcacacgccttcggtaatatgagtccgcgcgacaaagccgccgaagtgcagaaactcaaagccgccggcaaaaccgtggcgatggtcggagacggcatcaacgacgcacctgcgctcgccgccgccaacgttagcttcgccatgaaaggcggcgcggacgttgccgaacacaccgcatccgccacgctgatgcaacattcggtcaaccaactcgccgatgccctatcggtatcgcgggcgacgttgagaaacatcaagcaaaacctgtttttcgccttcttctacaatattttgggcattccgcttgccgcgctcggttttttaaaccctgtcatcgcaggcgcggcaatggcggcaagctcggtttccgtgttgagcaacgccttgcgcctgaaacgggtaaaaatcgattga

SEQ ID NO: 40628 - DNA, 1437 bp, Neisseria meningitidis
atgccgctgctgtctgtcgagttcgcactgttctttctcgccttcctgccgatttactggggcttggcgaaatacccgtccgtccaaaacctgctgcttttggctgccggtatgggctggctctaccatatcggccccgtatttgcggcaatcgtcgtcctttattcctcctgcgtgtaccttttgggcgaactgctccgttccgatcgcgaaaatacgcgccgcttttggctggggtgcggcattgccgtctcgctgaccgtcttgggctttttcaaatatttcgactttttccgcccgctgattgcacaatatgccggacaaggcggcgcaatcgacatcctgatgccgctggggctttcgtattacaccttccagtcaatcgcctatttggtttactgcttccgtgcgccgcacgccgcgcgtttcgagtggcacgaactgctgctgcacctgagttttttccccaccgttacctccggcccgattatccgcgccgccgcattcaaaagcgcggacggcgaacaggcgggcgcattggcgcaaatccgtacccgccaaccgcgttcgcccgtccgtcccgcactcgccgtttccctgattctgctgggtattgccaaaaaatggtggctggcggggatgctggcggaaaactgggtatcgcccgtatttgaaaaccccgcccaattcgacggctggggcgtattgggcggcgtgtacggctataccttccaactcttcctggacttttccggatattccgatttggttatcggcatgtcaatgctgctgggcttccgactgcccaaaaacttctcagcaccgcttcgtgccgcgaatatccgtgcattttgggacaaatggcacatcagcctttccacctggatacgcgactacatctacatccccttgggcggcagcaaaaaaggctttttacggacacagctcaacctgatggcggcaatggtactctcaggcatctggcacggctacggctggaacttcctcatttggggcgcgctgcacggcacggcactggtgctgctcaacacgggcgaccgctatttcggacgcaacgcactatgccgtctgaaataccttgcgccgctctcgtggtttgttaccttccatttcgtctgcctgaccttcgtcgtcttcaataccgcaaaccccgacgatgcaggcgcagttttcaatgccctctttgccaatgccaacggctggaatgcgccgcaacgggcggatatgctgctgcttgcctcgtttgcatccgtgatgctgctctacccttacctgcaacgcgctttcgacggcgcggtcaaaggtttggaaaaaatcccgatgtggctgtggtttatccccgtttccgccgtcctgctgctgattatcgtattcgccccctcggggattcccggctttatttatgccaatttttaa

SEQ ID NO: 40629 - DNA, 1779 bp, Neisseria meningitidis
atgacggttttgaagccttcgcactggcgggtgttggcggagcttgccgacggtttgccgcaacacgtctcgcaattggcgcgtatggcggatatgaagccgcagcagctcaacggtttttggcagcagatgccggcgcacatacgcgggctgttgcgccaacacgacggctattggcggctggtgcgcccattggcggttttcgatgccgaaggtttgcgcgagctgggggaaaggtcgggttttcagacggcattgaagcacgagtgcgcgtccagcaacgacgagatactggaattggcgcggattgcgccggacaaggcgcacaaaaccatatgtgtgacccacctgcaaagtaagggcagggggcggcaggggcggaagtggtcgcaccgtttgggcgagtgtctgatgttcagttttggctgggtgtttgaccggccgcagtatgagttgggttcgctgtcgcctgttgcggcagtggcgtgccggcgcgccttgtcgcgtttgggtttgaaaacgcaaatcaagtggccaaacgatttggtcgtcggacgcgacaaattgggcggcattctgattgaaacggtcaggacgggcggcaaaacggttgccatcatcggtatcggcatcaatttcgtgctgcccaaggaagtggaaaacgccgcttccgtgcaatcgctgtttcagacggcatcgcggcggggtaatgccgatgccgccgtgctgctggaaacattgcttgcggaactggacgcggtgttgttgcaatatgcgcgggacggatttgcgccttttgtggcggaatatcaggctgccaaccgcgaccacggcaaggcggtattgctgttgcgcgacggcgaaaccgtgttcgaaggcacggttaaaggcgtggacggacaaggcgttttgcacttggaaacggcagagggcaaacagacggtcgtcagcggcgaaatcagcctgcggtccgacgacaggccggtttccgtgccgaagcggcgggattcggaacgttttctgctgttggacggcggcaacagccggctcaagtgggcgtgggtggaaaacggcacgttcgcaaccgtcggtagcgcgccgtaccgcgatttgtcgcctttgggcgcggagtgggcggaaaaggcggatggaaatgtccgcatcgtcggttgcgccgtgtgcggagaattcaaaaaggcacaagtgcaggaacagctcgcccgaaaaatcgagtggctgccgtcttccgcacaggctttgggcatacgcaaccactaccgccaccccgaagaacacggttccgaccgctggttcaacgccttgggcagccgccgcttcagccgcaacgcctgcgtcgtcgtcagttgcggcacggcggtaacggttgacgcgctcaccgatgacggacattatctcgggggaaccatcatgcctggtttccacctgatgaaagaatcgctcgccgtccgaaccgccaacctcaaccggcacgccggtaagcgttatcctttcccgaccacaacgggcaatgccgtcgccagcggcatgatggatgcggtttgcggctcggttatgatgatgcacgggcgtttgaaagaaaaaaccggggcgggcaagcctgtcgatgtcatcattaccggcggcggcgcggcaaaagttgccgaagccctgccgcctgcatttttggcggaaaataccgtgcgcgtggcggacaacctcgtcattcacgggctgctgaacctgattgccgccgaaggcggggaatcggaacatacttaa

SEQ ID NO: 40630 - DNA, 360 bp, Neisseria meningitidis
atgagattaaaattaaaaaattatgattgttctgactttgatttggaagatttcccacaagacaagttagaaaatttttgtatacttttgacattatcaataggttttgatgaaagtaatggtgctgattatttttatgtttatatatatagcactgaatggttactttcaaatatacatagaccgatgtcattaaaaaactcaattgttacaaaccgttttaatattgaacacatattaaaattgataaatgatatattggaaatatgtaattcaacgtctgaagataagtctatatcaaatttggcaaaatattttgactgggaatttgacgattataatctaaatatccaagactaa

SEQ ID NO: 40631 - DNA, 1257 bp, Neisseria meningitidis
gtggccaataaattaagaaactacaccatcaacttcggcccgcaacaccctgcggcgcacggcgtattgcgtatgattttggagttggacggcgaacaaatcgtccgtgccgacccgcatatcggcctcctgcaccgcggtactgaaaaactggctgaaaccaaaacctatctgcaagccctgccttatatggacaggctggactacgtttccatgatggtcaacgagcaggcatactgcttggcggtagaaaaactcgccggaattgatgtacctatccgcgcccaatacatccgcgtgatgttcgccgaagtaacgcgcatcctcaatcacttgatgggcatcggttcgcacgccttcgacatcggcgcgatgaccgccatcctctacgccttccgcgaccgcgaagagctgatggacttgtacgaagccgtgtccggcgcgcgtatgcacgcagcctacttccgtcccggcggcgtttaccgcgacctgcccgatttcatgcccaaatacgagagcagcaaattccgcaacgccaaagtattgaagcagctcaacgaatcccgcgaaggcaccatgctcgactttatcgatgctttctgcgaacgcttccccaaaaatatcgacacactcgaaaccctcctgaccgataaccgtatttggaaacagcgtaccgtcggcatcggcgtcgtctcccccgagcgcgccatgcaaaaaggctttaccggcgtgatgctgcgcggttccggcgtggaatgggatgtgcgtaagaaacagccctacgaagtgtacgacaaaatggatttcgacatccccgtcggcgtcaacggtgactgctacgaccgttacctctgccgtatggaagaaatgcgtcaatccgtacgcatcatcaaacaatgttccgagtggttgcgtgtcaatccgggtccggtcattaccacaaaccacaaattcgctccgcccaaacgtaccgaaatgaaaacaggtatggaagacctgattcatcatttcaaactctttaccgaaggtatgcacgttcccgagggcgagacctacaccgctgtcgaacatccgaaaggcgagttcggcgtttacatcatttcagacggcgcaaacaaaccctaccgcctgaaaatccgcgcacccggcttcgcccacctgcaaggcatggacgaaatggcaaaaggccacatgctcgccgacgtcgttgccatcatcggtacgcaggacatcgtattcggggaggttgaccgataa

SEQ ID NO: 40632 - DNA, 933 bp, Neisseria meningitidis
atgaagcagaaccgcacctttacctttcccgattttcgcaccgtttacagctatgcgcctttatatcggctgcaacatttaaaatacacattgcgaaaatttttcggaaaaaaagaaatttacgccttcgagcagtttgtcaacgcctcccctatccgtcaggggctgttcctccactgcccgcaggatgcctatccgcttctgcgcgaatttgttgacaggcgttttaactgcaaacgccgtttagatgcgatgacggcagattttcttatggcggaaaaactgttcggcacagacatcctgcaccaaatggaagactaccgcttccatctggtcttggcgcacctttcagacggcatcagcttgtggctcaaccgcaacgacaactgcgtcgaagaaggcgcgtggtctttatctttacgcgacgaagcaggcaaccggctgtatatggcgaccttcgcctttgtcggcacacacctgctggcagcctccgtacaagggcctgcgggcgaagaggccaaagataccgtccgccgcataaccaaacaacttcacggcctgcgtccccaacaactgatggtaaccgcactgcaatatttcgccgccgcattaaaattagacggcgcgataggcattgcacaaaaacatcaagtcaaattgcgctggaaacttaaaaagcgcgtcaaaatgaattacgacgcattctggcaggaatacggcgcaagtttggaacgggacggctactggcatctcccccaaacccccgcccgcaaagaccttgccgacatcgaaagcaaaaaacgctcgatgtaccgcaagcgttatgaaatgctggacaacatggttgcagagatgaaggacagtctgaaaacagaagcacgcggcatttcagacggcatccaaacggaaaaaccgctccgccggacagcctga

SEQ ID NO: 40633 - DNA, 1167 bp, Neisseria meningitidis
atgagaaaattcaatttgaccgcattgtccgtgatgcttgccttaggtttgaccgcgtgccagccgccggaggcggagaaagctgcgccggccgcgtccggtgagacccaatccgccaacgagggcggttcggtcagtatcgccgtcaacgacaatgcctgcgaaccgatggaactgaccgtgccgagcggacaggttgtgttcaatattaaaaacaacagcggccgcaagctcgaatgggaaatcctgaaaggcgtgatggtggtggacgagcgcgaaaacatcgcccccggactttccgataaaatgaccgtcaccctgttgccgggcgaatacgaaatgacttgcggtcttttgaccaatccgcgcggcaagctggtggtaaccgacagcggctttaaagacaccaccaacgaagcggatttggaaaaactgtcccaaccgctcgccgactataaagcctacgttcaaggcgaggttaaagagctggtggcgaaaaccaaaacctttaccgaagccgtcaaagcaggcgacattgaaaaggcgaaatccctgtttgccgacacccgcgtccattacgaacgcatcgaaccgattgccgagcttttcagcgaactcgaccccgtcatcgatgcgcgtgaagacgacttcaaagacggcgcgaaagatgccggatttaccggctttcaccgtatcgaatacgccctttgggtggaaaaagacgtgtccggcgtgaaggaaattgcagcgaaactgatgaccgatgtcgaagccctgcaaaaagaaatcgacgcattggcgtttcctccgggcaaggtggtcggcggcgcgtccgaactgattgaagaagtggcgggcagtaaaatcagcggcgaagaagaccggtacagccacaccgatttgagcgacttccaagccaatgtggacggatcgaaaaaaatcgtcgatttgttccgtccgctgatcgaggccaaaaacaaagccttgttggaaaaaaccgataccaacttcaaacaggtcaacgaaattctggcgaaataccggactaaagacggttttgaaacctacgacaagctgggcgaagccgaccgcaaagcgttacaggcctctattaacgcgcttgccgaagaccttgcccaacttcgcggcatactcggcttgaaataa

SEQ ID NO: 40634 - DNA, 1059 bp, Neisseria meningitidis
atgcgccctttgaacgtgcagatcaggttgggcaaccttaggcacaattatcggattttgaaggaaatgcacggaggcaagctgttggcggtagtgaaggccgacgcatacggacacggtgcggtcagatgtgctttcgcgctggcagacttggcagacggctttgccgtggcgacaatcgatgagggaatcaggctgcgtgagagcggcattacccatccgattgtccttttggaaggcgtatttgaagcatcagagtacgaagcggtcgaacaatactcgctctggccggcagtcggaaaccaatggcagcttgaggctttgctggtccgccattggaaaaaacccgtcaaagtctggttgaaaatggattcgggaatgcaccgtaccggttttttccctcatgattacgcttcggcatatgcggcattgaagcagtcggaatatgtggacagtattgtcaaattctcgcatttctcctgtgcggacgaacccgaaagcggcatgacggaaatacagatggaagcattcgatttgggtacgaaagggctggaaggcgaagaaagccttgccaattcggcggctattttgaatatccccgaagcacgcagggactgggggcgcgccggtttggcgttatacggcatttccccgttcggaggaggcgatgacaggctgaagcccgtgatgaggctttccacccgtattttcggcgaacgcgttttacagccgcactcccctatcggttatggcgcaacattttataccagcaaatctacgcgcgtcggcctgattgcatgcggttatgcggacggttatccgcgccacgccccaagcaattcccccgtcgccgtcgacggtaaattgacccgggtcatcggcagggtctctatggatatgatgaccatcgagctggatgcttcgcaagaaggtttgggacacgaggtcgaactgtggggcgatacggtcaacatcaatactgttgccgaagcggccggaaccatcccttacgaattgatgtgcaatatcaaacgtgcaaaattcacttatatcgagtaa

SEQ ID NO: 40635 - DNA, 1011 bp, Neisseria meningitidis
atgagcgatacccccgctacccgcgatttcggcctgatcgacgggcgtgccgtaaccggctatgtgctgtccaaccggcgtggtacgcgtgtctgcgtgctggacttgggcgggattgtgcaggaattttccgttttggcagacggcgtgcgcgaaaacctcgtggtgtcgttcgacgatgcggcttcctatgcggacaatccgtttcagattaacaagcagatagggcgcgtggccggacgcatccgcggtgcggcgttcgacatcaacggcaggacttaccgcgtggaggccaacgaaggcaggaacgcgctgcacggcggttcgcacgggctggccgttacccgtttcaacgcggtggcggcagacggccgttcggtggtgctgcgcagccgcctgcaacagtcggccgacggttatcccaacgatttggatttggatatttcctaccgcttggacgaggacgaccggcttaccgttagctatcgcgccaccgcgctcggcgacacggtgttcgacccgacgctgcacatttactggcggctggacgcgggcctgcacgatgcggttctgcatattccgcagggcggacatattccggccgatgccgaaaaactgcccgtctcaacggtttcagacggcctcgaagtatttgatttcagccggcccaagccgctggatgccgccgttgccgccctgcgccgcgaaacgggtcgggccggttttgacgacgcttaccgcgtgccgtccgatataggccgtcccgccgctgtgttgcaagccggacgccgccgtcgtatcagcatatacagcgaccgcaacggcttggtcatctttaccgccgccccgcaggatttcgcgcggcacgatgcgggcgtttacgacgcgctggcgaccgaggcgcagacgctgcccgacagcctgaattggcccgagttcggcaatattcgtctgaacaagggtgataccagggaggcgacgattgcttacggcatcgaatccctttcttag

SEQ ID NO: 40636 - DNA, 1047 bp, Neisseria meningitidis
atgaaaatgcaggcagttgttgtgaataaaaatgtagcgggcgatgtggaaatagtcgaacgcgaggttcgcccgttggaatacggcgaggcgttggtcgaagtcgaatattgcggcgtgtgccacaccgacctgcacgttgcggcaggcgactacggcgaaaaaccgggccgcgtgctgggacacgagggcatcggtttggttaaagaagttgccgacggtgtgaaaaatctgaaagtcggcgaccgcgtcagcatcgcctggctgttccaaagctgcggctcgtgcgaatactgcaataccggccgcgaaaccttgtgccgctctgtattgaacgcgggctacaccgccgacggcggtatggcgacctactgcatcgtgagtgccgattacgcggtcaaagtccctgaaggtttggatcctgcgcaagcttccagcattacttgtgccggtgtaaccacttataaagccattaaagtttccagtgttcgtccgggacagtggattgccatctacggcgcgggcggtttgggcaacttgggggtccaatacgcgaaaaaagtatttggcgcacacgttgtcgccatcgacatcaacgacgacaaactggcgtttgccaaagaaaccggcgcggatttggttgtcaacgccgccaaagaagacgctgccaaagtgattcaggaaaaaaccggcggcgcacacgctgcggtcgtaaccgccgtatctgctgccgcattcaactctgccgtgaattgcgtccgcgcaggcggacgtgtggttgccatcgggctgccgccggaatcgatggatttgtccatcccgcgtttggttttggacggcatcgaagtggtcggctctttggtcggcacgcgcaaagatttggaagaagccttccaattcggcgcggaaggtttggttgtgccgaaagtccaactgcgtgctttggatgaagcacccgccattttccaagaaatgcgcgaaggcaaaatcaccggccgtatggtaatcgatatgaaaaaagaatgcggctgcggccatcaccactga

SEQ ID NO: 40637 - DNA, 621 bp, Neisseria meningitidis
atgaccacacatcatgtcgaattgaggaaggtaaccaaacgcttcggggcgcaaaaagccgttaaccaagtcgatttggttttgaaggcaggagaaagcgtcgggcttgccggacacaacggcgcgggcaagtccaccattatgaagctgatactcgggctgattaccccgaccgaaggcgaagtgatgcttttgggcgaacgtaccggcagcaaagcgggggcgcggcttcgcagccaaatcggctacctgcccgaaactgttgcgttgcacccttcgctgaccggcatcgaaacgctggatttttatgccaaacttaaaaaacagccgctcacgcagaatcgggggctgctcgagcgcgtcggcatttcacaggcggcacaccgccgcgtcggcacttattctaaagggatgcgccaacgccttgccttggcacaagccctgctgggcgagcccaaagtcctgctgtttgacgaaccgacaaccggcctcgaccctgcatcaaggcaaatgttttacgaagtcgtgcgcgaactcaacgggcgcggcgcgaccgtattgctcagtacccacgcccttgccgagttggacggacacgccgaccgcattatcgtggattaa

SEQ ID NO: 40638 - DNA, 1563 bp, Neisseria meningitidis
atggcaaaacaatcaaatgccgcgccgcaaaagcgcggtttttttgcgcgtttgttcggcaggcgggaagccgtcccgaaaacagcccgccgcaactttgcaggggcgcgtccggtcgggtcgctggcttcgtggcagccgcaaaactggtcggcggacgctttggcgcggtcagaccttgaccgcctgcgcgcccgcgcccgcagccttgcacgcgacaacgactacatgcgcaagtttttgaatatggtcgaaagcaacgttatcgggcgcgacggttttgccctgcaaatgcgtgttttgctggataacgccgaaaagcccgatgccttggcgaacaaggccatcgagacagcgttttcccgctgggcgcggcgcggtgtgtgcgacgttaccggccagatgtcttttaccgacctgcaacggctgctgattcgcagcgtggcgcgggacggcgaagtgctgattcgtcatatttcagggtttgacaatgattacggctatgcgttgcaggtgctggatattgaccgtttggatacgggatacaacgttccgcagcaaaacgggcgtaacgccgtgcgcatgggcgttgagttaaacagctattcccgtcctgtggcgtactggttgcggacggcacatccgggcgaatcatacggacagacgaatacgggcaatttacgcgaacgggtgccggcagagcaaatcagccatattttcctgcacgaccgcccggagcagcggcgcggctttccgtgggtggcttcggccatcatcggcctgcaaaacctgtcgggctatcaagaagcggccattattgctgcccgtgtcggtgcatcgaaaatgggctttttcaaacagacggaagatgccgacaacttcatgccgccgattgacgggcaagaggtcgataacgggcgcggcagcatcgatttaatcgattcggtcgagccgggtacgtttcacgaactgccgcagggttacgactttacgccgtttgatccggattacccgcacgccaattacgacgcattcgtcaaagccagcctgcgcggtatcgccagcggtttgaacgtggcttatcacagcttggcgaacgaccttgagggcgtgaacttttccagtatccgcagcgggacgctggaggaacgcgacacatggatgacgttgcaaaactggtttgccgacgcgttcttgtatgacgtattcgatcgctggattgaggcggcgttgctaatgggcgcaatcaagatgccgtccggcaaatcgctgcctgccggcaagctggacaagttcaaggcctgcaactggcaggggcgccgctggtcgtgggttgacccgctgaaagatattaatgcgcataaagaggcggtggcgctggcagtcaaatcccgccgcgatatttgcgcggaaatgggtttggattttgaagatgttattacccaaatcgaacaggaaaaccagatgttggcaggaaaaggaatcattgccgacgtaaaaccggccgcatcggcggcagaaccggaatcggaggataacccgaatgaagaaaatgaagcctga

SEQ ID NO: 40639 - DNA, 255 bp, Neisseria meningitidis
atgaagcatgattgtaccaatggcaaacccaaaacgccaaaccaaagacagcgcattttagcccgattgaggcaaggcagcgttacctcatgggagctttcccaaatggggatacttggctacaacacgcgcattatggagcttcgccaagcggggcataacatcgttaccacaatggaagaaatccaaaaccaatttggcgaaaccgtgaagcgcgggcggttttcgctggtgtcggagggcaggcaatcatag

SEQ ID NO: 40640 - DNA, 492 bp, Neisseria meningitidis
atgcgtgcggtcatacagaaaacggtaggtgcaaaggtggatgtcgtgtccgaaaacggcacggaaacctgcggcaaaatcgacggcggattcgtcgtactgctcggtgtaacgcatagcgacacagaaaaagatgcacgctatgtcgccgacaaaatcgcccatttgcgcgtgtttgaagacgaagcgggcaagttgaacctgtctttgaaggatgtcgggggatccgtgctgctggtgtcgcagtttacgctttatgccgatgcggcaagcggccggcggccgtcattttcgaaagccgcacctgcagaacaggcaaaacggctttatctgcatacggcagaactgttgcgcgggcacgggattcatgtcgaaacagggcgtttccgcacgcatatgcaggtgtcgctctgcaacgacgggccggtaactatactgctggactctttcatgacgcggatttccccaaaaatgaaggttgttccggattga

SEQ ID NO: 40641 - DNA, 1110 bp, Neisseria meningitidis
atgaaaaagagaaaaatactgccgctggcaatttgtttggcggctttgtctgcctgtacggcgatggaggcccgcccgccccgggcaaatgaagcccaagccccccgcgcggatgaaatgaaaaaagaaagccgccccgcgtttgatgcggcagccgtatttgacgcggcagccgtaccggtatccgacagcgggtttgccgccaatgcaaatgtccgccgttttgtggacgatgaagtcgggaaaggggatttttcccggacggaatggcaggatttttttgacaaagcggcttacaaggcggacatcgtcaagattatgcaccgaccctccacatcgcgtccgtggtatgtgttccgcacgggaaattcgggcaaggcgaaatttcgcggcgcgcgccggttttatgcggaaaaccgcgcgcttatcgatgatgtggcgcaaaaatacggcgtgcctgccgaacttatcgtggcggttatcgggattgaaacgaattacggcaaaaatacgggcagtttccgtgtggcggacgcattggcgaccttaggcttcgattacccccgccgcgccgggtttttccaaaaagaattggtcgagcttttaaagctggcaaaagaagaaggcggcgatgttttcgcctttaaaggcagctatgcgggcgcaatggggatgccgcaatttatgccttcgagctaccggaaatgggcggtggattatgacggggacggacatcgggacatatggggcaacatcggcgatgtcgcggcatcggttgccaattatatgaagcagcacggttggcgcacgggcgggaaaatactggtgtctgcaacattggcgccgggtgcggatgttcaggcaatcattggcgaaaaaaccgccctgacgcggacggtggcggatttaaaggcgtacggcatcatccccggcgaagagcttgcagatgatgaaaaggcggttttgttcaaactggaaaccgcaccgggcgtgtttgaatattatttgggcttgaacaatttttatacggtatggcagtacaaccacagccggatgtatgtaacggcggtcagggacattgccaattcgcttggcggctcgggattgtaa

SEQ ID NO: 40642 - DNA, 435 bp, Neisseria meningitidis
atgcccgcctgtttctgcccccactgcaaaacccgtctctgggtcaaagaaacccaactcaatgtcgcccaaggcttcgtcgtctgccaaaaatgcgaaggactgtttaaagccaaagaccatctggcaagcacgaaagaacccatattcaacgatttgcccgaagctgtttcggatgtcaaactcgttcaccgcatcggcacgcgcgccatcggcaagaaacagatttcccgtgacgaaatcgccggcatcctcaacggcggcacaacccagcccgatattccgcccgcaaccgccgccacccctgctgccgcaccgcaggttaccgtaccgcccgccgcgcccgcccgtcaggatgggttcaactggacgattgcaaccctgtttgcccttatcgtcctcattatgcagctttcctacctcgtcatcctatga

SEQ ID NO: 40643 - DNA, 642 bp, Neisseria meningitidis
atgaaactgtatatttacgaccattgcccgttttgcgtgcgtgcgcggatggctgccgggctgtttggcgcggacgttgaagaagccgtgctggcaaacgacgacgaggcaacgccgattggtatgatcggtgcgaaacaagtgcccgtcctgcaaaaagaagacggttcgtttatgggcgagagtttggacattgtgcggcatttcgaccgcgaagaccgtctgaaagacgaagtccgccccgagatacgggcgtggctggacaaggtgggcggatacaacgacaaactggtgcagccgcgcgtgatcaaaatcgggctgcctgaatttgcaacgccggaagcggtgaaatattttacagacaaaaaagagaaaagcatcggcagcttttccgccaatttgaataaaaccgcccaatacctcgaacggataaacgcagatttgcaagagttggaaaatttgatggacggtgcttcagacggcatcaacggcggaatcggtatggaggatattttggttttccccgttttgaggaatctgaccgtggtgcgcggcatcgaatggccccaaaaggtgatgggttatttgatgacgatgagtgaaaaatcgggcgtgccgctttattttgacagggcattgtaa

SEQ ID NO: 40644 - DNA, 237 bp, Neisseria meningitidis
atgaaacggttgcggcatcgggcggtgtccatttgtatccgccgtccttcgggggcgcggttgatgttgacgcagattccgctgtgtttgcccattatgttcggctgcgggataaccaaaatttatgagtgcataaaaacggtacgttcccgaacggtcgaaaaggtggcaaaatggcgtacttgtcagaacgcgaggctctgcgccaggttcacgagggtgcatcgggcacgctaa

SEQ ID NO: 40645 - DNA, 2838 bp, Neisseria meningitidis
atgttagacaaatacaatccagccgaaatcgaatccaagcactatcaaaactgggaaagccaaggctatttccaacctgatatggatttgaccaaaccgtctttttccatccaactgccgccgcccaatgtaaccggcacgctgcacatgggtcatgccttcaaccaaaccattatggacggcctgacccgctactaccgtatgaaaggctgcaacaccgcctggattcccggcaccgaccacgcgggcatcgccacgcaaatcgtggtcgagcgtcagcttgccgcgcaaaacgtgtcccgtcatgacttgggtcgtgaaaaattcttggaaaaagtgtgggaatggaaagaagtttccggcggcacgattacgcagcagatgcgccgtgtgggctgttctgccgactggacgcgcgagtatttcacaatggacgatgtacgcgccgaaaccgtaaccgaagtgttcgtacgcctgtatgaacagggcttgatttatcgcggcaaacgcttggtgaactgggatccggtattgggtaccgcagtgtctgatttggaagtggaaagcgtggaagaacaaggctctatgtggcacatccgctatccgctggcggacaatcctgccgaagccgtcatcgtcgccaccacccgtcccgaaacgctgttgggcgacgttgccgttgccgtcaatcccgaagacgaacgttatacccacttaatcggcaaagaattaatcctgccgctgaccggccgcaccattcccgtgattgccgacgaatacgttgaaaaagacttcggcaccggctgcgtgaaaatcacgcctgcgcacgacttcaacgactacgaagtcggcaaacgccacgatacgcgcttggttaatgtgttcgacttggaagccaaagtattggcaaacgccgaagtgttcaacttcaaaggcgaagcgcaaccaagctttgccctgcctgaaaaatacgcaggcttggaccgctttgccgcgcgcaaacaaatggttgccgatttgcaggaacaaggtttcttggtcgaaatcaaagcgcacacgctgatgacgccgaaaggcgaccgtaccggttccgtgattgagccgatgctgaccagccaatggtttgtcgccatgtccgccacgccaaacggcggcgagcctgacagcgaattcaaaggcttaagccttgctgacaaagccaaaaaagccgtcgacagcggcgcggtgcgctttatccccgaaaactgggtcaacacctacaaccaatggatgaacaacatccaagactggtgtatttcgcgccaactgtggtggggtcatcaaatccctgcgtggtacgacgaagcaggcaatgtgtacgttgcccgcaatcaggaagaagctgaaaaacaagccggcaaaacaggtttgacccgcgaagaagacgtattggatacatggttctcctccgcgcttgtgccgttctccacactcggctggccgtctgaaaccgacgaactcaaagccttcctgccgtccaatgtcttagtaaccggctacgaaatcatcttcttctgggtggcgcgcatgattatgatgaccacccactttaccggcaaagtaccgtttaaagacgtgtacatccacggcatcgtgcgcgaccacgaaggcaaaaaaatgtccaaatccgaaggcaatgtcatcgaccctgtggatttgattgacggcatcgacttggaaaaactgctggtgaaacgtaccaccggcctgcgcaaacccgaaaccgcgccgaaagtggaagaagccacgaaaaaacttttccccgaaggcattccgagcatgggcgcagacgcattgcgtttcaccatggcgagctacgccagcttggggcgcagcgtgaacttcgacttcaaacgcgccgaaggctaccgcaacttctgcaacaaaatctggaacgccaccaacttcgtcttaatgaataccgaaaaccaagactgcggctacggcgcaaccgctgccgagccgcgcggctattccttccccgatatgtggatcataggccgtctgaatcagaccatcgagcaggttacgcaagcctacaaaacctaccgctttgatttggcggcggaaaccctgtacagcttcgtgtggaacgactattgcgactggtatctggaacttgccaaagtgcagcttcaaaccggttgcgccagccgccaacgcgccacacgccataccttattgcgcgtactcgaaaccgccctgcgcctgctgcacccgattatcccgttcatcaccgaagaactgtggcaaaccgtcgctcctatgtgcgacgcgaaaaccgccgacagcatcatgctcgcccgcttccccgaagccgacagcggcgagattgttcagacggcattcgagcaaatgaccgtgttgcaggatttgattggcgcagtccgcaacctgcgcggcgaaatgggcatccagcccaacgtaaaagccccgctgtttgtcgaaagcacggacgacttggcggactacctcaaatacctgccgatgatgacccgcctgaccgaagcacagcaagtcgccgccctacccgaaagcgaagacgcgcccgtcgccgtctgcaacggcgcgcgcctgatgttgaaagtcgaaatcgacaaagccgccgaaaccgcccgtttgagcaaagaagccgagaagctgcaaaaagccttggacaaactcaacgccaaactctccaaacccggctacaccgaaaaagcccctgcgcatctggtggaaaaagacaaagccgatttggcggaattggaagacaaaatggcaaaagttcaaaatcagttggcgaagttgaaagactga

SEQ ID NO: 40646 - DNA, 597 bp, Neisseria meningitidis
atgaaacagacagtcaaatggcttgccgccgccctgattgccttgggcttgaaccaagcggtgtgggcggatgacgtatcggattttcgggaaaacttgcaggcggcagcacagggaaatgcagcagcccaatacaatttgggcgcaatgtattacaaaggacgcggcgtgcgccaagattatgtcgaagcggtcagatggtttcggcaggcggcagagcagggaaataccctagcccaaactttgttgggctggatgtatgccaacgggcgtggcgtgcgccaagatgataccgaagcggtcaaatggtatcggcaggcggcggaacaggggttagcccaagcccaatacaatttgggcgtaatgtataacacaggacgcggcgtgcgccgagattatgccgaagcagccagatggtttcgtaaggcggcggatcaggggttagcacaagcccaatttaatttgggcgcaatgtattacaaaggacgcggcgtgcgccaagaccttgtgctcgctcaagaatggcttggcaaggcgtgtcaaaacggaaaccaagacggctgcgacaatgaccaacgcctgaaggcgggttattga

SEQ ID NO: 40647 - DNA, 516 bp, Neisseria meningitidis
atgaaatcaaaactccccttaatcctaatcaacttttccctgatttcaagcccattgggtgcgaatgcggccaaaatctacacctgcacaatcaacggagaaaccgtttacaccaccaagccgtccaaaagctgcctctcaaccgatttgcccccaatcggcaactacagcagcgaacgctatatcccgccccaaacgcccgaaccggtatcatcaccgtcaaacggcggacaggttgtcaaatataaagccccggtcaaaacagtatccaagccggcaaaatccaatacgccgccgccgcaacaagcaccctcaaacaacagcagacgctccattctcgaagcagaattgagcaacgaacgcaaagccctgactgaagcccaaaaaatgttatcacaagcacgtctggcaaagggcggcaacatcaaccatcaagaaatcaacgcattacaaagcaatgtattggacagacagcaaaatatccaagctctgcaaagggaactggggcgtatgtaa

SEQ ID NO: 40648 - DNA, 1110 bp, Neisseria meningitidis
atgaaatacaaaagaatcgtatttaaagtcggcacatcttcgattacccattcggacggcagtctctcgcgcggcaaaatccaaaccatcacctgccagcttgccgcattgcatcatgcgggacacgagctggtcttggtgtcttccggcgcggttgcggcagggttcggtgcgctgggtttcaaaaaacgtccggtcaaaatcgccgacaaacaggcttccgccgccgtcgggcaggggctgctgatggaagaatatacggcaaacctgtcttcagacggcatcgtgtccgcgcaaatcctgctcagccgcgccgactttgccgacaaacgccgctaccaaaatgccggcggcgcactttccgtgctgctgcaacgccgcgccgtccccatcatcaatgaaaacgatacggtttcggttgaggaattgaaaatcggcgacaacgacacattgagtgcgcaagtggcggcgatgatacaggcagacctcttggtgctgctgaccgacatagacggtctttacacgggcaacccgaacagcaatcccgatgccgtacggctggacaaaatcgaacacatcaaccatgaaatcatcgaaatggcgggcggatcgggttcggcaaacggcacgggcggtatgctgaccaaaatcaaagcggcaaccatcgccgccgaatccggcgtaccggtgtatatctgttcctcgctcaaacccgatgcacttgccgaagctgccgaacatcaggcggacggctcgtttttcgtcccccgtgccaaaggtttgcggacgcagaagcaatggctggcgttctattccgaaagccggggcagcgtttatgtggacgaaggtgcggaacacgctttgtccgaacaggggaaaagcctgctgatgtcgggcattgccggaatcgaagggcatttttcccgtatggacaccgtaaccgtgtacagcaaggcaaccaaacagcccctgggcaaagggcgcgtcctgttcggttctgccgccgccgaagacctgctcaaatcgcgtaaggcgaaaggcgtgttcatccatcgggacgactggatttccatcacgcccgaaatacacctgcttctgaccgaattttag

SEQ ID NO: 40649 - DNA, 1176 bp, Neisseria meningitidis
atgcacaccatttcctttccaaaccgcacccgactcaccgccctgccgcccctgtcgctttacatccacatcccgtggtgcatcaaaaaatgcccgtattgcgacttcaattcccacagcctgaaaaacggattgcccgaagccgcctatatcgacgcgctgctgaccgatttgcagcttgaattgcccaatatttggggcaggccggtggaaacgatctttttcggcggcggtacgcccagcctgtttcaggcggaatcgattgaccgtttgttaagcggcgtgcgttcgctgttgcgcttgcagccggaagcggaaattaccttggaagccaatccggggacatttgaaatcgagaagtttcaaggatttaaagacgcgggtattacgcggctttctatcggcgtacagagtttcaacgacgatatgctctcaaggctggggcgcgtccacaacggtaaggaagccttaaccgctatcgataccgccttgaaattatttgataaagtcaatatcgacttgatgtatgccctgccgaaccaaaccgttcagacggcattggacgacgtacaaaccgctatcgctacgggcgcgacccacatcagcgcgtatcatctgacgatggaaccgaacacgccgttcggtcatacgccgccgaaaggtttgccgcaagacgaagccgccctcgacatcgaagacgcggtacacggcgcgctggaaagcgcgggttttgtccactacgaaacatcggcttttgcgaaaccagccatgcagtgccgccacaatttgaactactggcagttcggcgattatttaggcataggcgcgggcgcgcacggcaaaatttcctatcccgaccgcatcgagcgcaccgtccgccgccgccaccccaacgactacctcgccttaatgcaaaaccgaccgagcgaagccgtcgaacgcaaaaccgtcgccgccgaagatttgccgtttgagttcatgatgaacgccctgcgcctgaccgacggcgtacccgccgcgatgttgcaggaacgcacgggcgtaccgagtgccaaaatcatggcgcaaatcgaaacagcaaggcaaaaaggcctgctggaaaccgaccccgccgtattccgcccgaccgaaaaaggacgcttgtttttaaacgatttgctgcagtgttttttatag

SEQ ID NO: 40650 - DNA, 387 bp, Neisseria meningitidis
atgtggaaaatttataaagaaaatagcaccgacttaaattttgccataggcagtatatattgccaagcaatcaatcttaccgaatttaaaatgtgggtcgaaaaaatcataagggaagtggatttagatgaaattccaaattatttttttgatttgatagattttcaatcactatacgatctgattgatattataggatttgttcccgaaaataatttatcaaaaaatcaggataatgcattaaccggtattgcttttttaagggggatagatgtctatgaccctcccgtttcaaaagaaaaagcattaaaagccttagaaaaacatcctgaaatttatcagaggtttcagcatttcttcccatttgtagaactgcccccgctttaa

SEQ ID NO: 40651 - DNA, 1395 bp, Neisseria meningitidis
atggcagcagcctaccatcacggcacggagaccatccgcatcgacggcggctccaatcccgtctataccgttgacggcgcaattaccgccatcgtcggcactgcgccagtcggcgcggtcaatgagctgacggtatgtcaaattaaaaaagattttgcccgattcggcggcgagctgaccggcaagggctttactctgccggatgccgcacacatctggacgcgctacggcagcggtgtcgcttatgttgtcaatgtttgcgaccctgccaaacataagacaaccgtcagcaacgaagtattggcggttgatcctgacactttgacagccaaaaccgccaagcctgccctgcaaagcggctacgcggtttcagacggcaacagcctcctgaccgaaaacacgcactacaccatcaacacactgacgggcgaaattgtgttcaaaaccaaaccgtccgccgcggaaatcagctacacctataccgacccgacgaaagtgaccgaagccgacattatcggcgcatatgtggcggcaacgggaaaacgcaccggtttggaactcttgaccgaaggtttcaaccgacaaggcgcggacgcgaaaattatcatcgcccccgagtatgacggcaacgccggagtccgcgcagcaatggaaatcattgcgggcaaattgaaagccatcgcctatgccgccgcgccgaaaggcacaggcttgggcaaggctttggaaggacgcggtcctttgggcagcatcaatttccaaacttcgtccgaccgctgccagctcttctatccctacgccgtcgggctcttgggtttggaaagccttgccacccacgccgccggcctgcgaatgaaaaccgatgtggaacagggctactggttcagcatctccaaccgcgaactcttgggcgtaaccggcgtggaaatcggactgaccgcccgcgcggacgacccgcagtccgaaaccaaccggctgaacgaaaaaggcattaccaccgtattcaacagctacggcacaggctatcggatgtggggcaaccgccttgcctgtttcccgacggtttcgcatattaaaaactttgaagtggcgcaacgcaccggcgacatcatcgacgagtctatccgccgcgccgaactgcaatacgtcgaccgcccgattgacgatgccttaatcgacagtttgattgagacggtacgcacctatttgggtacgctgccttccatcgtaggtttctcggtcggtttggactatgactacgacctgccggatgcgttcagtaaaggccaagtgccgattgtgtacgactacacgcccaagctgcctgccgagcgtatgaccaataccagcgtgatgacccgcaaatacctggccaatctggtttctgcgtcctaa

SEQ ID NO: 40652 - DNA, 324 bp, Neisseria meningitidis; identical to SEQ ID NO: 36356

SEQ ID NO: 40653 - DNA, 1356 bp, Neisseria meningitidis
atgaaagcacccgaactcttattgcccgccggcggattggaaagaatgcgcaccgcctacgactacggcgcagatgccgtttatgccggcagcccgcgttactcactgcgcgcccgcaacaacgaatttgccaaactcgacgttctcgagcaaggcattaaagaagcgcacgagcgcaacaaaaaattctttttgaccgtcaacaccctgccgcacaactccaaactcaaaaccttcgtttccgatatggagccgctgattgccatgaaacccgacgcgctgattatggcggatccgggtttgattatgaccgtgcgcgaaaaatggccggaaatgccgatccacttgtccgtacaggccaacaccaccaactactggggcgtgaaattctggcagaatatcggcgtcgaacgcatcatcctgtcgcgcgaattgagtatggaagaaatcgccgaaatccgccaacaatgccccgacatcgaactcgaagtcttcattcacggcgcattgtgcatcgcctactccggccgttgcctactctccggctacttcaaccaccgcgaccccaaccaaggcacctgcaccaactcctgccgttgggactacaaagtccacaacgctacggaaagcgatgcgggcgatgcccagcttctgcaaggttttaactttgaaaaagcccaagaagaagccaaccaaaactttgaaggcatcaacggtcaaaaacgccatccctacgccgacaaagttttcctgattgaagagtccaaccgcccgggcgagatgatgccgattatggaagacgaacacggcacttacatcatgaactccaaagacctgcgcggcattgaagtggttgagaaactcgccaaaatcggcgtggacagcctcaaagtcgaaggccgcaccaagtcgctctattatgtcgcacgcgtcgcccaatcctaccgcaaagcgattgacgatgccgtcgcaggccgtccgtttgattacagcctgttgagcgaactcgaaggccttgccaaccgcggctacaccagcggcttcctcgaacgccaccaaacccaagactatcaaaactacctcagcggccattccaccgccaaacaaagccaatacgtcggacacgttaccgaaatcgacaaaaacggctgggcaacagtggaagtcaaaaaccgctttgccgtcggcgattcactcgaaatcatccacccgaacggcaaccaaaccatcaaattggaacaaatgacccgcaaaggccagcctgtcgatgtcgcacccggcaacggcattcaggtcaaaatccccaatatgcagggtaaagaaaaagccctcatcgcacgcgtattgaacccctga

SEQ ID NO: 40654 - DNA, 168 bp, Neisseria meningitidis
atggcgataaaaaaattccgcaagccgtgcggaatttcggctattggcgataaaaaaattccgcaagccgtgcggaatttcggctatttgtttagagagaaaccgcaatctagtttctcaatcccgatttgtaaatacttttcagacggcatttttacaagccactga

SEQ ID NO: 40655 - DNA, 588 bp, Neisseria meningitidis
ttgaatattaaactgaaaaccttgttattgcccttcgccacgctggcattgtgcaccaatgcttttgccgctccgcccagcgacgcgtcgttggcgcgttggctggatacgcagaattttgaccgggatatagaaaaaaatatgattgagggctttaatgccggatttaaaccgtatgcggacaaagcccttgccgaaatgccggaagcgaaaaaagatcaggcggcagaagcctttaaccgttatcgtgagaatgttttgaaagatttgattacgcccgaagtgaaacaggctgtccgtaatactttattgaagaatgcccgtgagatatacacgcaagaagaaattgacggcatgattgccttttacggttcgcctgtcggtcagtccgtcgttgccaaaaatccgcgcttaatcaagaaatcgatgagtgaaatagcagtatcttggactgcattgtcagggaaaatcgcgcgacatcatctgcccgcgtttacggaagagttgcggcgcatcatctgcggcggtaaaaatcccgatgcgggctgtaaacaagccggacaggttgggaaaaggcatcagaaataa

SEQ ID NO: 40656 - DNA, 1935 bp, Neisseria meningitidis
atgagcttgatcgaatgtaaaaacatcaaccgctatttcggcagcggcgagaaccgcgtccatattttgaaagacatcagcctgtcgatagagaagggcgattttgtcgccatcatcgggcagtccggttcgggcaagtccacgctgatgaacatactcggttgtttggataccgccggttccggttcgtaccgaatcgacggcatcgaaactgccaaaatgcagcctgacgaactggcggcattgcgccgcgaacgcttcggctttatcttccaacgctacaacctcttaagctcgctgaccgcaagggataacgtcgcgctgccagccgtctatatgggcgcgggcggcaaagagcgttccgcgcgggcggacaaactcttgcaggatttgggtttggcaagcaaagagggcaacaagcccggcgaactctcgggcggacagcagcagcgcgtctccatcgcccgcgccctgatgaacggcggagaaatcatcttcgccgacgagccgaccggcgcgctcgataccgccagcggcaaaaacgtgatggaaatcatccataagctgcacgaagccgggcataccgtcattatggtcacgcacgaccccggcatcgccgccaatgccaaccgcgtcatcgaaatccgggacggcgaaatcatttccgacacctcgaaaaatcccgaaatccccgcaagcaatgtcgggaggattcgggaaaaagcctcgtggtcgttttattacgaccagtttgtcgaagccttcagaatgtcggtgcaagcagtattggcgcacaaaatgcgttcgcttctgacgatgctcggcatcatcatcggcatcgcgtcggtggtttccgtcgtcgcattgggcaacggttcgcagaaaaaaatccttgaagacatcagttcgatagggacgaacaccatcagcatcttcccggggcgcggcttcggcgacaggcgcagcggcaggattaaaaccctgaccatagacgacgcaaaaatcatcgccaaacaaagctacgttgcttccgccacgcccatgacttcgagcggcggcacgctgacttaccgcaacaccgacctgaccgcctcgctttacggcgtgggcgaacaatatttcgacgtgcgcggactgaagctggaaacggggcggctgtttgacgaaaacgatgtgaaagaagacgcgcaggtcgtcgtcatcgaccaaaatgtcaaagacaaactctttgcggactcggatccgttgggtaaaaccattttgttcaggaaacgccccttgaccgtcatcggcgtgatgaaaaaagacgaaaacgctttcggcaattccgacgtgctgatgctttggtcgccctatacgacggtgatgcaccaaatcacaggcgagagccacaccaactccatcaccgtcaaaatcaaagacaatgccaatacccaggttgccgaaaaagggctgaccgatctgctcaaagcgcggcacggcacggaagatttcttcatgaacaacagcgacagcatcaggcagatagtcgaaagcaccaccggtacgatgaagctgctgatttcctccatcgccctgatttcattggtagtcggcggcatcggcgtgatgaacatcatgctagtgtccgttaccgagcgcaccaaagaaatcggcatacggatggcaatcggcgcgcggcgcggcaatattttgcagcagtttttgattgaggcggtgttaatctgcgtcatcggcggtttggtcggcgtgggtttgtccgccgccgtcagcctcgtgttcaatcattttgtaaccgacttcccgatggacatttcggcggcatccgttatcggggcggtcgcctgctcgaccggaatcggcatcgcgttcggctttatgcctgccaataaagcagccaaactcaatccgatagacgcattggcgcaggattga

SEQ ID NO: 40657 - DNA, 642 bp, Neisseria meningitidis
atgaccgatttccgccaagatttcctcaaattctccctcgcccaaaatgttttgaaattcggcgaattcaccaccaaggcaggacgtcagtcgccctatttcttcaatgccggcctctttaacgacggcttgtccacgctgcaactggcaaaattttacgcacaatccatcattgaaagcggcatccgattcgatatgctgttcggtcccgcctacaaaggtattattttggcggcggcaaccgcgatgatgctggcggaaaaaggcgtaaacgtcccgtttgcctacaaccgcaaagaagccaaagaccacggcgaaggcggcgtgttggtcggtgcgccgcttaaagggcgcgtgctgattatcgacgacgtgatttccgccggcacatccgtacgcgaatcgatcaaactgattgaagcggagggtgcaacccccgccggtgtcgccatcgcgctcgaccgcatggaaaaaggcacgggtgaattgagcgcggttcaggaagtggaaaaacaatacggtctgcccgtcgcccccatcgccagcctgaacgatttgtttattctgttgcaaaacaaccccgaattcggacagttcctcgaacccgtccgagcctaccgtcggcagtacggcgtagaataa

SEQ ID NO: 40658 - DNA, 789 bp, Neisseria meningitidis
atgaatcccaaaatcgtgtttttcgatattgacgatacgctgtaccgcaaatatacggataccttgcgtccttccgtgaaaacggcggtggcggctttgcgcggcaaaggtatattgacggcgttggcaacggggcggtctttggcgacgattcccgaaaaggtcagggacatgatggcggaaacgggtatggatgccgtggtaacgataaacggacagtttgcgctgctgcacggaaaaactgtgcacgaagtaccgatggatgccggtttgatgggcagggtttgcgcgcatttggatggcttgggcatggattatgcgtttgtcggcggagaggggatcgccgtgtccgcgctgtcggaatgcgtgtgccgcgccttgcagcatatcgccagcgatttttttgccgataaggattatttttcaagcaaaccggtgtatcagatgctggtgtttgcggaggaaaacgaaatgccgatctggtcggatattgtggaacaggaaggcttgaaaacggtgcgctggcacgaggaagcggtcgatctgctgcctgcgggaatgtcgaaaacagacggcatcagaagcgtggttgaagcattgggtttggaaatggcggacgtgatggcgttcggagacggtttgaacgatgtggaaatgctgtctgaagtcgggttcggcgtggcaatgggcaacggggaacaggcggcgaaagaagcggcgaaatatgtttgccccagcgttgatgaagacggcgtgttgaggggcttgcaagatttgggcgtgatttga

SEQ ID NO: 40659 - DNA, 684 bp, Neisseria meningitidis
atgcaacacgacgtttacgactacaccgcgcatacggtttctaaaaacaccgtcctgcagaaaacctaccgcctgctcggattttcattcattccggctgccgcaggcgcggcacttgccgccaatgccggtttcaatttttacgccgccttcggttcgcgctggatagggtttgccgtcgtgttggcgtttttctacggtatgatccacttcatcgagaaaaaccgttacagcaataccggcgttaccctgctgatggtattcacattcggtatgggcgtattgatcggccccgtgctgcaatacgcgctccatattgccgacggtgcgaaaatcgtcggcattgccgccgcgatgaccgccgccgtctttttaacgatgtccgccttggcgcgccgaacccggctcgatatgaacgcgctcggacgcttcctgaccgtaggtgcggtcattctgatggtcgccgtggttgccaatctgtttttgggtattcccgcactcgccctgaccatttccgccggttttgtcttgttcagttccttaatgattatgtggcaggtacgcaccgtcatcgacggcggcgaagacagccacatcagcgcggcactgacactgtttatctcgctttacaacatcttcagcagcctgctgaacatcctgctgtctttaaacggcgaggattga

SEQ ID NO: 40660 - DNA, 561 bp, Neisseria meningitidis
atgaatatgaaaaccttattagcactagcggttagtgcagtatgttcagttagtgttgcgcaagcacacgagcataatacgatacctaaaggtgcttctattgaagtgaaagtgcaacaacttgatccagtaaacggtaacaaagatgtgggtacagtgactattactgaatctaactatggtcttgtgtttacccctgatttacaaggattaagcgaaggcttacatggtttccacatccatgaaaacccaagctgtgagccaaaagaaaaagaaggtaaattgacagctggtttaggcgcaagcggtcactgggatcctaaaggtgcaaaacaacatggttacccatggcaagatgatgcacacttaggtgatttacctgcattaactgtattgcatgatggcacagcaacaaatcctgttttagcaccacgtcttaaacatttagatgatgttcgcggtcactctattatgatccacacgggtggtgataatcactccgatcatccagctccacttggcggtggcggcccacgtatggcatgtggcgtgattaaataa

SEQ ID NO: 40661 - DNA, 540 bp, Neisseria meningitidis
atgaaacagcgcaaactgtccctgcgcccatccgacaagagggcaccgcgaggcggtgcaaaaggagaatacgatatgtacaaacatttggtcgttgccgttgacggcagtgaaacgtccatcaatgccctgaaacatgccgccgaacttgcaggagtcaacagcgcgcgcctgactttggtgcacgttgccaatcctgccgaatatatggcactcgcccccgaatttttgcaacacgaaagctacgaagccgccgccgtcgcgcaaggcaacgaagttttggatgccgccgagcgcaccgcccgggaactgggtgtggaaaataccgtcaaacacctgctggttgccaataagggtgcgcgtgaaatggcgcaggatttggttgattatgccgatgaaaacggtgccgacctgctggtgttgggtacgcacggacgtaccgggctgatgcaccttttaatgggcagttttgctgaaacggtaatgcgccaaagccacctgccgcttttgattatccgcagcaaagccgaagaggcgtag

SEQ ID NO: 40662 - DNA, 1407 bp, Neisseria meningitidis
atgaaactgttccaacgcattttcgccacattttgcgcagttatcgtctgtgcaatctttgtggcgagtttttctttttggctggtgcagaacacccttgccgaaaaccagttcaaccaacgccgcaccatcgaaaccactttgatgggcagcatcatttccgcattccgggcacgcggggacgcgggcgcgcgcgaaatcctgacggaatggaaagacagccccgtctcatcgggcgtgtacgttatacagggcgacgagaaaaaagatatcctgaaccggtatatcgacagctataccatcgaacgcgcccggcttttcgccgccggacacccgcattccaacctcgtccatatcgaatacgaccgcttcggcgaagaatacctgttcttcaccaaagactgggacaaactccaagcccgccgcctgcccagccccctgttgatccccggcctgccgctcgccccgatttggcacgaactcatcatattgtccttcatcatcatcgtcggactgctgatggcatatatcctcgccggcaacattgccaaacccatcagaatcttaggcaacggcatggacagggtggcaaacggagaacttgaaacccgtatctcccaacaggtcgacgaccgcgacgacgaattgtcccatcttgccatccaattcgacaaaatggtggaaaaactcgaaaaactcgttgccaaagaacgccacctgctccatcacgtctcccatgaaatgcgttctccccttgcgcgcatgcaggcaattgtcggactgattcaggcgcagccccaaaaacaggagcaatatctcaaacggctggaaggcgaactgacccgcatggatacgctggccggggaactgttaaccctgtcccgtctcgaaacttccaatatggctttggaaaaagaaagcctgaaactcctgcccttcctgggcaacctggtagaagacaatcaaagcattgcccagaaaaacggacaaacggttaccctgtctgccgacggaaaaatccccgaaaatacaaccatccttgccaacgaaagctacctgtaccgcgccttcgacaacgtcatccgcaacgccgtcaactacagtcccgaaggcagcaccatcctgatcaacatcggacaagaccacaaacactggataatcgacgttaccgacaacggccccggcgtggacgaaatgcagctcccgcacatcttcaccgctttctaccgtgcagactccagtgcgaacaaacccggaacaggactggggcttgcattgacccaacatattattgaacagcactgcggaaaaatcatcgccgaaaacatcaaaccgaacggtctgcggatgcgcttcatcctgcccaagaaaaaaaccggttccaaaacagaaaaaagtgcgaactga

SEQ ID NO: 40663 - DNA, 195 bp, Neisseria meningitidis
ttggctgaaggtcaaaaatcagccgtcaccgagtattacctgaatcacggcaaatggcccggcggcaacagtgatgccggcgtggcatcctcctctaaaatcaaaggaaagagacctttgcaaaattcctttccctcccgacagccgaaacccaaacacaggttttcggctgttttcgccccaaatacctcctga

SEQ ID NO: 40664 - DNA, 783 bp, Neisseria meningitidis
atgaaaaccaagttaatcaaaatcttgaccccctttaccgtcctcccgctgctggcttgcgggcaaacgcccgtttccaatgccaacgccgaacccgccgccaaagccgagtccgccggcaaatccgttgccgcctctttgaaagcgcgtttggaaaaaacctattccgcccaagatttgaaagtgttgagcgttagcgaaacaccggtcaaaggcatttacgaagtcgtcgtcagcggcagacagattatctacaccgatgccgaaggcggctatatgttcgtcggcgaactcatcaacatcgacacgcgcaaaaacctgaccgaagaacgcgccgccgatttgaacaaaatcgacttcgcctccctgcctttggacaaagccatcaaagaagtgcgcggcaacggcaagctgaaagtcgccgtcttctccgaccccgattgtccgttctgcaaacgcttggaacacgagtttgaaaaaatgaccgacgtgacggtttacagctttatgatgcccattgccggcctgcaccccgatgccgcgcgcaaggcgcaaatcttatggtgtcagcccgaccgcgccaaagcgtggacggattggatgcgtaaaggcaaattcccggtcggcggcagcatctgcgacaatcccgtcgcggaaaccacttccttgggcgaacaattcggcttcaacggcacgccgaccctcgtcttccccaacgggcgcagccaaagcggctacagcccgatgccccaactggaggaaatcatccgcaaaaatcaataa

SEQ ID NO: 40665 - DNA, 648 bp, Neisseria meningitidis
atgaaacctttgattttagggcttgccgccgtgttggcgctgtctgcctgccaagttcaaaaagcgcccgatttcgactacacgtcattcaaggaaagcaaaccggcttcaattttggtggttccgccgctgaacgaatcgcccgatgtcaacggaacatggggtgtactggcttcgaccgccgctccgctttccgaagccggctattacgtcttccccgccgcagtcgtggaggaaaccttcaaacaaaacggcttgaccaatgccgccgatattcacgccgtccggccggaaaaactgcatcagattttcggcaatgatgcggttttgtacattacggttaccgaatacggcacttcatatcaaattttagacagcgtgacgaccgtatccgccaaagcacggctggtcgattcccgcaacggaaaagagttgtggtcgggttcggccagcatccgcgaaggcagcaacaacagcaacagcggcctgttgggggctttggtcagcgcagtggtcaatcagattgccaacagcctgaccgaccgcggttatcaggtttccaaaaccgccgcatacaatctgctgtcgccctattctcacaacggcatcttgaaaggtccgagattcgttgaagagcagcccaaataa

SEQ ID NO: 40666 - DNA, 531 bp, Neisseria meningitidis
atgaaattcgtcagcgaccttttgtccgtcatcctgtttttcgccacctataccgttaccaaaaacatgattgccgcaacggcggtcgccttggttgccggtgtggttcaggcggcttttctgtattggaaatataaaaagctggatacgatgcagtgggtcggactggtgctgattgtgatattcggtggcgcaaccattgttttgggcgacagccgcttcattatgtggaagccgagcgttttgttttggctgggcgcgctgttcctgtggggcagccacctcgccggtaaaaacggcttgaaggcgagtatcggcagggagattcagctttcagatgccgtatgggcgaaattgacgtatatgtgggtcggttttctgatttttatgggtattgccaactggtttgtgtttactaggtttgaagcgcaatgggtcaactataaaatgttcggctcgactgcactgatgcttgttttctttattattcagggtatttatctgagtacctgtctgaaaaaggaggattga

SEQ ID NO: 40667 - DNA, 270 bp, Neisseria meningitidis
atgctcaaacaatccatcgaaatcatcaacaaactcggactccacgcccgcgcgtccaacaagttcacccaaaccgcgtcccaattcaaaagcgaagtctgggttacgaaaaacgacagccgcgtcaacggcaaaagcattatggggctgatgatgctcgccgccgccaagggtacggtcatcgaactggagacggacggcgcggacgaggcggaagcgatgcgcgccctgaccgacttaatcaacggctacttcggcgagggcgaataa

SEQ ID NO: 40668 - DNA, 1008 bp, Neisseria meningitidis
atgagcaccttcttccggcaaaccgcccaagccatgattgccagacacatcgaccgcttcccactattgaagttggaccaggtgattgattggcaaccgatcgaacaatacctgaaccgtcaaagaacccgttaccttcgagaccaccgcggccgtcccgcctatcccctgctgtccatgttcaaagccgtcctgctcggacaatggcacagtctctccgatcccgaactcgaacacagcctcattacccgcatcgatttcaacctgttttgccgctttgacgaactgagcatccccgattacagtactttatgccgttaccgcaactggctggcgcaagacgacaccctgtccgaattgctcaaactgattaaccgccaactgaccgaaaaaggcctaaaaatagagaaagcatccgccgctgtcgttgacgccaccattattcagaccgccggcagcaaacagcgccaggccatagaagtcgatgaagaaggacaaatcagcggccaaaccacaccgagtaaggacagcgatgcccattggatcaagaaaaacggcctctacaaactcggttacaaacaacatacccgtaccgatgcggaaggctatatcgagaaactgcacatcacccccgccaatgcccatgagtgcaaacacctgtcgcctttgttggaagggttacccgaaggtacgaccgtctatgccgacaaaggctatgacagtgcggaaaaccggcaacatctggaagaacatcagttgctggacggcattatgcgcaaagcctgccgcaaccgtccgctgtcggaaacgcaaaccaaacgtaaccgatatttgtcgaagacccgttatgtggtcgaacaaagcttcggtacgctgcaccgtaaattccgctacgcccgggcagcctatttcggactgattaaagtgagtgcgcaaagccatctgaaggcgatgtgtttgaacctgttgaaagcggccaacaggctaagtgcgcccgctgccgcctaa

SEQ ID NO: 40669 - DNA, 564 bp, Neisseria meningitidis
atgaccgatttagaaaccaaacgccttgaaacacaggcgatgcttgaaaacgccgatcttttgttcgaccaaggccaatgccgtgccgcactgcaaaaagtggcggacgagattacgcgcgatttgggcggcaaatatccgctgctgctgcccgtgatgggcggcgcggtggtgtttacggggcagttgctgccgctgttgcgttttcccttagattttgattatgttcacgtttcccgttacggcgacaagctggagggcggcgcgttcaactggaagcgtatgcccgatgcggaacaaatccggggcaggcacgtcgtcgtgctggacgatattttggacgaagggcatacgatgtccgccattcaagccaaacttttggaaatgggtgcggcaagctgccgtgcggcggtgttcgccaacaagctgattgacaaacccaagcctatccgagccgattatgtcggactggatgtgccgaaccgttatgttttcggttacggcatggatgcggcgggctgctggcgtaatttgggcgagatttacgcattggacggaaaataa

SEQ ID NO: 40670 - DNA, 474 bp, Neisseria meningitidis
atgaaaaaattattggcagccgtgatgatggcaggtttggcaggcgcggtttccgccgccggagtccacatcgaggacggctgggcgcgcaccaccgtcgaaggtatgaaaatgggcggtgcgttcatgaaaatccacaacgacgaagccaaacaagactttttgctcggcggaagcagccccgttgccgaccgcgtcgaagtgcatacccacatcaacgacaacggcgtgatgcggatgcgcgaagtcgaaggcggcgtgcctttggaagcgaaatccgttaccgaactcaaacccggcagctatcacgtgatgtttatgggtttgaaaaaacaattaaaagagggcgacaagattcccgttaccctgaaatttaaaaacgccaaagcgcaaaccgtccaactggaagtcaaaatcgcgccgatgtcggcaatggaccacggtcatcaccacggcgaagcgcatcagcactaa

SEQ ID NO: 40671 - DNA, 423 bp, Neisseria meningitidis
atgaaaatcaccaaaatcttcaccttcgactcctcgcatatgctcgacgggcatgacggcaaatgccaaaacctgcacggacatacctacaaactcgaaatcaccgtttcagacggcattatcaaaggcggcgcgaaagacggtatggtgatggactttaccgacttgaaagccattgtcaaacaacacattaccgaccccttcgaccacgccttcatctaccacggcggcaacagccgcgaatgccaaatcgccgcgcttttggagggctggaacatgaaaaccctgcgcctgccctgccgcaccactgccgaaaatatggcggtcgaaatgtacggccgtctgaaaaacgcggggctgaacgtgtgccgcgtgaaattgtgggaaacgccgacatcgtgtgcggagtatgaaggggagtag

SEQ ID NO: 40672 - DNA, 966 bp, Neisseria meningitidis
atgagctacacgcaactgacccaaggcgaacgataccacatccaatacctgtcccgccactgcaccgtcaccgaaatcgccaaacagcttaaccgccacaaaagcaccatcagccgcgaaatcagacggcaccgcacccaagggcagcaatacagcgccgaaaaagcccagcggcaaagccggactatcaaacagcgtaagcgacaaccctataagctcgattcgcagctgattcagcacatcgacacccttatccgccgcaaactcagtcccgaacaagtatgcgcctacctgtgcaaacaccaccagatcacgctccaccacagcaccatttaccgctaccttcgccaagacaaaagcaacggcagcacgttgtggcaacatctcagaatatgcagcaaaccctaccgcaaacgctacggcagcacatggaccagaggcaaagtacccaaccgtgtcggcatagaaaaccgacccgctatcgtcgaccagaaatcccgtatcggcgattgggaagccgacaccattgtcggcaaaggacagaaaagcgcattattgaccttggtcgaacgcgttacccgctacaccatcatctgcaaattggatagcctcaaagccgaagacactgcccgggcagctgttaggacattaaaggcacataaagacagggtgcacaccatcaccatggataacggcaaagagttctaccaacacaccaaaataaccaaagcattgaaagcggagacttatttttgtcgcccttaccattcttgggagaaagggctgaatgagaacaccaacggactcatccggcaatacttccccaaacaaaccgatttccgtaacatcagtgatcgggagatacgcagggttcaagatgagttgaaccaccgaccaagaaaaacacttggctacgaaacgccaagtgttttattcttgaatctgttccaaccactaatacactag

SEQ ID NO: 40673 - DNA, 643 bp, Neisseria meningitidis
atgagaaaaagtcgtctaagccggtataaacaaaataaactcattgagctatttgtcgcaggtgtaactgcaagaacggcagcagagttagtaggcgttaataaaaataccgcagcctattattttcatcgtttacgattacttatttatcaaaacagtccgcatttggaaatgtttgatggcgaagtagaagcagatgaaagttattttggcggacaacgcaaaggcaaacgcggtcgcggtgctgccgataaagtcgccgtattcggtcttttgaagcgaaatggtaaggtttatacggttacagtaccgaatactcaaaccgctactttatttcctattatccgtgaacaagtgaaacctgacagtattgtttatacggattgttatcgtagctatgatgtattagatgtgcgcgaatttagccattttagcttcgctgaaacttcgttttcgtatcaatcacagcacacattttgccgaacgacaaaaccatattaatggaattgagaacttttggaaccaggcaaaacgtcatttacgcaagtttaacggcattcccaaagcgcattttgagctgtatttaaaggagtgcgaatggcgttttaacaacagtgagataaaagttcttgttccattttaa

SEQ ID NO: 40674 - DNA, 1140 bp, Neisseria meningitidis
atgaaaaaaacactggtggcggcggcaatcctgagcctcgccttgactgcgtgcggcggcggaagcgataccgccgcccaagccccctccgccaagcccgaagccgaacaatcgggcaaactcaatatctacaactggtcggattatgtcgatcccgaaaccgtcgccgcctttgaaaaagaaaccggcatcaagacgcgttccgattattacgacagcaacgaaacactggaggcaaaagtcctgaccggcaaatccggctacgacctgaccgcgccgtccatcgccaacgtcggccggcaaatcaaagcgggcgcgtatcagaaaatcgacaaggcgcaaatcccccattacggcaacatcgataaagatttgctgaaaatgatggaagccgtcgatccgggcaacgaatacgccgtcccctatttctggggcatcaacaccttggcaatcaacacgcggcaggtgcaaaaggcattgggtacggacaagctgcccgaaaacgaatgggatttggtgttcaaccccgaatacaccgccaaactcaaatcctgcggcatcagctatttcgacagcgcaatcgaacagattcccttggcgttgcactatttgggcaaagaccccaacagtgaaaatcccgaagacatcaaagccgccgtcgatatgatgaaagccgtccgaggcgacgtgaaacgcttcagctcttccggctatatcgacgatatggcggcgggcaacctgtgtgccgccatcggttacggcggcgatttgaacattgccaaaacccgtgccgaagaagccgcaaacggcgtggaaatcaaagtattgaccccgaaaaccggcgtgggcgtgtgggtggattcctttatgattccgcgcgacgcgcaaaacgtcgccaacgcccaccgctatatcgactacacgctccggcccgaggtggcggcgaaaaacggcagcttcgttacctacgcgcccgccagccgtcccgcgcgcgagctgatggatgaaaaatacacctccgacgcatcgattttcccgaacaaagaactgatggaaaaaagtttcatcgtatcgcccaaatccgcagaatccgccaaactgggcgtgaagctgtggcaagggctcaaggccggaaaataa

SEQ ID NO: 40675 - DNA, 1719 bp, Neisseria meningitidis
atgaacctacatcaaaccgtcgaacacgaagccgccgccgcctttgccgccgcaggcatcgccggcagccccgttgtcttgcagccgaccaaaaatgccgaacacggcgatttccaaatcaacggcgtgatgggtgcggcgaaaaaagccaaacaaaacccgcgcgaactggcgcaaaaggtcgccgacgcattggcaggcaacgccgtcatcgaaagcgcggaagtcgccggtcccggttttatcaacctgcgcctgcgccccgaatttctcgctcaaaacattcatgcggccttgaacgacgcgcgtttcggcgtggcaaaaaccgacaaaccgcaaaccgtcgttatcgactattcctcgcccaatctggcaaaagaaatgcacgtcggccatctgcgttccagcatcatcggcgacagcatttcgcgcgtgtcagaatttatgggcaataccgttatccgtcaaaaccacgtcggcgactggggtacgcaatttggcatgttggtcgcttatttggtcgagcagcaaaaagacaatgccgcattcgagctggcggatttggagcagttttaccgcgccgccaaagtgcgctttgacgaagaccccgcctttgccgacaccgcgcgcgaatacgttgtgaagctgcaaggcggcgatgaaaccgttttggcattgtggaaacagtttgtcgatatttcgctctcgcacgcccaagccgtttacgacacgctgggcttgaagctgcgccccgaagacgtggcgggcgaatcgaaatacaacgacgatttgcagcccgtagtcgataatttggttcaaaaaggtctggcagtcgaagacgacggcgcaaaagtcgtgttcttggacgagtttaaaaacaaagagggcgaacctgccgcatttatcgtgcaaaaacaaggcggcggcttcctttatgcttccaccgacttggcgtgtttgcgctaccgcgtcggcacgcttcatgccgaccgcctgctgtacgtcgtcgaccaccgccaagccctgcacttcgagcaactctttaccacttcccgcaaagcaggctatttgccggaaaacgtcggcgcggcatttgtcggcttcggcacgatgatgggcaaagacggcaaaccgttcaaaacgcgcagcggcgacaccgtaaaactggtcgatctgctgaccgaagccgtcgagcgcgccaccgctttggtgaaagaaaaaaatcccgaattgggcgcggatgaagccgctaaaatcggcaaaaccgtcggcatcggcgcggtcaaatacgccgatttgagcaaaaaccgcaccagcgattatgtgttcgactgggacgccatgctctcgtttgaaggcaacaccgccccctatctgcaatacgcctacacccgcgtgcaaagcgtgttccgcaaagcaggcgaatgggatgcaaatgcgccaaccgttttgaccgaaccgctggaaaaacagcttgccgccgagctgctgaaatttgaagacgtactgcaaagcgtggcggacacggcgtatccgcactacctcgccgcctacctctatcaaattgcgaccctgttcagccgcttctacgaagcctgtccgatactcaaagccgaaggcgcaagccgcaacagccgcctgcaactggcaaaactcaccggcgacacgctgaaacaaggcttggatttgctgggcatcgatgtgttggacgtaatgtaa

SEQ ID NO: 40676 - DNA, 2391 bp, Neisseria meningitidis
atgactgaacaaaaacacgaagaatacggcgccgacagcattcaggtgctcgaaggcttggaagcggtacgcaaacgacccggaatgtacatcggcgacacgcaggacggcagcggcctgcaccatatggtgtttgaagtattggacaacgccattgacgaagcactcgccggacattgcgacaaaatcacggtaacgatacacgccgaccattccgtcagcgtcgccgacaacgggcgcggtatgcccaccggcatccacccgaaagaaggacgctccgccgccgaagtcatcatgaccgtattgcacgcgggcggtaaattcgacaacaacagctacaaaatctccggcggcctgcacggcgtgggcgtgtccgtcgtcaacgcgctgtccgactgggttacgctgaccatctaccgcgacggcaaagaacacttcgtccgcttcgtgcgcggcgaaaccgaagagccgctgaaagttgtcggcgattccgataaaaaaggcacgaccgtgcgcttcctcgccagtacggaaaccttcggcaacgtcgaatacagcttcgacatccttgccaaacgcatccgcgaactttcgttcctgaacaacggcgtggacatcgaattgaccgacgagcgcgacggcaaacacgaaagcttcgccctttccggcggcgtggctggattcgtgcaatacatgaaccgcaaaaaaacgcccttgcacgaaaaaatcttctacgcgttcggcgagaaagacggcatgagcgtcgaatgcgcaatgcaatggaacgacagctatcaggaaagcgtgcagtgcttcaccaacaacatccctcagcgcgacggcggtacgcacctgaccgcgttgcgccaagtgatgacgcgcaccatcaacagctacatcgaagccaacgaagtcgccaaaaaagccaaagtggaaaccgccggcgacgatatgcgcgaaggtttgacctgcgtgttgtccgtcaaactgcccgaccccaaattttcgtcccaaaccaaagacaaactggtttccggcgaaatcggtcccgtcgtcaacgaagtcatcagccaagccctgaccgacttcctcgaagaaaaccctgccgaagccaaaatcatcaccggcaaaatcgtcgatgccgcccgcgcgcgcgaagccgcccgcaaagcccgcgaaatcacccgccgcaaaggcgtgatggacggcttggggctacccggcaaactcgccgactgccaagaaaaagaccccgcattgtcagaactttatctggtcgagggcgattctgcaggcggttccgccatgcaggggcgcgaccgcaaattccaagcgattttgccgcttaagggcaagattttgaacgttgaaaaggcgcgctttgaaaaaatgctcgccagtcaggaagtagccgctttgattaccgcgttgggcgcgggcatcggcaaggaagaattcaatgccgagaagctgcgttaccaccgcatcattatcatgaccgatgccgacgtggacggcgcgcacatccgcaccctacttttgaccttcttctaccgccaaatgcccgaactggtcgagcgcggctacatctatatcgcccagccgcctttgtataaagcgaaatacggcaaacaggagcgttacctcaaagacgaactggaaaaagaccaatggctgctcggtcttgccttggaaaaagccaaaatcgtttcagacggccgcaccatcgaaggcgcagaacttgccgacaccgccaaacaattcctgttggcaaaaaccgtcatcgaacaggaaagccgcttcgtagacgaactcgtcctgcgcgccatgctacacgcgtcgcccattgatttgacgtcgtctgaaaacgccgataaagccgttgccgaactttccggtctgcttgacgaaaaagaagtcgccctcgaacgcatcgaaggtcatgaaggacaccggttcatcaaaatcacgcgcaagctgcacggcaacgtcatggtcagctacatcgaacccaagttcctcaacagcaaagcctaccaaaccctcacccaaaccgccgccgcgctcaaaggcatggtcggcgagggtgccaagctttacaaaggcgaaaacgggtacgacgcggacagctttgaaaccgctttggacatcttgatgagcgttgcccaaaaaggtatgtccatccaacgatacaaaggcttgggcgagatgaaccccgaacagctgtgggaaaccacgatggatcccgccgtgcgccgcctgttgaaagtgcgcatcgaagacgccatcgccgccgacgaagtgttcgttacgctgatgggcgacgaggtcgagccgcgccgtgcctttatcgaaaacaacgcgctgattgcccaaaatatcgacgcataa

SEQ ID NO: 40677 - DNA, 1131 bp, Neisseria meningitidis
atgtttaccgatgaaaatatgaccgcaaaggaagaactgttcgcatggctgcgccatatgaaccaaaacaaaggttccgacctgttcgtgacgacccatttcccgcccgcgatgaagttggacggcaaaatcacccgcatcacggacgagccgctgacggcggaaaaatgtatggaaatcgccttttcgattatgagtgcgaagcaggcggaagaattttcatcgaccaacgagtgcaacttcgccatcagtctgccggacaccagccgcttccgcgtcaatgcgatgatacagcgcggcgcgacggcgttggtattccgtgcgattaccagcaagattcccaagtttgaaagcctgaacctgccgccggtcttgaaggatgtcgcgctgaaaaaacgcgggctggttatttttgtcggcggcaccggctcgggcaaatcgacttcgcttgcctcgcttatcgattaccgcaatgaaaattcgttcggacacatcatcaccatcgaagacccgatcgagtttgtccacgaacacaaaaactgcatcatcacccagcgcgaggtcggcgtggatacggaaaactggatggcggcgttgaaaaacacgctgcgtcaggcgccggatgtcatccttatcggcgaaatccgcgaccgcgaaacgatggactacgccattgcctttgccgaaacggggcatttgtgtatggcgacgctgcacgccaacagcaccaatcaggcactcgaccgcatcatcaactttttccccgaggagcggcgcgaacaattgctgacggatttgtcgctcaaccttcaggcgtttatttcgcaacgcctcgttccgcgagacggcggcaagggcagggtggcggcagtcgaggtgctgctcaattcgcccctgatttcggagttgattcacaacggcaacatccatgaaatcaaagaagtgatgaaaaaatccactaccctgggtatgcagaccttcgatcaacacctttaccaattgtatgaaaaaggcgatatttccctgcaagaagcattgaaaaatgccgattccgcacacgatttgcgtttggcggtacagttgcgcagccgccgcgcgcaaagttccagccccgatttggaactgctctga

SEQ ID NO: 40678 - DNA, 1179 bp, Neisseria meningitidis
atggaatttgtttacgacgtggcagaatcggcagtcagccctgcggtgattaaagtaatcggcttgggcggcggcggttgcaatgcaatcaataacatggttgccaacaatgtgcgcggtgtggagtttatcagtgccaatacggatgcgcagtctctggcaaaaaaccatgcggcgaagagaatccagttgggtacgaatctgacacgcggtttgggcgcgggcgcgaatcccgatatcggccgtgcggcagcccaggaagaccgggaagccattgaagaagccattcgcggtgcgaatatgctgtttatcacgaccggtatgggcggcggtaccggtaccggttccgcgccggttgttgctgagattgccaagtctttgggcattctgaccgttgccgtggttacccgaccgttcgcatatgaaggtaagcgcgtccatgtcgcacaggcagggttggaacagttgaaagaacacgtcgattcgctgattatcatcccgaacgacaaactgatgactgcattgggtgaagacgtaacgatgcgcgaagccttccgtgccgccgacaatgtattgcgcgatgcggtcgcaggcatttccgaagtggtaacttgcccgagcgaaatcatcaacctcgactttgccgacgtgaaaaccgtgatgagcaaccgcggtatcgctatgatgggttcgggttatgcccaaggtatcgaccgtgcgcgtatggcgaccgaccaggccatttccagtccgctgctggacgatgtaaccttggacggagcgcgtggtgtgctggtcaatattacgactgctccgggttgcctgaaaatgtccgagttgtctgaagtcatgaaaatcgtcaaccaaagcgcacatcccgatttggaatgcaaattcggtgcggctgaagacgagaccatgagcgaagatgccatccggattaccattatcgctaccggtctgaaagaaaaaggcgcggtcgattttgttccggcaagggaggtagaagcggttgccccgtccaaacaggagcaaagtcataatgtcgaaggtatgatccgcaccaatcgcggtatccgcacgatgaaccttaccgctgcggatttcgacaatcagtccgtacttgacgactttgaaatccctgcgattttgcgtcgtcaacacaattcagacaaataa

SEQ ID NO: 40679 - DNA, 1536 bp, Neisseria meningitidis
gtgtctgattccaagacgaaagaacgcgccacattcggcacgcgccgcgcgtttatgattgccgccatcgggtccgccgtcggcttgggcaatatttggcgtttcccctatattgcttttgaaaacggcggcggcgcgttcatcctgccctatctggtcgcgcttctgacggcgggcatcccgctgctgctgctcgattatgccatcggccaccgttaccgtggttctgcgcccttggctttccgccgcctcggacgatggtttgagccggtcggctggtggaacgtgatgaccaatatcgtcatctgcatctattacgcggtaattatcggttgggcggcaagctatacctattattcggtcaacgccgcctggggtgcggatccgcagggttttttctttaaggacttcctgcaaatggcgggcccggaagccttgggtttggattttgtcggcaaagtcgccggtcctttggcgggcgtgtgggtttttaccgccgccattatggcgttgggcgtgcaaaagggcgtggcgcgcgcctcgtcgttctttatgccgctgcttttggtgatgtttttgattatggtcggcatttcactaaccctgccgggtgcggcaaagggcttggacgcattgtttacgcccgactggtcgaaactcgccgattccaaggtctgggtggcggcatacgggcagattttcttttcgctttccatctgcttcggcattatggttacctattcttcttatttgaagaaaaaaaccgacttgggcggaacggggctggtggtcggttttgccaacagcagctttgaactgctcgcgggcatcggcgtgtttgccgcattgggctttatggcgcaggcgggcggtaaggcggtcaacgaggttgcctcaggcggcatcggtttggcgtttatcgcctttccgaccattatcaaccaggcaccgatgggctggctgatcggcatattgtttttcggttcgctggtgttcgccggcgttacgtcgatgatttccatccttgaagtgattgtggcggcgattcaggacaagctgaacatcgggcgcgtcaacgccacgctgctggtctgcattccgatgggcattgtttccacgctgctgttcggtacggcgacggggctgccggttttggacgtgatggacaaattcgtcaacacctacggcattgttgccgccggctttgtttatgttgccgccatcatcatcagcggcaggctgccggaattacgcaagcacctgaacgctttgtcctccatccgcatcggcggcttgtggacggtctgcgtcgtggttaccgtcgtgatgctcggctatatgctgtttaaagataccagcggcctgatggagaaaaattacgaaggttatccggatggtttcctcagtattttcggctgggggatgtcggcggcgttggtcgtgttcgggctgctgctgtcgttgctgccttggaaacacggtcaggatttcaacgtcaaagacgaacacgaacatgaacaaggagaagaaaaatga

SEQ ID NO: 40680 - DNA, 417 bp, Neisseria meningitidis; identical to SEQ ID NO: 36952

SEQ ID NO: 40681 - DNA, 1521 bp, Neisseria meningitidis
atgttttttatttcaatccgctatatatttgtcagaaaactatggcgcgcaaacggtcagccctttaaaataacgcctttacgcatcgaaaatccaccggaacgcaacattatgatgaaaaatcgagttaccaacatccattttgtcggtatcggcggcgtcggcatgagcggcatcgccgaagtcttgcacaatttgggttttaaagtttccggttcggatcaggcgcgaaatgccgctaccgagcatttgggcagcctgggcattcaagtttatcccggccataccgcagaacacgttaacggtgcgaatgtcgtcgttacctctaccgccgtcaaaaaagaaaatcccgaagttgtcgctgcgttggagcagcaaattcccgttattccgcgcgccctgatgttggcggagttgatgcgcttccgtgacggcatcgccattgccggcacgcacggcaaaaccacgaccaccagtctgaccgcctccatcctcggcgcggcaggacttgacccgactttcgttatcggcggcaaactcaacgccgcaggcaccaacgcccgcttgggcaaaggcgaatacatcgttgccgaagccgacgagtcggatgcatcctttctgcacctgacaccgattatgtccgtcgttaccaatatcgacgaagaccatatggatacctacgggcacagcgtcgaaaaactgcatcaggcgtttatcgatttcatccaccgtatgcccttctacggcaaagcctttttgtgtattgacagcgaacacgtccgcgcgattttgcccaaagtgagcaaaccttatgctacttacggtttggacgataccgccgacatctacgccaccgacatcgaaaacgtcggcgcgcaaatgaaattcaccgtccatgttcaaatgaaaggacatgagcaggggtcgtttgaagtcgtgctgaatatgcccggcagacacaacgtgctgaacgcattggcagccatcggcgtggcgctggaagtcggcgcatcggttgaagcgatccaaaaaggcttgctcggctttgaaggtgtcggccgccgcttccaaaaatacggcgacatcaagttgccaaacggcgggaccgcgctcttggtggacgactacggacaccaccccgtcgaaatggcggcgaccctttccgccgcacgcggcgcgtatccggaaaaacgtttggtactcgccttccagccgcaccgctatacccgcacgcgcgatttgtttgaagactttaccaaagtcctcaataccgttgacgcgctggtgctgaccgaagtttatgccgccggtgaagagccgattgccgccgccgattcccgcgctcttgcccgcgccatccgcgtgttgggcaaactcgagccgatttactgcgaaaacgttgccgatctgcccgaaatgctgttgaacgttttgcaggacggcgacatcgtgttgaatatgggcgcgggaagcatcaaccgcgtccccgccgcgctactggaattgtcgaaacagatttga

SEQ ID NO: 40682 - DNA, 216 bp, Neisseria meningitidis
atggaccaatcagtattgcgtgttaatcaggtagccgagcgtttaggcgtgagccgttcgaccgtgtggaattggggcaatactaaaagccgccattaccgcgccgattttccgcgcccgttcaaagtatccgcaaacgtcgttggctggctttccagtgagattgacgactatatcggcaaactggccgccaaacgcgaagagcagacagattaa

SEQ ID NO: 40683 - DNA, 1575 bp, Neisseria meningitidis
atgaaaaaatcccttttcgttctctttctgtattcatccctacttaccgccagcgaaatcgcctatcgctttgtattcggaattgaaaccttaccggctgcaaaaatggcagaaacgtttgcgctgacatttgtgattgctgcgctgtatctgtttgcgcgttataaaacttcgcggctgctgattgcgctgtttttcgcgttcagcattattgccaacaatgtacattatgcggtttatcaaagttggatgacgggtattaactattggctgatgctgaaagaggttaccgaagtcggcagtgcgggcgcgtcgatgttggataagttgtggctgcctgcgttgtggggcgtgttggaagtcatgttgttttgcagccttgccaagttccgccgtaagacgcatttttctgccgatatactgtttgccttcctaatgctgatgattttcgtgcgttcgttcgacacgaaacaagagcacggtatttcgcccaaaccgacatacagccgcatcaaagccaattatttcagcttcggttattttgtcggacgcgtgttgccgtatcagttgtttgatttaagcaggattcccgcctttaagcagcctgctccaagcaaaatcgggcagggcagtgttcaaaatatcgtcctgattatgggcgaaagcgaaagcgcggcgcatttgaagctgtttggctacggacgcgaaacttcgccgtttttaacccggctgtcgcaagccgattttacgccgattgtgaaacaaagttattccgcaggctttatgactgcagtgtccctgcccagttttttcaatgcgataccgcacgccaacggcttggaacaaatcagcggcggcgatactaatatgttccgcctcgccaaagagcagggctatgagacgtatttttacagcgcgcaggcggaaaacgagatggcgattttgaacttaatcggtaagaaatggatagaccatctgattcagccgacgcagcttggctacggcaacggcgacaatatgcccgatgagaagctgctgccgctgttcgacaaaatcaatttgcagcagggcaggcattttatcgtgttgcaccaacgtggttcgcacgccccatacagcgcattgttgcagcctcaagataaagtattcggcgaagccgatattgtggataagtacgacaacaccatccacaaaaccgaccaaatgattcaaaccgtattcgagcagctgcaaaagcagcctgacggcaactggctgtttgcctatacctccgatcatggccagtatgttcgccaagatatctacaatcaaggcacggtgcagcccgacagctatctcgtgccgctggtgttgtacagctcgaataaggccgtgcaacaggctgccaaccaggcttttgcgccttgcgagattgccttccatcagcagctttcaacgttcctgattcacacgttgggctacgatatgccggtttcaggttgtcgcgaaggctcggtaacgggcaacctgattacgggtgatgcaggcagcttgaacattcgcgacggcaaggcggaatatgtttatccgcaatga

SEQ ID NO: 40684 - DNA, 420 bp, Neisseria meningitidis
atgacttatacagtttatagttttgagaagaaatttcttgagaagtttggtgtttatggtctgagtgttcttaatttccgagggtctatgtacccgttggatatatactgcccaaagcacgggaatcagacggtctccaatgcgacatcctgtctccgctctaaactcggctgtcctgcttgcggaagggaacaccaacagtcaaaagcctctgaacgtctaaaacagtcaagcaagtctgccaaacccctcctcatcctcgacacaatgaccaacgaaacactcgcgttccccagcgttactgccgcaggcactgctttaggtgtgcatttccaacaaatcaatcacaggctcaagggtcgaacgtcgcccgacaaccttatttcaaacaggtacaaagtgcttgggtacgataggtag

SEQ ID NO: 40685 - DNA, 423 bp, Neisseria meningitidis
atgagcgagcagacggcattggccgtgtgtgccgacggtgtggaaacggcattggcggaagcggcatcactgttggaagagggatgcgggtcggttttggttttggcggcggacgatccgctgccggaaggatatgccgtatcggcaacgcgcgcgccgtttgcttatgctttggcgatggttctgaccaaagggacgcgttacagcctgactctgtctgcttcggacgatatgccgtctgaagccggtatgctgcccgaggcatattggagcggtttggaatgggtgcgctttctgctgaacggcagtcgggaatgccgccgggtatatcgcaatcgtgaatggctgtggcagcccgcaagctgcaggctgaagatttccgcaatgtccgcaccgtcaacgacgtggtacaggcggtattga

SEQ ID NO: 40686 - DNA, 261 bp, Neisseria meningitidis
atgaaatacttgatccgcaccgccttactcgcagtcgcagccgccggcatctacgcctgccaaccgcaatccgaagccgcagtgcaagtcaaggctgaaaacagcctgaccgctatgcgcttagccgtcgctgacaaacaggcagagattgacgggttgaacgcccaaatcgacgccgaaatcagacaacgcgaagccgaagaattgaaagactaccgatggatacacggcgacgcggaagtgccggagctggaaaaatga

SEQ ID NO: 40687 - DNA, 507 bp, Neisseria meningitidis
atggttgacgcttggtctgtccctgattttgaatcgaaaatctgtccgcccgaggcgttggcggcgcgtttggcgttgttgccgcgcccgctggtgtttaccaacggctgtttcgacatcctccacagggggcacgttacttatctggcgcaggcgcgttcggcaggggcggcgttggtgctggcgttgaataccgatgcttcggtgcggcgtttgggcaagggcggcgaccgcccgattaatcctttggagaaccgtgccgccgttgccgccgcgttggaaagtgtggatttggttacttggtttgacggggatacgccggcggcgttgattgaggcggtcaaacctgagattttggtcaagggcggcgattgggctgcggataagattgtcggtgcggcagaaacgttggcgcgcggcggtcaggtgttttcaattccgtttctgcaccagacttcgacaacgaagactttggcaaaaatccgtgcggcagagggcggaaaatga

SEQ ID NO: 40688 - DNA, 732 bp, Neisseria meningitidis
gtgtcgcgcgaaatcaatgcgggcgggcatcatttcctctacggcggcatcagcggcggcggcgtgcattattgggataacaaagatttcagcgaacagtgcctgcgcctgtcgctcggctataaaaatcgttcggtaacgcgctcgttcggcatcgtgccgtttgtcgggcaaaacctcttaggctgcagccgatacaatttcgtcggcggctttaatgccgatttctcccaacacttgagcgaacgctggcggttgacactaaacgcgggcaatatgtggaagcattatcaggaagaccgcaccgccgcccgatacgacagccatatgccgctggcgggcgcgacgctgatgtattccgcgccgaaagactggctgctttacggcggggcggactggtcgcacgacttgacgaaggaggcggaacaggcttccgtccgcaagggtttgcgtatcggcgcggtcaaaacgttcgacggcggcttgggtctgcgggcaaacctgcgctatacacgcaggacgtttgacgcgcccgggaccattgtgtaccgcttcccgcgcaaagaccacgaatatcaggcaaacctgtcgttttggcacgacaaaatctcttggaagggctttacgccgcaactcaatttccgctatctgaaaatcgacagcaatatgaaaagtttttacacacgcaaaaacacgcagattttcatgagcgtggaaaaggatttcaaataa

SEQ ID NO: 40689 - DNA, 1407 bp, Neisseria meningitidis
atggaaaaaaacaccctatccgcccgcgcaccatccccttggctgccgcttctgctggcaattgccatttttatgcagatgttggatgcgaccattttaaataccgcactgcctgaaattgccgccgacatgaatgagtcgcctctggatatgcaactggcagtcgttgcctatacgctgacggttgccctgctgattcctttgagcggttatttggcggacaggttcggaacgaaaaaagtctttttcggttcgattgccgtttttatgctcggatcggcattgtgcgccgcatcgggttcgctgtttgaattgacgctttcccgtgtcgttcagggcatcggcggttcgatgctggttccgataccgcgtctgaccatcttgcgtatgtacgacaagtccaagctgctcaatgctatcaattatgcggtcatgcctgcattaatcgggccggttttagggcctttggcgggcggttatttggtcgaatacgcttcgtggcactggattttcctgctcaacctgcccatcggtctgctgggtttcatattgggacgcaacatcatgcccgatgtcaaaggcaacgataccgctctggatttcaaaggctatctgattttttctgccgccgcgtgcctcttgttactttcggcagaaagcctgtcgcacgcgctgcctccgtattttgcactgttgccgctgtgcggcggactgctgtttgcacgccgttatttccgacatatgaaaaccgcgtccaaaccgatttattccgccgacctgtttctgatacgcactttccgtctgggactggcgggcaatctgttcagccgtctcggcatcagctcgattccttttctgatgcccctgatgtttcaagtcgctttcggcttcggcgcaagcctgtcgggttggctggtcgcccccgtcgccctgtcttcgctgctggtcaaaccgctgattgcaccgctcatgaaacgtttcggctaccgcacggtactgctttggaacaccaagctgcttgccgccttcatcatgctgctcgccctgcctgacggaaactcgtcgctgtggatttggattttcctctcgctggcgatcggcgcgtgcaactccctgcagttttctgccatgaatacactgaccctcgccgatttgcgcccgcaacagaccggcagcggcaacagcctgatggcggtcaaccaacagcttgccatcagcatgggcattgttgtcggcgcattaatccttaaaaactggacatttctgataccggcttcttcaggtctgcattccgccttccgtatgaccctgctcagtatcggcggcatcacccttgcctcgtcgttggttttcaagcgtctgcacgtttcagacggtgcaaacctgacacggaacacaccgtcctaa

SEQ ID NO: 40690 - DNA, 360 bp, Neisseria meningitidis; identical to SEQ ID NO: 36299

SEQ ID NO: 40691 - DNA, 1746 bp, Neisseria meningitidis
atggaacggcagacagatgaatttgcccaagcggcggcaagggcggcaatccgttttttggaacactatgcgggttccggcgacgaagtgcttgcaaactgcaccgaacgcctgtttcaggcattgcaaaacggtcattcgtttatccgtttgagcggtggcgaggctgacgcgctgtcggcactcgcacccgttgtcggaacatccgccgcgcctttgattttggaaggcagaaggctgtttttgggcaggatgtggcagttggaatacgatttggctgccgagataaaacgcttggcggcagccgacacgtccgcccccgacgcggcaggcgcgaggcaaaacctcgcaaaatggtttcaaggcacgggcagcgaagggcagcgcgatgccgccgccttggcactgttgcagtcttttatggtgattaccggcgggccgggaacgggcaaaacgacaacggttgccaaactgctggcgctgatttgcggtaaagacgaaaatcttcccaacatcgcgcttgccgcaccgacgggcaaagcggcggcacatatggcgcgcgcgctgcaccgtgcaatcaacggttttgacgcgctggaggccgtccgccgccatttgctcaaactggaagggcaaaccgtccaccgactgctgaagctgcgcccgcccaaaatgcaggcggcgttcaaccctgtttacccgctgccgtttgacgtattggttatcgatgaagcctctatgctggatacggcattgatgctgcaacttttaaaagcggtcaaaaccggcgcgcgcgtgattctgctgggggatgaaaaccagctcccgtccgtcggaataggggcggtgctgtccgttttgtcacaaaaaaccgttttggacggagaaacgcaccaaaggctggccggcttccttccggaacacggtttcagcgtcagcgcaaatccgcccgtgttggcgcaaaacaccgcccatctgtcgttcagccaccgcttcggcgacaacagcggcatcggctgccttgcccgtgccgccgtatcgggcgatgagggggcgtgggcattgtttgaccggtttccggacgaactggaacattcggaatgcagtccgaacgctcgagtcgaaaggttgtaccgggcgcacaaagcctattggcaggcggtaaaagacggcaatatcgaagccgcatacgcaggcatctcggatatcgtggtcctggcagcttggcggcaggatgcggaagacttcaacgaagcctattgcagccatgtacgccgcaaaatgaacataccggaacatcaggcctatttcgccggagaaccgattatgatcaggcagaacgactacgcgcttgaactgttcaacggcgacatcggattgattatggaagatgtcggacggcagggcagccttgccgcctattttgccgatgcggacggatttaaaaaggtagcggtaagctgcctgcccgatttcgaacccgcattcgccatgaccgtccacaaaagccaaggttcggaatatcgggaagtctggctgctgccgccttccgccgcaccttcggacgaaggggacgacgcgctttcgggcttgagcagagggctgctttacacagccattacccgcgcgagggaaaagttcgtatttttcggcggggaagaagccttccggcaagccgccgccaccgtcaaagcgcgtcagacggcattgggcagtatgcttgggcgggtattttcacaaggataa

SEQ ID NO: 40692 - DNA, 354 bp, Neisseria meningitidis
ttgctgtgttttaatggcagcattgaaaaacacatcttattcaatcaaccgattaagaaaggactgaaaatgaaaaaactgttattggctgccgttgtttccctgagtgccgcaaccgcatttgccgacgattctgccgagcgtcagatttacggtgatccccattttgaacaaaaccgcacaaaagccgtaaaaatgttggaacagcgcggttatcaggttcacgatgtcgatgccgacgaccattggggcaaacctgttttggaagtggaagcctataaagacggccgcgaatacgacatcgtgttgtcttaccccgacctgaaaatcatcaaagagcagctcgatcgctga

SEQ ID NO: 40693 - DNA, 408 bp, Neisseria meningitidis
atgaaaatttataatttagataatattataacttcatcagcattgagtctgtataaatccacttgggttaagttagatttaatatcttgtgctaaatttatcatagaaggaacggattttacttttgattgggatgaaggaattgaaaattggatagttttttttcataaaaacaaagttattggttatttgtgtgcaaaattaccttttgctatattagacaacgaacaattaaaaaatcagctatatcacaaatatcctcatgtattaaccttacaaattaaaaatattgaaactgaaaaaatatctttaaatgtaaacatttgtagattaacgttatgcccatcatttcatgatgaacatgatacgcttgtttgttcagtacaagatttttatgtaaatactgtt

SEQ ID NO: 40694 - DNA, 3099 bp, Neisseria meningitidis
atgaaccttgaaaccaaacccattgccgaaacgccgaatttcatcgtgctcgaccaatatgaaaaaatcgaacagtcgggcagctaccaatcggaaaaccggttggaagcggagttaatcgccgatttgcagaatcaggggtacgaataccgcaaagacttgaacagccaaagcaggctgctggaaaacctgcgcgcccagttgcagcggctgaacgatgtggcgttttcagacggcgaatgggcgcgttttttgacggaatatctggacaggccgtctgaaaacattaccgataaaacccgcaaaatccacgacgaccatatttacgatttcgctttcgatgacggccgtctgaaaaacatttatctgctggacaagaaaaaccttgcccgcaaccatgtgcagcttatcaaccagtttgagcagacgggcacgcatgcaaaccgctatgacgttaccgtgttggtaaacggtctgccgctggtgcagattgaattgaaaaagcgcggtgtggcggtgcgcgaggcattcaatcaggtgcaccgttacagcaaagagagcttcaacagcgacaattcgttgttcaaattcctgcaaatcttcgtcatttccaacggcacggacacgcgctatttcgccaacaccaccaagcgcgacaaaaacagcttcgatttcacgatgaattgggcgcggtcggacaatcatccgattaaggatttgaaagactttaccgccacgttcctgcagaaaagcgtattgctgggcgttttgctgcattacagcgtgttcgatgcgaataatacgctgctgattatgcggccgtaccagattgccgccgccgaacgtattttgtggaaaatcaacagctcggcgcaggcgaagaattggagcaaaccggagagcggcggctatgtctggcacaccacgggcagcggcaaaacgctgaccagctttaaggcggcgcgtctggcgacggaatcggcgtttatcgacaaggttttcttcgtggtggacaggaaggatttggactatcagacgatgaaggaataccaacgtttttcgcccgacagcgtgaacggttcggaaagcacggcaggcttgaaacgcaatttggaaaaagacgacaacaaaatcatcgttaccaccatccaaaagctgaacaacctgatgaagggcgaagataatctgccggtttaccaccagcaggttgtctttattttcgacgaatgccaccgctcgcaattcggcgaagcgcaaaaaaacctgaaaaagaaatttaaaaaattctgccagttcggctttaccggcacgccgatttttcccgaaaacgctttgggcgcggaaaccacggcgggcgtgttcggacgggagctgcattcttatgtgattaccgatgccatccgcgatgaaaaagtattgaaattcaaagtggattacaacgatgtgcgcccgaagttcaaagccgtggaagcggaacaggacgagaagaaactgagtgccgccgaaaaccgccaagccctgcttcaccccgaacgcatccgcgaaatcacgcaatatatcctgaaccagttcaggcagaaaacgcaccggctgaatgcgggcggcaaaggctttaacgccatgtttgccgtcagcagcgtggatgcggcgaagtgctattacgaagcgttcaaaacacaacaggcaggcagcctgcacccgttgaaagtggctactattttttcctttgccgccaacgaagagcaaaacgccgtcggtgaaattgtcgatgaaacctttgaaccggaagcgatggacagcagcgcgaaagaatttttgcaggctgccatcaacgattacaacgcctgtttcaaaactaatttcggcacggacagcaaagcctttcagaactactaccgcgatttggcaaaacgggtgaaaaatcaggaagtggatttgctgattgtggtcggcatgtttttgacgggttttgacgcgccgacgctgaacacgctgttcgtcgataaaaacctgcgctatcacggcctgatgcaggcgttttcgcgcaccaaccgcatttacgatgccaccaaaaccttcggcaatattgtctgcttccgcgatttggagcaggcaaccattgatgcgattaccctgtttggcgataaaaacaccaaaaatgtagtgctggaaaaaagctacgaagaatacatgaacggctataccgatgatcggaccggcgaagcacggcgcggttatctggatgtggcaaaagaattgcgcgaacgtttccccgaacccgacaaaatcgaaacggaaaaagacaaaaaagattttgccaaactcttcggcgaatacctgcgggcagaaaacgtattgcagaactacgatgaatttgccgcgctgcgcgagttgcagaatgtggatgcggcggacgaagatgcgatgaaggcgtttcaggaaaaatactacctgagcgatgaagacgtgaaggaaatgcggcaagtgccgatgccgtctgaaagggcggtgcaggactaccgctccgcctacaacgacatccgcgactggctgcgccgccaaaaagcaggcgaacagaaagaacagtcaaaaatcgattgggacgatgtggtttttgaggtagatttgctcaaatcacaggaaatcaatctggattacatcctgcaactggttttcgagcatcacaaaaaaatcaaaggaaaagcggagctggtggaagaaatccgccgcatcatccgcgccagcatcggccaccgcgccaaagagggtctgattgtggattttatcaacgatacggatttggataaagtccccgacgttcccgccatactggaaaccttttacacctacgcgcaagaggtaatgcggcacgaagcggcaggattgattgccgccgaagacctgaacgaaaccgccgccaaacgctatttgaccggctcgctcaaacgcggctatgccagcgaaaacggtacggaactgaccgaaaccctgccgaaaatgagtccgctcaacccgcaatatctgacgaagaaacaaagtgtttttcaaaagattgcggcgtttgtggagaagtttgccggaatagggaccgatatttga

SEQ ID NO: 40695 - DNA, 756 bp, Neisseria meningitidis
atggggcgtttacttttgggcagtatccgcatgagcatcattgtcgaaaacctgaccgtcagctaccgccgccgtcctgccgtacaccacgttgacattacttttgaagaacatagtatgtgggcggttttcggtcccaacggcgcagggaaatccacctttctcaaatccttgatgggattgcagcctatcgatacaggcagcatccggctggatggattgagccgccaagacatcgcctaccttccccagcagtccgatatcgaccgctcccaacctatgactgttttcgacttggcggcaatggggctttggtatgaaatcggctttttcaaagggataaataccgctcaaaaacaacgcgttcacgaatctttggaacgcgtcgggatgcggcagtttgccggccgccaaatcgcccacctctcaaacggacaattccaacgcgtcctttttgcccgaatgctggttcaaaatgcaaaattcctgcttttggacgaacctttcaacgccgttgatgcacggacgacctacgaacttctcgacgtattgcagaaatgccattgcggcggacacgctatcattgccgtactgcacgattacgaacaagtccgtgcctactttcccagtaccctgctgctcgcccgagaaaaaattgcggcaggcgcaaccgagaccattctgacagaaccctacctcgcccaagccaacgccaaaatgcagcaacaggaaagccccgactggtgcgcctcataa

SEQ ID NO: 40696 - DNA, 1128 bp, Neisseria meningitidis; identical to SEQ ID NO: 37842

SEQ ID NO: 40697 - DNA, 384 bp, Neisseria meningitidis
atggaaccttcttcttacgcggcagaaaaaaaaggcaaaggcggcatcaggcgcgtcatcaacgcattcggctattcgatagacggcatcgccgccgcctaccgttacgaagcggcattccgtcaggttttgtggctgaacgtactgctggtgtgcgcggcatttttttgggtttccgaaaccgccgtccgcctgccgttgattatcgcgtcttttgtgtcggtcattgtcgaactgttcaacaccgccgtcgaagctgccgtcgatcatacttcgaccgaaaaacacgagctggccaaacgcgccaaagacgcaggttctgccgcacaattgttcgcgatgctgatgttggcggcggtttggctgtctgccctgttcgggtaa

SEQ ID NO: 40698 - DNA, 1155 bp, Neisseria meningitidis
atgaaatttaccaagcaccccgtctgggcaatggcgttccgcccgttttattcgctggcggctctgtacggcgcattgtccgtattgctgtggggtttcggctacacgggaacgcacgagctgtccggtttctattggcacgcgcatgagatgatttggggttatgccggactggtcgtcgtcgccttcctgctgaccgccgtcgccacttggacggggcagccgcccacgcggggcggcgttctggtcggcttgactatcttttggctggctgcgcggattgccgcctttatcccgggttggggtgcgtcggcaagcggcatactcggtacgctgtttttctggtacggcgcggtgtgcatggctttgcccgttatccgttcacagaatcaacgcaactatgttgccgtgttcgcgctgttcgtcttgggcggcacgcacgcggcgttccacgtccagctgcacaacggcaacctaggcggactcttgagcggattgcagtcgggcttggtgatggtgtcgggttttatcggtctgattggtacgcggattatttcgttttttacgtccaaacggttgaatgtgccgcagattcccagtccgaaatgggtggcgcaggcttcgctgtggctgcccatgctgaccgccatgctgatggcgcacggcgtgatgccttggctgtcggcggctttcgcgtttgcggcaggtgtgatttttaccgtgcaggtgtaccgctggtggtataaacccgtgttgaaagagccgatgctgtggattctgtttgccggctatctgtttaccggattggggctgattgcggtcggcgcgtcttatttcaaacccgctttcctcaatctgggtgtgcatctgatcggggtcggcggtatcggcgtgctgactttgggcatgatggcgcgtaccgcgctcggtcatacgggcaatccgatttatccgccgcccaaagccgttcccgttgcgttttggctgatgatggcggcaaccgccgtccgtatggttgccgtattttcttccggcactgcctacacgcacagcatacgcacctcttcggttttgtttgcactcgcgcttttggtgtatgcgtggaagtatattccttggctgattcgtccgcgttcggacggcaggcccggttga

SEQ ID NO: 40699 - DNA, 1110 bp, Neisseria meningitidis
atgtcaaaccacaaaatatgttccgatttaaaaacagaatgttataaaacccaatccccaaaacacaacaagaccgcccgcctacgggcagtctcctgtcagacgacatactttacagatggctgttttttcaacaaaataacgccaatactcaaaaatatggaatcaaaaatgtccatccatactctgaaacgcctgccctcatcgctgctgctcggtctctgcctttccctgccgtcagcccacctttttgccgacaacgacattttagggcaatttttagaacagaacatgcttacctcctccgatccgatagaaatattcgccgaaagcacgatacaccccaccaacacccaagccattacaggcggtctgattctctcctcacagtctgccctggtcgtcaacaacaaaaccggacagatactgtatcagaaaaacgccgacaggattatgcccatcgcctccatttccaaactgatgagcgcgatggtcgttttggatgcaaacttggacatgaacgaaaccgttaccattacgcccgacgaaatcgaccgcctcaaagggaccggcagccgtcttgccataggtacggcacttacacgcaaagaactgctgcacctgagcctgatgagcagcgaaaaccgcgccacccatgcattgggcagaacctaccccggcggcatgggcgcatttgtcgccgccatgaaccgtaaagcccaaagcctcggtatgtacggcagccgcttttacgaaccgaccggactcaacttccaaaacgtttctaccgccaaagacctgagccttatggtcaacgccgccgcccaatatccgcaaatccgcaccaactcgacttccaactacgcctcggtacagaccaaaaacgggcagcagaactacaaaaactccaatgccctggtcagagaaggcatgtggaacatcgaattgcagaaaaccggctacatacgcgaagcaggcaggtctatggttgtcaaagccaacattcaaaaccaacccgttaccatcgtattgctgaactcgcccacatccgccacacgcgtcaacgacgctcgcaaaatcgaatcgtggatgctgcagcaacgctcctga

SEQ ID NO: 40700 - DNA, 1494 bp, Neisseria meningitidis
atgttgtcaggactccccatccccaaagacatcgcgcgcccgcccgaaacgatattggtcaacatcacgccgcaggaaacgcgcgtagcggtgttggaggaaaacaatatctgcgagctgcacatcgagcgcaacagcgaacacagcctagtcggcaatatctatttgggcgtggtgcgccgcgtgctgcctgggatgcagagcgcgtttatcgacatcggcttggaacgcgcggcgtttttacacatcgtcgatgtcctcgaacaacgccgcaaccccgaagaaacccagcgcatcgaacatatgctgtttgaagggcagtctgttttggtgcaggtcatcaaagacccgatcaacaccaaaggcgcgcggctttccacccaaatctcgctggcggggcgtttcctcgtccatcttccgcaagaagaccacatcggcgtgtcccaacgcatcgaagacgatgccgaacgcagcagcctgcgcgaacgcctcgacaagctcctgccggaaaatgcctgccggggctacatcatccgcaccaacgccgaaaacgccaccgacgaacagctccagtccgacatcgactacctgaccaaagtgtgggaacacatccaagaacaggcgaaaatccggccgccggaaaccctgctttatcaggatttgcccttgagtttgcgcgtgttgcgcgatatggtcggctgcgacacgcaaaaaatcctcgtcgattccaccgtaaaccacggccgcatgacgcgttttgccgaacaatacgtccacggcgcattgggcaggatagaattgttcaaaggcgaacgcccgctatttgaaacccacaacgtcgagcaggaaatcagccgcgccctgcaaccgcgcgtcaacctcaacttcggcagctacctgattatcgaatccaccgaagcgatgaccacgatagacgtgaacaccggcggcttcgtcggcgcacgcaatttcgatgaaacgattttccgcaccaacctcgaagcctgccacaccatcgcccgcgaattgaggctgcgcaacctcggcggcatcatcatcatcgacttcatcgatatggcgcaggaaagccaccgcgaagccgtgttgcaggagcttgccaaagccctcgccttcgaccgtacccgcgttaccctgcacggttttaccagcctgggactggtcgagctgacgcgcaaacgctcgcgcgaaaacttaaaccaagtcctctgcgaaccctgcccttcctgccaaggcagaggccgtctgaaaacgccgcaaaccgtatgctacgaaatccagcgcgaaatcgtccgcgaagcgcgccgttacgatgccgaaagtttccgcatcctcgccgcccccaacgtcatcgatttgtttttggacgaagaatcgcaatccttggcaatgctgatagatttcatcggcaaaccgatttctctggcagtcgaaaccgcttacacgcaggaacaatacgacatcgttttgatgtaa

SEQ ID NO: 40701 - DNA, 1446 bp, Neisseria meningitidis
atgacacaatacacattgaaacaggcgggcagcctgttgcagtccaaacagatttccgccgtcgaactggcaaacgaatacctcgccgccatcgccgaaaaaaatcccgccctcaacggctacatcacgctgaaccccgaaaaaaccctcgccgaagcccgcgccgccgacgaacgtatcgcgcagggcaacgcctccgcgcttaccggcgtgcccgtcgcctacaaagatattttctgccaaaccggctggcgcagcgcgtgcgcgtccaaaatgctcgacaacttcatctccccctacaccgccaccgtcgtccaaaacctgctcgacgaaagtatggtaacgctcggacgcaccaatatggacgagttcgctatgggttcgaccaatgaaaactcgttctacggcgcgaccaaaaacccgtggaatcccgaacacgtccccggcggctcttccggcggttcggctgtcgtcgttgccgcgcgcctcgcccctgccgcgctcggttcggacacgggcggctccatccgccaacccgcatcgcactgcggcattaccggcatcaaacccacatacggcacggtttcccgcttcggtatggtcgcctacgcctccagcttcgaccaggccggcccgatggcgcaaaccgccgaagactgcgcgattctgttgaacgcgatggcaggtttcgaccccaaagactccaccagtctcgaacgtgaaaaagaagactacacccgcgatttgaaccaaccgctcaaaggtttgaaaatcggcctgcccaaagaatatttcggcgaaggcaacagcgccgatgttcagacggcattgcaaaacaccattgatttgctgaaaacccaaggcgcggaattggtcgaagtttccctgccgcaaaccaagctgtccattcccgcctactacgtcctcgcttcggcggaagccggcaccaacctttcacgttacgacggcgtacgttacggacaccgtgccgcccaattcggcgatttggaagaaatgtacggcaaaacccgcgccgaaggtttcggcagcgaagtcaaacgccgcatcatgatcggcacttatgtactgtcgcacggctactacgatgcctactatctcaaagcccaaaaactgcgccgtctcgttgccgatgactttcagacggcatttgcacggtgcgacctcatcctcgcgccgaccgcacccactgccgcccccaaaatcggagcggatgcttcgccggttgaaacctacttgagcgatatctacaccatcgccgtcaacctcgccggactgcccgcattgaccctgcctgcaggtttcagcggcggcggactgcccatcggcgttcagcttatcggcaactatttctccgaagcccgaatactcggtgcggcgcatcaaatccaactcaacagcgattggcacggcaaacgacccgaatga

SEQ ID NO: 40702 - DNA, 552 bp, Neisseria meningitidis
atgccgtctgaacgccgaccgtttcagacggcatttttatcgaacaggaaaaccgtcggtaaacttgcagagcgtgtgcaatcccgatatgatggtttgcataaatttaaacatatatgttccgcagctatggcactgattaaagagccgttggacaaagcgaaacaaaggaacgaagaacttgaagcggcagaagaagcggcggcgcaggaggcattgggtcgggagcaggaagtcgaccgcgtatccgaatgggaagaacgctacaagctgtcgcgcagcgagttcgagcagttctggaaaggattgcctcaaaccgtacagaataagctgcaagcctcacagaaaacatggaaaagcgggatggataaaatctgtgccaacaatgcgaaagctgaaggtgaaacgccaaacggcataaaattcagcgaactggcatgcaaaacggcggaaaccgaagcacgcttggaagagctgcacaaccgtaaaaaagcccttatcgacgaaatggccagggaagcggacaagaaagaactgccaaagcggctctga

SEQ ID NO: 40703 - DNA, 1911 bp, Neisseria meningitidis
atgaatatattatctgtagaaaacgcttcttttgccatcggccacgttgccttgctcgacaaaacttcttttcaactcgacagcggcgaaaaagtcggcttaatcggacgcaacggcgcaggcaagtcttcgtttttaaaaatcctcgccggtttgcaaaagctcgacgacgggcagattattgttcaaaacaacctcaaaatcgtttatgtaccgcaggaatccttttttgataaggacgcaaccgtatttgataccgttgccgaaggtttgggcgaaattcgtgatttattgcgccgttatcatcatgtcagccatgagttggaaaatggttcgagtgaggctttgttgaaagaactcaacgaattgcaacttgaaatcgaagcgaaggacggctggaaactggatgcggcagtcaagcagactttgggggaactcggtttgccggaaaatgaaaaaatcggcaacctttccggcggtcagaaaaagcgcgtcgccttggcgcaggcttgggtgcaaaagcccgacgtattgctgctggacgagccgaccaaccatttggatatcgacgcgattatttggctggaaaatctgcttaaagcgtttgaaggcagcttggttgtgattacccacgaccgccgttttttggacaatatcgccacgcggattgtcgaactcgatcgcggtattttgcgttcctatcccggctcgttctccaaatatagcgagaaaaaagcgcaagagttggcagtcgaagcggaacacaaccgcctcttcgacaaattccacgcgcaggaagaagcgtggatacgcaaaggcatcgaagcgcgccgtacccgcaacgaaggccgcgtgcaccgtttggaagaactgcgccgccagcgtgccgaacgccgcaacgtacaagggcaggtcaatttcaagctcgacagcggcgagaaaagcggcaaaatcatcgccgagctggaacacgcctcgtttgcttatggcgacaaagtcattatggacaaattctccgccatcttgcagcgcggcgacaaaatcggcttaatcggcccaaacggcatcggcaaaaccacatttttaaaactgattttgggcgaattgcagccgacctacggcagaatccgtatcggcagcaagcaggaagtcgcctatttcgaccagttccgcagcgcgttgaatgaaaacgacaccgtgttttacacgctcggacagggcaatgattacgttgaagtcggcggtaagaaaaagcatgtgatgagctatttggaagatttcctgttcccccctgcccgcgcgcaaagtcctgtttcttcactctccggcggcgaacgcaaccgccttttgctggcaaaactctttacccgtcccgccaatattttggtcttggacgaaccgaccaatgacttggacatcgacacccaagagctgctcgaagacctgttgcgcgattatcaaggcacggtattccttgtctcgcacgaccgtatgttcctcgataacgtgattacccaaagcattgtttttgaaggaaatggaaggttaaaagaatatatcggcggctatcaggactacatcgacgcaaaatcacgcgaagcgaagattcagacggaatccgcacccaaaacagccgatgccgaaccggtgaaagaaaaacccaaagccaaccgcacggtcaaactgtcctacaaagaacagcgcgaactcgacgccctgcccgacgaaatcgccgccttggaagccgaacaggcagaaatcaacgcgcagctttccgatcccgaaatcttcaaagattacgaaaaagccggcgcactgcaaagccgcgccgaagaaatcgaaatgctgcttttggaaaagctggaacgctgggagctgctggaaaccaaacagaacggcaatgccgtctga

SEQ ID NO: 40704 - DNA, 357 bp, Neisseria meningitidis; identical to SEQ ID NO: 36858

SEQ ID NO: 40705 - DNA, 912 bp, Neisseria meningitidis
atggttcatattatgtttaatcaggcagtacaagaattgacgactatccgcgatattttacgttttgcagtcagccgttttaatgaggcagggctcttttttggtcatggaacagataatgcgcatgatgaagcggcttatttgattctgcatactttgaatttgcctttggatatgcttgccccatatcttgatgcaaaactcttggaagctgaaaaagaggaagtgctggcggttattgagcgtcgtgctgtcgaacacattccagccgcttatttgacacaccaggcatggcagggagagtttgatttctatgtggatgagcgcgtaatcatacctcgttcttttatttatgaattgttgggtaacggacttcgtccttggatagaatacgatgagctggtgcataatgctttggatctttgcaccggaagcggttgccttgccattcagatggcgcatcattatcctgatgcccaaattgatgcggttgatgtgagcttggatgctttggaagtggcagggattaatgtcgaagattatggtttggaagaacgcatccagcttattcatacggatttgtttgaaggattggaaggcacttatgatttgattgtttccaatccgccttatgtggatgcggaatcggttgagttattgcctgaagagtatttgcacgaaccggaattggcattgggcagcggggcggacgggttggatgccaccaggcagattcttctgaatgcggcaaagtttctgaatcccaaaggtgtattgctggtggaaatcgggcataacagggatgtattggaagcagcgtatccggagttgccttttacttggttggaaaccagcgggggcgacggttttgttttcctcttgacgcgcgagcagttattgggtgaagagtga

SEQ ID NO: 40706 - DNA, 435 bp, Neisseria meningitidis
atggcatttggttcgatgaattccggcgacgattctccgatgtccgacatcaacgttacgccgttggtggacgtgatgctggtgttgctgattgtgtttatgattactatgccggtgctgacgcattccatccctttggaactgccgaccgcgtccgagcagacaaacaagcaggacaaacagcctaaagaccccctgcgcctgacgattgatgcgaacggcggctattatgtcggcggggattctgcaagcaaagtggaaatcggggaagtggaaagccgtctgaaagccgccaaggagcagaatgaaaacgtgattgtggcgattgcggcagacaaggcggtggaatacgattatgtaaacaaagctttagaagccgcccgtcaggcaggaatcaccaaaatcggttttgtaaccgaaaccaaggcgcaataa

SEQ ID NO: 40707 - DNA, 1065 bp, Neisseria meningitidis
atgactcttttaaaaaacgataccttcctccgcgccctgctcaaacagcccgtcgaatacacgccgatttggatgatgcgtcaggcggggcgttatctgcccgaatacaaagccacacgcgcgaaagcgggcagcttcctcgatttgtgcaaaaacaccggattggcgaccgaagttaccatccaacctttggaacgcttcgatttggacgcggcgattttgttttccgacatcctgaccgtccccgacgcaatgggcttgggactgtattttgccgaaggcgaaggcccgaaattcaaacgcgccctgcaacacgaagccgatatcgccaagctgcacgttcccgatatggaaaaactgcaatacgttttcgacgcggtaacttccatccgtaaagcattggacggccgcgtaccgcttatcggcttctccggcagcccgttcacgctcgcctgttatatggtcgaaggcggcggcagcaaagaattccgcaccatcaaaaccatgatgtactcgcgccccgatttgctgcacaaaatcctcgataccaacgcccaagccgttaccgcttacctcaacgctcaaatcgacgcgggcgcgcaggcggtgcagattttcgacacttggggcggcgtgttgagcgacgcggcgtttaaagaattcagcctcaaatacatccgccaaatcgttgccggattgaaacgcgaaagcgaaggcaggctcgtgcctgttatcgtgtttgccaaaggcggcgggctgtggctggaaagcatggcccaaatcggcgcagacgcattgggcttggactggacgtgcaacatcggcgaagcacgccgccgcgtcggcaaccaagtcgccctgcaaggtaacttcgacccgttcgccctctttggtacgccggaatccatccgcaccgaggtcgcacgtatacttgccgactacggacacggcagcggccatgtcttcaacctcggacacggcatcaaccaacatgccgaccccgaacacaccaaaatcttagtcgacaccgtacacgagctgtctcggcattatcacggcgggtaa

SEQ ID NO: 40708 - DNA, 339 bp, Neisseria meningitidis
atggcacaaacaaaacaagtggtcttggtaaccacggtcaaaacatcaggcaaggtggtcaaaaaccgctttgtggatttcgcaggcaaacagacagccgccggtgtgaaagtgctgggtactgctacttttgatgcggatgcgggcgatacgctggcggtcgatgccttgggtatcgcactggtcgaggcaggcggcacggttgccgtcggcgatgaagtagcagccgatgcgcaaggcgcggcagtcaaggcggcaggtaatgccaaggttgccggtacggcgcgctctgcggcgacagcggcgggcgaagtcatccaagtatttttgaaaggttga

SEQ ID NO: 40709 - DNA, 453 bp, Neisseria meningitidis
atgattaagatgaaagatatttatgagtcaatttgttgtaaatctattagaaagataatgtatatatcagatagttttgtagctatttcaggaacggggtttattattaaatttcaggaaaaattttatttttgctgtttatatcattgcatatctaatgaaggaaaatttgaaaaaaataaattgtttgggttaagtattttatataaaacatatcttgaaatagatcccaaaactatatctgaatctaatgtagctaattatgtactttttcctaatcctgagcaaattacaaaagagttttgtagttcaaaaattgatgatgatttaatgcttgatgaggaatttatccctattgagattattggagaaaatgaacttataccatgtgggtatttggattttgatatcgaatattggagtaattatttgttttcagaaaaaaaccaatag

SEQ ID NO: 40710 - DNA, 312 bp, Neisseria meningitidis
atgaacatcaaacgccttctcttgaccgccgccgcaaccgcactgctgggcatttccgcccccgcgctcgcccaccacgacggacacggcgatgacgaccacggacacagcaaacaagacaaaatcatcagccgcgcccaagccgaaaaagcggcttgggcgcgtgtcggcggcaaaatcaccgacatcgatctcgaacacgacgacggccgtccgcactatgatgtcgaaatcgtcaaaaacggacaggaatacaaagtcgttgtcgatgcccgtaccggccgcgtgatttcctcccgccgcgacgactga

SEQ ID NO: 40711 - DNA, 1095 bp, Neisseria meningitidis
gtggatgcgttaagtgcgtttttgaagctgaagggcttggacggcggcaatacccatccggttaccatgcccgatttcgtcctgtcttacgaagacaaagatataacggcagatgttgcgccttatctgatttcgttcagctataccgattatcttgaggggcagtcggacgaattgcaggtcgattttgaggatacggacggccgctggctgagtaactggtatcccgaacagggcgatgctttgtctttgagcctgggtaaccaatttaccgggctggtttctctcggcaaatttgagattgccgaaatcgaatacaaccgcccgccgtcgacggtcagcctgaaggctttatcgacgggcattaccaagtcgaaccgcaccctgcgcggcaaggcgtatgaaaacacgactctggccgccattgtccgtcagattgcaggccgtctgaaattggaaatcacagtgacggttaaagatatccccatcaaacgcgttacccagtatcaggagcgctatgtcgagtttttggcgcggctggcgaaggaatacggacacagctttaaaatcgtcggcaagaaactggtgtttaccgacaacgacgcgctcaaacagcgtcctgccgttgccgtcctgaaacccgaggacatcattcgtgtccgcctgcgcgatttgattaagggcgtgccgtccaaagtagatgtcaaaggctacgacccgaaaaacaagaaaacggtctcggcaagccgaaaaagcaagcccaagcgaggcaaagccaaacacggcagcacgggcgatacattgcgtatcgtgccgaataagggtgagagcgcggcgcaattgaatgccagggcagatgccaaattggcagatgcgcaggacgaccaatgcgcggggacggttacactggtcggcaatgcgctgttggcggcaggccaaatggtacggttgaaaggattcggcaagttttcgggcaaatatctggtcaaacagtcgcggcatgacttttcgcgcagcggcggctatacgacggaaatcgaaatcaagatgacggaatatgtttctgaagaggagcaaggcagtgcaaacccatga

SEQ ID NO: 40712 - DNA, 684 bp, Neisseria meningitidis
atgacggaaacacgcgccgatatgattgtcagcgcgtttttgcctatggtcaaagccggcttcgcggtctctctgcctttggcggcagcttctttcgttatcggtatgatgattgcggtagccgtggctttggtgcggattatgcccgccggcggcatcgtgcggaaaatcctgctgaaattggtggaattttatatttccgtcattcgcggtacgccgctgttggttcagcttgtgattgtgttttacgggctgccttccgtcggcatctatatcgccccgattcctgccgccatcatcggcttttcgctcaatgtcggcgcatatgcttccgaaaccatacgcgcggcaattttgtccgtaccgaaaggccaatgggaagcaggtttctccatcggcatgacctatatgcagacgttccgccgcatcgtcgcgccgcaggcatttcgcgttgccgtgccgcctttgagcaacgagtttatcggtttgtttaaaaacacctcgctcgcggcagtcgtgacggtaacggaattattccgcgtcgcgcaggaaacggcaaaccgcacttatgactttttgcccgtctatatcgaagccgctttggtttactggtgtttttgtaaagtgctgttcctgattcaggcgcgtttggaaaaacgtttcgaccgctacgtcgccaaataa

SEQ ID NO: 40713 - DNA, 396 bp, Neisseria meningitidis; identical to SEQ ID NO: 39895

SEQ ID NO: 40714 - DNA, 2652 bp, Neisseria meningitidis
atggcaagcgatttaggtatatcgatcagtgtttctgccgttgtcggtggggctttgtcgggtttgacccatatcggcaaggcgatgaatacgctgaaaacgacgaccaataccctgtctgaacgtcagaaggaactgggcagggtattggagcggaacaaagaccgtttgggcgtatcgtctgccaaacagctatggcaggaatacgacaaaatcggcaattccgtcgccaaactgacccgccaatatgaaaagctcaatgccgtccgcgcccaaatggcagccgtcagcagccaatggacagacatcaaagggcaatggcagggtgcgcttgccgccgcaggtacattaattttgcctgtcaaagcctcgattgaatttgaatcggcaatggctgatgtcaaaaaggtggttaatttcgatacgccgcagcaatttaaggaaatggaacgggacattttgaaaatgacccgcaagattccaatggcgggcaaggacattgctgccatcgttgccgcaggcggacagtcaggagtcgcccgcgaaaacctgacgggttttgccgaaaatgccgccaagatgggcgtggcattcgatatggcggcaggacaggcgggcgaatctatggcgacgctgtccaacgtcttgcagatacccattcccaaaatcggcatattgggcgatgccgtcaaccatctttcggacaatgcgaactcgaaggcggcggatattgtcaacgtcctgacccgcgtcggcagcgacatcaagcagttgggcatgacggaaaaccaaggtgcggcatggggcagtacctttttgagtatgggtaaagcccccgaactggcggcgcaggcgatgaagggtatgattacttcgatgtcggtcatgaaggcgggcggtgcgaaaaaagagctggcagagctaggattgacaaccaaggaatttgccgccgctatggacaaagatgccaacggtgcgatgctcaacctgttggctcgagtcaagcagttgtcgaaggcggagcagttccccatgctgctgaagatgttcggcaggaactatgccgacgatgccatgatgctcgccaacaatgtcggtgagtacaaccgccaactggcattgctggaagaacgcgatgcttcaggcaatttgaaatatctcgggtcgatgcagcgcgagtttgccaaccgttcggcaacaacggcgaaccaaatccaaattttcaaaaacgggatttcggaactcggcatacgcatgggctcgatagtcctgcctgccttgaatgattttttggctaagggcagcaaacttgccaacatcgtctcggactggtcggaaaaacatcccgtattgacgaaagggattgtcggtacggccgcttcgctgctggcttttaaagtcgggatgtttggtgcgatggtcgttgccaaccggtcgcgtgcggcttatttgggaatgaagggagcggttttatcgctacggtctgccattgtactgacccatactgtgatgcaaggcggaatgggactgcatgatgtaccgggtaggctaggaaagctcatgcgggctttggtggcagcaagaaccgccatgctcggtttcagtctgtcgtcgctgacggcgacgtggccgctggttttggccgtcggcgcacttgccctggtcggatggacaatttacaaggcttggaacccgattaaggctttttttgccggactgtgggatgggctgttgaaaggcttgaaaccgttaaaacctgcttttgatgctctggtttctgcactgtcggatgcttgggacggcatttataacgctatttctccggttgtagataccgttttttctgtcttaggtggcttgtgggatacggttcgaccttttgtccggccgctattggatttctttagggatttcttcagcacgacacaagttgctgcaggcggggcgcgcagcttcggcgaatcggcaggctcgtggataggtgaaaaaatcacagcggtcgccggttgggtcggcggcaaaatcgccgaaatgaaaaccgcctttgacggcggactgctcggcatcctcggcctgattctcaactggtcgcccattggcgcgttctattcggcctttgccgccgtactgtcttggttcggcattgacttgccgtccagcttcacgcagtttggcgcaaacatcatccaagggctgtggaacgggttgcagtccaaattcgagtcggtcaaggcatggtttgccgaaaaggcggcatcgctcaaacaggcttttgccggcgtgatgggcatccattcgcccagccgcgtgttccgccgctttggcggatggatgatggatggcctgcaaatcggtttggacgggggcgcggcgcgtccgattgcctctatagccgatacggcaggccgtctgaaaagcggttttaccgaccatatgggcgcgctggcggcacggttgtctgcgggcggcgaggcatttgcgtctgcacgcaatactcaggcggcgggcgggatgaccatcaattacaacccgaccatcaatgcgccgggcagtaatcctcagcagattgaggctgcgctgcagatgggcttgcgtgaattcgaagcaatgttccgccgcatgatggacgacaaagcacggagggcttattga

SEQ ID NO: 40715 - DNA, 555 bp, Neisseria meningitidis
atgaaaaaaatcatcgcctccgcgcttatcgcaacattcgcactcgccgcctgccaagacgacacgcaggcgcggctcgaacagcagcagaaacagattgaagccctgcaacagcagctcgcacagcaggcagacgatacggtttaccaactgactcccgaagcagtcaaagacaccattcctgccgaagcacaggcaaacggcaacaacgggcaacccgttaccggtaaagacgggcagcagtatatttacgaccaatcgacaggaagctggctgctgcaaagcctggtcggcgcggcggcaggcgcgtttatcggcaacgcgctggcaaacaaattcacacgggcgggcaaccaagacagccccgtcgcccggcgcgcgcgtgccgcctaccatcagtccgcacatcccaatgcgcgcaccagcagggatttgaacacgcgcagcctccgtgcaaaacaacaggcggcgcaggcgcagcgttaccgcccgacaacgcgcccgcccgccaattaccgccgaccggctatgcgcggtttcggcaggaggcggtaa

SEQ ID NO: 40716 - DNA, 501 bp, Neisseria meningitidis
atgaatgcaatgccccaaaccgccgcacaaaacgaaaccctgcacacttgtagcattattgtcgatgatgcacaggatttttcccccatgcttctcgatgcagggcgggacgacacacttatcagcgaatcgatgattccgcaaatccgcactgttgccgccctgatagccgccgaacggcacaacttcagccgcagcagccccgccgagtttaccgatgccgccgatttttttgccgcacggattctcgtattgggcgtgcgacgcttccatctggacgtatcgctgcttcagattttgaaaaccgccaacagccgcgcccgccgctttgccgaaaaacaccgcctgtttttcacacccgcacaagccgaattgagcctgaacaaacacaaaaaccgccgcctgctgaccgtagaaaccgaacacgaagtcgaaaacaaaggcaacccagtcgccaacagcctcgcatttgtccgcaaactgcacaccctgcccctgtaa

SEQ ID NO: 40717 - DNA, 480 bp, Neisseria meningitidis
atgactgacaacctaatacagatagcaacgccgatattgactgttatcggcgtttttgttgccgcttacggcatcatgaggaatacagaaaacgccaaaaagcgcgccaccatcgacatgatcatggccgaacgtaacaatgccgcccttcaagaagccataaccatagtaaacgggctggcaaaaacagacggatgcatactcgccacctatacatcggataccccggacaagaagaaagaccgtgaagccatactgacagttttaaaccagcgcgaatttgtctgtgcgggcgtattaggcggagcactgcacgagaaaatgtataaagatttcgaatactccatgctgttacgtgactgggacaacctaagcagcttcatttttgaaatacgccgtatcaggagcgcaccgacggcctttcaagaatttgaagccgtagcccgaaaatggaagaaaaagcctctgaaaaccaaatag

SEQ ID NO: 40718 - DNA, 198 bp, Neisseria meningitidis
atgaaatggaccgacacccggcgtatcgccgaagaactctacgacctgcacggcgaaaccatcgatcccagaaccgtgcgctttacccaactgcgcgacctgattatggcattgcccgaatttgacgacgaccccgcccgttgcggcgaacgtatcctcgaagccgtgcagcaggcatggatagacgaggcggaataa

SEQ ID NO: 40719 - DNA, 1008 bp, Neisseria meningitidis
atgagcaccttctttcaacaaaccgcgcaagccatgattgctaaacacatcgaccgcttcccgctattgaagttggaccgggtgattgattggcagctgatcgaacaatacctgaaccgtcaaaaaacccgttaccttagagaccaccgcggccgtcccgcctatcccctgctatccatgttcaaagccgtcctgctcggacaatggcacagcctctccgatcccgaactcgaacacagcctcatcacccgcatcgatttcaacctgttttgccgttttgacgaactaagcatccccgattacagcaccttatgccgctaccgcaactggctggcgcaagacgacaccctgtccgaattgctcaaactgattaaccgccaactgaccgaaaaaggcctaaaaatagagaaagcatccgccgctgtcgttgacgccaccattattcagaccgccggcagcaaacagcgccaggccatagaagtcgatgaagaaggacaaatcagcagccaaaccacaccgagtaaggacagcgatgcccgttggatcaagaaaaacggcctctacaaactcggttacaaacaacatacccgtaccgatgaggaaggctatatcgagaaactgcacatcacccccgccaatgcccatgagtgcaaacacctgccgcctttgctggaagggatagccgaaggtacgaccgtctatgccgacaaaggctatgacagtgcggaaaaccggcaacatctggaagaacatcagttgctggacggcattatgcgcaaagcctgccgcaaccgtccgctgtcggaaacgcaaaccaaacgtaaccgatatttgtcgaagacccgttatgtggtcgaacaaagcttcggtacgctgcaccgtaaattccgctacgcccgggcagcctatttcggactgattaaagtgagtgcgcaaagccatctgaaggcgatgtgtttgaacctgttgaaagccgccaacaggctaagtgtgcctgtttgcgcctaa

SEQ ID NO: 40720 - DNA, 1791 bp, Neisseria meningitidis
atgcgctacaaaccccttctgcttgccctgatgctcgttttttccacgcccgccgttgccgcccacgacgcggcacacaaccgttccgccgaagtgaaaaaacagacgaagaacaaaaaagaacagcccgaagcggcggaaggcaaaaaagaaaaaggcaaaaatggcgcagtgaaagataaaaaaacaggcggcaaagaggcggcaaaagagggcaaagagtccaaaaaaaccgccaaaaaccgcaaagaagcagagaaggaggcgacatccaggcagtctgcgcgcaaaggacgcgaaggggataagaaatcgaaggcggaacacaaaaaggcatatggcaagcccgtgtccggatccaaagaaaaaaacgcaaaaacacagcctgaaaacaaacaaggcaaaaaagaggcaaaaggacagggcaatccgcgtaagggcggcaaggcggaaaaagacactgtttctgcaaataaaaaagtccgttccgacaagaacggcaaagcagtgaaacaggacaaaaaatacagggaagagaaaaatgccaaaaccgattccgacgaattgaaagccgccgttgccgctgccaccaatgatgtcgaaaacaaaaaagccctgctcaaacaaagcgaaggaatgctgcttcatgtcagcaattccctcaaacagcttcaggaagagcgtatccgccaagagcgtatccgtcaggcgcgcggcaaccttgcttccgtcaaccgcaaacagcgcgaggcttgggacaagttccaaaaactcaataccgagctgaaccgtttgaaaacggaagtcgccgctacgaaagcgcagatttcccgtttcgtatcggggaactataaaaacagccagccgaatgcggttgccctgttcctgaaaaacgccgaaccgggtcagaaaaaccgctttttgcgttatacgcgttatgtaaacgcctccaatcgggaagttgtcaaggatttggaaaaacagcagaaggctttggcggtacaagagcagaaaatcaacaatgagcttgcccgtttgaagaaaattcaggcaaacgtgcaatccctgctgaaaaaacagggtgtaaccgatgcggcggaacagacggaaagccgcagacagaatgccaaaatcgccaaagatgcccgaaaactgctggaacagaaagggaacgagcagcagctgaacaagctcttgagcaatttggagaagaaaaaggccgaacaccgcattcaggatgcggaagcaaaaagaaaattggctgaagccagactggcggcagccgaaaaagccagaaaagaagcggcgcagcagaaggctgaagcacgacgtgcggaaatgtccaacctgaccgccgaagacaggaacatccaagcgccttcggttatgggtatcggcagtgccgacggtttcagccgcatgcaaggacgtttgaaaaaaccggttgacggtgtgccgaccggacttttcgggcagaaccggagcggcggcgatgtttggaaaggcgtgttctattccactgcaccggcaacggttgaaagcattgcgtcgggaacggtaagctatgcggacgagttggacggctacggcaaagtggtcgtggtcgatcacggcgagaactacatcagcatctatgccggtttgagcgaaatttccgtcggcaagggttatatggtcgcggcaggaagcaaaatcggctcgagcgggtcgctgccggacggggaagaggggctttacctgcaaatacgttatcaaggtcaggtattgaacccttcgagctggatacgttga

SEQ ID NO: 40721 - DNA, 624 bp, Neisseria meningitidis
atgaaaatcatacacaaaggtttggtcgaatatctgccgacttttgaagcgatgaaaacctttaatgccggacggaatgccgacaccgaagacgaactgtgggtcgtcgaacacccgcccgtgttcacacaaggactggcgggaaaacccgaacacctgctgattcgcgacgacattcccgtcgtccaaatcgaccggggcgggcagattacctatcacggacccgggcaattggtcgtttatacgatgattgatttcaaacggcgcaaaaccagcgtccgcaacattgtttccgcgcttgaaaacagcatcatcgccacattggcggaatacggcatcgaagcggcggcagatcccaaacgccccggcatttacgtcggcgaacgcaaaatcgcctcactggggctgcgtatcaaaggaggttccgtctatcacggccttgcgctcaacgtcaatatggatttaagcccgtttacccacatcaacccctgcggctacgccggtatggaaatgacgcaaatcgcggattttgtccaaccctgccccacgccggacgaagtcgccgccaaacttaccgcacaccttgaaacacaattcacaccgaaagcagataacaatgagtga

SEQ ID NO: 40722 - DNA, 4170 bp, Neisseria meningitidis
atgaccgataccgcaccgacagataccgatccgaccgaaaacggcacgcgcaaaatgccgtctgaacaccgccctgccccgccggcaaaaaaacgccgcccgctgctgaagctgtcggcggcactgctgtctgtcctgattttggcagtatgtttcctcggctggctcgccggtacggaagcaggtttgcgcttcgggctgtaccaaatcccgtcttggttcggcgtaaacatttcctcccaaaacctcaaaggcacgctgctcgacggcttcgacggcgacaactggtcgatagaaaccgagggggcagaccttaaaatcagccgcttccgcttcgcgtggaaaccgtccgaactgatgcgccgcagcctgcacattaccgaaatttccgccggcgacatcgccatcgttaccaaaccgactccgcctaaagaagaacgcccacctcaaggtctgcccgacagcatagacctgcctgccgccgtctatctcgaccgctttgagacgggcaaaatcagcatgggcaaaacttttgacaaacaaaccgtctatctcgaacgcctcaacgcggtataccgttacgaccgcaaaggacaccgccttgacctgaaggccgccgacacgccgtggagcagttcgtcggggtcagcctcggtcggcttgaaaaaaccgtttgccctcgataccgccatttacaccaaaggcggactcgaaggcaaaaccatacacagtacggctcggctgagcggcagcctgaaggatgtgcgcgccgaactggcgatcgacggcggcaatatccgcctctcgggaaaatccgtcatccacccgtttgccgaatcattggataaaacattggaagaagtactggtcaaagggttcaacatcaatccggccgccttcgtaccttccctgcccgatgccgggctgaatttcgacctgaccgccatcccgtcgttttcagacggcatcgcgctggaaggctcgctcgatttggaaaacaccaaagccggctttgccgaccgcaacggcatccccgtccgtcaggttttaggcagctttgtcatccggcaggacggcacggtgcatatcggcaatacgtccgtcgccctgctcggacggggcggcatcaggctgtcgggcaaaatcgacaccggaaaagacatcctcgatttaaatataggcatcaactccgtcggcgcggaagacgtactgcaaaccgcgttcaaaggcaggttggacggcagcatcggcatcggtggcacgaccgcctcgcccaaaatctcttggcaactcggcatcggcacggcgcgcacggacggcagcctcgccattgcaagcgaccccgcaaacggacagcggaaactggtgctcgacaccgtcaacatcgccgccgggcaaggcagcctgaccgcgcaaggctatctcgagctgtttaaagaccgcctgctcaagctggacatccgttcccgcgcattcgacccttcgcgcatcgatccgcaacttccggcaggcaatatcaacggctcaataaaccttgccggcgaactggcaaaagagaaattcacaggcaaaatgcggtttttacccggcacgttcaacggcgtaccgattgccggcagtgccgacattgtttacgagtcccgccaccttccgcgtgccgccgtcgatttgcggctggggcggaacattattaaaacagacggcggcttcggcaaaaaaggcgaccggcttaacctcaatatcaccgcacccgatttatcccgtttcggtttcggactcgcggggtctttaaatgtacgcggacacctttccggcgatttggacggtggcatccgaacctttgaaaccgacctttccggcgcggcgcgcaacctgcacatcggcaaggcggcagacatccgttcgctcgatttcacgctcaaaggttcgcccgacacaagccgcccgatacgcgccgacatcaaaggcagccgcctttcgctgtcgggcggagcggcggttgtcgataccgccgacctgatgctggacggcacgggcgtgcagcaccgcatccgcacacacgccgccatgacgctggatggcaaaccgttcaaattcgatttggacgcttcaggcggcatcaacagggaacttacccgatggaaaggcagcatcggcatcctcgacatcggcggcgcattcaacctcaagctgcaaaaccgtatgacgctcgaagccggtgcggaacgcgtggcggcaagtgcggcaaattggcaggcaatgggcggcagcctcaacctgcaacacttttcttgggataaaaaaaccggcatatcggcaaaaggcggcgcacacggtctgcatatcgccgagttgcacaatttcttcaaaccgcccttcgaacacaatctggttttaaacggcgactgggatgtcgcctacgggcgcaacgcgcgcggctacctcaatatcagccggcaaagcggcgatgccgtattgcccggcgggcaggctttgggtttgaacgcattttccctgaaaacgcgctttcaaaacgaccgcatcggaatcctgcttgacggcggcgcgcgtttcgggcggattaacgccgatttgggcatcggcaacgccttcggcggcaatatggcaaatgcaccgctcggcggcaggattaccgcctcccttcccgacttgggcgcattgaagccctttctgcccgccgccgcgcaaaacattactggcagcctgaatgccgccgcgcaaatcggcggacgggtcggctctccgtccgtcaatgccgccgtcaacggcagcagcaactacgggaaaatcaacggcaacatcaccgtcgggcaaagtaattctttcagtacctcgcccctgggcgggaaactcaacctgaccgttgccgatgccgaagtattccgcaacttcctgcccgtcggacaaaccgtcaaaggcagcctgaatgccgccgtaaccctcggcggcagcatcgccgacccgcacttgggcggcagcatcaacggcgacaagctctattaccgcaaccaaacccaaggcatcatcttggacaacggttcgctgcgttcgcatatcgcaggcaggaaatgggtaatcgacagcctgaaattccgtcacgaagggacggcggaactctccggtacggtcggtatggaaaacagcggacccgatgtcgatatcggcgcggtgttcgacaaataccgcatcctgtcccgccccaaccgccgcctgacggtttccggcaacacccgcctgcgctattcgccgcaaaaaggcatatccgttaccgggatgattaaaacggatcaggggctgttcggttcgcaaaaatcctcgatgccgtccgtcggcgacgatgtcgtcgtattaggcgaagtcaaaaaagaggcggcggcaccgctccccgtcaatatgaacctgactttagacctcaatgacggcatccgcttcgccggctacggcgcggacgttaccataggcggcaaactgaccctgaccgcccaatcgggcggaagcgtgcggggcgtgggcacggtccgcgtcatcaaagggcgttataaggcatacgggcaggatttggacattaccaaaggcacggtctcctttgtcggcccgctcaacgaccccaacctcaacatccgcgccgaacgccgcctttcccccgtcggtgcgggcgtggaaatattgggcagcctcaacagcccgcgcattacgctgacggcaaacgaaccgatgagtgaaaaagacaagctctcttggctcatcctcaaccgcgccgccagcggcagcagcggcgacaatgccgccctgtccgcagccgcaggcgcgctgcttgccgggcaaatcaacgaccgcatcgggctggtggatgatttgggctttaccagcaagcgcagccgcaacgcgcaaaccggcgaactcaaccccgccgaacaggtgctgaccgtcggcaaacaactgaccggcaaactctacatcggctacgaatacagcatctccagcgcggaacagtccgtcaaactgatttaccggctgacacgcgccatacaggcggttgcccgtatcggtagccgttcgtcgggcggcgagctgacatacaccatacgtttcgaccgcttctccggttcggacaaaaaagactccgccggaaacggcaaaggaaaataa

SEQ ID NO: 40723 - DNA, 534 bp, Neisseria meningitidis
atgggtatttacgattttcaaatgaaagatgcagaaggcaatgcggttgatttgtcaggctatcgcggcaaggttctgctgatcgtcaacacggcaacgcgttgcggtctgaccccgcaatacgaggctttgcagaagctgtatgcacaatataccgcagaaggcttggagattttggattttccgtgcaaccagttccgcgaacaggctcccgaaagcagcggagaaattgcccaagtgtgtatgatgaagtttggcacgaagtttaagattttcgacaaaatcgaagtcaatggagcaaataccgcgcccttgtatgcctacctgaaatccgtcaaaccgcaagataaaggcaatcatctgtttaaagatttcgtgttgaagctcgcagctttgggagagaagcgcgacgaaggcgacatcaaatggaactttaccaaattcctcgtcaaccgcgacggcgaagtggtcgagcgttttgcgcctagtgttacgcccgaagaaatcgaagccgatattcgggcattgctgtaa

SEQ ID NO: 40724 - DNA, 309 bp, Neisseria meningitidis
atgaggattatcgtcttcttcgacctaccggttatcacggcggcaaagcgcaaagccgccaatcaattccgccagtttttattaaaagacggataccaaatgctgcaactttccgtatacagccgtatcgtcaaaggccgcgattcgttgcaaaaacaccacaacagactgtgtgcaaaccttccgcaagaaggctcaatccgctgtttggagataacagaaaagcaatatgccgccatgaaactgctgttgggcgagctgaaaacccaagaaaaaaaggtcaattcagaccaattattgttattttaa

SEQ ID NO: 40725 - DNA, 318 bp, Neisseria meningitidis
atgcaaaaacgtattgatgaaatccaaagcaaataccgcgaatggtgtcatttactacctcaattggaagaagacatccgccgttggaaacatgccgtcgctttgattcgcgatatggacaatttttatacccacgaatatcaggcttgtcatcgggctattgaagatgaagcggaggtggatttgcgcacagaaggcgaatatagcattatgagtgaagatgcgttatggaacgcgctgggcgaattccatcaattggcttggctatatttgcgctccagcgtcgatgccttggacagatatacgcaagaagattaa

SEQ ID NO: 40726 - DNA, 702 bp, Neisseria meningitidis
atgttccgcatcgtcaaatggctgattgccctgcccgtcggcatctttatctttttcaatgcctatgtgtacggcaacatcattacctaccgcgccgtcgcgccccatcggactgcctttatgtcgatgcggatgaagcagtttgaacaggaaggtcgcgatgtcgcactggattaccgctggatgccctacaaacgcatttccaccaacctgaaaaaagccctgattgcttccgaagatgcccgtttcgccgggcacggcggcttcgattggggcggcattcaaaacgccatcaggcgcaaccggaacagcggcaaagtgaaggcgggcggctcgaccatcagccagcagcttgccaaaaacctgtttttaaacgaaagccgcagctatatccgcaaaggcgaagaagcggcgattaccgcgatgatggaagccgttaccgacaaagacaggatttttgaactgtatttaaactcaatcgaatggcactacggcgttttcggcgcggaagccgcgtcccggtatttttatcaaatacccgccgccaagctgaccaaacagcaggcggcaaaactgacggcacgcgtccccgccccgctctactacgccgaccatccgaaaagcaaacggctgcgcaacaaaaccaatatcgtgctcagacgcatgggttcggcagagttgcctgaaagcgacacggactga

SEQ ID NO: 40727 - DNA, 1188 bp, Neisseria meningitidis
atgacagaggacgaacgtttcgcgtggctgcaattggcgtttacgccctatatcggcgcggaaagcttcctgctgctgctgcgccgtttcggcagcgcgtcaaacgccctgtccgcaccggcggaacaggtcgccccggcggtgcggcacaagcaggcggccgaggcttggcgcaatgcggaaaaacgcgctttggcgcggcaggcggcagaagcggcgttggaatgggaaatgcgggacggatgccgcctgatgctgcttcaggatgaagatttccccgaaatgctgacgcaggggctgaccgcgccgccggttttgtttttgcgcggcaacgtgcggctgctgcacaagccttccgccgccatcgtcggcagccgccatgccacgccgcaggcgatgcggattgccaaagatttcggcagggcgttgggagagaaaggcattcccgttgtgtcgggtatggcttcgggcatcgataccgccgcccatcagggtgcgttgcaggcggaaggcggcaccatcgccgtgtgggggacgggcatagaccgcatttatccgccgtccaataaaaaccttgcctatgaaatcgccgaaaaaggactgattgtcagcgagttccccatcggcacgcgcccgtatgccggcaattttccgcgccgcaaccgcctgattgccgcgctgtcgcaggttacgctggtggttgaagccgcgttggaatccggttcgctgattaccgccggcctggcggcagaaatggggcgcgaagtgatggcggtacccggttcgatagacaatccacacagcaaaggctgccacaaactgattaaagacggcgcgaaactgacggaatgtttggacgacatcctgaacgaatgcccgggtctattgcaaaatacgggtgcttcgtcatattctataaataaggatacgtccgacacgggcagccgcgccgttcaggcggcatacgccccgccgcctgccgcaaaaatgccgtctgaaggggcggcaggcggcacagccgtcggcggcatactggataaaatgggtttcgaccccatccatcccgacgtgcttgccggacagttggctatgcctgccgcagatttgtatgccgcactgttggaattggaattggacggcagcgttgccgcaatgcccggcggcagataccagcgtatccgaacttga

SEQ ID NO: 40728 - DNA, 516 bp, Neisseria meningitidis
atgtacacttgcacttcctgcggcgaaaaacatgaagatatgcccgcaatcggctttaccgccccctatccctataatcaactcagtgaagaagaacgcattgcttaccaagctgaatgcggcggcgatttctgcatcatccgttatcccgaccaaaccgaccgctttatccgcgcggtgctgccgattccgattatcgggcatgaggaaacgctggaatacggggtgtgggtatccgtcagcgaaaagagttttaacgactatcaaagccgcttttacgacaaccttgaaaacgctgtttatttcggcatgatctgcaactggctgcccccttacaaatccgacactttcggtctgcactgcaatgttgttacccaacccgatggccaacgtcctttgctgcaacttcatcaaagcggcggacatccgctggtacgcgacttttatcacggcatagaatacgccgaagcgcaggcaaggataggggcggtatccgaatcggattgttcaggataa

SEQ ID NO: 40729 - DNA, 654 bp, Neisseria meningitidis
atgaaagccgtatttgtcgaactgccgccgtttgaacgtttccgtgctgactacttcagcagtgaggaataccgcgcctttcaaaatgaattaatggcaaatcccgaaaaaggcgatgtaatacaagggacgcgcggtctgcgtaaaatccgcgttgccgattccaagcgcggcaagggcaagcggggcggctctagggttatctactattgggcggtcagccgtgccgttttccttttgttcactgtttacggcaaaaacgttaaagatgatttgtctccaagtgaaaaaagatactttccgccatgcttcataacctcaaggaaaataaccatgtctgaacgcaatttgtttgaagaactgaaagagggcttggaagccgccgaacaatatttgcaagggaaaatcacattgcgggcaatagaagcggaaatacccgaaaacggggcggctgccatttctcctgaagaaatacgcgccattcgcgaaagcctgaatttctcccaagcggtctttgcccgcaaactccgttgctccgtccgtacatatcagggctgggaacaaggcaaaacgcgcccgaacccccaagccgccttattgcggcgtatggtgcaaaaatcgcctaaaacgtttaagacgattgccgcgctatga

SEQ ID NO: 40730 - DNA, 450 bp, Neisseria meningitidis
atgaaaatcggaacaacttggcagacggcatccgctatgctggttttgcgtctgtttgccgcatatgaatttttggaatcgggtttgcaaaaatggaacggggagaattggttttccgaaatcaacgatcagtttccattcccgttcaacttgctgccggacgcgttaaactggaatctcgccatgtatgcggagcttttgctgcccgtattgttgcttttgggtttggcaacgcgtctgtcggcattggggctgatggtcgttaccgccgtcgcttgggctgcggttcacgccggttcgggttacaatgtctgcgacaacggttataaaatggctttaatttatatcgtggtattaatcccgctgcttttccagggtgcgggcggatggtcgctggatacgctgctgaaaaaacggttttgcccccaatgccgtctgaagcaagattga

SEQ ID NO: 40731 - DNA, 1566 bp, Neisseria meningitidis
atgacccaagacaaaatcctcatcctcgacttcggttctcaagttacccagctgattgcccgccgcgtgcgcgaagcccacgtttactgcgaactgcattccttcgatatgcctttggacgaaatcaaagccttcaaccccaaaggcatcatcctctccggcggccccaattccgtttacgaatccgactatcaagccgataccggtatttttgatttgggcattccggttttgggcatctgttacggcatgcagtttatggcgcaccacttgggcggcgaagtgcagcccggcaaccagcgcgaattcggttatgcgcaagttaaaaccatagacagcgagctgacacgcggcattcaagatggtgagccaaacacactcgacgtatggatgagccacggcgacaaagtgtccaaactgcccgacggtttcgccgtcatcggcaacaccccgtcctgcccgattgccatgatggaaaacgccgaaaaacaattctacggcatccagttccaccccgaagttacccacaccaaacaaggccgcgccctgttgaaccgctttgtcttggatatttgcggcgcacaaccgggctggacgatgccgaactacatcgaagaagccgttgccaaaatccgcgaacaggtcggcagcgacgaagtgattttaggtttgtcaggcggcgtagactcttccgtagccgccgcgctgattcaccgcgccatcggcgaccaactgacctgcgtgttcgtcgatcacggtttgttgcgcctgaacgaaggcaaaatggtgatggatatgttcgcccgcaacttgggcgtgaaagtgattcacgtcgatgccgaagggcagtttatggcgaaactcgccggcgttaccgaccctgagaaaaaacgcaaaatcatcggcgcggaatttatcgaagtatttgatgtcgaagagaaaaaactcaccaacgccaaatggctggcgcaaggcacgatttaccccgacgtaatcgaatccgcaggcgcgaaaaccaaaaaagcccacgccatcaaatcgcaccacaacgtcggcggtctgcctgaaaacatgaagctcaagctgcttgagccgttgcgcgatttgttcaaagacgaagtgcgcgaactgggcgttgctttgggcttgccgcgcgaaatggtgtaccgtcatccgttccccggccccggtttgggcgtgcgcatcttgggcgaagtgaaaaaagaatacgccgacttattgcgtcaagcagacgatattttcatccaagaattacgcaacaccaccgacgaaaacggcacatcttggtacgacctgaccagccaggcatttgccgtattcctgcctgtgaaatccgtcggcgtaatgggcgacggacgcacttacgactacgtcgtcgcactgcgcgcagtcatcaccagcgacttcatgaccgcacactgggcagaactgccttactcactgctcggacgcgtgtccaaccgcatcatcaacgaagtcaaaggcatcaaccgcgtggtgtacgatgtcagcggcaaaccgcctgccacgattgaatgggaataa

SEQ ID NO: 40732 - DNA, 1467 bp, Neisseria meningitidis
atgaggcagatgccgtctgaagccgttttcctgcaatttcgacagacgagaaaaatcatgaaatacatcagcacgcgcggcgaaaccgcacacaaaccgttcagcgaagttttattgatggggcttgcccccgacggcggcctgatgctgccggaacattatccgcaaatcgggcgcgaaaccttggacaaatggcgcggtttagcttatcccgaattggcgtttgaaattatgcgcctgtttgttacggatattccggaggacgatttgcgcgacattctgaaccgtacttacacggaagcggcgttcggtactaaggaaatcacccccgtccgcacgctttcagacggcatcaaaatccaagccttgtccaacggcccgacgctggcgttcaaagatatggcaatgcagtttttgggcaatgcgtttgaatatgttttaaacaaagaaggcaaaaaactcaatatcttgggcgcaaccagcggcgatacgggttcggctgcggaatatgccttgcgcggcaaaaaaggtgtgaatgtatttatgctgtcgcccgatggcaaaatgagcgcgttccaacgcgcgcaaatgtacagcctgcaagacgagaatatccacaatatcgccgtgaagggaatgtttgacgactgtcaggatattgtgaaggcggtgcagaacgatgccgcgttcaaggaaaaataccatatcggtacggtcaactcgatcaactggggacgcatcgtcgcgcaagtggtttattactttgcaggctatttcaacgccacttcaagcaatgacgaaaccgtcagcttctgcgtaccgagcggcaacttcggcaacgtttgcgcgggacatattgccaaacagatgggcctgcctgtccgccgcctgattgttgcgaccaatgaaaacgatgtgttggacgagtttttcaaaaccggcgcataccgcccacgcaacagcgcgcatacttatgttacctccagcccgtctatggacatttccaaagcgtccaacttcgagcgtttcgtgttcgacctgatggatcgcgatcctcaggaaatgaatacgctgtgggcggaagtagcggcgggcaaaggctttgacctgcggtttgctttagaaaaagtcggtggcaaatacggttttacctccggcaaatccacccaccccgaccgcctcgccaccatcagacaggtttatgagcaagaccaagaactcatcgacccgcacactgccgacggcgtaaaagtcgcccgcgaagtgcgcgaagaaggggaaacggttgtgtgtttggaaaccgcgttggcagcgaaattcgatgcgaccatacgcgaagccgtcggcgatgccgccattccgcgccctgccgcgctggaaggtttggaaaacctgccgcagcgcgtgcaaaccgtgccgaacagtgcggatgcggtaaaaggcatcatcgaacaaacccttgcctga

SEQ ID NO: 40733 - DNA, 234 bp, Neisseria meningitidis
atggcacgagtttgcaaagtgaccggcaaacgcccgatgtccggcaacaacgtatcgcacgccaacaacaaaaccaaacgccgttttttgcccaacttgcaatcacgtcgtttttgggtagaaagtgaaaaccgctgggttcgcctgcgcgtttccaacgctgcactgcgtaccatcgacaaagtaggcattgatgtcgtattggctgatttgcgtgctcgcggcgaagcttaa

SEQ ID NO: 40734 - DNA, 354 bp, Neisseria meningitidis; identical to SEQ ID NO: 40032

SEQ ID NO: 40735 - DNA, 453 bp, Neisseria meningitidis
atggtcataaaatatacaaatttgaattttgcgaaattgtcgataattgcaattttgatgatgtattcgtttgaagcgaatgcaaatgcagtaaaaatatctgaaactgtttcagttgataccggacaaggtgcgaaaattcataagtttgtacctaaaaatagtaaaacttattcatctgatttaataaaaacggtagatttaacacacatccctacgggcgcaaaagcccgaatcaacgccaaaataaccgccagcgtatcccgcgccggcgtattggcgggggtcggcaaacttgcccgcttaggcgcgaaattcagcacaagggcagttccttatgtcggaacagcccttttagcccatgacgtatacgaaactttcaaagaagacatacaggcacaaggctaccaatacgacaccgaaaccgacaaatttgcaaaggtctcaggctaa

SEQ ID NO: 40736 - DNA, 306 bp, Neisseria meningitidis; identical to SEQ ID NO: 38913

SEQ ID NO: 40737 - DNA, 378 bp, Neisseria meningitidis
atgatttacggcatcggtacagacatcgtttccctcaagcgcatcatccgcttaaacaaaaaattcggacaggcgtttgccgtgcgtatcctcactccggaagagctgcttgaatttcctcaggcgggcaaacccgtcaactaccttgccaaacgctttgccgccaaagaagcctttgccaaagccgtcggcacgggcatacgcggcgcggtttccttccgcaacatcggcatcgggcatgacgcattgggcaagcccgaatttttctacggccccgccctgtccaaatggctggaggaacaaggcatcagccgcgtcagcctcagcatgagcgacgaagaagacaccgtattggcgtttgtcgttgccgaaaaataa

SEQ ID NO: 40738 - DNA, 1770 bp, Neisseria meningitidis
atgaccgtacagaccaagacaaaaggtttggcgtggcaagaaaaaccgctatccgacaacgaacgtctgaaaaccgaaagcaattttttacgcggcacgattttggacgatttgaaagacccgctcacgggcggcttcaaaggcgacaacttccaactcatccgcttccacggtatgtatgagcaggacgaccgcgacatccgcgccgaacgcgccgaggcaaaactcgagcccttgaaatttatgcttttgcgctgccggctgccgggcgggatcatcaaaccgtcccaatggatagaactggacaaatttgcccgggaaaacagtcattaccgctccatccggctgaccaaccggcaaaccttccaatttcacggcgtgccgaaagccaagttgcagacgatgcaccgcctcttgcacaaactgggtttggattccatcgccacggcggcggatatgaaccgcaacgtgctttgcacgtccaacccgatcgagtccgaactgcaccggcaggcttacgaatacgcgaaaaagatttccgaacacttgctgccgcgcacgcgcggttatctggatgtgtgggtggacggcaaaaaagttcaaagttctgacgacttccttcaagaagacgagccgattttgggcaaaacctatctgccgcgcaaattcaaaaccgcagtcgtcatcccgcccttaaatgatgtggactgctacggcaacgacttggattttgtcgccatttcagacggcaacggacagcttgccggattcaatgttttggcgggcggcgggctttcgatggaacacggcaacaccaaaacctatccgaacatttcactggaactgggtttcgtgcctccggaacacgcgctgaaggccgccgaagcggtggtaaccacgcagcgcgacttcggcaaccgcagcgaccgcaaaaacgcccgcacccgctacaccattcaaaatatgggcttggacaacttccgcgcggaagtcgaacgccgtatgggtatgccgttcgaacccatacgcccgttcaaatttaccgggcgcggcgaccgcatcggctgggtgaaaggcatagacggcaactggcatttgacccttttcatcgaaagcgggcgtttggttgacgaaggcgggaaacagcttctgaccggcgtgttggaaatcgccaaaatccacaaaggcgacttccgcatcaccgccaaccaaaacctcatcgtggcaaatgtacccgaaagaggcaaagcccggatcgaacagctcgcccgctcatacgggctgatacacgacggtgtcagcaaactgcgcgaaaatgcgatgtcgtgcgtttccttcccgacctgccccttggcaatggcggaagccgaacgcgtgctgccagacttcatcgacgatctggataagattatggcgaaacacggcacgtcggacgactatatcgttacccgcattaccggctgccccaacggctgcggacgggcaatgttggcggaaatcgggctggtcggcaaagccgtcggacgctacaacctccatatcggcggcgaccgtgaaggcgtacgcatcccccgcctttacaaagaaaacatcaccctgcccgaaatccttgccgaattggacgacctgatcggcaaatgggcggcagaacgcaatatcggcgaaggtttcggcgatttcgccatacggacgggcatcgtcaaacccgtgttggatgcgcccgtcgatttttgggacgcatccaaagccgtcccgattgcgcgcgcctga

SEQ ID NO: 40739 - DNA, 900 bp, Neisseria meningitidis
atgaaaaccaattcagaagaactgaccgtatttgttcaagtggtggaaagcggcagcttcagccgtgcggcggagcagttggcgatggcaaattctgccgtaagccgcatcgtcaaacggctggaggaaaagttgggtgtgaacctgctcaaccgcaccacgcggcaactcagtctgacggaagaaggcgcgcaatatttccgccgcgcgcagagaatcctgcaagaaatggcagcggcggaaaccgaaatgctggcagtgcacgaaataccgcaaggcgtgttgcgcgtggattccgcgatgccgatggtgctgcatctgctggcgccgctggcaacaaaattcaacgaacgctatccgcatatccgactttcgctcgtttcttccgaaggctatatcaatctgattgaacgcaaagtcgatattgccttacgggccggagaattggacgattccgggctgcgtgcacgccatctgtttgacagccgcttccgcgtaatcgccagtcctgaatacctggcaaaacacggcacgccgcaatctacagaagagcttgccggtcaccaatgtttaggcttcaccgaacccggttctctaaatacatgggcggttttagatgcgcagggaaatccctataagatttcaccgcactttaccgccagcagcggtgaaatcttacgctcgttgtgcctttcaggttgcggtattgcttgcttatcagattttttggttgacaacgacatcgctgaaggaaagttaattcccctgctcgccgaacaaacctccgataaaacacacccctttaatgctgtttattacagcgataaagccgtcaatctccgcttacgcgtatttttggattttttagtggaggaactgggaaacaatctctgtggataa

SEQ ID NO: 40740 - DNA, 642 bp, Neisseria meningitidis
atgttgttccgtaaaacgaccgccgccgttttggcggcaaccttgatgctgaatggctgtacggcaatgatgtggggcatgaacgacccgttcagccaaacgaccgcctataaacacgttgacaaggatcaaatccgcgccttcggtgtggttgccaaagacaatgcccaattggaaaagggcagtctggtgatgatgggcgggaaatactggttcgtcgtcaatcccgaagattcggcgaagctgacgggcattttgaaggcagggctggacaaacccttccaaatagttgaggataccccgagctatgctcgccaccaagccctgccggtcaaactcgaatcgcctggcagccagaatttcagtaccgaaggcctttgcctgcgctacgataccgacaggcctgctgacatcgccaagctgaaacagcttgagtttgaagcggtcgaacttgacaatcggactatttacacgcgctgcgtatccgccaaaggcaaatactacgccacgccgcaaaaactgaacgccgattatcattttgagcaaagtgtgcctgccgatatttattacacggttactgaaaaacataccgacaaatccaagctgtttgcaaatatcttatatacgcccccccctttttga

SEQ ID NO: 40741 - DNA, 675 bp, Neisseria meningitidis
atgcctgctgctttgattaaagattttctgctgactcagggtttgaagctgccgcttgacgaggttcgggcggcgtatctgacggcgcagacggtaatggatatggggacggcttcgattgagcgttcggttttgtggcttgagcatgaggattggaggcttgccgattatttggagcaaaacagcgggaatgaggaaagtctgaaacggcttttcatggctttggattcggtgttttcgcgctgtaaaggcgtgcgcgccgcagccgtttatgccctgatgccgtctgaaaatgccgcctttcggctggtttgcctgtcccggcagggcgaggttttggaaaacctgtgggatttggatgaagcggcaggcaaggtttcgctggcttgccgttcggcgcaaagcggctggatgaatattgcctcggatgtgcgtcgttggttggatttgggagagctttcgggagaacgcaatcatgcttcggcggcgcaaatttccattccggtctgcacggaaagcggcagtgtgttgggcgtggttcatgtggaatttgaatgcgcagagtgtgcggatgaggcagcgcaggcggaatgggtggctcttgccttggctttgtccgaacctttgaagcagcttttgggcatcactgccgcagaaggagatgaaaatgtctga

SEQ ID NO: 40742 - DNA, 624 bp, Neisseria meningitidis
atgcctaatagctttatcgaccgccgcacagaaatatacaaccaacgaaaccaaaataagattacgttgagtttacgtttatccattaaagatgatttgattttgcaagagcttgccgatgcttgggaaacaactcgccaagatatcatcaatgatttaattcaagaattcattattcaagactgggagaacaaacgaatgattgacaaacaaaaagaagaagaatttgataattcaactacaacacgatatttcttattaaatactaatagtgccaacgacttggaagaccataattttatgatgacaaaccaagtagctgctgcatttgaagatggctacaaagaaaaaatctgtcggattaaaaaaggagactatgtattcctatacgcctctggacaaggaattgttgcatatggtcaagcaacaggaatcatagagaaaactcatcattacggcgttgataataaaacattttttcagaaactagaacattttatcgatttaagtcagaatccaatcaaagcaaaacaggttaaatccattttgggacgttcttttccttttgcccaaacattatctcagatgactgatggggaaaaactgttggagaatctcaaataa

SEQ ID NO: 40743 - DNA, 636 bp, Neisseria meningitidis
atgccggatgtggtttttttaaatgcagttaaatatgataagggaagtgtttcacattttggcgaagattatcagcctgaaaaaatactcaatcaatccaaagtcgaagttttgaaaggattatgccgatttagaaaatttccgggttcggcgtgtaataagattataaaaagggaattgattatcaaagaaaaactattttttgaaaaagaggtttatgccgaagatatcgaatggtcaatgagattatttaatgcggcaacaactttttcttatttggacggttgttattactattatcggcagggaagaaaagattctaaaacaggaactgtttcggaaaaaagtataaagtcattattatatattttggagaaaaatgcggaaatggaatttgatagggatatatcaagttatctttattcttttctttcctacgaatatctcgttttgctttttatcatgacgagtaaaaatatagagtgtgatgctgatataaaaagaagggcgtatcatttaaggtttatgctgttaaagtccaataaattgatatataagctgatattcccgataatcacattattcggggtcgatattacaggcaggattttaaaagcaatcagggggaatatttaa

SEQ ID NO: 40744 - DNA, 4128 bp, Neisseria meningitidis
atgacctaccccatccccaaaccccgtgaaaaatcccgttggcccaatctttcgcaaggctcgctgcccttggctttggcgcgttatctgccgcataagcagctcaaggttgtcttgactcaagatgcggaacaggcgctacgccttcagacggcatggctgtttttccgtccgcacgatacggcggtgttcttgccggactgggaaacgctgccttacgagcgtttttctccgcatcaggatttagtgtcggagcgcttgtcggcattgtggcagattaaaagcggcgcggcggacgtgttgttcgtgccggttgctacggcgatgcagaagctgccgcctgtgccgtttttggcggggcgcacgttttggctgaaaacagggcagactttggatataggccgtctgaaaagcgatttggtggatgcaggttataaccatgtttcccacgttgttgcggcaggcgagttcgctgtgcgcggcggcattgtcgatttgttccccatgggcagcgaaatgccgtaccgcattgatttgttcgacgatgaaatcgacagcatcaaaactttcgataccgaaacacaacgcaccatttctcctgtttccgaaatccgcctgctgccggcgcacgagttccccaccgacagcgaggcgcaaaagattttccgcagccgcttccgcgaggaagtcgacggtaatccgaacgatgccgccgtgtacaaagccgtcagcaacggccacttcggtgcgggcgtggaatattacctgccgctgttttttgaaaacgagctggaaacgctgtttgactatatcggcgaggatgcgctgtttgtctctttgggcgatgttcatgccgaggcaaaccgcttttggagcgacgtcaaatcgcgttacgccatggcgcagggcgacgaaacctatccgcctttgcttccacagcatttgtatctctctgccgatgtattcgcaggccgtctgaaaaactacggacaggtactgcccgatgtttccggcaaggaacacgccctccccgaccttgccgtcaaccgacaatccgacgagcctttgcaggcattgaaggattttcagacggcgtttgaaggacggattttgctgtgcgccgaaagtttgggacggcgcgaaaccatgctcggtttcttgcagcaaaacggtttgaaagccaaacctgtgtccgactggcagggcttcttgtcggcgcatgagccgctgatgattacagtggcgccgttggcttacgggtttaaactgggcggactgcaatcgccgaaccaacagcaaactacttccgcctccgaaggagaaggcgatgcggttaccgaccaaaccgaattttccgcatccgcaacaaaccctctccctagccctctcccacaggagagggaacaaagtgcagccgccgtttcagacagtctgaaagcagccgccgtttcaaccgaaagcagcctgccccccggtaaaagtaatctgcacggacaaatccgacagcaacctaccccctcccccgtgggggaagattggggagagagcaaaacagttgccgctcaaaccgaatttcccgcatccgcaacaaaccctctccctagccctctcccacaggagagggaacaaagtgcagccgtcgtttcagacagtctgaaagcagccgccgtttcaaccgaaagcagcctgccccccggtaaaagtaatctgcacggacaaatccgacagcaacctaccccctcccccgtgggggaagattggggagagagcaaaacagttgccgctcaaaccgaatttcccgcatccgcaacaaaccctctccctagccctctcccacaggagagggaacaaagtgcagccgccgtttcagacgacctgaaaaccaaaagcagcctgtaccccatcgaaaatagtctgcacgggcaaatccgacagcaacctgccccctcccccgtgggggagggttggggagagggaaaagcagttgccgaccaaagtgccatcgccgtcattaccgaatccgacctctaccaatacgtcgcccgttcgcgcgtccacaaccgccgcaagaaacacgccgccgtttcagacggtctgttgcgcgaccttgccgaaatcaatatcggcgatcccgtcgtgcacgaagaacacggcatcgggcggtatatgggcttgatcacaatggatttgggcggcgaaaccaacgaaatgatgttgcttgaatatgcaggcgaagcgcagctttatgtgcctgtttcgcaactgcatttaatcagccgctactccggtcaggcgcatgaaaacattgccctgcacaagctcggcagtggcgcgtggaacaaggcgaagcgcaaagccgccgaaaaggcgcgcgataccgccgccgagttgcttaacctttacgcccgacgcgctgcccaatcgggacacaagtttgaaatcaacgagttggactatcaggcgtttgccgacggcttcggctacgaggaaaccgaagaccaggccgccgccatcgccgccgtgattaaagatttgacgcaagcgaagccgatggatcgccttgtgtgcggcgatgtcggcttcggcaaaaccgaagtcgccctgcgcgccgcgtttgtggcggtgatgggcggcaaacaggtcgccgtactcgccccgaccacgcttttggtcgagcagcacgcgcaaaacttcgccgaccgtttcgccgatttccccgtgaaagtcgccagcctttcgcgtttcaacaacagcaaagccaccaaagccgcgctggaaggcatggcagacggcacggtcgatattgttatcggtacgcacaaactggtgcaagacgacatcaaattcaaaaacttaggtttagtgattatcgatgaagaacaccgcttcggcgtgcgccagaaagagcagctcaaacgcctgcgcgccaatgtcgacatcctcaccatgaccgccacaccgattccgcgcactttaagtatggcgttggaaggactgcgcgacttctcgctgattaccaccgcgcccagccgccgcctctccgtcaaaacctttgtcaaaccctttagcgaaggcagcgtgcgcgaagccgtattgcgcgaactcaaacgcggcgggcaagtatttttcctgcacaatgaagtggataccatcgaaaacatgcgcgagcggctggaaaccctgctgcccgaagcccgcatcggcgtggcgcacggacaactgcgcgagcgcgagctggaacaagtgatgcgcgactttttgcagcaaagatttaacgtgttgctctgctccaccatcatcgaaaccggcatcgacatccccaacgccaacaccatcatcatcaaccgcgccgacaaattcgggctggcgcaactgcaccagcttcgcgggcgcgtcggccgcagccaccatcaagcctacgcctacctgctcacgcccgaatacatcaccaaagacgcagaaaaacgcctcgacgccatcgcggcagcagacgaactcggcgcaggtttcaccctcgccatgcaggatttggaaatccgcggcgcaggcgaaatcctcggcgaagggcagtccggcgaaatgatacaggtcggcttcacgctctacaccgaaatgctcaaacaagccgtgcgcgacctcaaaaaaggccgccagcccgacctcgacgcaccgctgggcatcaccaccgaaatcaaactgcacagccccgccctgctgcccgaaagctactgccccgacatccacgagcgtctcgtcctctacaaacgcctcgccgtctgcgaaaccgtgcagcaaatcaacgccatacacgaagaactcgtcgaccgcttcggcctgcccgaacaacccgtcaaaacccttatcgaaagccaccacttacggcttatggcaaaagaattgggtatcgatgccattgatgcggccggcgaagcggtaacggtaaccttcggtaaaaacaataatgtcgatccaaccgaaatcatcctgctgattcagaacgacaaaaaataccgccttgccggcgccgataagctacggtttaccgcagagatggaaaatatcgaggtcagaatcaacaccgtaaaaaacgttttaaaaaccttgcaaaacagatgcctgcccaaataa

SEQ ID NO: 40745 - DNA, 1098 bp, Neisseria meningitidis
atgaaatccgtccgctccttcatccgcgacgacatacaagctatgtcggcatatcagattgccgacgttccgcccggctttgccaaactcgattcgatggaaagtcccgtccacccttttgccggacatgaaacgctgttgcaggaatggcaggcacggcttgccgccgcgcccatccatctttaccccaatccctccggcagcggtttacaggaagcattacgttcggcgttcgacattcccgactgcgccgacatcgcgctgggcaacggctcggacgagctgatacagttcatcacgatgctgaccgccaaaccgggcgcggcaatgttggcagccgaacccagtttcgtcatgtaccgccacaacgccgcgctgtacggcatggattatgtcggcgttccactgaacggagatttcaccctcaacctgcccgccgtcatcgaagccgtcaggaagcaccgccctgccctgacctttatcgcctaccccaacaaccccaccggcgtatgtttcacgcgtgccgaaatcgaagccgtcatcgaagcttcagacggcatcgtcgtcgtcgacgaagcctacggcgcattcaacggcgacagcttcctgccgcaggcgggcagcattcccaacctcatcgtcatacgtaccgtcagcaaaatcggttttgccggactgcgtatcggctatgcggcaggctgtcccgaagtcatcggcgaactgcaaaaaatcctgccgccctacaatatgaaccaactgagcctgaccaccgccaaactcgccctgcaacactacggcatcatctctgccaacatcgacagcctgaaaaacgaacgcgaacggatgttcgccgaattgggcaaaatatgccgtctgaacacctttccaagtcaggcaaacttcattaccatacgcgtacccgatgccgatttgttgtttgacacgctcaaacaaaaccgcgtcttggttaaaaaactgcatggcgcgcacccgcttttggaacactgcctgcgcattaccgtaggcagccccgcacaaaacgatgccgttctcaacatcattcgccaactttactgccaaccaacggatttcctatga

SEQ ID NO: 40746 - DNA, 207 bp, Neisseria meningitidis; identical to SEQ ID NO: 39219

SEQ ID NO: 40747 - DNA, 759 bp, Neisseria meningitidis
cagcccccaaaaaccttctcttctcttctcttctcttctcttctcttctcttccgcagcgcaggcggcaagtgaagacggcagccgcagcccgtattatgtgcaggcggatttagcttatgccgccgaacgcattacccacgattatccgaaagcaaccggtgcaaacaacacaagcacagtaagcgattatttcagaaacatccgtgcgcattccatccacccccgggtgtcggtcggctacgatttcggcggctggaggatagcggcagattatgccagttacagaaaatggaaagaaagtaattattctaaaaaagttactgaatttaaacacgaaaacggcaacaaaaaagaagacaaaacagaacatcagggaaacggcagcttccacgccgcttcttctctcggcttatccgccatttacgatttcaaactcaacgataaattcaaaccctatatcggcgcgcgcgtcgcctacggacacgttaaacatcaggttcattcagtggaaagcaaaaccacgactgttacctctaaaggtggaggccctatcccacaaggtccgacccccaaacctccctatcacgaaagcaacagcatcagcagcttgggtcttggtgtcatcgccggtgtcggtttcgacatcacgcccaagctgactttagacaccggataccgctaccacaactggggacgcttggaaaacacccgcttcaaaacccacgaagtctcattgggcgtgcgctaccacttctga

SEQ ID NO: 40748 - DNA, 1002 bp, Neisseria meningitidis
atgaaacggaaaatttggctgctgccgctgctggcggtttcggcatacctgcaggcgcagacggaagtcaggctggcggtgcataagtcgttcagcctgcccaaagggctgattgcgcgcttcgagcgggcaaacgatgcgaaggtgtcgattattcaggcgggcggcgcgaacgaaatgctcaacaaactgattttgagccgcgccaacccgattgccgacgcggtgtatggtttggacaacgccaatatcggcaaggcgcgggaaatgggcattttggcggcggcgcaacccgaatccgcccccgtcgcggtcgggctgccttcggctttggcggtcgattacggctatgtgtccatcaattacgacaaaaaatggtttgaaggcaaaaagctgcccctgccgcaaaccctgcaggatttgacccgccccgaatataaaaacctattggtcgtgccgtcccccgccacgtcgtccccggggctgggcttcctgatggcgaacatcagcggtctgggcgaagaaggcgcgttcaaatggtgggcacagatgcggcagaacggcgtgaaggtcgccaaaggctggagcgaggcgtattacaccgacttttcgcacaacggcggcgcgtatccgctggtggtcggttatgccgccagcccggcggcggaagtgtatttttccaaaggcaaatacagcgagccgccgacgggcaacctgtttttaaaaggcggcgtattccgccaggtcgaaggcgcggcggtcttgaagggcgcgaaacagccgaagctggcggcaaaactggtgcaatggctgcaaagtcgggaagtgcagcaggcggttccgtccgaaatgtgggtttaccccgccgtcaaaaacacgcgcctgcccgacgtgttccgcttcgcccaagccccgacgcacaccaccgcccccgcgcagcgcgatattgatgcgaaccagcgcggatgggtttcccgttggattagaacggttttgaaataa

SEQ ID NO: 40749 - DNA, 1200 bp, Neisseria meningitidis
atgtccgaccaactcattcttgttctgaactgcggcagttcatcgctcaaaggtgccgttatcgaccgcaaaagcggcagcatcgtcctaagctgcctcggcgaacgcctgaccacgcccgaagccgtcattaccttcagcaaagacggcaacaaacgccaagttcccctgagcggccgaaattgccacgccggcgcggtgggtatgcttttgaacgaactggaaaaacacggtctgcacgaccgcatcaaagccatcggccaccgcatcgcccacggcggcgaaaaatacagcgagtctgttttgatcgaccaggccgtaatggacgaactcaatgcctgcattccgcttgcgccgctgcacaaccccgccaacatcagcggcatccttgccgcacaggaacatttccccggtctgcccaatgtcggcgtgatggatacttcgttccaccaaaccatgccggagcgtgcctacacttatgccgtgccgcgcgagttgcgtaaaaaatacgctttccgccgctacggtttccacggcaccagtatgcgttacgtcgcccctgaagccgcacgcatcttgggcaaacctctggaagacatccgcatgattattgcccacttaggcaacggcgcatccattaccgccatcaaaaacggcaaatccgtcgataccagtatgggtttcacgccgatcgaaggtttggtaatgggtacacgttgcggcgacatcgatccgggcgtatacagctatctgacttcccacgccgggatggatgttgcccaagtggatgaaatgctgaacaaaaaatcaggtttgctcggtatttccgaactttccaacgactgccgcaccctcgaaatcgccgccgacgaaggccacgaaggcgcgcgcctcgccctcgaagtcatgacctaccgcctcgccaaatacatcgcttcgatggctgtggcctgcggcggcgttgacgcactcgtgttcaccggcggtatcggcgaaaactcgcgtaatatccgtgccaaaaccgtttcctatcttgatttcttgggtctgcacatcgacaccaaagccaatatggaaaaacgctacggcaattcgggcattatcagcccgaccgattcttctccggctgttttggttgtcccgaccaatgaagaactgatgattgcctgcgacactgccgaacttgccggcatcttgtag

SEQ ID NO: 40750 - DNA, 4365 bp, Neisseria meningitidis
atgaaaacaaccgacaaacggacaaccgaaacacaccgcaaagccccgaaaaccggccgcatccgcttctcgcctgcttacttagccatatgcctgtcgttcggcattcttccccaagcctgggcgggacacacttatttcggcatcaactaccaatactatcgcgactttgccgaaaataaaggcaagtttgcagtcggggcgaaagatattgaggtttacaacaaaaaaggggagttggtcggcaaatcaatgacaaaagccccgatgattgatttttctgtggtgtcgcgtaacggcgtggcggcattggtgggcgatcaatatattgtgagcgtggcacataacggcggctataacaacgttgattttggtgcggagggaagcaatcccgatcaacatcgttttacttataaaattgtgaaacggaataattataaagcagggactaaaggccatccttatggcggcgattatcatatgccgcgtttgcataaatttgtcacagatgcagaacctgttgaaatgaccagttatatggatgggcggaaatatatcgatcaaaataattaccctgaccgtgttcgtattggggcaggcaggcaatattggcgatctgatgaagatgagcccaataaccgcgaaagttcatatcatattgcaagtgcgtattcttggctcgttggtggcaatacctttgcacaaaatggatcaggtggtggcacagtcaacttaggtagtgaaaaaattaaacatagcccatatggttttttaccaacaggaggctcatttggcgacagtggctcaccaatgtttatctatgatgcccaaaagcaaaagtggttaattaatggggtattgcaaacgggcaacccctatataggaaaaagcaatggcttccagctggttcgtaaagattggttctatgatgaaatctttgctggagatacccattcagtattctacgaaccacgtcaaaatgggaaatactcttttaacgacgataataatggcacaggaaaaatcaatgccaaacatgaacacaattctctgcctaatagattaaaaacacgaaccgttcaattgtttaatgtttctttatccgagacagcaagagaacctgtttatcatgctgcaggtggtgttaacagttatcgacccagactgaataatggagaaaatatttcctttattgacgaaggaaaaggcgaattgatacttaccagcaacatcaatcaaggtgctggaggattatatttccaaggagattttacggtctcgcctgaaaataacgaaacttggcaaggcgcgggcgttcatatcagtgaagacagtaccgttacttggaaagtaaacggcgtggcaaacgaccgcctgtccaaaatcggcaaaggcacgctgcacgttcaagccaaaggggaaaaccaaggctcgatcagcgtgggcgacggtaaagttattttagatcaacaagcagatgaaaataataaaaaacaagcctttagtgaaatcggcttggtcagcggcagggggacggtgcaactgaatgccgataatcagttcaaccccgacaaactctatttcggctttcgcggcggtcgtttggatttgaacgggcattcgctttcgtttcaccgtattcaaaataccgatgaaggggcgatgattgtcaaccacaatcaagacaaagaatccaccgttaccattacaggcaataaagatattgctacaaccggcaataacaacagcttggataacaaaaaagaaattgcctacaacggttggtttggcgagaaagatacgaccaaaacgaacgggcggctcaatctgaattaccaaccgacagaagcggatcgcactttactgctttccggcggaacaaatttaaacggtaacatcacgcaaacaaacggcaaactgtttttcagcggcagaccgacaccgcacgcctataatcatttaaacaaccattggtcgcaaaaagagggcattccgcacggagaaatcgtgtgggacaacgactggatcaaccgcacgtttaaagcggaaaatttccatattcagggcgggcaggcggtgatttcccgcaatgttgccaaagtggaaggcgattggcatttgagcaatcacgcccaagcagtttttggtgtcgcaccgcatcaaagccacacaatctgtacacgttcggactggacgggtctgacaaattgtgtcgaaaaaaccattaccgacgataaagtgattgcttcattgactaagaccaacatcagcggcaatgtcagccttgccgatcacgctcatttaaatctcacagggcttgccacactcaacggcaatcttagtgcaaatggcgatacacgttatacagtcagccacaacgccacccaaagcggcaaccttagcctcgtgggcaatgcccaagcaacatttaatcaagccacattaaacggcaacacatcggcttcgggcaatgcttcatttaatctaagcaacaacgccgtacaaaacggcagtctgacgctttccgacaacgctaaggcaaacgtaagccattccgcactcaacggcaatgtctccctagccgataaggcagtattccattttgaaaacagccgccttaccggacaaatcagcggcggcaaggatacggcattacacttaaaagacagcgaatggacgctgccgtcaggcacggaattaggcaatttaaaccttgacaacgccaccattacactcaattccgcctatcgccacgatgctgcaggcgcgcaaaccggcagtgcgacagatgcgccgcgccgccgttcgcgccgttccctattatccgttacaccgccaacttcggcagaatcccgtttcaacacgctgacggtaaacggcaaattgaacggtcagggaacattccgctttatgtcggaactcttcggctaccgcagcgacaaattgaagctggcggaaagttccgaaggcacttacaccttggcggtcaacaataccggcaacgaacctgcaagcctcgaacaattgacggtagtggaaggaaaagacaacaaaccgctgtccgaaaaccttaatttcaccctgcaaaacgaacacgtcgatgccggcgcgtggcgttaccaactcatccgcaaagacggcgagttccgcctgcataatccggtcaaagaacaagagctttccgacaaactcggcaaggcagaagccaaaaaacaggcgggaaaagacaacgcgcaaagccttgacgcgctgattgcggccgggcgcgatgccgtcgaaaagacagaaagcgttgccgaaccggcccggcaggcaggcggggaaaatgtcggcattatgcaggcggaggaagagaaaaaacgggtgcaggcggataaagacagcgccttggcgaaacagcgcgaagcggaaacccggccggctaccaccgccttcccccgcgcccgccgcgcccgccgggatttgccgcaaccgcagccccaaccgcaaccccaaccgcagcgcgacctgatcagccgttatgccaatagcggtttgagtgaattttccgccacgctcaacagcgttttcgccgtacaggacgaattagaccgcgtatttgccgaagaccgccgcaacgccgtttggacaagcggcatccgggacaccaaacactaccgttcgcaagatttccgcgcctaccgccaacaaaccgacctgcgccaaatcggtatgcagaaaaacctcggcagcgggcgcgtcggcatcctgttttcgcacaaccggaccgaaaacaccttcgacgacggcatcggcaactcggcacggcttgcccacggcgccgttttcgggcaatacggcatcgacaggttcgacatcggcatcagcgcgggcgcgggttttagcagcggcagcctttcagacggcatcggaagcaaaatccgccgccgcgtgctgcattacggcattcaggcacgataccgcgccggtttcggcggattcggcatcgaaccgcacatcggcgcaacgcgctatttcgtccaaaaagcggattaccgatacgaaaacgtcaatatcgccacccccggtcttgcgttcaaccgctaccgcgcgggcattaaggcagattattcattcaaaccggcgcaacacatttccatcacgccttatttgagcctgtcctataccgatgccgcttcgggcaaagtccgaacacgcgtcaataccgccgtattggctcaggatttcggcaaaacccgcagtgcggaatggggcgtaaacgccgaaatcaaaggtttcacgctgtccctccacgctgccgccgccaaaggtccgcaactggaagcgcaacacagcgcgggcatcaaattaggctaccgctggtaa

SEQ ID NO: 40751 - DNA, 2025 bp, Neisseria meningitidis
atgaacgatatgactttatatttgataattgcccttgttccgttggcaggctcgctgattgcgggtttgttcggcaacaaaatcggccgcgccggcgcgcatacggttacgatactcggcgtggcggtgtccgccgtgctgtcggcttatgtgttgtggggctttattgacggcagccgcgccaagtttgacgaaaacgtctatacctggctgacaatgggcggcttggatttctccgtcggcttcttggtcgatacgatgacggcgatgatgatggtcgtggtcaccggcgtatcgctgatggtgcatatctataccatcggttatatgcacgatgagaaagtcggctaccaacgcttcttcagctatatttctttgtttactttcagcatgttgatgctgattatgagcaacaacttcatccagctcttcttcggctgggaggctgtgggcttggtgtcgtatctcttgatcggtttctatttcaaacgtccaagcgcaacatttgccaacctgaaagcctttttgatcaaccgtgtcggcgacttcggctttttgctcggtatcggcttggtgcttgcctatttcggcggcagcctgcgctatcaagatgtattcgcttatctgcccaacgtgcaaaatgccaccatccagcttttccccggtgtggaatggtcgttgattactgtcacctgtttgctcctgtttgtcggtgcgatgggtaaatcggcacaattcccactgcacgtttggctgcctgattcgatggaaggcccgaccccgatttctgcattgattcacgccgcgacgatggttaccgccggtttgtttatggtgtcgcgtatgtcgccgatttatgagatgagcagcaccgcgctgtctgtcatcatggtaatcggtgcgattaccgccctgtttatgggtttcttgggcgtgattcaaaacgacatcaaacgtgtggttgcgtattccaccctgtcgcaactgggctatatgaccgtggctctgggcgcgtctgcctattccgtggcgatgttccatgtgatgacccacgccttctttaaagccttgttgttcttggcggcgggcagcgcgattatcggtatgcaccatgaccaagatatgcgccacatgggcaatctgaaaaaatacatgccgattacttggctgaccatgctgatcggtaacttgtcgctgatcggtacgccgttcttctccggcttctattccaaagattcgattatcgaagcggcgaaatacagcaccctgccgggcagcggctttgcctatttcgccgtcctcgccagcgtgtttgttactgcgttctacgcattccgccaatactttatggtgttccacggcgaagagaaatggcgcagcttgcctgaacatcatgacgatcatcatggcgaagaacatcacagcttgggcaaaaacgacaatccgcacgaaagcccgttggttgttaccctgcctttgattttgcttgccattccgtccgtcatcatcggctacgttgccatcgagcctatgctttacggcgatttctttaaagacgtgattttcgtcaataccgacgcgcatccgaccatgcacatcatgaaggaagagttccacggcgcattggcaatggtgtcgcacagcttgacatcgcctgttttgtatttggcggctgccggtgttgccgccgcgtggcttttgtacgtcaaactgccgcacctgcccgccaaaatcgcgcaggcgttccgtccggtttacgttttgtttgaaaacaaatactacctcgacgccctgtatttcaacgtcttcgctaaaggcacgcgcgcactgggtaccttcttctggaaagtcggcgataccgccattatcgataacggcatcgtcaacggctctgccaaactggtcggcgcgattgccgcgcaagtgcgtaaagcccaaaccggctttatctacacctacgccgccgctatggtattcggcgtattggtactgctcggcatgaccttctggggcttgttcagataa

SEQ ID NO: 40752 - DNA, 753 bp, Neisseria meningitidis
atgattaccctgccttccttaaacaatctgccgtcaaaatgggatgaaatccgccattgcctcgaaacccgggtttttgagtgcggcgttatgccgcatcccaatctgacggaatgcgaagccgggcagttcgatcgggatttttgggacaatatcggctgcgcgcctgaagaatatgtccgcatccgccgcgccatccgtttgttggaagcgcgttatcccgacagcttgaacgagctggtgtgtgccgccattgccacgcctttgggcgagatgttggcggtgtttggaaataagggattgtgtctgctggagtttgtcggacagaaacatatggagcaggaaattgccgccgtccaaaaagccttgcgcggacggtttgtgtttcgggaggatgagcggacgcaacttttgcggcaggaattggacttatacttcaagggtcgtctgaaaacctttgccacgcctttggagcagattggcaccgagtttcaaaagcaggcatgggacgcgctcttggcgattccttacggcgaaacgcgcagctacaaagagcaggcgcagcgtttgggcaaccccaaagccgtccgcgccgttgccgccgccaacgggcagaacaaggtgtctatcttgattccctgccaccgcgtcatcggcagcgacggcaaactgaccggctacgcgggcgggttgaaccgcaaacagtttttactggctttggaacgcggcgaagttcagacggcattgttttaa

SEQ ID NO: 40753 - DNA, 510 bp, Neisseria meningitidis
atgaatccgtttgaaaccaaaagcgttacctttgccgaaccgattgaaatgctgtatgcctgccacggcaaagtgcgccgtttttgcggacaagtcgccatgctgtcggactatatcgccgaaaacggctgcaatcagattgttttgcaaaccatccgccaaatcgcccagtatttcaacgttgccgcgccgctgcaccatgaagacgaagaagaaaacttcttcccgctgctgctgcaatatgcgccgcaagcccaagaaagcgtggacgagcttttgcgccaacatatcgggctgcacgacaactgggcggctgtttccgccgaatttgccaaactcgaagcagacaacgcttatgtccccgatgaggaagcgttcaaacgttttgtggcgggatatgatgttcatttggcgattgaagagccgctgtttgatatgggcaacacctttatcccaaaagaaaaactgaccgaaatcggcgaaattatggcggcgcgccggcgcaaataa

SEQ ID NO: 40754 - DNA, 486 bp, Neisseria meningitidis
ttggctgattttaaacctgactttgcgtggctgttgaaacggccgttgtgttttttggctttcggtttcggcagcgggctggctccgttcgcgccgggtacatttggcactttggcggcactgcctttggcatttgtgctgattttgctcggcatagacgggctgctgctggcttttttgtgtatcgtgctgtttatgtggggcatacgcatttgcgcttatgcggaacgtgaaacgggtgtcagcgaccatggtgggattgtttgggacgagattgtcgccatgctgtttgtgctggcgtttgtgccgttcaggtggacgtggtggctggcggcatttgtcctattccgtctgtttgacgcgctcaaaccgtctcccgtcggttggtttgacaagaatctgcacggcggtttgggcattatggcggacgatatggcggctgcggtgatgactttgattgtcttgaggattgcaatgctgttttaa

SEQ ID NO: 40755 - DNA, 735 bp, Neisseria meningitidis
atgagcgcaaacgtcagccgccttgttgttcaaaacctgcaaaaaagtttcaaaaaacgccaagtcgttaaaagcttctcccttgaaatcgaaagcggggaagtcgtcggcctgctcgggcccaacggtgcgggtaaaaccaccagcttctacatgattgttggactcattgccgccgatgcgggcagcgtgatgctggacgggcaggaattgcgtcacctgcccatacacgaacgcgcccgcctgggtgtcggctacctaccgcaggaagcctctattttccgtaaaatgaccgtcgaacaaaacatccgcgccattttagaaatcagtaccaaagacaaaagccgcatcgacggcgaagttgaaaaactgcttgccgacctgaatatcgagcgtttgcgcaataatcctgccccatctttgtcgggcggcgaacgccgacgcgtcgaaatcgcccgcgtacttgccatgaaaccgcattttattttgttggacgagccttttgccggcgtcgatcccatcgccgtcatcgacatccaaaaaatcatcggatttctcaagtcgcgcggtatcggcgtattaattaccgaccacaacgtacgcgaaaccctcagcatctgcgatcgggcctacattatttcagacggcacggtgttggcatcgggaaaacctgatgatttggtcggaaacgaacaggttcgttctgtttatctgggtaagaacttcaaatattga

SEQ ID NO: 40756 - DNA, 393 bp, Neisseria meningitidis
atggaattcctatctcttcacccttggtggtctttttttattatattaactattatccttagctatattggattctgtgcacatctccacattcaaaatagggcagttttcttttatagctatcgggatgtaactattattttcttgacacctgtcatcctcatcgctctaagttatttaattaaaaataaagaaatcctgtcagcttgtatcttatgtataactcttattgcattttcatgggcatggattataatctatcgacctaatactaaaaggttttttctttccttattgatagtatggggaaaattgttatttaagtactattgtttgggcaattctcgccatatcacttggcttagctgtaataacagggaacagcaagcgtaa

SEQ ID NO: 40757 - DNA, 1035 bp, Neisseria meningitidis
atgccgaattgtttcaaatttcataccgttatcgaacggcattggcaaaaaccttatccggttttgtcttttctgcttaagccgctctccgggctgtttgccaaaattgcggcaaaacggcggacggattttttatcgggaaaacggcaaagcgaaaagctgcccgtgcctgtggtcgtggtcggcaatattcacgcgggtgggacggggaaaacgccgattgttgccgcgctggtgtcgggtttgcaggaaaagggcgtcaaggtcggcatcattagccggggctacgggcgcaagagcaaggcggttcatgtattgaatgctgagagccgagcggaagatgcgggcgatgagcctttgctgctgttccgcaaaaccggtgcgccgacggcggtgggcagcagccgtgcagaggcaggcagggcgttgctggcggcgcatcccgacatcggactgattgtggcggacgacggtttgcagcattacgccctgcggcgagatgtggaaatcgcggtgtttccggcggcggatacggggcgcacggatttggatttactgcccaacggcagtttgcgcgaacctttgttgcggctggattcggtggatgcggtcgtcgtcagcggcggcaaggcggatgcgctgtttaggccgtctgaaaatatgtttcacagccgtatcgaagcgggacggatttaccgtttgaacaatccgtccgaaatactggacacaggccgtctgaaaaatcaaaccgtcgtcgccgtggcaggtattgccaagccggcgcggttttttgattcgttgcggaatatgggcattaccgtgaagcgaaccgtcgcgctgcccgaccacgccgacatttcggcggcagatttgcccgatgcggacgcggtcattattacggagaaagatgcggtcaaattttcagacggcatttgcaccgataatgtttgggtgttgcccgtttgtgcgataatcgaacctgatttggcggcgtttgtgttggagcggttggaagatgtaccgaaggccgtctga

SEQ ID NO: 40758 - DNA, 441 bp, Neisseria meningitidis
ccccgggaggttttgtgcatcctgataccgatcggttgctgttgctcaaaggacagaaggccgctgataaacgagattacctgtttgtcgctattgacgatttttatactctgccattttgccggacaaaaccgcagacagtgctgccaagtttctgaccgaacatctggccgacccctgcttgtacctgattgagtacgtttactctgacaatgataggtaatataaagagccgtccaacatgctttcggtgcagcttgttataataatgggattggttggaggcttgcccgatttgcttgtccgcagaccaacggtaaggcggagcgggttatccgtaccttgatggagatgtggcatgaggaacagtcgtttgacagtccggaacatcggcaaaaggagttgtgctgctttattaatttaggggctgccctagatcac

SEQ ID NO: 40759 - DNA, 1428 bp, Neisseria meningitidis
atgaacgagaactttaccgaatggctgcacggctgggtcggcgccatcaacgatccgatgtggtcgtacttggtttatatgcttttgggtacgggacttttcttcaccgtaaccacgggctttgtccaattccgcctgttcgggcgcagcatcaaagaaatgctcggcggccgcaaacagggggacgaccctcacggcatcacgccgtttcaggcatttgtaaccggccttgccagccgcgtgggcgtgggcaatatcgcgggcgtggccatcgccatcaaagtcggcgggccgggcgcggtgttttggatgtgggtaaccgccttaatcggtatgagttcggcgtttgtcgaatcttcgctggcgcagctctttaaagtccgcgactacgacaaccaccatttccggggcggccctgcctactacatcacgcaagggctggggcagaaatggctgggcgtgttgttcgccctgagtctgattttctgtttcggctttgtgtttgaagcggttcagaccaataccattgccgataccgtcaaagcggcgtggggttgggagcctcattatgtcggcgtcgccctggtgattttaaccgcgccgattatcttcggcggcatcaggcgcatatctaaggcggcggaaatcgtcgtccccctgatggcggttttgtacctctttatcgcgcttttcatcattttgaccaatattccgatgattccggacgtgttcggtcagattttttcgggcgcgttcaaattcgacgcggcagcaggcggcttactcggcggtctgatttcgcaaacgatgatgatgggcatcaaacgcggcctgtattccaacgaggcgggtatgggttccgcgccgaacgccgccgccgccgccgaagtgaaacaccctgtttcgcaaggtatgattcaaatgctgggcgtgtttgtcgataccatcatcgtttgttcttgcaccgccttcatcatcttgatttaccaacagccttatggcgatttgagcggtgcggcactgacgcaggcggcgattgtcagccaagtggggcaatggggcgcgggcttcctcgccgtcatcctgtttatgtttgccttttccaccgttatcggcaactatgcctatgccgagtccaacgtccaattcatcaaaagccattggctgattaccgccgttttccgtatgctggttttggcgtgggtttatttcggcgcggttgccaatgtgcctttggtctgggatatggcggatatggcgatgggcattatggcgtggatcaaccttgtcgccatcctgctgctctcgccactggcgtttatgctgctgcgcgattacaccgccaagctgaaaatgggcaaagaccccgagttcaaactttccgaacatccgggcctgaaacgccgtatcaaatccgacgtttggtaa

SEQ ID NO: 40760 - DNA, 822 bp, Neisseria meningitidis
atggctgttttaattaccggtgcttcggcaggattcggcgaagcgatgtgccgtgcgtttgtcggggcgggataccgcgttatcggtgcggcgcgccgtgcggacaggcttcaggccttggcggatgaattgggtgctttgttttaccctttggaaatggacgtgtcgcgacgcgagtcggtggaaaacgccttaaacggcatccccgatgaattttccgacatcgactgcctcatcaacaatgccgggctggctttgggtctggacacggcggacaaggcggattttgaagattgggaaacgatgattcaaaccaatgttttgggtttgacgttcctgacgcgcaaaattttgccgcaaatggtggaacgcggcggcggttatgtgatgaatttgggttcgattgcaggcaattatgcttatgccggcagcaacgtttacggggcgaccaaggcgtttgtgcgccagttcagcctgaatttgcgcgcggagttggcggataagaacatccgcgttaccaatatcgagccgggtttgtgcggcaatacggagttttccaacgtgcgcttcaaaggcgatgacgagaaggcagcaggcgtgtatgagggtgtggaatttatccgccccgaagatattgcggaaaccgcattgtggctgtaccgccggccggcgcatatgaatgtgaacacgattgaaattatgcccgtggcgcagacttttgcaggaatgaaggtgataaaaaaagccgtgccggaagtgcgggaagactttgaaaaacagagtatgtcgctgttttcccgcatcaggtcttggttcaaatga

SEQ ID NO: 40761 - DNA, 894 bp, Neisseria meningitidis
atggtaacgttttcaaaaatcagaccgcttttggcaatcgccgccgccgcgttgcttgccgcctgcggcacggcgggaaataatgctgcccgcaagccggtgcaaaccgccaaacccgccgcagtggtcggtttggcactcggtggcggcgcatctaaaggatttgcccatgtaggtattattaaggttttgaaagaaaacggtattcctgtgaaggtggttaccggcacatcggcaggttcgattgtcggcagcctttttgcatcgggtatgtcgcccgaccgtctcgaattggaagccgaaattttaggcaaaaccgatttagtcgatttaaccttgtccaccagtggttttatcaaaggcgaaaagctgcaaaattacatcaaccgaaaagtcggcggcaggcggattcagcagtttcccatcaaatttgccgctgttgctactgattttgaaaccggcaaggccgtcgctttcaatcaagggaatgccgggcaggctgtgcgcgcttccgccgccattcccaatgtgttccaacccgttatcatcggcaggcatacatatgttgacggcggtctgtcgcagcccgtgcccgtcagtgccgcccggcggcagggggcgaatttcgtgattgccgtcgatatttccgcccgtccgggcaaaaacatcagccaaggcttcttctcttatctcgatcagacgctgaacgtaatgagcgtttccgcactgcaaaacgagttggggcaggcggatgtggttatcaaaccgcaggttttggatttgggtgcagtcggaggattcgatcagaaaaaacgcgccatccggttgggcgaggaggctgcacgtgccgcattgcctgaaatcaaacgcaaactggcggcataccgttattga

SEQ ID NO: 40762 - DNA, 483 bp, Neisseria meningitidis
atgacgaacatccgtatcggacagggctacgatgtccaccaactgaccgaaggcagaaagctgatacttggcggagttgaaatcccatttgaaaaagggctgctcggacactccgatgccgatgcgctgttgcacgccgttaccgacgcgctgctcggcgcagcaggtttaggcgacatcggcagccatttccccgataccgcctcagagtttaaagatgcggacagccgcgccctgctgcgcgatgcctatcggagcgttcaagctaaggggtggcatgtcgtcaatgtcgatacgaccgtgattgcacagaaacccaaactcgcgccgcacattccgcaaatgcgtgccaacatcgccgccgatttgggcatagacatttcgtgcgtcaacatcaaaggtaaaaccaacgaaaaactcggctatctcggacggatggaaggcatagaggcgcaggcggcggtattgctggtacggatttga

SEQ ID NO: 40763 - DNA, 1557 bp, Neisseria meningitidis
atggatttcagttggttggcagaaccgcatacctggataggttttgccacgcttttggtgttggaagtcgtattggggatagacaaccttgtctttgtggcgattttggcaaacaaggtccagcccgcacggcgcgaccgcgcacggattatcgggctggggctggcagtcgtcatccgcatcattatgcttgcttttatggcgcacatcatcacgctgaccgagccgctgttccaaatcggcggcctcgccgtttccggcaaggacatgattatgctcgcgggcggtattttcctgctttacaaagccaccaccgaactgcacgaacgcctcgaagggcacaaccggtttaccgttgccgacagccagaaaaaacacgcgccgttttggggcgtggtcgcgcaaatcctgatactggatgctgtgttttccatcgattcggtcatcaccgccgtagcgatggtcgatcacatcgttgtggcgatgggcgcggtcgtcgtcgcgatggcggtgatgatttccgccagcaaactcttgaccgaatttgtagacaggcatcccaccgtcgtgatgctctgccttggttttttgttgatgatcggtttcagcctgattgccgaagccttccatttccacattcccaaaggctacctctacgccgccatcggcttctcgattttaatcgaactgtttaaccagatttcccagcgcaacagccgcaaaaacgactacatcggcagctcgtggcgcaagcgcaccgccgaaaacgtcttgggtatgatgggtatacgcgaaagcgtgcttgccgacgcgggcggcgaatccgtggatgacgcgcattttgaagaaaacgaaaaatcgatgatacgcagcgtgctgacgcttgccgaacgcccgattatgggggtaatgatcccacgccgcgacatcgaacggctggacatttcccaaagccgcgaagaacagtgtgcccaactgcaaaacacgccttacagccgcctgctcgttgtcggtaaggcgggcgtggacgaacctttgggctacatcaacaaaaaagacctgctgtcccaactgctggaaacaggcggtctcgacattcagacggcattgcgccagccgctcgttttgcccgacagcaccaccgcgctgggcgcaatcgaactcttccgccaaagcagcgcggattatgctttggtggtggacgagttcggcgcggtattgggcatggtaaccatgaaagacctgctcgaaaccatcgcaggcgagttccccgaagaatttgagcgcgaagaagaaccagccgttcaggggaatcccgatgaaagcctgacggtggaaggcgcgttggaatatgtggaactcgcaccgcaactcaacctgccgcagcaggaggaagatgccgatttccatacggttgccgggctgattatggaagaattgcaaaccatccccgatgtcggtgattttgccgatttccacggctggcggtttgaagtggtcgaaaaagaagggcagcgcatcgagcgggtcaaaatcaccaaattgcccgaagaataa

SEQ ID NO: 40764 - DNA, 1467 bp, Neisseria meningitidis
atggctgaagcgacagacgttgtcttggtgggcggcggcattatgagcgcgactttgggcgttttgctcaaagaactcgaaccgtcttgggaaatcaccctgattgaacgcttggaagatgtggcgttggaatcgtcaaacgcgtggaacaacgccggcacggggcattccgcactgtgcgaattgaactatgcgccgctgggtgcggacggcatcatcaatccggcacgcgccctcaatattgccgaacagttccacatcagccgccagttttgggcgacgctggtcgcggaaggcaagttggaagacaattctttcgtcaatgccgtgccgcatatgtctttggtgatgaacgaagaccactgccgttacctgcaaaaacgctatgatgtgtttaaaacgcagaaactttttgaaaatatggaattctccaccgatcggaacaagatttccgattgggctccgctgataatgcgcggccgggacgaaaaccaacccgtcgccgccaactattccgccgaaggcacggatgtcgatttcggacagctgacgcgccagatggtgaaatatttgcagggcaagggcgtaaaaaccgagttcaaccgccacgtcgaagacatcaaacgcgaatccgacggcgcgtgggtgctcaaaaccgccgatacccgcaaccccgacgggcagctcaccctccgtacccgcttcctcttcctcggcgcgggcggcggcgcgctgaccctgctgcaaaaatccggcatccccgaaggcaagggctacggcggcttccccgtgtccggcctgttcttccgcaacagcaaccccgaaactgccgaacaacacaacgccaaagtgtacgggcaggcttccgtcggcgcgccgccgatgtccgtcccgcacctcgacacacgcaacgtggacggcaaacgccaccttatgttcggcccttacgcaggcttccgttccaacttcctcaagcaaggctcgcttatggatttgccgctgtccatccatatggacaacctctatcctatgctgcgcgccggctgggcgaatatgccgctgaccaaatacctgctgggcgaattgcgtaaaaccaaagaagaacgcttcgcctccctgctggaatactaccccgaggcaaaccccgacgactgggaactcatcaccgcagggcaacgcgtccaaatcattaaaaaagactccgaaaaaggcggcgtgctccagtttggtacggagattgtcgcccacgccgacggctcgctcgccgcattgctgggcgcgtcgccgggcgcatcgaccgctgtgccgctgatgatccggctgatgcaccaatgcttccccaagcgcgccccgtcgtgggaaggccgtctgaaagagctggtaccgggttacggcatcaagttgaacgaaaaccctgaaagggcggatgaaattatcgcctataccgcgaaagtattggatatttaa

SEQ ID NO: 40765 - DNA, 648 bp, Neisseria meningitidis
atgaaaggcgtttacttcgtcagcggcatagacacggacatcggcaaaaccgtcgccaccggcgtgttggcaaaacaattgttgcagcagggcaaaagcgtgattacgcaaaagcccgtgcaaaccggttgccaaaacattgccgacgacatcgccgtccatcgtaaaatcatgggtaaacccatgcaggaagccgacaaacaagggctgaccatgcctgaaatcttcagttatccagcttcgccccatctcgccgcccgtctggacggcagggctttggacttggacaaaatccgcaccgccacacaagaattggcggcgcaatatgaaatcgtcttggtcgaaggcgcgggcggattgatggttccgctgacggaaaaactgttaaccattgattatattcggcaacaaggctatcccgtcattctcgtaacgagcggacggctcggcagtatcaaccacactttactcagtttcgccgcgctcaaacaatacggcatccgcctgcacagcctgattttcaaccatattcacgacagttccgacgaatgtgtcgcgcaagacagcctgaactatctgcaatgccgtctgaaagacagtttccccgaggcggaatggttggagttggataaaacagacgcggtataa

SEQ ID NO: 40766 - DNA, 513 bp, Neisseria meningitidis
atgttaccgaatacaccgcgccgcgccgtttatgccggcagtttcgatccgcccacattggggcatctgtggatgatacggcaggcgcaatctatgtttgacgaactcatcgtcgccatcggcattaaccccgacaaacgcagcacctataccgtcgctgaaaggcaggatatgttgtgcgatattactaaaatgtttcccaacgtcagaaccgatgtatttgaaaaccgatttctggtgcattacgcccgtgaggtagatgcaggattcatcgtgcgcggcatccgttctgcttcggattacgaatacgaacgttccatgcgccatatcaacagcgacctcgcccccgaaatatccaccgtattcctcatgccgccgcgcgaaatcgccgaagtgtcgtccactatggtcaaaggactggtcgggccggaaggctggacggaaacgatccaccgctacgtgccgcaagctgtgtacgaaaaaatccttgccgaacatcaacacgaaaattga

SEQ ID NO: 40767 - DNA, 483 bp, Neisseria meningitidis; identical to SEQ ID NO: 36693

SEQ ID NO: 40768 - DNA, 1557 bp, Neisseria meningitidis
atgacactagcagagttttggccgctgtgcctccgccgtcttcacgatatgttgcctcaagggcagtttgcgcaatggattgcgccccttaccgtcggtgaggaggggggcgtatgggtggtgtacggcaagaaccagtttgcctgcaatatgctcaagagccagtttgccggaaaaatagaagcggtgagggaagagttggctgccggccgttccgccttcgtattcaaaccgggagaaggcgtgcgttatgagatggcggcggttgaaggtgctgtcgaacctgccgagccgtccttgcacgcggtgtcggagggaatgcccgtgcaggaggttctgttggacgagctgccgtctgaagagcctgtcaaacctgctgcgtcgaaaacggcggcggatattttggcggaacgtatgaaaaacctcccgcatgagccgcgccatactgccgggtctgcttcccgtccggaatcggaggtacttgcgaaagcgcggacggatgcgcagcgtgatgcggaagaggcgcgttacgaacaaaccaacctgtctccggattacacatttgatacgttggtagaaggcaagggcaaccgccttgcggcagctgccgcgcaggcgattgcggaaagtccgggacagagttataacccgttcttcctctatggcagtacgggtttgggtaaaacccaccttgtgcaggcggtcggcaacgaactgttgaaaaaccgtcccgatgccaaagtgcgctatatgcattcggacgactatatccgcagctttatgaaggcggttcgcaacaatacctacgacgtgttcaagcagcaatacaagcaatacgacctgctgattatcgacgacatccagttcatcaaaggcaaagaccgtacgatggaggaattcttctatctgtacaatcatttccataacgagaaaaaacagctcatcctcacttgcgatgttttacccgccaaaatcgaaggtatggacgaccgcctcaaatcccgtttttcatggggactgactttggaactcgagccgcccgaattggaaatgcgtatcgccattttgcagaaaaaggcggaagcggcgggcatcagtattgaagacgaagccgcgctgttcattgccaatctgatccgttccaacgtgcgtgagcttgaaggcgcgttcaaccgcgtcggagcgagcagccgctttatgaaccgtcccgtcatcgacatcgatttggcgcgtactgctttgcaggacattattgccgagaagcacaaagtcatcaccgccgatattattattgatgccgttgcgaaatattaccgcatcaaaatcagcgatgtgctcggtaagaaacggacacgaaacattgcccgtccgcgccaggtggcgatgagcctgaccaaagaactgaccactttgagcctgccgtctatcggcgattcgttcggcggacgcgaccatacgaccgttatgcacggcatcagggcagtggcgaaactgcgcgaagaagatccggaattggctcaggattatgaaaagctgctgattctgattcaaaactga

SEQ ID NO: 40769 - DNA, 630 bp, Neisseria meningitidis
atggcagcccatctcgaagaacaacaagagttagacaactttaaatatttttggaaaaccacgggcaaatggctgtttgccctgctgattttggcagcactcggctacttgggatacacggtttaccaaaaccgtgcggcttcccaaaatcaggaagcggcggcggtgctggcaaacatcgtggaaaaggcgcaaaacaaagccccgcaaagcgaaattaatgccgaattgaccaaactccaacaaagctacccgcattctatttccgccgcccaagccacgctgatggcggcggcaaccgaatttgacgcgcagcgttacgatgttgccgaaggccatttgaaatgggtgttgtccaaccaaaaagacagcctgattcaagcgttggcggcgcagcgtctgggcgttgtgttgttgcaacaaaaaaaatacgatgccgcgcttgccgcgctcgacacgccggttgaagcggacttctcccccctgctgatggaaaccaaaggcgatgtctatgccgcacagggaaaaagccaggaagccttaaaaaactacggtcaggctttagaaaaaatgcctcaagattctgtcggtcgtgaattggttcaaatgaaactcgattcgctgaaataa

SEQ ID NO: 40770 - DNA, 948 bp, Neisseria meningitidis
atgcagttgcatgatttttctctcattgccgtaaatactgtaaatgtaccccaaatgccgcatccgtgccaaaccgttcacactttaaccgcccgtgtcccgaaatgccgtctgaagttgaacgccgcccgacggcagcgttacaatcgcccacaactgttttttccgaacatcatcatgaccacgaccgaacacgacaacgacgatgcattcctgctgcggtacagccgccacatcctcttggacgaaattggcatcgaagggcagcagaaactttccgccgcgcatattttggtcgtcggctgcggcggtttgggtgccgccgccctgccctatctcgccgcttccggcatcggcacgctgaccatagccgattccgacacggtcgagctgcacaacctgcaacgccaagtcgcatttgacgagggcgatgtcggcaagcccaaagccgaagccttggcagaccgcctgaaacgcatcaaccataacgtcgatgtccgcaccgtcaacgaaaaactcgacggctgccgcctgaccggtttggttcaaaccgccgacatcgttttagactgctgcgacaactacgccacgcgccaagccgtcaaccgtgtctgcgtacaaacgaaaacaccgctggtttcaggagcagcggtgcgctttgaagggcaacttgccgtgtaccgtcccgacttgcccgactcgccgtgttacgcctgcctgtttgacggcggatcggcttcagacggcatctgttccctcttcggcgtattctcgccgctggtcggcatcatcggctgcacgcaggcggcggaagctctgaaaatcctgctagacgtgggcgaaccgtcgcacggcaggctggcggtttaccgtgccttggaagggggctggcaatatttcgacctgccgcgcaaccccgaatgcccgatttgcggcacggaacggtaa

SEQ ID NO: 40771 - DNA, 2394 bp, Neisseria meningitidis
atgaaactgaaacagattgcttccgcactgatggtcttgggcatatcgcctttggcacttgccgacttcaccatccaagacatccgcgtcgaaggcttgcagcgtaccgagccgagtaccgtattcaactacctgcccgtcaaagtcggcgacacctacaacgacacacacggcagtgccatcatcaaaagcctgtacgccaccggtttctttgacgacgtacgcgtcgaaactgcggacgggcagctcctgctgaccgttatcgaacgccccaccatcggctcgctcaacatcaccggcgcaaaaatgctgcaaaacgacgccattaagaaaaatctcgaatcgttcgggctggcgcagtcgcaatactttaatcaggcgacactcaatcaggcagtcgccggcctgaaagaagaatacctcgggcgcggcaaactcaatatccaaatcacgcccaaagtaaccaaactcgcccgcaaccgcgtcgacatcgacatcacgattgacgagggcaaatccgccaaaatcaccgacatcgaatttgaaggcaaccaagtctattccgaccgcaaactgatgcggcagatgtcgctgaccgaaggcggcatttggacatggctgacacgaagcaaccaattcaacgagcagaaatttgcccaagacatggaaaaagtaaccgacttctaccaaaacaacggctacttcgatttccgcatcctcgataccgacatccaaaccaacgaagacaaaaccaagcagaccatcaaaatcaccgtccacgaaggcgaacgtttccgttggggcaaagtctccatcgaaggcgacaccaacgaagtccccaaagccgaactggaaaaactgctgaccatgaagcccggcaaatggtacgaacgccagcagatgaccgccgttttgggtgagattcagaaccgcatgggctcggcaggctacgcatacagcgaaatcagcgtacagccgctgccaaacgccgaaaccaaaaccgtcgatttcgtcctgcacatcgaaccgggccggaaaatctacgtcaacgaaatccacatcaccggcaacaacaaaacccgcgacgaagtcgtgcgccgcgaattgcgccaaatggaatccgcgccttacgacacctccaagctgcaacgctccaaagagcgcgtcgagcttttgggctacttcgacaatgtccagtttgacgccgtcccgcttgccggcacgcccgacaaagtcgatttgaacatgagcctgaccgaacgttccaccggttccctggatttgagcgcgggttgggtacaggataccggcctggtcatgtccgcaggcgtttcccaagacaacctgttcggtacgggcaagtcggccgccctgcgcgcctcacgaagcaaaaccacgctcaacggctcgctgtcgtttaccgacccgtacttcacggcagacggggtcagcctgggctacgatgtttacggaaaagccttcgacccgcgcaaagcatcgaccagcatcaaacaatataaaaccaccacggcaggcgcaggcatccgcatgagcgtgcctgttaccgaatacgaccgcgtgaatttcggtttggtggcagaacacctgaccgtcaacacctacaacaaagcgcccaaacactatgccgactttatcaaacaatacggcaaaaccgacggcacagacggcagcttcaaaggctggctgtacaaaggtaccgtcggctgggggcgcaacaaaaccgacagcgcgttatggccgacgcgcggctacctgacgggcgtgaacgccgaaatcgccctgcccggcagcaaactgcaatactactccgccacccacaaccaaacctggttcttccccctgagcaaaaccttcacactgatgcttggcggcgaaatcggctatgccaacggctacggcaaaaccaaagaaatccccttctttgaaaacttctacggcggcggcctgggttcggtacgaggttacgaaagcggcacactcggtccgaaagtctatgacgaatacggcgaaaaaatcagctacggcggcaacaaaaaagccaacgtctccgccgagctgctcttcccgatgcccggcgcgaaagacgcgcgcaccgtccgcctgagcctgtttgccgacgcaggcagcgtgtgggacggcaaaacctacgacgacaacagcagttccgcgaccggcggcagggttcaaaacatttacggcgccggcaatacccataaatccacctttaccaacgaattgcgctattccgccggcggcgcggttacctggctctcgcctttaggcccgatgaaattcagctacgcctacccgctgaagaaaaaaccggaagacgaaatccaacgcttccaattccaactcggcacgacgttctaa

SEQ ID NO: 40772 - DNA, 957 bp, Neisseria meningitidis
atgaccgcctgtttcaccacatacccgaacataacaatgagaatcaggctggggcggcacaacgcgcccgactttccgcacggggccgccgtaaccataggcaattttgacggcgtacacctcggacacaaacacatcctccaaaaactccgcctcgaagccgatacgcgcggattacccgtcgtgaccgtcgttttcgaaccccaacccaaagaatttttcgcactccgcaccggcaggatgccaccgtgtcggatcagccccctgcgcaccaagctcgaattattggaaggcacaggctgtgtcgatgccgtctgggttttgcgtttcgatcaaaatttttccgaaatatccgcgcaagggtttatcgaccgcctgctgcgtcaaaccttgaatacgcgttatttgctcgtcggcgacgatttccgtttcggtgcggggcgggaaggctgttttgaacttttggcacaacagcccgatatgcagaccgagcgtacgccttccgtcatcgtcgaagacatccgcaccagcagtaccgccgtgcgacaagccctttcagacggcaaccttgcctatgcgaaaaaacttttgggacacgactacgtcttgagcggcagggtggtgcacggcagaaaactcggacgcaccttaaacgccccgactgccaacatccgcctgccccgccaccgttatgcactcggcggcgtgttcgtcgtcgaagcggacggcgcgttcggcacgcggcgcggcgtggcgagcttcggcttcaatcccaccgttgatagcgactgttttcaaaagctggaagtccacctgttcgactttcaaggcgatttgtacggacaacggttgaacgtccgcttcctgcacaaactgcgcgatgaggaaaagtttgacggtatggaagaactgaaaaggcagattgaagccgatatggaagccgcaaagtgttggtag

SEQ ID NO: 40773 - DNA, 420 bp, Neisseria meningitidis; identical to SEQ ID NO: 36338

SEQ ID NO: 40774 - DNA, 1221 bp, Neisseria meningitidis
atggctgtcaacctgactgaaaaaaccgccgaacaactgcccgacatcgacggcattgccctctacaccgcccaagcaggcgtgaagaagcccgggcataccgacctgacactgattgccgtagccgccggcagcaccgtcggtgcagtcttcacgaccaaccgtttctgtgccgcgcccgtccacatcgccaaatcgcaccttttcgacgaagacggcgtgcgcgccctcatcatcaacacgggcaacgccaacgcgggtacgggcgcacagggcagaatcgatgctttggcagtgtgtgccgccgccgcccggcaaatcggctgcaaaccgaaccaagtgctgcccttctccaccggcgtgattctcgaaccgctgcccgcagacaaaatcatcgccgcgctgcccaaaatgcagcctgccttctggaacgaagcggcacgcgccatcatgaccaccgacaccgtgcccaaagccgcctcgcgcgaaggcaaggtcggcgacaaacacaccgtccgcgccacgggcatcgccaaaggctcgggcatgattcatcccaatatggcgaccatgctcagtttcatcgccaccgatgccaaagtttcccaacccgtcctccaactgatgacgcaggaaatcgccgacgaaaccttcaacaccatcaccgttgacggcgacaccagcaccaacgacagcttcgtcatcatcgccaccggcaaaaacagccaaagcgaaatcgacaacatcgccgacccgcgttacgcccaactcaaagaattgttgtgcagcctcgcgctcgaactcgcccaagccatcgtccgcgacggcgaaggtgcgaccaagttcatcaccgtccgcgtcgaaaacgccaaaacccgcgacgaagcccgccaagccgcctacgccgtggcacgttcgccgctggtcaaaaccgcctttttcgcctccgaccccaacctcggcagactgctcgccgccatcggttatgccggcgttgccgacctcgataccgacctcgtggaaatgtatctcgacgatattttggttgccgaacacggcggacgcgccgcaagctacaccgaagcacaagggcaggcggtgatgtcgaaggacgaaatcaccgtccgcatcaagctgcatcgcggacaagccgccgccaccgtctatacctgcgacctgtcgcacggatacgtttccatcaacgccgattaccgttcctga

SEQ ID NO: 40775 - DNA, 1122 bp, Neisseria meningitidis
atgagtaatcaagatttttatgcgacgctgggtgtggcaagaacagctaccgatgatgagattaaaaaagcctaccggaaattggcgatgaaataccatcccgaccgcaatcctgacaataaagaggcggaagagaagtttaaagaagtacaaaaggcgtatgaaactttgtccgacaaggaaaagcgcactatgtacgaccagtatggtcatgcggcgtttgaaggcggcggacaggggggcttcggagggtttggcggatttggcggtgcgcagggttttgactttggggatattttcagccaaatgtttggaggcggttcggggcgcgcccagcctgattatcagggtgaggacgttcaagtcggtatcgaaatcacgcttgaagaagccgcaaaaggtgtgaagaaacgcatcaatattccgacttatgaagcgtgtgatgtctgtaacggcagtggcgcgaaaccggggacatccccggaaacctgcccgacttgcaaaggttcgggtacggtacacatccagcaggcgattttccgtatgcagcaaacttgtccgacctgccacggtgcgggcaaacacattaaagaaccttgcgtcaaatgccgtggcgcggggcggaataaggcggtcaagacggtggaagtcaatattcccgccggtatcgatgacgggcagcgtatccgtttgagcggcgaaggcgggccgggtatgcacggtgcgcctgccggcgacttgtatgtaaccgtccgcattcgggcgcataagattttccaacgcgacggtctggacttgcattgcgaactgccgatcagttttgccacggctgctttgggcggggagttggaagtgccgaccttggacggaaaggtcaagctcaccgtccccaaagaaacccaaaccggcaggaggatgcgcgtgaagggtaagggtgtcaaatctttacgcagcagcgcgaccggcgatttgtactgccatattgttgtcgaaacgcctgtcaatttgaccgaccgtcaaaaagagcttttggaagaatttgagcggatttctaccggcttggaaaaccaaacaccgcgcaagaaatcgtttttagacaagctgcgcgatttgtttgattga

SEQ ID NO: 40776 - DNA, 312 bp, Neisseria meningitidis
atgcttgccatactgttgtctgcaatattgggactggtatcgacaactgccgctgccggtacgtcagaacccgcccaccgccataccaaacatatccgcaaggcaaacaagcagatgctgcaccccgaatgcaggaaatatttggaacgccgtgccgcgtggtaccgatcgcaaggcaacgtgcaggaattgcgcgaaaacaaaaaggcgcgcaaagcattccgctccctgccttatgcggaacagaaaatccaatgccgggcggcttatgaggctttcgatgatttcgacggcggcagtttccgccgttaa

SEQ ID NO: 40777 - DNA, 1056 bp, Neisseria meningitidis
atgactattttatcggacgttaaagcattaggacaacaaatctggctggacaacctttcccgctcgctcgtgcaaagcggcgaattggcgcaaatgctgaaacaaggcgtgtgcggcgtaacttccaatcccgccatcttccaaaaagccttcgccggcgacgcgctttacgccgatgaaatcgccgccctcaagcagcaaaacctcagccccaaacaacgctacgaaaccatggcggttgccgatgtgcgtgccgcctgcggcgtttgccttgccgaacacgaatccaccggcggcaaaaccggtttcgtcagcctcgaagtttcgcccgaattgtccaaagacgcgcaaggcacggtagaagaagcgcgccgcctctacgccgccatcgggtgcaaaaacgcgatgattaaagtgcctgccaccgacgcaggcatcgatgcgctcgaaatcctcgtttcagacggcatcagcgtaaacctcacgctgctgttctcacgcgcccaaaccctcaaagcctacgccgcctacgcgcgcggcattgccaaacgcttggcagccggacaaagcgttgcccatatccacgtcgtcgccagcttcttcatctcccgtgtggacggcgcgctggacacaacgctgcccgaccacctcaaaggcaaaatcgccatcgcccttgccaaaaccgcctatcaagattgggaacaatatttcaccgcccccaaatttgccgcactggaagcccaaggcgcaaaccgcgtgcagcttttatgggcatctaccggcgtgaaaaacccagcctatcccgacacgctctacgttgacagcctgatcggcgcgcacaccgtcaacaccgttcccgatgccacgctcaaagcctttatcgaccacggcacagccaaagccacgctgaccgaaggcgtggacgaagcacgggcgcggctcgctgaaattgccgcgctcggcatcgatgtcgaaaccttggcggcgcgtttgcaggaagacggtttgaaacagtttgaagaagcgtttgaaaaactgctcgcaccgttggtttaa

SEQ ID NO: 40778 - DNA, 1458 bp, Neisseria meningitidis
atgtcccgacatcccgcccccaccggagaaaaaacattcttcggccaccccttccagctttccaccctcttccatatcgaattgtgggaacgtttttcattttacggaatgcagggcatcctgctgatttacctctactacaccgccgacaaaggcggcttgggcatagacaaaaccctcgccggcggcattgtcggcgcatacagcggcagcgtgtacctgtccaccattttgggggcgtggtttgccgaccgagtatggggtgcggaaaaaaccctcttcctctcgggcatcgtcgtgatgctcggacacatcgtccttgccgccgccccgggcctgtacggtcttttaatcgggctgatattcatcgcattgggcagcggcggtgtgaaatctacggccagttctatggtgggcgcattatacgaacaggacgaaatgcgcccgctgcgcgatgcgggattttccattttctacatcgccatcaacatcggcggcttcctgggcccgctgctgaccggcctgctgcaggaaaacatcggtttccattatggtttcggcgcggcggcggtcggtatggcattcggcttgtggcgttattccttgggacgtaaaaacctgccccaccccaccgtcccccatccgctttcaaaaggacagggcaaaactgcggccgccgtcggcatcaccctcatcgccgcacttgcaaccgccatcaaaaccgggcttgtcaacctcgacaatttctccggcatcctcttatctaccgtcatccttgccgtcattgcctatttcgcccgcctgctgaccaacccccgcgtcagttccgacaacaaacggcacatcatcgcctacatcccgcttttcctgaccatctgtatgttttgggccgtctggtttcagatttacaccgtggcaaccgtctatttcgacgaaaccgtcaaccgcaccatcggttcgtttaccgtgcccgtcgcctggaaagattctatgcaaagcctgtgggtcatcctgttttccggactgatggcggcaatgtggacaaaaatggggcgcaaacagcccaaaaccccgctgaaattcgctatggcggtatttgttaccggcgcgtcgtttttgggattcgtcccctttatttccgccggcacgccgatgcctattgcggttttcgcactgattgtccttgccatcacgataggcgaactgatgatttccccgattgcgctgtccatctccaccaaaatcgcaccgcctttattcaaaacccaaatggtcgcccttaatttccttgccttttcattaggcttcactttgggcggcgtattgtttgaaaaaggctatcaggcgggcgacgaaatcggcttctatcggctgctgttctacatcggcgcagccacaggcttcctgctgctcctgctcgtccccaaattgaacaaaatgctcgaaggcacagactaa

SEQ ID NO: 40779 - DNA, 1839 bp, Neisseria meningitidis
atgtgcggtatcgtcggcgccatccgcgcccatcacaacgtcgtcgattttctgaccgacggcctcaaacgcctcgaataccgggggtatgactcatcaggcattgccgtcaacaccgacggcaaaatcaaacgcgtgcgccgcgtcggacgcgtgcagcttatggaggacgcggcacgcgaaaaaggcatcagcggcggcatcggcatcggacatacgcgttgggcgacacacggcggcgttactgagccgaacgcccacccgcacatcagcggcggtatgattgcggtcgtacacaacggcatcatcgaaaactttgaaagcgaacgcaaacgtttggaaggtttgggataccgttttgaatcgcaaacggataccgaagtcatcgcacacagcatcaatcacgaatacgcgcaaaacggcggcaggctgtttgaagcggtacaagaagcggtcaaacgtttccacggcgcatacgccatcgcggttattgcccaagacaagcctgatgaattagttgtggcgcgtatgggctgcccgcttttggtcgctttgggcgacgatgaaacctttatcgcttcggacgtatccgccgtcatcgcctttacgcgccgcgtggcgtacctcgaagacggcgacatcgcgctgctggcttcagacggcatcaaaaggctgaccgataaaaacggcctgcctgccgaacgcaaagtcaaggtatccgaactctcgctcgcctctttggaactgggaccgtacagccactttatgcaaaaggaaatccatgagcagccgcgcgcgattgcagacacggcggaggttttcctcgacggcggcttcattcccgaaaacttcggcaaagacgccaaaagcgtgtttgaaagcatccgcagcgtcaaaatccttgcctgcggcacgtcctattacgccgcgctgaccgcaaaatactggctcgaatccatcgccaaaattccgaccgacgtcgaaatcgccagcgaataccgataccgcagcgtgattgccgatccggaccaactggtcattaccatttcccaatccggcgaaacgctggacacgatggaggcgttgaaatacgccaaatctttgggacaccgccacagcctctccatctgcaacgtgatggaatccgccctgccgcgcgaaagcagcctcgtgctttatacccgtgccggtgcggaaatcggcgtcgcctcgaccaaggcgtttaccacgcagctggtcgcgctgttcggtttggcggtaacgctggcgaaagtgcgcggtttggtatccggcgaagatgaagcacgttacaccgaagaactccgccagcttcccggcagcgtgcagcacgctttaaacctcgaacctcaaattgccgcctgggcgcaacagtttgccaagaaaaccagcgcgctgtttttagggcgcggcatccattacccgattgccctcgaaggcgcgttaaagctgaaggaaatcacctacatccacgccgaagcctatcctgccggcgaactgaagcacgggccgcttgccttggtggacgaaaacatgcccgtcgtcgtcatcgcgcccaacgacagcctgttggacaaagtcaaagccaatatgcaggaagtcggcgcacgcggcggcgaacttttcgtctttgccgacctcgacagcaattttaatgcaaccgaaggcgtgcacgttatccgtgcgccgcgccatgtcggcgaactgtcccccgtcgtgcataccatccccgtgcagctcctttcctaccacaccgccctcgcgcgcggcacggatgtagacaagccgcgcaatctggcgaaatccgtaaccgtcgaataa

SEQ ID NO: 40780 - DNA, 642 bp, Neisseria meningitidis
atgtccccgatccgtggtatacgggcgattttgaagaaaccttcaggcttgcggatgcgggctgtcgggcattgttggaaaagatttccaaataaagcaattgaatacaaatataaaaccgcctcctgccgtatcggttgttcagacggcataaacagagaatttatgaaaacaaatttcaaacagaaaattatcgaacaggcacgcagcgaaggcttgcaggtaaccgctttgcgcgagcaggtattagatattgtcttgcagcaaagcggcgtgattaaagcctacaacgtcttgtcgcagatgcagcagcaaagcgagggcgtgcttgcgccgccgaccgcctaccgcgcccttgatttttgggcggagcagggcgttttgcacaaagtggcggcggtcaacggctatattttgtgcagccacgcgcagcacgagtgcgacgaccattgccacgaccacgaagaagccgaagcgcaccacagcgcgtttattttggtctgcaccgaatgcggcacggcggacgagcaaaccctcagccacgagtgggcggcactgcgcgcaggcgttgccgaaagcggctttgcgctgaaagaagaacacgttgttttaaccgggatttgtaaaaaatgtcagaaatga

SEQ ID NO: 40781 - DNA, 1386 bp, Neisseria meningitidis
atggacggctggacacagacgctgtccgcgcaaaccctgttgggcatttcggcggcggcaatcatcctcattctgattttaatcgtcaaattccgcatccacgcgctgctgacactggtcatcgtcagcctgctgacggctttggcaaccggtttgcccacaggcagcattgtcaacgacgtactggtcaaaaacttcggcggcacgctcggcggcgtggcgcttctggtcggcctgggcgcgatgctcggacgtttggtcgaaacatccggcggcgcacagtcgctggcggacgcgctgatccggatgttcggcgaaaaacgcgcaccgttcgcgctgggcgttgcctcgctgattttcggcttcccgattttcttcgatgccggactaatcgtcatgctgcccatcgtgttcgccaccgcacggcgcatgaaacaggacgtactgcccttcgcgcttgcctccatcggcgcattttccgtcatgcacgtcttcctgccgccccatccgggcccgattgccgcttccgaattttacggcgcgaacatcggccaagttttgattttgggtctgccgaccgccttcatcacatggtatttcagcggctatatgctcggcaaagtgttggggcgcaccatccatgttcccgttcccgaactgctcagcggcggcacgcaagacaacgacctgccgaaagaacctgccaaagcaggaacggtcgtcgccatcatgctgattcccatgctgctgattttcctgaataccggcgtatcggccctcatcagcgaaaaactcgtaagtgcggacgaaacctgggttcagacggcaaaaataatcggttcgacaccgatcgcccttctgatttccgtattggtcgcactgtttgtcttgggacgcaaacgcggcgaaagcggcagcgcgttggaaaaaaccgtggacggcgcactcgcccccgtctgttccgtgattctgattaccggcgcgggcggtatgttcggcggcgttttgcgcgcttccggcatcggcaaggcactcgccgacagcatggcggatttgggcattcccgtccttttgggctgtttccttgtcgccttggcactgcgtatcgcgcaaggttcggcaaccgtcgccctgaccaccgccgccgcgctgatggctcctgccgttgccgccgccggctttaccgactggcagctcgcctgtatcgtattggcaacggcggcaggttcggtcggttgcagccacttcaacgactccggcttctggctggtcggccgcctcttggacatggacgtaccgaccacgctgaaaacctggacggtcaaccaaaccctcatcgcactcatcggctttgccttgtccgcactgctgttcgccatcgtctga

SEQ ID NO: 40782 - DNA, 330 bp, Neisseria meningitidis
atgaaacaaaatatcgaaaaactcgaaagcagcgtttatacgctggtacaaaaattcgaaaccctcgtcagcgaaaaccgccgcctcaaagaaaccgtcgccgaactcaaacgggcgcacgagcggcaaaaactcgaacacgaaaccgccgtcgacgaactcagcgaagccctgctcgtccaagtcggcaaactcaaagaagacctgcaaaacaaaatcgacagcctgacagaagaaaatacacgataccgcagcctgctcgaacagagcagggaaaaaatcagcgcactggcagcgcgcctcccccaatggcaggaaacgcagcaataa

SEQ ID NO: 40783 - DNA, 441 bp, Neisseria meningitidis
gtgcgcgcctttcagacggcattgaggccgtcccgcatcctgaacatcctgactgtatcgcttcacgccgcctcccttgccgtctgcctgacttggttttacggctggatgatgtggttcggtttggcggctttggtggcaagttacgcatactcgctcaggataacgaatctgaaacaccgccatgccataaccgccattaccatagaccgcgacggacaggcggaaatcatatccggcaaagacaaaacagcggcaacacttgcgggcagcagtatggttacgccttatgccttattcttacaatgggacacaggcggcacaaccgtcagccaatgcatcatacccgacatgacggacaaagaatcctaccggcggctgaaagtctggatactttggcggcagccgaaaaaaaccgccgaaaccgatacaccaagctga

SEQ ID NO: 40784 - DNA, 669 bp, Neisseria meningitidis
ccgtattatgtgcaggcggatttagcctacgccgccgaacgcattacccacgattatccgcaagcaaccggtgcaaacaacacaagcacagtaagcgattatttcagaaacatccgtgcgcattccatccacccccgggtgtcggtcggctacgatttcggcggctggaggatagcggcagattatgccagttacagaaaatggaaagaaagtaattattctaaaaaagttactgaatttaaacacgaaaacggcaacaaaaaagaagacaaaacagaacatcagggaaacggcagcttccacgccgcttcttctctcggcttatccgccatttacgatttcaaactcaacgataaattcaaaccctatatcggcgcgcgcgtcgcctacggacacgttaaacatcaggttcattcagtggaaagcaaaaccacgactgttacctctaaaggtggaggccctatcccacaaggtccgacccccaaacctccctatcacgaaagcaacagcatcagcagcttgggtcttggtgtcatcgccggtgtcggtttcgacatcacgcccaagctgactttagacaccggataccgctaccacaactggggacgcttggaaaacacccgcttcaaaacccacgaagtctcattgggcgtgcgctaccacttctga

SEQ ID NO: 40785 - DNA, 723 bp, Neisseria meningitidis
atgaaacccgcctatttcatctccgacctgcatttgagcgaaaagcaccccgaactgaccgcgctgttgctgcgttttttacgttcttccgccgccgggcaggcgcgggcggtttacattttgggcgatttgtttgatttttgggtgggcgatgacgaagtttccgagttgaatacttcggttgcgcgtgaaatcaggaaattgtccgacaaaggcgttgccgtgttcttcgtcaggggcaaccgcgacttcctgattggtcaggatttttgccggcaggcaggcatgacgctgctgccggattactcggttttggacttgttcggctgcaaaaccctcatctgccacggcgacactctgtgtacggatgacagggcataccaacgtttccgcaaaatcgtgcatcggaagcggctgcaaaaactgttcctgatgctgcccctgaagtggcgcacgcgccttgccgccaaaatcaggcgcgtcagcaaaatggaaaaacaggtcaagcccgccgatattatggatgtcaatgccgcctttaccgcgcggcaggttcgcgcctttaacgcggaaaggctgatacacggacacacccaccgcgagcatatccatcacgaaaacggctttacccgcatcgttttgggcgactggcataacgactatgcttcaatcctccgcgtggacggggacggcgcggtattcgtgccgctggaaaaatgctga

SEQ ID NO: 40786 - DNA, 390 bp, Neisseria meningitidis; identical to SEQ ID NO: 39501

SEQ ID NO: 40787 - DNA, 1929 bp, Neisseria meningitidis
atggcaaaagtaatcggtattgacttaggtacaaccaactcttgtttggccatttctgaaaacggtcaaaccaaagtgatcgaaaatgcagaaggtgcacgcaccacgccgtccgttatcgcttatttggacggcggcgaaatcctcgtcggcgcaccggcaaaacgccaagccgtaaccaacgccaaaaacactatttacgccgccaaacgtttgatcggtcataaatttgaagacaaagaagtccaacgcgacatcgaatctatgcctttcgaaatcatcaaagccaacaatggcgacgcatgggtgaaagcgcaaggcaaagagctgtccccgccgcaaatttccgcagaagtcctgcgtaaaatgaaagaagccgccgaagcttacttgggcgagaaagtcactgaagccgtgattaccgttcctgcctacttcaacgacagccaacgtcaagcgactaaagacgcaggccgcatcgccggtttggaagtaaaacgtatcatcaacgaaccaaccgcagccgctttggcattcggtatggacaaaggcgacaataaagaccgcaaagtagccgtatatgacttgggtggcggtactttcgatatctccatcatcgaaatcgccaacctcgacggtgacaaacaatttgaagtattggctaccaacggcgatactttcttgggcggtgaagacttcgaccaacgcttgatcgactacatcattgacgagttcaaaaaagaacaaggcattgatttgaaacaagacgtaatggctctgcaacgtctgaaagaagctgccgaaaaagccaaaatcgaattgtccagcggtcagcaaaccgaaatcaacctgccgtacatcactatggacgcaaccggtccgaaacacttggcgatgaaaattacccgtgccaaatttgaaagcctggttgaagatttgatccaacgttctatcgagccttgtaaagtcgcattgaaagatgccggcttgagcaccagcgacatcgacgacgtaattttggtcggtggtcaaagccgtatgccgaaagtacaagaagccgttaaagccttcttcggtaaagagcctcgtaaagacgtgaaccctgacgaagccgttgccgtaggcgcagcgattcaaggtgaagtattgagcggcggccgtagcgacgtattgctgctggacgtaacgcctctgtctttgggtatcgaaaccatgggcggcgtgatgaccaaactgattcaaaagaacacaactattccgactaaagcgtcgcaagtgttctctaccgccgaagacaaccaaagcgcagtaaccatccacgtactgcaaggcgaacgcgaacgcgcttctgccaacaaatctttgggtcagttcaacttgggcgacatcgcacctgcaccacgcggtatgccgcaaattgaagttactttcgacatcgacgccaatggtatcttgcacgtttctgccaaagacaaaggcaccggtaaagcagccaacattaccatccaaggttcttcaggtttgagcgaagaagaaatcgaacgcatggtgaaagatgccgaagccaatgctgaggaagataaaaagctgactgaattggtcgcttcccgcaaccaagccgaagccctgattcactccgtgaaaaaatctttggcggactacggcgacaaacttgacgcagccgaaaaagaaaaaatcgaagccgcgctgaaagaagccgaagaagccgtgaaaggcgacgacaaagccgctatcgatgccaaagccgaagctttgggtgcagccagccaaaaactgggcgaaatggtttacgctcaagcgcaagccgaagcccaagcaggtgaaagtgcgcaaaccaatgcttctgcaaagaaagacgatgacgttgtagatgccgactttgaagaagtaaaagacgacaaaaaataa

SEQ ID NO: 40788 - DNA, 606 bp, Neisseria meningitidis
atgacaataatgaatatcaatacttccgaaaataaagatgctgttgccgaacacaccggacaatggttggaaaaagccgtcatcggtctgaacctgtgtccctttgccaaagccccccacgttaaaaaccttgtccgcatcgcgatcagcgaagccaaacaccttgacggttttttggaagacttggacgaagaactgcagcgactgggcaatacacccgccaccgaactggaaaccaccctgctggttcacccgaccctattccccgatttcggcgtattcaacgatatgctcgatattgccgatgccgccgttgtcgaaaacggcttggaaggcatcgtccaaatcgccccgtttcatcccgatttccaatttgaaggcacggattcagacgacatcggcaactacaccaaccgttctccctatccgacactgcatctgatacgcgaagacagcattgccaaagccgcacaagcctttcccgacgcttcggcaatattcgaacgcaatatcgccctgctggaaaaaatgggacatgaaggctgggcaaaactcggtatcacatcctgcccttatccgcacaataagaaaaatatttcaaaatga

SEQ ID NO: 40789 - DNA, 738 bp, Neisseria meningitidis
atgctgctgatacccgccatcgatttgaaagaaggacgctgcgtccgcctgagacaagggctgatggaagaggcgaccgtcttttccgattcgcccgccgaaaccgcgctgcactggttcgaacaaggcgcgcgccgcctgcatctggtagatttgaacggcgcgtttgccggtgttccgcaaaacctgcccgccatcaaagacatccttgccgccgtcgccaaagacatccccgtacagctcggcggcggcatacgcgatttgaaaaccatcggacaatatttggatttgggcttaaacgacgtgattatcggcacggcggcggtcaaaaaccccgacttcgtgcgcgaggcgtgcaaagccttccccggcaggattattgtcgggctggatgccaaagacggtatggccgccatcgacggctgggcaaccgtaaccgggcatcatgtaattgatttggcaaaacgctttgaagacgacggcgtcaacagcatcatctacaccgacatcgggcgcgacggtatgatgagcggcgtgaacatcgacgcgacggtcaaactcgcccaagccgtccgcattcccgtcatcgcctccggcggactgaccggcttggacgacatccgcgccctgtgtgccgccgaaaaacatggcgtagcaggcgcgattaccggccgcgcgatttacgagggcagcatcgattttgcccaagcgcagcaactggcagattccctcgactaa

SEQ ID NO: 40790 - DNA, 1266 bp, Neisseria meningitidis
atgaacacactccaacgccgcaagacgcatcaagtccgcatcgatcatattaccgtcggttcagaagcacccgtcgttatccaatctatgaccaacaccgacactgccgatgcaaaagccaccgcattgcagattaaggaattgagcgatgccggatccgaaatggtgcgtattaccgtcaacagccccgaagccgcgtccaaagttgccgaaatccgccgccgcttggacgatatgggctatgccacaccgcttatcggcgatttccacttcaacggcgaacgcctgttggcggaatttcccgaatgcggcaaagcattgtccaaataccgcatcaatcccggcaatgtcggcaaaggcgtaaaaggcgatgaaaaatttgcctttatgattcggactgctgctgaaaacgataaagccgtccgcatcggcgtaaactggggttctttggatcaaagcctcgccaaacgtatgatggatgccaacctcgcttcttccgcgccgaaaccgcccgaagaagtgacgaaggaagcactgattgtctccgctttggaatctgccgaaaaagccgttctattgggactgcccgaagacaaaatcatcctgtcgtgcaaagtcagcgcggttcaggatttgattcaggtttaccgcgaactgggcagccgttgcgcctatccgctgcatttgggtttgaccgaagccggtatgggcagcaaaggcattgtcgcatcaacggcggcattatccgtcttgcttcaagaaggaatcggcgacaccatccgcatttcactgactccggaacctggcagcccgcgtactcaggaggtcgtcgtcgggcaagagattttacagactatgggattgcgttcgtttacgccgatggttaccgcctgccccggctgcgggcgtaccaccagtaccgtatttcaagagctggcacaagatgttcaaaattacctgcgccaaaaaatgtctatatggcgtaccctttatcccggggttgaatccctgaacgttgccgtaatgggctgcgttgtcaatgggcccggagaaagcaaattggccgacatcggcatcagcctgcccggtacgggagaaacacccgtcgcgccggtttatgtggacggggagcgcaaaataacactgaaaggtgataatattgcaactgaattcctagctattgtagaggaatatgtcaaaaccaactatggtgaaaacggctccaaacgcaaccagaacaaaatcatccctatacagtccctataa

SEQ ID NO: 40791 - DNA, 282 bp, Neisseria meningitidis; identical to SEQ ID NO: 38303

SEQ ID NO: 40792 - DNA, 1407 bp, Neisseria meningitidis
gtggaatttagcacaaaaaccgaaatcttgcaggaacagcaggcaggcgcacagttatttgtctgcaccgaagaggcgcaattaaaccatccgaccgcccttgcccttttgtcttcgcttgaagaaggtcaaaattttgccgacacaaaaatcccgacaggcaacggtttgcaggctgttgccgtatgctgtctgaaaagcaccggccgcgccgcattgaagaaggccgccgccgaagccgccaaatgggcgcaaaatcaggaaacggtcaatgtggacatccatgccttcgatgaagcgcaagccgccgccgtagccgaagcgtttgcgattgcgttcggcaacgccgcctaccgtttcgaccgctacaaaaaagaagccaagcccgccaaatttgaaaccgccgtgttccacagcgcacacgaagccgtcgttaaagaagccttgcgcgtcgccgaagcgcaagtttacggacaaagcctctgccgcgacttgggcaacgccgcgcccaacgaatgcacgcccgaatttttagcgcgcaccgccaaagccgaagccgaaaaactgggcgcgcacgccaaaatcatcgaaaaagactacatcaaagaaaacatgggttcgttttggtcggtcgccaaaggcagcgcggaagccccctatttggtcgaactgagctatttcggtgcagccgacaaagaagccgcgcctgtggtattggtcggcaagggcattaccttcgacaccggcggcatttccctcaaacccggcctgaacatggacgaaatgaagttcgacatgtgcggcgcggcaaccgtcatcagcaccttctgcgccgccgtcaagctgcaactgccgattaacctgattgccgtcgtcgccacttgtgaaaatatgccttccggcgcggccaacaaaccgggcgatgtcgtgaaaagtatgaaagggctgaccatcgaagtgttgaacaccgatgccgaaggccgtctgattttgtgcgacgcgctcacttacgccgagcagttcaaacccaaagccgtcatcgacgtcgccaccctgaccggcgcgtgtattgttgccttggggcacgatgtcagcggcgtgatgggcaacaatcaggatttgatcgacagcctgcttgccgcttcctacaacgtggacgacaaagcgtggcaactgccgctctttgagacctacaaagaccaactcaaatccaactttgccgacattccaaacatcggcacgcccggcgcgggcacgattaccgccgcaacattcctatcctactttaccgaagactatccatgggcacaccttgacatcgcgggtacggcgtggaaatccggtgcggaaaaaggtgcgaccggccgtcccgttcccttgctgctgaactatctgcggaatctttaa

SEQ ID NO: 40793 - DNA, 498 bp, Neisseria meningitidis
atgagcacgacacgtccgattattgatgcggtagtagagcatttgcaggccgctatcccgtgggtcagcgttgaggcttttccggagcggccgtccgaataccaatttatccatcccgtcggggcaatcttggtcggctacggcggcagtaaatttggcgatattgagcagctcggccgtattgcgcagcagcgcgatgtcaggctgatgctgaccgtttttggcagcagccttaatgcggatgacggcactttggccatcttggatgagacacgtcttgctatggttggtttcgcgccgccgaactgccggccctgccaccttatcagcgaggagtttttggccgaggatgcgggcgcatggcagtatcagcttgtcttgcagactgagactcagcaggttgaagtttgccgtgaagaaaaacgccccctcttcgtcgctgcccgctatcgccgaaccgatcaagacctcaattccgatttaaaacctaaaaaatag

SEQ ID NO: 40794 - DNA, 1308 bp, Neisseria meningitidis
gtgggcgaacctgaaaacaaatcatccgaacccgtacgcgagatacaggcatcaaaagaaatgccgtctgaaacctcttccccacgcaaagaaaacgaaacagaagtacacattcctgccgctccttttatcgtcaaacagtccggcagcaacgctttggcagtctgcgccctggtattggcggcattgggtttgggtacaagtggttttttgtttgtccaaggacagaatgtcttgaaaaaccaagagttggcattcaaccaaaaaatcgacaaagccgctttgggcgagtcggaaaacgccgccctgctcaaagacaacctcaaccggcaagccgccatacaatcagagctcgaccgtttggacggaaacgtcaaagcaaacggcgaacaaatcttggaaatgcaaaaatcctatcgcgagttgaccaaaggacgtgccgattggctggtggacgaaaccgataccatactcaatttggcagcgcaacagctggtgttgaccggcaatatccaaacggcagtcggcgtgttggagcatatcgacagccgcctgtcccgtttcaatcaggcagagcttctgccgatcaagcaggcggtcagcagcgacttggcggaactgaaaaaccgtccctatgtcgatatttccggcacggcattgcgcctcgacaggctggaaaccgccgtattcggactgccgctgattttggacggcgtattgaaaccgggcgtacaggtgaagaacgaagccgcttctgcttcatggtggcagaacgtatgggaaaaatccctcggcacattgaaggggctggtcgaaatccgccgtttggaaaacaacgatgccatgctgatttctcccgaacaggcatattttgtgcgtgaaaacctgcgcctccgccttttggatgcgcggactgcattaatgcagcgcaacagcgaagtctatcagggcgatttgaacaatgccgaagccgccgtcagacagtatttcgatgccaagtctcccgccacgcagtcgtggctgaaagaactggcggaattgaaggagttggatgtgcgcatgacggcggatgacggtttgaaggccagtttaaatgccgtccgcgcctatcgcgacggtacgcgcatgatggcggcggaaaatcaagaagcggaacaggcggtttccgaaccgtctgccgcatcggatgtgaagaccatagaagcaccgtccctgccttcggaacgcaaaccggaacagcctgcaaaaaaacagcccgtaccggaaaaggcagggcgttcgccgtccgctaaaggagaacgcgcatga

SEQ ID NO: 40795 - DNA, 378 bp, Neisseria meningitidis
atgtctgccaaaccgcgtcctgtttatctggatttgccgaacatccgtctgccgatacccgggatagtttccatccttcaccgcatcagcggggtcgggctgtttattatgctgcctttcctgctgtatttcctgtccggtaccctgagtcaagagtctgcatttgaaacttaccgtgccattgtttcccatcctttggtcaagctggttttaatcggtgtattgtgggcttatctgcaccattctctcgccggtatccgctttttatttttggatgcacacaaaggccttgagctgaatactgcgcgcaataccgctaaagccgtatttgcttctgcattggttttgactgtcgttttgggagcgttgttatggtag

SEQ ID NO: 40796 - DNA, 1929 bp, Neisseria meningitidis
atgtccaaaaaccaaaatcacgaagaataccaagacgatgcccgccccctgacgattgaggaacaacgcgcacgcctgcgccaactcatcattatgggcaaagaacgcggctacatcacctactccgaaatcaacgacgcactgcccgacgatatgtccgatgccgatcaaatcgacaacatcgtcagtatgatttccggtttgggcatccaagttaccgaacacgcccccgatgcggaagacatattgttaagcgacaatgccgccgttaccgacgatgatgccgtcgaagaagccgaggccgccctttccagcgcagattccgagttcggcaggacgaccgaccccgtccgtatgtatatgcgcgaaatggggcaggtcgacctgctgacccgcgaagacgaaatcatcatcgccaaaaaaatcgaaaacgccctgaaaaatatggttcaggccatctccgcctgcccgggttccattgcggaaatcttagaactcatcgaaaaaatccgcaaagacgaaatccgcgtcgacgaagtcgtagaagccattatcgacccgaatgaagtattgctcaacgaattgggcttggggcacttggaaaccacagcacccgagaaaccttccaacgacaattcggacgaaaacgaagacgacgaagaatcggaagaagatgcggatgaaatctcggcagccaatctcgccgaattgaaacaaaaagtcatcggccactttgcccaaatcgaaaaagactacaaaaaaatgatcggccgtttggaaaaacaccacagccggcacaaagactatctcgcctaccgcgacgcgattgccaacaaactgctggaagtccgtttcgccacccggcaaatcgacagcctcagcagcagcctgcgcggaaaagtagaaaacatccgcaaactcgaacgcgaaatccgcgacatctgcctcgaccgcgtccatatggagcgcgactacttcatccaaaacttcctgcccgaaatcaccaatctggaatggattgaagaagaaatcgccaaaggcagggtttggagcgacgcgctcgaccgcttccgccacgccatcctcgaaaaacaaaccgagttggcggatatggaaaaagaaacccgcatttccatcgaagagttgaaagaaatcaacaaaaatatggtgtcgagcgaaaaagaaaccgcagccgccaaacaggaaatgattcaggcaaacttgcgcctcgtgatttccatcgccaaaaaatataccaaccggggcttacaattccttgatttgattcaggaaggcaacatcggtttgatgaaagcggtcgataagttcgaataccgcagaggctataaattctccacctacgcaacctggtggatccgccaggcaattacacgctcgattgccgatcaggcgcgtaccatccgcattccggtacatatgattgaaaccatcaacaagatgaaccgcatctcgcgccaacaccttcaagaaaccggcgaagaacccgattccgccaaacttgccgaactgatgcagatgcccgaagacaaaatccgcaaaatcatgaaaatcgccaaagagccgatttcgatggaaacccccatcggcgacgacgacgattcgcacttgggcgacttcatcgaagatgccaacaatgttgcgccggccgatgcggcaatgtacaccagcctgcacgaagtaaccaaagaaatcctcgaaagcctgacaccgcgtgaggcaaaagtcctgcgtatgcgtttcggcatcgatatgaacaccgaccacacgctggaagaagtcggcagacagtttgacgtaacgcgcgaacgcatccgacaaatcgaggcaaaagcactccgcaagctgcggcatccgacaagaagcgaccgtttgagaagtttcttggacagcgaagacagcaagctgtaa

SEQ ID NO: 40797 - DNA, 3033 bp, Neisseria meningitidis
atgttttggatagttttgatcgttattttgttgcttgcgcttgccggcttgttttttgtccgcgcacaatccgaacgcgagtggatgcgcgaggtttctgcgtggcaggaaaagaaaggggaaaaacaggcggagctgcctgaaatcaaagacggtatgcccgattttcccgaacttgccctgatgcttttccatgccgtcaaaacggcagtgtattggctgttcgtcggtgtcgtccgtttctgccgaaactatctggcgcacgaatccgaaccggacaggcccgttccgcctgcttctgcaaaccgtgcggatgttccgactgcatccgacggatattcagacagtggaaacaggacggaagaagcggaaacggaagcagcagaagctgcggaggaagaggctgccgatacggaagacattgcaactgccgtaatcgacaaccgccgcatcccattcgaccggagtattgctgaagggttgatgccgtctgaaagcgaaatttcgcccgtccgtccggtttttaaagaaatcactttggaagaagcaacgcgtgctttaaacagcgcggctttaagggaaacgaaaaaacgctatatcgatgcatttgagaaaaacgaaacagcggtccccaaagtccgcgtgtccgataccccgatggaagggctgcagattatcggtttggacgaccctgtgcttcaacgcacgtattcccgtatgttcgatgcggacaaagaagcgttttccgagtctgcggattacggatttgagccgtattttgagaagcagcatccgtctgccttttctgcagtcaaagccgaaaatgcacggaatgcgccgttccgccgtcatgcagggcaggcggaggcaaaatccccggatgtttcccaaggacagtccgtttcagacggcacagccgtccgcgatgcccgccgccgcgtttccgtcaatttgaaagaaccgaacaaggcaacggtttctgcggaggcgcggatttcgcgcctgattccggaaagtcggacggttgtcgggaaacgggatgtcgaaatgccgtctgaaaccgaaaatgttttcacggaaaccgtttcgtctgtgggatacggcggtccggtttatgatgaaactgccgatatccatattgaagaacctgccgcgcccgatgcttgggtggtcgaaccacccgaagtgccgaaagttcccatgcccgcaatcgatattccgccgccgcctcccgtatcggaaatctacaaccgtacctatgaaccgccgtcaggattcgagcaggcgcaacgcagccgcattgccgaaaccgaccatcttgccgatgatgttttgaatggaggttggcaggaggaaaccgccgctattgcggatgacggcagtgagggtgcggcagagcggtcaagcgggcaatatctgtcggaaaccgaagcgttcgggcatgacagtcgggcggtttgtccgtttgaagatgtgccgtctgaacgcccgtcctgccgggtatcggatacggaagcggatgaaggggcgttccaatcggaagaaaccgatgcggtatacgaacacctgccgacaaccgacctgcttctgccgccgctgttcaatcccggggcgacgcaaaccgaagaagaactgttggaaaacagcatcaccatcgaagaaaaattggcggagttcaaagtcaaggtcaaggttgtcgattcttattccggccccgtgattacgcgttatgaaatcgaacccgatgtcggcgtgcgcggcaattccgttctgaatctggaaaaagacttggcgcgttcgctcggcgtggcttccatccgcgttgtcgaaaccatcctcggcaaaacctgtatgggtttggaacttccgaacccgaaacgccaaatgatacgcctgagcgaaatcttcaattcgcccgagtttgccgaatccaaatccaagctgacgctcgcgctcggtcaggacatcaccggacagcccgtcgtaaccgacttgggcaaagcaccgcatttgttggttgccggcacgaccggttcgggcaaatcggtgggtgtcaacgcgatgattctgtctatgcttttcaaagccgcgccggaagacgtgcgtatgattatgatcgatccgaaaatgctggaattgagcatttacgaaggcatcccgcacctgctcgcccctgtcgttaccgatatgaagctggcggcaaacgcgctgaactggtgtgttaacgaaatggaaaaacgctaccgcctgatgagctttatgggcgtgcgcaatcttgcgggtttcaatcaaaaaatcgccgaagccgcagcaaggggagaaaaaattggcaatccgttcagcctcacgcccgacgatcccgaacctttggaaaaactgccgtttatcgtggtcgtggtcgatgagtttgccgatttgatgatgacggcaggcaagaaaatcgaggaactgattgcccgcctcgcccaaaaagcccgcgcggcaggcatccatttgattcttgccacacaacgccccagcgtcgatgtcatcacgggtctgattaaggcgaacatcccgacgcgtatcgcgttccaagtgtccagcaaaatcgacagccgcacgattctcgaccaaatgggcgcggaaaacctgctcggtcagggcgatatgctgttcctgccgccgggtactgcctatccgcagcgcgttcacggcgcgtttgcctcggatgaagaggtgcaccgcgtggtcgaatatttgaaacagtttggcgagccggactatgttgacgatattttgagcggcggcggcagcgaagagctgcccggcatcgggcgcagcggcgacggcgaaaccgatccgatgtatgatgaagccgtatccgttgtcctgaaaacgcgcaaagccagtatttcgggcgtacagcgcaccttgcgcatcggctacaaccgcgccgcgcgtctgattgaccagatggaggcggaaggcattgtgtccgcaccggaacacaacggcaaccgtacgattctcgtccccttggacaatgcttga

SEQ ID NO: 40798 - DNA, 261 bp, Neisseria meningitidis
gtgcggacgtggttggttttttggttgcagcgtttgaaatacccgttgttgctttggattgcggatatgctgctgtaccggttgttgggcggcgcggaaatcgaatgcggccgttgccctgtgccgccgatgacggattggcagcattttttgctggcgatgggaacggtgtcggcttgggtggcggtgatttgggcatatctgattattgaaagtgaaaaaacggaagatattgagtcattcggacacaatgccgtctga

SEQ ID NO: 40799 - DNA, 924 bp, Neisseria meningitidis
atgacgaaaaccgaaccgaacaacgcccaactcgactggttggaatccgaatccatccacattatccgcgaagtggcggcggaatgcgaaaaccccgccctgctcttttccggcggcaaagattccgtggtcctgctcgccctcgcctgcaaagccttccggctgggcagccggccggtaaaactgcccttcccgctggtgcatatcgacacgggacacaactaccccgaagtgattgctttccgcgacgcgcaggcggcaaaactcaatgcccgcctgatagtggggcgcgtggaagactccattgccaaaggcacggtggtcttacgcaaagaaaccgattcgcgcaatgcggcacaggcggttaccttgttggaaaccatcgaggcaaacggcttcgacgcgcttatgggcggcgcgcggcgcgacgaagaaaaagcccgcgccaaagaacggattttctcgttccgcgacgagttcggacaatgggatccgaaggcgcaacgccccgagctgtggtcgctgtacaacaccaggctgcacaaaggcgaaaatatgcgcgtcttcccgatttccaactggacggaactcgacatctggcaatacatcgcccgcgaaaacctcgagctgccgccgatttattacagccacaggcgcgaagtggtcagacgcagggggctgctggtccctgtaacgccgctcaccccgaaaatgccgtctgaaacctccgaaatccttgatgtccgcttccgcaccgtcggcgacatcagctgcacctgcccggtagaaagcaccgcgtccacgccggcggagattatcagagaaacagcggttgccgacatttccgaacgcagcgcgacccggctggacgatcaggcaagcgaggcggcaatggaaaaacgcaaaaaagaaggctatttctaa

SEQ ID NO: 40800 - DNA, 339 bp, Neisseria meningitidis
atgacctaccgtgaattagttgaacgtcagttggctgtgcgccatgccgatttggaattgggcttaagccgcgcacgcgaacaagagccgtttgtcattcatatttccgacctgttggataaggcaggcattgagtacgcggtacgcatggataaggattttcagacgacgtttcaccttgaatatccaattacgaactatgacacctttaaacgtgcggtttggcaaactttgggggcgtattactgtgtttgtaatgatggtgatggactggagattgccagcaatcgccctgacggttacgccgtccgtatcgtattcggcgatgtgccggtttaa

SEQ ID NO: 40801 - DNA, 612 bp, Neisseria meningitidis
ttgggcggtgtggcgggctttgaaaaaaatacgcgcgaagccgttgaccggtggatatgggacaaccccaatgccgccgaaaccgtcgaagccgtcttcaacgttgccgccgccgccaaagtcgcgaagctggcaaaggcggcaaaaccggggaaggctgcggttagtggagatttttcgattggttataaaaacttttctactgtcaaaccaaaagtaattgccaaaggaacgattaatggaaagacttttagagatgttaatcaaagtgcaaaaattggatcgcctgattcacctacattaatagcccaacgagttaatgcaaaaatccaagccgacggtaaacctcgtccgaatgcaaccgttgctaattcacatgctgaaattggtgttatccagcaggcctataatgcaggtaaaacgaaagggggatctatgacaatgacagtttcaggaaaagatgtttgtggttattgtaaaggagatattgcagctgctgctcaagcttctggactgaaatcactgaccgttaatgcgacagatgatgtgacaggaaaaaataaaacttactattggactcctggtatgaaatcaattaaggagagaaaatga

SEQ ID NO: 40802 - DNA, 351 bp, Neisseria meningitidis
atgtcagacggacaaaatattccggcaaaaatgatgtcgttgcagctgaaagacatgaatctgctgtacagctcctacatgccgtttttggaacacggcggtctgtttgtgcagaccaacgacgtattttccatcggggacgatattctgcttgccgtagaaatcctcaacttccccaaactgttcctgccgaccaaagtcgcctggatcaatcctgcgcgtacttcctccaaacccaaaggggtggggctggcattcacaaaacacgaaaactgcctgaaagtcaaagaccagatcgaagtcgaactgggcaacacaatcggcggcagcagacctacgtttaccatgtaa

SEQ ID NO: 40803 - DNA, 648 bp, Neisseria meningitidis
atgaaaacaaaattttacaatcatcaaggcggacatttaatcctgtattttgcaggttggggaacgccgcccgatgctgtaaatcatttgattttgccggaaaatcacgatttattgatttgctatgattatcaagatttgaagttagattttgatttttccgcctatcggcacatccgtttggtggcgtggtcaatgggcgtttgggcggcagagagggcattgcaaggaataagattaaaatctgcaacggcagtgaatggcacaggtttgccttgcgatgataatttcggtattccttacgccgtttttaaaggcacattggagaacctcacggaaaatacccgtttaaaatttgaacgcagaatctgtggcgataaagcatcttttgaacgttaccaacaatttcccgcacgcccgtttggcgaaattcatcaagaacttatcgcactttttgcgatgatcgggcaagatagacgtacagatcttatccgctggacaaatgccttggtcggatcgggcgataaaatttttatgcctgccaatcagcaccgatattggacagcgcgttgcaccgttcgggaaattgacggcggacattacctgttttcaagattcacccattggtcggcactatggaatcactga

SEQ ID NO: 40804 - DNA, 975 bp, Neisseria meningitidis
atgacagaatatcccggcatcgggtcgccgttgttttacggcgttttttttgcggcagtgctggtcatgattgccttggatatgttttcgctgaagaaaaacggcagccataaagtcggcatcaaagaagccttggcatggagcggcttgtgggttgccgtatcctgcctgttcgcgggctggctgtatttcgaactcgccggcaatcccggctacggcgcggcagtcgcaaaagaaaaagtattggaattctttaccggctacattttggaaaaatcgttggcagtcgataatattttcgtgttcctgatgatattcggctacttcaaagtcgcaccgcagtttcagcaccgcgtgctgctgtacggcgtattgggcgcattggtattgcgcaccgtcatgattttcgtcggcgcggcactggttcggcagttcgagtggattctgtatctgttcggcgcgttcctgctctataccggcatacacatgatgaagcccgaaggcgatgaggaaggggatttggcaaacagcaggctgctgaatgccgtcaagaaagtcgttccggtcggcacggaatttcacggcgagaaattttttaccgtcgaaaacggcaaaaaaatcgccacgccgctgtttttggtgctggtcatgattgaattgagcgatgtcgtgtttgccgtggacagcatccccgccgtctttgccgttaccaccgatccgtttatcgtgctgacctccaatattttcgccattttgggtttgcgggcgatgtatttcctgctgtcggatgtggaggaacgctttatcttcctgaaatacggcttggcattcgtgttgagttttatcggtgtgaaaatgctggtaatgcattgggtgcatatcccgatttccgtttcgctgtcggtcgtgttcggcgcgttgggtgcatcgatactgacctcgttaatttatacgaaaaaacagcctgataaataa

SEQ ID NO: 40805 - DNA, 798 bp, Neisseria meningitidis
atgaaccgtctttacccccacccgattatcgcccgtgagggctggccgattattggcggcggtttggctttgagcctgctggtgtcgatgtgttgcggctggtggtctttgccgttttgggtgtttaccgtatttgccctgcagtttttccgcgaccctgcgcgtgagattccgcaaaatcctgaagcggtgttgagccctgttgacggccgcattgtggtggtcgaacgcgcacgcgatccgtatcgtgatgtcgatgctttgaaaatcagtatttttatgaacgtgttcaacgtgcattcgcaaaaatcgcctgccgattgtacggtaacgaaagtggtctataacaaaggcaaattcgtgaatgcggatttggacaaagccagcacggaaaacgaacgtaatgcggtgttggcgactacggcttccggtcgtgaaattacttttgttcaagtggccggtttggtggcgcgccgtattttgtgctacacccaagcaggtgcgaaactgtctcgcggcgaacgctatggctttatccgttttggctcgcgcgtggatatgtatctgcctgtcgatgcgcaggcgcaagtggcgattggcgataaagtaaacggtgtcagcactgtattggcgcgtttgccgctgactgcgccgcaaatcgaatccgagcctgaatctgagcctgctttacaaactgctccggttgaaacagcggcaaacccatctgccgaacaacggcaaatcgaggcagtggcggctaagattcaggcggctgtgcaagatgtgttgaaagattaa

SEQ ID NO: 40806 - DNA, 1020 bp, Neisseria meningitidis
atgaacacaatgctaatgtcgggcgcggctgccgcgctgcttgccggcatcatcctttatttcaaaagcgacaagaagcggcaggaaaacggtgaatggagttccggcctcgaatacgcctatatcctgacagcggtcggcgtgtttgccgctttgtccctgtttatgagctttaccgccgttttcctgattttcgttgtattgtgcggtacggcttggggggtatacaaataccgcctgaagactcatcccgaaatctcggaaagcagccacttcggctattatttcggcagtttcttccctaccgttttggtattgtttctcatccggtcgtttattgccgaaccgttccaaattccatccagctccatgcgcccgggcctgattaagggcgatttcattttggtcggcaaattttcctacggcctgcgcgtacccgttttaaacaatgtattcatccccacgggcaaaatcgaacggggcgatgtggtcgtttttaattatcctttgcaaccggagatgacctacatcaagcgtattgtcggcattccgggcgatgtggtcgaatatcggaataaagttttgacggtaaacggaaaacctgcttccgatattcctgacggcacataccgttatcccgacgacaccgacccatccgaaatccacaatacggatatgttccacagcggtttggacggcaaatccttcaatattctgaaaaaagaaggacagcctgccgtttccctgcccgtattgggcaaatatacctccgatattatgtctgaaaacggatattccatagagcaaagcggtttggaacactgccaatatgccgacgacggcagcggtttcgtgtgcaaagttcccgaaggacgctatttcgctatgggcgacaaccgcgacaacagtgccgattcgcgctactggggatttgtggatgacaagctggttgtcggcaaggcaatgttcattttgatgaacttcggcgatttcggcagggccggtacggcaatccgttag

SEQ ID NO: 40807 - DNA, 426 bp, Neisseria meningitidis; identical to SEQ ID NO: 39813

SEQ ID NO: 40808 - DNA, 948 bp, Neisseria meningitidis
atgtacaaaacaatagatttattttcaggcattggcggaatacgcctaggctttgaaaaatatgggtgcaccaatgtattctcatcggaatgggacaaatatgcccgacaaatgtatgaagcaaactttggagaaaaaccttttggcgacattaacggcatcgatccttcagatattcccgatcatgatattctgcttgcgggatttccgtgccaacctttcagtatcgcaggtaagggattgggatttgaagatacgcgcggaacattgtttttcaatattgccgaaatcctgaaaaccaaacagccgaaggcttttcttctggaaaacgttaagcggctgactacgcacgattcgggcaggactttccgtattattttagaaacccttaaacagcttggttatacggtttattttaaggttttaaatactttggatttcggattgccgcaaaaacgcgagagaatttatattattggtttttcagacaacatccctttttactttcccgaacccataaaccaatatcggccattgggcgaactgttggaaaacgaccgagatgtcgaaccaagctattttttatcagatgccttgaaacaaaaacgtttggcagccttaaaaaaagcccctcccactccatcaatttggcatgaaaatattggcgggaatgtttccgcacttccatattcctgtgccttaagggccgggggaagttacaattatttagtggtgaacggagtaagaaggttaacaggaagggaaatgttaagattacaaggttttcccgatgattttgaaatcaatatcccctactcgcaagtcaggaaagtcgccggaaattctgtatccgtccctgtaatagaagccatagcggaaaatatgctcgcttctctttccggcaaggtcgaacaaaaagggcaattggatttattggaggcaggatga

SEQ ID NO: 40809 - DNA, 435 bp, Neisseria meningitidis; identical to SEQ ID NO: 36184

SEQ ID NO: 40810 - DNA, 435 bp, Neisseria meningitidis
atggatacgaataactatgacaaaattatgccatttaagcctgaaaacaaagagagtgagctaaaaatcgccgtaagattccaacgaagattgataccatcaaaaattgtatatttttatacaggttttatgggattattggtttttttacagaaatatcaaattcttcatatttctaacttcaatgaattaatggattggctcatgctgttatttgtattgctcggtgtatatagtgtgatttctacagtttttttaactatttgcccctattgccacagatttcaaaaacagtttaatgggaaagtaatcagcgtcgataatcaagaaatagcttgcaatcaaggagtagttccatttattcattattgtaatcgatgcaatgccccgctttcaccaaaagcagtaacagattattatgaaaataaagcgtga

SEQ ID NO: 40811 - DNA, 879 bp, Neisseria meningitidis
atggcaagaaagacagaaaaatttgaagtggcggctagagaagttgaagagaggttcggtcatcgtggtataaagttggtggaatttagcggtcgttcaaatccttgtgttatttattgtccagaacacggcaatcagacttatggaagatttggcagtatgttcaggggcaacagtatgggctgtcctgcctgcggtaaggttagggcggctaaaattgccaatgccagccatcagtcggttcgtgaagagctggagaatttgaaacaagctataacaggtatgaccaagcaagagcgcatcacgacgcaagcctacaatgagatgaccaaatccgtggcaggttcaaacagcataatccttaacgatgtccaaggcgatacgaccatcaacaaccatcatacgcatacgcacaaccacagcgatgccgatggcaaagcactgtcgatgaggctcacaccccgtcctttgttgtcagaccgtcaggcggcggctttcgcccgtacaggcaaactcacgggcagtttcgacctgtttgcttcggtggtcgccccctcgcagtacacgtttgccgttgccatgcccgacacgtccatgtcgccggttatcgaaaagggagacttgctggtggtcgagccgcgtatgtgccctgcggacgaagacatcgcgctgattgaactgtccgacaagcggctggtcgtcgcgcaccttgttatcgatattgcgggcaggatgctgatttatcagacgggcaggccgtctgaagcctttgacctgcccgaaggcagcacgattttaggtgtggtgctggaggtcaaaaaacggtttatgtccgccgcacaggcgagaaggcgtgttgattcggattaccacccctga

SEQ ID NO: 40812 - DNA, 2133 bp, Neisseria meningitidis
atggcctatcaagttctcgcccgaaaatggcgtccgaaaacctttgccgacttagtcggtcaggaacacgtcgtcaaagccttgcgcaacgctctagacgaaggcaggctgcaccacgcctacctgctgaccggtacgcgcggcgtaggcaaaaccaccattgcccgcatccttgccaaaagcctcaactgcgaaaacgcgcaacacggcgaaccttgcggcgtatgcgaaagctgtacgcagatcgatgccggacgctacgtcgacctgctggaaatcgacgccgcctccaacacaggcatcgacaacatccgcgaagtattggaaaacgcccaatatgcaccgactgccggcaaatacaaagtctatatcatcgacgaagtgcatatgctttccaaaagcgcgttcaacgctatgctcaaaacgctggaagagccgcccgaacacgtcaaattcatccttgccacgaccgatccgcacaaagtccccgttaccgtcttgagccgctgcctgcaattcgtcttgcgcaatatgacttcgcagcaggttgccgaccacctcgcccacgtcctcgacagcgaaaaaattgcctacgaaccccccgccctgcaacttttgggacgcgccgccgccggatcgatgcgcgatgccttaagcctgctcgaccaagccatcgccctaggttcgggcagcgttgccgaacaagacgtccgccaaatgatcggtgcggtcgataaacaatacctttacgaactgctgacaggcatcgtcaaccaagacggcgaagccctgctggcgaaagcgcaggaaatggctgcgtgtgccgtcggctttgacaacgccttgggcgaacttgccatactgctgcaacacctcgccctgatacaggcggtgccctccgccttggcgcacgacgaccccgattccgatattttgcaccgcctcgcccaaaccataagcggcgaacaaatccagctttactaccaaatcgccgtccacggcaaacgcgacctgagcctcgcccccgacgaatacgctggctttatgatgaccctgctgcgtatgctggcgtttacgcccttggcggcagcttcgtgtgatgcaaacgccgtgattgaaaataccgaacttcaatccccatcggtacaaaccgccgaaaaggaagccgccgcaaaaaagccccaaccgcgccctgaagcggaaaccgcccaaacatccgttcagacggcatccgcagcggcaatgccgtctgaaggcaaaactgccgaacccgttaccaatcaagaaaacaacgatgttccgccttgggaagacgcgccggacgaagcccaaaccgcagccggcacgaccgcgcaaacgtcggcaaaaagcattcagacggcatccgaagccgaaacgccgcccgaaaaccaagtttccaagaacaaggcagccgacaacgaaaccaatgcccccttgtccgaaatgccgtctgaaaaccccattcagacaacaccgaatgatgaagcccttgaaacggaaacatttgcacacgaagcccctgcagaacctttctacggttacggctttccggatgatgactgccccgtagaagacaacgcggaaatcccgccgcccgattgggaacacgccgcccctgccgataccgcaggcggaggcgcggacgaagaagcagaagcaggcggcatcggcgaaaacaacacgccgtccgccccgccgcccgaattttccaccgaaaactgggcagccatcgtccggcatttcgcccgcaaactcggcgcggcgcaaatgccggcacaacactccgcgtggacggaataccatcccgacaccggcctgatggttttggcaatgaccgccgaggcacgcgccaccgccgacaaaaagcggctcgacaaaatccgcgacacccttgcccaagcctacgggctgcaactcaccctgcaaacccaagactggcacgacgaagccggccgggaaacccccgcgatgcaggacaagcgcgtccaagccgaggacaggcaaaaagcacaagcattgctcgaagccgaccccgccgcacaaaaaatcctccaagcattcggcgcgcaatggcagcccgaatcactggaattagcggcaaaccggccataa

SEQ ID NO: 40813 - DNA, 183 bp, Neisseria meningitidis
atggaaaaaaaattcttagacatcctcgtctgccccgttaccaaaggcaggctggaatatcatcaggacaaacaggaattgtggagccgtcaggcgaagcttgcctatccgattaaagacggcattccctatatgctggaaaacgaagcgcgtccgttgggcgaagaggaactcgaagcatga

SEQ ID NO: 40814 - DNA, 1077 bp, Neisseria meningitidis
atgaagccgtctatcttagaaaaactgcaacaactcggcgaccggttggaagaagttacccaccttttagggcaacccgaagccacatccgatatggacaactaccgcaagctcacgcgcgaacacgccgaactgacccccgtcgtcgaagtattccaaaactatcaactggcgcaaagcgacttggcagatgccgaagaaatgctgtccgaccccgaaatgaaagactttgccgccgaagaaatcgaagcggcaaaagccaaaatcaacacgctcgataccgaactgcaaaaactgctgctgcccaaagatgccgacgacgacaaaaacatcttcatcgaaatacgcgccggaacgggcggcgacgaagccgcgctgtttgccggcgatttgctgcgtatgtacagccgctacgccgaacgcaaccgctggcaggttgaaatcgtgtccgccaacgaaagcgagttgggcggctataaagaagttatcgcccgtattatcggcttaggcgcgtacagccgtttgaaatttgaatcgggcggacaccgcgtgcagcgcgtccccgccaccgaaagccaaggccgcatccacacctccgcctgcaccgttgccgtcatgcccgaagcggacgaactggaagacatcgagttgaaccccgtcgaccttcgcatcgacaccttccgcgcatccggcgcgggcgggcagcacatcaataaaaccgattccgccgtccgcatcacccacctgcccaccggcatggtggtcgaatgccaagacggccgcagccaacacgccaacaaagcgcaggcaatgaaagttctcgccgcccgcctgaacgacgcgcaaaaacgcgaagcccaagccaaagaagccgccgaacgcaaatcccttatcggcagcggcgaccgcagcgaacgcatccgtacctacaactatccccaaggccgcgtgaccgaccaccgcatcaaccttaccctgcacaagctggattttgtgatggacggcgatttggaagaaatcaccaacgccctgattgccgagcatcaggccgagcttctggcggcaatgggcgattga

SEQ ID NO: 40815 - DNA, 1308 bp, Neisseria meningitidis
atgaagccagtaaacatcggtcttttaggtttgggtacggtcggcggcggtacggctgccgtgttgcgggacaacgcggaggaaatttcccgtcgcttggggcgcgaaatccgtatttctgccgtgtgcgatttgagtgaagaaaaagcccgacaaacctgcccgtccgcagcctttgtcaaagatccgttcgaactggtcgcacgtgaagacgtcgatgtcgtcgtcgaattgttcggcggtaccggcattgccaaagatgcggtgttgaaagccattgaaaacggcaaacacatcgttaccgccaacaaaaaactgctcgccgaatacggcaacgaaatcttcccgctggcggaaaaacaaaacgtcatcgtccaatttgaagcggcagtagcgggcggtatcccaatcatcaaagccctgcgcgaaggtttggcggcaaacaggattaaatccatcgccggcattattaacggcaccagcaacttcatcctctccgaaatgcgcgaaaaaggcagcgcgtttgccgatgtactgaaagaagcgcaggcattgggttatgccgaagccgatccgaccttcgacatcgaaggcaacgatgcgggccataaaatcaccatcatgagcgcactggcattcggcacgccgatgaacttttccgcctgctacctcgaaggcatcagcaaactcgacagccgcgacatcaaatacgccgaagaacttggctatcgcatcaaactgttgggcattacccgcaaaaccggcaaaggcatcgagctgcgcgtccaccctaccctgattcccgaaagccgcctcttggcaaacgtcaacggcgtgatgaacgccgtgcgcgtcaacgccgatatggttggcgaaaccttatattacggcgcgggcgcgggcgcattgccgaccgcttccgccgtggttgccgatatcatcgacatcgcccgcctggttgaagccgataccgcccaccgcgtaccgcatctggcgttccaacccgcgcaagtccaagcgcaaaccatcctgcctatggacgaaattaccagcagctactacctgcgcgtccaagccaaagacgaaccgggcacgctggggcaaatcgccgcgctgttggcacaagaaaacgtgtccatcgaagcactgattcaaaaaggcgtgattgatcagaccactgccgaaatcgtgattctgacccacagcacggtcgaaaaacacatcaagtcggcaatcgcagccatcgaagcactggattgcgtggaaaaaccgattaccatgatccgcatggaaagcctgcatgactga

SEQ ID NO: 40816 - DNA, 687 bp, Neisseria meningitidis
atgtttgatttcggtttgggtgagctggtttttgtcggcattatcgccctgattgtcctcggccccgaacgcctgcccgaggccgcccgcaccgccggacggctcatcggcaggctgcaacgctttgtcggcagcgtcaaacaggaatttgacactcaaatcgaactggaagaactgaggaaggcaaagcaggaatttgaagctgccgccgctcaggttcgagacagcctcaaagaaaccggtacggatatggaaggcaatctgcacgacatttccgacggtctgaagccttgggaaaaactgcccgaacagcggacacctgccgatttcggtgtcgatgaaaacggcaatccgcttcccgatgcggcaaacaccctatcagacggcatttccgacgttatgccgtccgaacgttcctacgcttccgccgaaacccttggggacagcgggcaaaccggcagtacagccgaacccgcggaaaccgaccaagaccgcgcatggcgggaatacctgactgcttctgccgccgcacccgtcgtacagaccgtcgaagtcagctatatcgatactgctgttgaaacgcctgttccgcacaccacttccctgcgcaaacaggcaataagccgcaaacgcgattttcgtccgaaacaccgcgccaaacctaaattgcgcgtccgtaaatcataa

SEQ ID NO: 40817 - DNA, 1635 bp, Neisseria meningitidis
atgataaaaccgaacctgaggccgaagctcggctcttccgcgctgattgccttcctttccctgtattcctcgctggtattgaattacgccttttttgccaaagttgtcgagcttcatccttttaacggcaccggggcggatatcttcctctatacgatgccggtggtgctgttttttttaagtaatttcgtttttcacgtcattgccctgcctttcgtgcataaggtattgattccgttgatattggttatcagtgcggcggtgtcttaccaagaaatatttttcaatatctatttcaacaagtcgatgttgaataatgtcttgcaaactacggctgccgaaagcgcgcgcctgattacgccgggctatgtgctgtggattgtatgtttgggcgtattgcccgcgctggcgtatatcgccgtcaaggttaaataccgcgtttggtataaggagcttttgacgcgccttgtgcttgccgccgtttcctttttgtgcgcgttgggtatcgcaatgttgcaatatcaggattacgcctcgtttttccgcaacaataaatcagtaacccatctgattgtgccgtctaatttcatcggcgcgggcgtgtcgaaatacaaagattggaagcgttccaatattccttatacgcaattggatatggcggtcgtgcaaaaccggccggccggcagcctgcgccgtttcgtggtgctggtcgtgggcgagaccacgcgtgccgccaactggggtttgaacggttacagccgccaaactacgccgctgcttgccgcgcgcggcgatgaaattgtcaatttcccgcaggtcagaagctgcggtacatcgaccgcgcactccctgccgtgtatgttctcaactttcgaccgcacggattatgacgaaatcaaagccgaacaccaagacaacctgctggacatcgtgcagcgcgccggcgtggaagttacctggttggaaaacgattccggctgcaagggcgtgtgcggcaaagtgccgaataccgacgttacctcgctcaacctgcccgaatactgccgcaacggcgagtgcctcgacaatatcctgctgactaagttcgacgaagtcctcaacaaaaacgataaagacgcggttttaatcctgcataccatcggcagccacgggccgacgtattacgaacgctataccgaagccgaacgcaaattcacgccgacctgcgacaccaacgaaatcaacaaatgcacccgcgccacgctggtcaacacttacgacaatacggttttgtatgtggaccagtttatcgacaaggttatccgcaaacttgaaaaccgcgacgatttggaaagcgtggtgcattatgtttccgaccacggcgaaagtttgggcgaaaacgggatgtacctgcacgccgcgccttacgccatcgcgccttccgggcagacgcatatcccgatggttatgtggttttccaaagccttccgccaacacgggggcatagatttccaatgcctcaaacaaaaagcggcggaaaacgaatattcgcacgaccactatttcagcacggtattggggctgatggacatttccaacagtcaaacctatcggaaggaaatggatatattggcagcctgccgccgtccgcgctga

SEQ ID NO: 40818 - DNA, 717 bp, Neisseria meningitidis
atgaaaggctattctatcatgaataccaacaacacccaacttgttcaaatctccggcgaccgtttggttacaacctcgctcgctgtttcaaaccacttcggaaaaaagcacaagaacgtccttcaagcaattgaaaacctcgaatgttcagacgagtttgcaaagctgaattttcagcccatttcctaccgcgacgggatgaaccgcgagaaacccgcctacgaaatcacccgcgacggtttcgtgttcctgtgtatgggctttaccggctcagctgccgcgcagtggaaggagcgttacatcgccgccttcaacgccatggagtcggaattgtccaagccgcgcggatcttcgggcatcgaaggcgatatgaagctcttggcgcagggcatgaccctcgtcctgcagcagaaccagctcacccaccgctacatcgacctcttggagcgcaaccagaaatcccgcgcccgcatcagccccgaccacgccgtcgaagccaaaaagctcgtcgccgcaggcttcagccagtcgcaggccgccgcccaattgggtatttccaaagccgccgtcaacgcgctggtcaacgacaaatacgagttcggcggcgaatggaaggcgccgaccccgaccaagctgctgcaacggcagttggaagaacagcgcgacgccatcgtccaagccctgcaattgaccgttgaagagggggagcaatcatga

SEQ ID NO: 40819 - DNA, 549 bp, Neisseria meningitidis; identical to SEQ ID NO: 39055

SEQ ID NO: 40820 - DNA, 801 bp, Neisseria meningitidis
atgaacgcgttcaaccttatcatcatcggcgacgaaatcttacacggcagccgccaagacaagcatttcgcctttttcaaatccctgctcgaatccaaagggctgaagctcaatcaggtgcaatatctgcccgacgaacccgatttgctggtcaggcaactgagccgcagcttttcagacggcataccgacgtttgttaccggcggcatcggcgccacgcccgacgaccacacgcgccaagccgcagcggctgctttggatttgcctgtcgtccgccatcctgaagccgccaagtttatcgaaggagtaacccagaaacgcagcgagccgcttgattcgccggaacacgcccaacgcctgaaaatggcagattttccggaaggcgcggaattggtgcccaatccgtttaataatattgccggattttccatccgcgagcattattttttccccggctttcctgtgatggcgcacccgatggcggaatgggtattggaaacttattatgccgaccgcttcaaccaaaccgaacgcggcagccgcagcgtgtatgtgtttgagcagcccgaatcgcgcattacgccgcttatggagcatatcgagcaaacttatcccggtgtgcgttcgtacagcctgcccagcgtcggttggacgcattcagacggcacgcaagtcaaaccgcacattgagttcggcatcaaagccgaaggagaagccgtcaaccttttggacgcggcgtgggcggaagtattgcacagcttggacggattgggagcagagctgaaaaatcgggtaaactga

SEQ ID NO: 40821 - DNA, 1047 bp, Neisseria meningitidis
atgccgtctgaagccttcagacggcatcgtgcctatcgggagaataaattgcagcctttagtcagcgtattgatttgcgcctacaacgcagaaaaatatttcgcccaatcattagccgccgtcgtgaatcagacttggcgcaacttggagattttgattgtcgatgacggctcgacagacggcacacttgccattgccaaggattttcaaaagtgggacagccgtatcaaaatccttgcacaagctcaaaattccggcctgattccctctttaaacatcgggctggacgaattggcaaagtcaggaatgggggaatatattgcacgcaccgatgccgacgatattgccgcccccgactggattgagaaaatcgtgggcgagatggaaaaagaccgcagcatcattgccatgggtgcgtggctggaagttttgtcggaagaaaaggacggcaaccggctggcgcggcatcacaggcacggcaaaatttggaaaaagccgacccgacacgaagatattgccgactttttccctttcggcaaccccatacacaacaacacgatgattatgaggcgcagcgtcattgacggcggtttgcgttacaacaccgagcgggattgggcggaagattaccaattttggtacgatgtcagcaaattgggcaggctggcttattatcccgaagccttggtcaaataccgccttcacgccaatcaggtttcatccaaatacagcatccgccaacacgaaatcgcgcaaggcatccaaaaaaccgccagaaacgattttttgcagtctatgggttttaaaacccggttcgacagccttgaataccgccaaataaaagcagtagcgtatgaattgctggagaaacatttgccggaagaagattttgaacgcgcccgccggtttttgtaccaatgcttcaaacggacggacacgctgcccgccgacgcgtggctggattttgcggcagacggcaggatgcggcggctgtttaccttgaggcaatacttcggcattttgcaccgattgctgaaaaaccgttga

SEQ ID NO: 40822 - DNA, 642 bp, Neisseria meningitidis
atgccgtctgaaaaaccaatgaacagaagaatcttcctcctcggcacaggcgcgttgcttcttaccgcctgcggcagaaaatccgcccgaacccacgccaaaattcccgaaagaagcaccgtgcttgccttgggcgattcgctcaccttcggctacggcgcaaaccccggcgaatcctaccccgcgcaactgcaaaaactgacgggttggaatattgtcaacggcggcgtatcgggcgatacatccgcgcaagccctgtcacgcctgcccgcgctgttggcacgcaaacccaagcttgtgattgtcggcataggcggcaacgactttctgcgcaaagttcccaaggagcagacccgcgccaatatcgcgaaaatcatcgaaaccgtgcagaaggaaaacatccccgccgtcctcgtcggcgtgccgcacattaccttgggtgcgttgttcgggcatttgagcgatcatccgctgtatgaggatttgtccgaggaatacggcattccgctgttcggcggcgcgtgggcggaaattttgggcgataataatctgaaatccgaccaaatccacgccaacggcaaaggctatcggaaatttgccgaagatttgaatcaatttttgagaaaacaggggtttagataa

SEQ ID NO: 40823 - DNA, 1728 bp, Neisseria meningitidis
atgcagttatcaggcgcgcaaatcatagtgcagagtctcaaagccgaaggtgtcgagtacgttttcggttatcccggcggtgcggttatcgaaatctacgatgcccttttccaactcaataaattcaagcacattctgacccgtcacgagcaggcggcagtacacgcggcagatgcgtatgcgcgcgtcagcggtaaggtgggcgtggcattggttacatccggcccgggcgttaccaatgcactgaccggtattgctactgcctatacggattcgattccgatggtggtcatcagcgggcaggtaggcaattccctgattggtacggatgcgttccaagaagttgatacggtgggtattacccgtccgtgcgtcaaacacaatttcctggttacggacatcaatgagttggcggaaaccattaaaaaggcgttccaaattgccgcaggcggccgaccggggcccgtggtggttgatgtcccgaaagatgttacgcaggcgatggcgaaattcagctatcctcaggaagacatttttatccgttcgtatcaaccggttgttcaagggcatatcggtcagattaaaaaggccgtgcagatgttggcatctgccaaacgtccggtcgtctattttggcggcggcgtggtgttgggtaatgcttctgaagagctgacccgatttgtccgaatgacgggtgctccgtgcacgggtacgctgatgggcttgggcgcttatccttccggcgaccgccaattcctcggtatgctcggtatgcacggtacttacgaggcaaaccttgccatgcagaatgcggatgtcgttcttgccgtaggtgcgcgttttgacgaccgtgtggtttccgtaccgtccaaatttttcgagaaggcgaagaaggttatccatatcgatgtcgatccttccagcatcgccaaacgcgtgaaggcggacattccgattgtcggcgacgtgaaaaacgttttgtccgagatggttgcgctgtggcaaaaacaagagtccgtgccgtctgaagatactttgggcaaatggtggaaaaccatagaggaatggcgttcccgagattgcttgtggtttgacaacggcagcgaaattatcaagccccaatatgtgattcagaagcttgccgagattaccggcaattcggcaatcatcacatcggatgtagggcagcatcaaatgtttgcggctcaatattatcccttcgaacgtccgcgccaatggctcaattccggcggtttgggtacgatgggcgtgggtctgccttatgcgattggtgcaaaacttgccgccccggatcaagacgtattctgtatcaccggcgacggctcgatccagatgaacatccaagagttgtccacctgtttccaatatcggattccggttaacgtcattacgctgaacaacggttatctcggtatggtacgccagtggcaggaaatatattacggcggccgagagtcggaaacttatttcgattctttgcccgatttcgtcaaacttgccgaggcatacggtcatatcggtatccgcgtggacaagaagtctgatgtggaaggtgcgttgttggaagcattgaaccaaaaagacaggctggtgtttatcgacttcctgaccgaccagaaacagaatgtgatgcccatggtcggcaacggcaaaggtttggacgaaatggtacttccgccgcatatgcgtgcggacgaaaaggcgtaa

SEQ ID NO: 40824 - DNA, 651 bp, Neisseria meningitidis
atgatccgtttcgaacaagtttccaaaacctatcctggcggttttgaagccctgaaaaacgtcagcttccaaatcaacaaaggcgaaatgatatttatcgcaggacactccggttcgggcaaatccaccgtcctcaagctgatttcgggcatcaccaagccgagcaggggcaaaatcctgtttaacgggcaggacctcggcacattgtccgacaaccaaatcggctttatgcgccaacacatcggcatcgtgttccaagaccacaaaatcctctacgaccgcaacgtcctgcaaaacgtcatcctgccgcttcggattatcggctatccgccgcgcaaagccgaagaacgcgcccgcatcgccatcgaaaaagtcggcctgaaaggacgagaattggacgatcccgtaaccctctccggcggtgaacaacaacgcctgtgcatcgcccgcgccgtcgttcaccagcccggcctgctgattgccgacgaaccctccgccaacctcgaccgcgcctacgcgctcgatattatggaattgttcaaaaccttccacgaagcgggaacaaccgtcatcgtcgccgcacatgacgaaaccctgatggcggactacggacaccgcatcctgcgcctctcgaaaggacgactcgcatga

SEQ ID NO: 40825 - DNA, 1173 bp, Neisseria meningitidis
atggcaacacatgcagatgaaacgacaattcaaaacagacaagaagccaatagcgcaaaagtcaaacgcaaacgccgcctgacggcattgacgctgctgttcgcgcttgccgccgtagccgccgggtcggcgttttttttatggtggcagcacgaagaggaaacggaagacgcttatgttgccggacgcgtggttcaggttacgccgcaaaagggcggtacggtacggaaggttttgcacgacgatacggatgccgtgaaaaaaggcgacgtgctggcggtattggacgacgataatgatgtgctggcttacgagcgggcaaaaaacgagctgattcaggcggtgcggcaaaaccgccagcaaaatgccgccacttctcaggcgggggcgcaggttgctttgcgccgagcggatttggcacgtgcgcaggatgatttacgccgccggtctgctttagcggaatcgggcgcggtgtccgccgaagagctggcacatgcccgtgcggcagtgtctcaggctcaggcggcagttaaggcggctttggcggaagagtcttcggcacgtgcggctttgggtggtcaggtcgctttgcgcgaacagccggcggttcagacggcaatcggcaggttgaaagatgcgtggctgaaccttcagcggacgcaaatccgcgcgccgacggacggtcaggtggcaaagcgttcggtgcaggtcgggcagcaggtggcggcaggcgcgccgctgatggcggtggtgccgctgtcggatgtgtgggtggatgccaattttaaagagacgcagttgcggcatatgaaaatcggacaacctgctgagctggtgtccgatttgtacggcaaacaaattgtttatcgcggcatggtggcagggttttcggcaggtacgggcagcgcgttttcgctgattccggcgcaaaacgcaacgggcaactggattaaagtggtgcagcgcgtccccgtccgtatcgtgctgaaccgcgaagatgtggacaggcatccgttgcgtattggtttgtcgatgacggttaaagtggatacttctgccgcaagcgcgcctgtttcaaaaacgccgggtgcggcattgccggaaatggaaagtaccgactggtcggaagtcgatcggacggtcgatgaaatcctcgggcaatccgcgccctga

SEQ ID NO: 40826 - DNA, 633 bp, Neisseria meningitidis
atgaccctacgttacgaaatcttccccgttacccccttccgccaaaactgcaccctgatttgggacgacgaaagtggcgaagccgtcctgaccgatgtcggcggcgatgtgccgttcctgctgcaagcgttggcaaaccgcaaacttacgctcacggcaatctggctgacgcacggccatctcgatcacgcgggcggcgtggtcgaaatgttgaaaacgcataaagtccctgtcctcgggccgcatccggacgatgaattcctgctccaatcgctgccgcaaaccaccgcgcaatacggatttcccgtctcgcccgcctttgcgccgaaccgttggctcgaagaaggcgaaacgctcacggtcggacgctatgcctttcaagtgctgcatattccgggccatacgccgggacatatcgtcttttattgtgccgaggcggaattgctgattgcgggcgacgtgctgttttacgaaaccataggcagaaccgattttccgcgcggcaaccacgccgacttaatcaataatatccgcaacaaattattcacccttcccgaaaccgtgcaagttgtcgccggacacgggcgtatgacttccatcggacacgaaaagcggcacaatccgttcttctaa

SEQ ID NO: 40827 - DNA, 960 bp, Neisseria meningitidis
atgtccaaaaaaaccaaacaagaactcgaaaacaacaaactcagcaaacgcctgcgccacgccgtcggcgacgcgattaacgatttcaacatgatcgagccgggcgacaaaatcatggtctgtctctccggcggcaaagacagctacgccctgttagacatcctgcgccagctccaagccagcgcgccgattgatttcgaactggtcgccgtcaatctcgaccaaaagcagccgggtttccccgaagaagtattgccgacctatctcgaaagcataggcgtgccgtacaaaatcgtcgaagaagacacctactccaccgtcaaacgcgtattagacgaaggcaaaacgacttgttcgctgtgcagccgcctgcgccgcggcatcctctaccgcaccgcaaaagaattgggctgcaccaaaatcgccttaggacaccaccgtgacgacatccttgccaccatgtttttaaatatgttttacggtggaaaactcaaagccatgccgcccaagctggtgagcgacaacggcgaacacatcgtcatccgtccgctggcgtatgtaaaagaaaaagacttaatcaaatacgccgaattaaaacaattccccatcatcccgtgcaacctctgcggctcgcaacccaacctgcaacgccaagtcatcggcgatatgctgcgcgattgggacaaacgctttcccggccgcatcgaatcgatgttctccgccctgcaaaacgtcgtcccttcccaccttgccgataccgaactcttcgactttgccggattggaacgcggtcaaaccctgaaacacggcggcgatttggcgtttgacagcgaaaaaatgcccgaacgtttttcagacggcagcgaagaagacgaaagcgaaatcaaaatcgcgccgcaaaaagccgaacgcaaagtcatcaacattctggcgaacaagccgaaaacctgcggcgcgtaa

SEQ ID NO: 40828 - DNA, 774 bp, Neisseria meningitidis
atgagtgcgaacatccttgccatcgccaatcagaagggcggtgtgggcaaaacgacgacgacggtaaatttggcggcttcgctggcatcgcgcggcaaacgcgtgctggtggttgatttggatccgcagggcaatgcgacgacgggcagcggtatcgacaaggcgggtttgcagtccggcgtttatcaggtcttattgggcgatgcggacgtgaaatcggcgacggtacgcagcaaagagggcggatacgctgtgttgggtgcgaaccgcgcgctggccggtgcggaaatcgagctggtgcaggaaatcgcccgggaagtgcgtttgaaaaacgcactcaaggcagtggcggaagattacgactttatcctgatcgactgtccgccttcgctgacgctgttgacgcttaacggcttggtggcggcgggcggcgtgattgtgccgatgttgtgcgaatattacgcgctggaagggatttccgatttgattgcaaccgtgcgcaaaatccgtcaggcggtcaatcccgatttggacatcacgggcatcgtgcgcacgatgtacgacagccgcagcaggctggttgccgaagtcagcgaacagttgcgcagccatttcggggatttgctttttgaaaccgccatcccgcgcaatatccgtcttgcggaagccccgagccacggtatgccggttatggcttacgacgcgcaggcaaagggtaccaaggcgtatcttgccttggcggacgagctgatggcgagggtgtcggggaaatag

SEQ ID NO: 40829 - DNA, 702 bp, Neisseria meningitidis
atgttcagacggcatcggcatttgaaaaatatgcagattaaaaaaatcatgaaatggcttcccgtcgccctgtcgcttttgggcgcgttgggttatacggggtacggcagcgaggcggtgcggacggcggttgccgtactcgacgtactcggcgcggcaggggacgcgggttccgacgcgcccgcccgccgccgagcatcggcgaaatccggccaccgctacacaggcacggtgtccaaagtctatgacggcgacacccttcacgttatcgacggcgacggcgcgaaacacaaaatccggatggcgtatatcgacgcgccggagatgaaacaggcttacggcacgcgttcgcgcgacaacctgcgtgcggcggcggaaggcaggaaagtcagcgtgcgcgtgttcgacaccgaccgctaccagcgcgaagtggcgcaggtttctgtcggcaaaaccgatttgaacctgatgcaggtgcaggacggggcggcgtggcattataaaagttatgctaaagaacagcaggataaggcggattttgccgattatgccgacgctcaaattcaggcggaaagggaacgcaaaggattgtggaaagctaaaaatccgcaagcgccgtgggcgtaccgccgagcaggcaggagcggcgggggcaataaggattggatggatgccgtgggcgaatggttgggcatttggtaa

SEQ ID NO: 40830 - DNA, 1155 bp, Neisseria meningitidis
atgactgaaactactcaaaccccgactttcaaacctaaaaaatccgttgcgctttcaggcgttgcggccggtaataccgctttgtgtaccgttggccgtaccggcaacgatttgagctatcgcggttacgacatcttggatttggcacaaaaatgcgagtttgaagaagtcgcccacctgctgattcacggtcatctgcccaacaaattcgagctggccgcttataaaaccaagctcaaatccatgcgcggcctgcctatccgtgtgattaaagttttggaaagcctgcctgcacatacccatccgatggacgtaatgcgtaccggcgtatccatgctgggctgcgttcatcctgaacgtgaaagccatccggaaagtgaagcgcgcgacatcgccgacaaactgatcgccagcctcggcagtatcctcttgtactggtatcaatattcgcacaacggcaaacgcattgaggttgaaagcgacgaagagaccatcggcggtcatttcctgcaactgttgcacggcaaacgcccaagcgaatcacacatcaaagccatgcacgtttcactgattctgtatgccgaacacgagttcaacgcttctacctttaccgcccgcgtgatcgccggtacaggctctgatatgtactccagcattaccggagcaatcggcgcgttgaaaggtccgaaacacggcggcgcgaacgaagtggcttacgatattcaaaaacgctaccgcaatgccgacgaagctgaagccgacatccgcgaacgcatcggccgcaaagaaatcgtgatcggtttcggtcatccggtgtacaccatttccgaccctcgcaacgttgtcattaaagaagtggcacgcggtttgagcaaagaaaccggcgatatgcgcctctttgacattgccgaacgtttggaaagcgtgatgtgggaagagaaaaaaatgttcccgaatctggactggttctctgccgtttcctaccaaaaattgggcgtaccgaccgctatgttcacaccgctgttcgtaatttcccgtacaaccggttggagcgcacacgttcttgagcaacgcaaagacggcaaaatcatccgtccgagcgcaaactacacgggccctgaagatttggcgtttgtggagattgaagaacgctga

SEQ ID NO: 40831 - DNA, 1284 bp, Neisseria meningitidis
atgaaccgtaacgaaattttattcgaccgtgccaaagccatcatccccggcggcgtgaattcccccgtccgcgcattcggcagcgtcggcggtgtgccgcgctttatcaaaaaagccgaaggcgcgtatgtttgggacgaaaacggcacgcgttataccgactatgtcggttcgtgggggcccgcgattgtcggacacgcgcaccccgaagtcatcgaagccgtgcgcgaagccgcgttgggcggtttgtcgttcggcgcacccaccgaaggcgaaatcgccattgccgaacaaatcgccaaaatcatgccgtccgtcgaacggctgcgccttgtcagctccggtaccgaagccaccatgaccgccatccgtctggcacgcggttttaccggccgcgacaaaatcatcaaatttgaaggctgctaccacggccattccgacagcctgttggtgaaagcaggcagcggtctgctcaccttcggcaatccttcttccgccggtgtgcctgccgactttaccaaacacactttagtcctcgagtacaacaatatcgcccaactcgaagaagcctttgctcaaagcggcaatgacattgcctgtgtgattttggagcctttcgtcggaaatatgaaccttgtccgcccgaccgaagccttcgtcaaagccctgcgcgaattgactgaaaaacacggcgcagtgttgatttacgacgaagtgatgaccggttttcgcgtcgcgctcggcggcgcacaatcgctgcacggcatcacgcccgacctgaccacgatgggcaaagtcatcggcggcggtatgccgcttgccgcgttcggcggacgcaaagacatcatggaatgtatttccccgctgggcggcgtgtatcaggcaggcaccttgtcgggcaacccgattgccgtcgccgcaggcttgaaaacgctggaaatcattcagcgcgaagggttctatgagaacctgactgccttgacccaacgcctcgccaacggtattgccgatgcggctaaagcacatggtgttgaatttacggcggacagcgtgggcggtatgttcggtctgtatttcgccgcacacgcgccgcgaaactatgccgatatggcgcgttccaatattgaaggcttcaaacagtttttccacgggatgctcgaccgcaatgtcgccttcggcccgtccgcttatgaagcaggtttcgtttccgccgcgcatacgcccgagctgattgacgaaacggttgcggttgcggttgaagtgttcaaggcgatggctgcatga

SEQ ID NO: 40832 - DNA, 3165 bp, Neisseria meningitidis
atgaataaaacttggaaacggcaggttttccgccataccgcgctttataccgccatattgatgttttcccataccggcggggggggggggcaggcgcaagcgcaaacgcaaacgcaaacgcataaatacgctattgtaatgaacgcgcaaaatctgcccgaggtaaagtgggggaatcaatatcagtcattgacgcacaaaagcaatgaacgcgaagttatccatacgagtggttttggtttggcaaaaaagtacattagtttctcattcaataataccgatgaagttgttgctgaaaaaaaagatgctgtcgttttcggcgcggcgacttatctgccgccctacggcaaggtttccggttttgataccactaagctgaccgagcgcaaaaatgccgttgatcagattggtacgacccaccctgggttagtaggctacagctacgaaggtagcacatgctccagcggaagttgtcctacagttgcctatagaacccaatttaccttcggcaattccagtttggcaaaaaagacaaacggcggcgggctggatatatacgaagacaaaagccgcgacaattcgcccatttacaaattgaaggatcatccttggttgggcgtgtctttcaatttgggcggagagagctccttcaaaccaaagagacaaggttctttggtatcttcttttagcgaggacgtgacgcagcaaaatggtgcggacagccaacacaaaggcaaaaacctcgtttatacgacagacgattacaagagtcagaataataaaaaccatcaggacaaacaccacgccgtcgccttttatctgaacgccaagctgcacctgctggataaaaaacacatcacaaatatcgcgcaagtcggaacagttgatttgggtaccttgaaaacacgcatcgagccgacggaagcatggaaaaaacagaataataactttttcagcggtagttggacgtatgaagagaaaggattagtcagcgtcaaactcatcttgccgcaagtcaaagcaggccgctgcgtcaacaaaaataaccccaatcccaacaaaaaagacctttcgccggcactgactgcccccgcgctgtggttcggagctgggcaaaatggtaaggcggagatgtattccgcttcggtttccacctaccccgacagttcgagcagccgcatcttccttcaaaatctgaaaagaaaaaccgaccacagcaaacccggtcgccattccctcgcaaccttgaataagtcggatattgaaagtaaagagccgagtttcacagggcggcaaaccgtcatccgattggatggcggcgtacatgagatcaaacttaaaggtaatgaggtcgaaggttttaagggaaacaacggcaacgcaactttcggcattgttaaggacttgggcgtcgatcctgatgccaatgagtggaaaaaagtgctgctgccttggacggttcgtgcttccaatgatgacggtcaatttaacacattcaacaaagaagaaaacaacggcaagccaaaatacagtcaaaaataccgcagccgcgacaacggcaagcacgagcgcaatttgggcgacatcgtcaacagccccatcgtggcggtcggcgggtatttggctacttccgccaacgacgggatggtgcatatcttcaaaaaaggcaacggggatgaccgcaactatagtctgaagctcagctacatccccggcacgatgccgcgcaaggatattgaaagcaaagactccacccttgccaaagagctgcgcgcctttgccgaaaaaggctatgtgggcgaccgctacggcgtggacggcggctttgtcttgcgccaagtcgaatggaaagggcaaaaccgcgtgtttatgttcggcgcgatgggctttggcggcagaggcgcatacgccttggatttgaccaaagccgacggcaatgacccgacaaaagcctctttgtttgatgtaaaaaataacggcaataatggcaataacggcaataatagcgtgaaattaggctacaccgtcggcacgccgcaaatcggcaaaacctacaacggcaaatacgccgctttcctcgcctccggttatgcgactaaacaaattgacagcggcgagaatacaaccgcgctgtatgtgtatgatttggaaggaaacggtacgaataatctgattaaaaaaatcgaagtatccggcggcaagggcgggctttcgtcccccacgttggtggataaagatttggacggcacgatcgatatcgcctatgccggcgatcgcggcggcagtatgtaccgctttgatttgagcggtcaagatcctagtcaatggactgtacgcactattttccaaggcacgaagccgattacttccgcgcccgccatttcccaactgaaagacaaacgcgtggttatcttcggtacgggcagtgatttgagtgaagaggatgtggacaatatggaagaacaatatatttacggtatcttcgacgacgatacagcggcgacgggtactgtaaacttcaccggtacgggaggcgggctgctcgagcaacaccttactgaggaaaataaaaccttattcctgaccgattataagcgatccgacggctcgggcagcaaagggtgggtagtgaaattgaaggacggacagcgcgttaccgtcaaaccgaccgtggtattgcgtaccgcctttgtaaccatccgcaaatataacgacggcggctgcggcgcgcaaaccgccattttgggcatcaataccgccgacggcggcaagctgaccaagaaaagcgcgcgcccgattgtgccagaagccaatacggctgtcgcgcaatattccggccataagaaaggcaccaacggcaaatccatccctataggttgtatgcaaaaaggcaatgaaatcgtctgcccgaacggatatgtttacgacaaaccggttaatgtgcgttatctggatgaaaagaaaacagacggattttcaacaacggcagacggcgatgcgggcggcagcggtatagaccccgacggcaagcgtgccggcaaaaacaaccgctgcttctcccaaaaaggggtgcgcaccctgctgatgaacgatttggacagcttggacattaccggcccgacgtgcggtatgaaacgaatcagctggcgtgaagtcttctactga

SEQ ID NO: 40833 - DNA, 234 bp, Neisseria meningitidis
atgtggcacatcgtcgccatcggctatctttttgttgccgttatgtattccgccgcgcagccgagtattgcgcgctccttgatttatttggttttttgggcggtgctgcccaccgtgttcacggtcttcgtcgtaaccgtccgccgccgcaaccgcctgatgaaacggcaggaacaggcagaattcgaacagcagcgcgcacaacggcaaaaagacagcggcacaaaaccctga

SEQ ID NO: 40834 - DNA, 1512 bp, Neisseria meningitidis
atgaaatggttgaaacgcctgacggtcattgtcgggactttttaccgctatcggctggcaggtctgtgtgcttcgctgatgggtagcggttggatatgcgctctgctgaaaatgatgccgcagtcgtccaaattgaaaaacgaaccgcctgccgtccgtctgcgccttgccttggaaagcctggggccgattttcatcaagttcgggcaggttttgtccacacgccccgatttgattccgcacgattacgccgtcgaactggcaaagttgcaagacaaagtgccgccttttgacgcgcggctttcgcgtgaacaaatcgaaaaatcgctgggccagcccatcgaaaagctgtatgcggaatttgaaaccgaacccgtcgccagcgcgtccatcgcccaagtacacaaagcccgcctgcattcgggcgaacgagtggctgtcaaagttttgcgccccaaccttttgccccttatcgaacaggatttgtcgctgatgcgtttcggcgcggcttgggtcgagcgtctgtttgccgacggcaggcgtctgaagccgcgcgaagtggtggcggagttcgacaaatatctgcacgacgagttggatttgatgcgcgaagccgccaatgccggacaacttggacgcaatttccaaaacagcgatatgctgattgtgccgaaggtgttttacgactactgcaccagcgacgtgctgaccatcgaatggatggacggcacgccggtttccgacatcgccaaactcaaagcagacggcatcgatttgcacaaactcgccgattacggcgtggaaatctttttcacgcaggtcttccgcgacggctttttccacgcggatatgcaccccggcaatattttggttgccgccgacaaccgctacatcgccctcgatttcggcatcgtcggcacgctgaccgattacgacaaacgttatctcgccatcaacttcctcgcctttttcaaccgcgattaccggcgcgtcgccaccgcccacatcgaatcgggctgggtgcccgccgacacgcgcgcggaagagttggaagcggctgtccgcgccgtgtgcgaaccagtgttcaacaaaccgatttcgcagatttccttcggcttggtgctgatgcgcctgtttgaagtcagccgccgcttcaatgtcgaaatccagccgcagctggtattgctgcaaaaaacgctgctcaatatcgaaggtctgggtcgccaactcgatcccgatttggacttgtggaaaaccgccaaaccgtttttggtgaaatggatgaacgggcaggtcggccccaaagccctttggcgcaacctcaaaaacgaagcccccgactgggcgcaaatcattccttcattgccgcgcaaaatcaatgccttggtcgatgaggcgcgccggcaggaaatgcgtgatgcctatatccatttggtcaaagtgcagcagcggcaaagcctgtggctggctgtgattgcggttgttttgctgctgattttgcttttgaaatag

SEQ ID NO: 40835 - DNA, 441 bp, Neisseria meningitidis
atgattaaggaaaccctaatgcgcccaatcttcctatctttcgttttactccctattttgataaccgcctgcagcacaccggacaagtctgcccgatgggaaaatatcggcacaatctcaaacggcaatattcatacatatatcaataaagacagcgtgagaaaaaacggaaatctgatgattttccaagataaaaaagttgttaccaatctaaaacaagaacgttttgccaacatccccgcatacaagactgccattgccgagtgggaaatccactgcaacaacaaaacataccgcttaagttcgctacagttgtttgatacaaaaaacacggaaatttccacacaaaactacacagcctcttccctccgcccgatgagcatcctgtccgggacattaaccgaaaaacaatatgaaaccgtatgcggaaaaaaactctga

SEQ ID NO: 40836 - DNA, 4179 bp, Neisseria meningitidis
atgaactattcgtttaccgagaaaaaacgtatccgtaagagttttgcaaagcgggaaaatgttttggaagttcctttcttgctagcaacccaaattgattcttatgcgaagtttttgcagctggaaaatgcttttgacaaacgtaccgatgacggtctgcaggcggcatttaattctattttcccgattgtgagccataacggttatgcgcgattggagtttgtgcattacacattgggcgagcctttgttcgatattcccgaatgtcagttgcgcggaatcacttatgcagcccccttgcgcgcgcgtatccgtttggtgattttggataaggaagcatctaaaccgacggtaaaagaagttcgtgaaaacgaagtgtatatgggcgaaattccgttgatgaccccgagcggttcttttgtgattaacggcacagagcgtgtgattgtttcccagttgcaccgttcgcccggcgtgtttttcgagcatgacaaaggtaagacgcactcttccggcaaattgttattctccgcccgcatcattccctaccgtggttcatggttggattttgaatttgatccgaaagatttgctgtatttccgtatcgaccgccgccgtaaaatgccggtaacgattttgttgaaggctttgggctacaacaatgagcaaatcttggatattttctacgacaaagaaacgttctatttgtcttcaaacggtgttcaaaccgatttggtcgcaggccgtctgaaaggcgaaactgccaaggtcgatatcttggataaagaaggcaatgtattggttgccaaaggtaagcgcattactgcgaaaaatatccgtgatattaccaatgcaggcctgacccgtttggatgtagaaccggaaagcctgctgggcaaagcattggctgccgatctgattgattcggaaaccggcgaggtattggcttctgccaatgatgaaattacagaagagttgttggccaaatttgatatcaacggcgtaaaagaaattacgaccctttacatcaatgagttggatcagggtgcttatatctccaataccttgcgtacggatgagactgccggccggcaggcggctcgtgttgcgatttaccgtatgatgcgtccgggcgaaccgcccactgaagaggcggtcgagcaattgtttaaccgcttgttcttcagtgaagacagctacgatttgtcccgcgtaggccgtatgaaatttaatacgcgcacatacgaacaaaaactgtccgaagcccaacaaaactcttggtacggccgcctgctgaacgaaacgtttgccggtgctgccgacaaaggcggttatgtcctgagcgtcgaagatattgtcgcctcgattgcgactttggtcgagttgcgtaacggccatggcgaagtggacgatatcgatcacttgggcaaccgccgagtacgttcggtaggcgagctgactgaaaaccaattccgtagcggtttggcccgtgtggaacgtgccgtaaaagaacgtttgaatcaggcggaatcagaaaacttgatgccgcacgatttgattaatgcaaaacctgtttctgccgctattaaagaattcttcggctccagccaattgagtcagtttatggatcagaccaaccccttgtctgaagtaacccataaacgccgtgtatctgcattgggtccgggcggtttgacccgcgaacgtgcaggatttgaggtgcgggacgtgcatccgacccactacggccgcgtatgtccgattgaaacgcctgaaggtccgaacatcggtttgatcaactcattgtccgtttatgcgcgcaccaatgattacggtttcttggaaacgccttaccgccgcgttatcgacggcaaagtaaccgaggaaatcgattacttgtctgccatcgaagaaggccgctatgtgattgcacaggcgaatgccgatttggattcagatggcaatctgattggcgatttggttacctgtcgtgaaaaaggcgaaaccattatggcaacgcccgaccgcgtccaatatatggacgtggcaaccggccaggtggtatccgttgcggcatccctgattccgttcttggaacacgatgacgcgaaccgcgcattgatgggtgcgaatatgcaacgtcaggcagtgccttgcttgcgtcctgaaaaaccgatggtcggtaccggtatcgagcgttccgttgccgttgactctgctactgcaatcgttgcccgccgaggcggcgtggtcgagtatgtcgatgccaaccgtgttgtgattcgtgtccatgacgacgaagcgactgccggcgaagtgggtgtcgatatttacaacttggttaaatttacccgttccaatcaatctactaacatcaaccaacgtccggctgtcaaagcaggcgatgttttgcaacgcggcgatttggtggccgatggcgcgtccaccgatttgggcgaattggctttgggtcaaaatatgactatcgccttcatgccgtggaacggttacaactacgaagactcgattctgatttccgaaaaagtggctgcggacgaccgctatacttcgattcacattgaagaattgaatgtcgttgcccgcgataccaagctgggtgcggaagacattacccgcgatattccgaacttgtccgagcgtatgcaaaaccgtttggacgaatccggtatcgtttacatcggtgcggaagtagaagccggcgatgtgttggtaggcaaggtaacgcctaaaggcgaaacccagctgacgccggaagaaaaactgctgcgcgccatcttcggtgaaaaagcatctgacgtaaaagatacttcattgcgtatgcctaccggcatgagcggtaccgttatcgacgttcaagtcttcactcgtgaaggtattcaacgcgacaaacgtgctcaatccattatcgattccgagttgaaacgctaccgtttggatttgaacgaccaattgcgtattttcgataacgacgcattcgaccgtatcgagcgtatgattgtcggtcagaaagccaacggcggcccgatgaagctggccaaaggcagtgaaatcacgaccgaatatctggcgggtctgccgagcaggcacgattggttcgatatccgtctgaccgatgaagatttggccaagcagttggaactgattaaagtgagcctgcaacaaaaacgcgaagaagcggacgagttatacgaaatcaagaagaaaaaactgacccaaggcgacgaattgcaacccggcgtacaaaaaatggtgaaagtttttatcgccatcaaacgccgtctgcaagccggcgacaaaatggcgggccgccacggtaacaaaggcgtggtatcgcgcattctgccagtggaagacatgccttacatggcggacggccgtccggtagacatcgtactgaacccattgggcgtaccttcccgtatgaacatcggtcagattttggaagttcacttgggttgggcagcaaaaggtatcggcgagcgtatcgaccgtatgctgaaagagcaacgcaaagccagcgagttgcgcgagttcttgaacaaactctacaacggcagcggtaagaaagaagatttggatgccctgactgatgaagaaatcatcgaactggcctccaacctgcgcaaaggtgcatctttcgcctctcctgtattcgacggtgcgaaagagtctgaaatccgcgaaatgctgaacttggcttatccgagcgacgatcctgaggttgaaaaactgggcttcaacgacagtaaaacccaaatcacgctgtatgacggccgttcaggcgaagcatttgaccgcaaggttacagtaggtgtgatgcactatctgaaactgcaccacttggttgacgaaaaaatgcacgcgcgttctaccggtccgtacagtctggttacccagcagcctttgggcggtaaagcccagttcggcggccaacgtttcggcgagatggaggtttgggcattggaagcatacggcgcggcatacgcgctgcaagagatgctgactgtgaagtctgacgacgtgaacggccgtaccaaaatgtacgaaaacatcgtcaaaggcgaacacaaaatcgatgccggtatgcccgagtccttcaacgtattggtcaaagagattcgctcactgggcttggatatcgatttggaacgttactaa

SEQ ID NO: 40837 - DNA, 396 bp, Neisseria meningitidis
atgccgtctgatgtcggaatgcggcttcagacggcattcaaacggaagttaaacatgaaaaaaatattttattttctgatggttgttttttctaccagtgtatgggcaggggatgctgaagacaatttgctcagtatccaatccggttaccgcgccttattgcaaaaacaaaacaggcttgacggaaaaattatcgggatgcagtcggatttggaagatgcgcgcagacggttgcaggcggctcaggcagacatcgcccgtttggaagcggaaattcctgcagcaatggcgcaaaaagcccggcaggctgaagagctgaggcaaatcggagtgcgtttggaccatgcttggaatgcggtttacggcgcagggggaacgaaggcgtcggggaattga

SEQ ID NO: 40838 - DNA, 906 bp, Neisseria meningitidis
atggggaagggaggggatattgtggtcggtaacggcaaaaaatatgccgcaccattgctggtgctgggttgcgtggtgttcggtctgggcagtctgattgtcagatccgtccccgtcggttcgtatgcaatcgcattttggcggttgctgatttcggtgttcgtattttggtttttagcacggtttttcgggcaaaaattcccaaaaaacaggaaaaccgtccgatatgccctgacggcgggcgtgtttctcgctttcgatttggcgttgtggcacgaaagcatacacgcggtcgggccgggtatttccaccctgctcaacagcctgcaaatctttttcttgtcggcaatcggtgttttctttttcggcgagcgtttgagcgggctgaaaaaggcaggcttaatatcggcagttgccggcgtggcgatgattgccggtgcggaattcggctacaacggtaatgcggtttggggattcgtcagcggtttggtatcgggactgatgctcgccctgtcgatggtgttcgtccgcaaaacccatgaaatcgagccggtggcgcttttcccttcaatgatgattttgagtttgggcggcgcggtatcgctggttgttccggcattgctgatggatggcggcgcgctttatccgacgacttggaaagatgcgggtttggtgcttgtgtacggcgtggtgatgcagtgcttcgcgtgggcgatggttgcctatgcgattccgctgctttcgctgtcgctgacggggctgctgcttttgtccgaaccggttgccgccctgttcatcgattatttcgagttgggcaaaccgattgaaggcgtgcagtgggcaggggtggcgctgacgctttcggcaatttacctcggttcgctgaaacagcagtccgagccttga

SEQ ID NO: 40839 - DNA, 777 bp, Neisseria meningitidis
atggcagcattcaatacccaaaaagtattgtccgtacaccactggacagacgcatattttacctttacctgcacccgcgacgaatcgttgcgctttgaaaacggacagttcgttatggtcggattgatggtggacggcaagccgctgatgcgcgcatacagcgtcgcctccgccaactgggaagaacacctcgaatttttcagcattaaagtccaagacggtccgctgaccagccgcctgcaacacctcaaagtcggcgacgacgtgttaatcagcaaaaaaccgaccggaaccctggttgccggcgacctgaatccgggcaaacacctttacttgttgagcaccggtaccggcatcgctcctttcttgagcatcaccaaagaccccgaaatttacgagcaatttgaaaaaatcatcctcgtacacggcgtgcgctacaaaaaagatttggcgtactacgaccgctttaccaaagaattgcccgaacacgaatacctcggtgacttggttaaagaaaaactgatttactacccgattgtttcccgagaagaattcgaacaccacggccgcctaaccgacctgatggtgagcggcaaactgtttgaagacatcggcctgcccaaaatcaacccgcaagacgaccgcgcgatgctgtgcggcagccccgcgatgctgaaagacacctgcaaagttttggacgatttcggtctgaccgtctccccgaaaacaggcgtgcgcggcgactacctgattgagcgtgcgtttgtagatcaataa

SEQ ID NO: 40840 - DNA, 1254 bp, Neisseria meningitidis
gtggacaaactgaaaatctccgcaaacggcccgctcaacggggaaataacggtctcgggcgcgaaaaacgcggcattgccgctgatgtgcgcgggtttgctgacatcgggtacgttgcgcctgaaaaacgtccctatgctggcagatgtgaaaaccacgcaaaagctgcttcaggggatgggcgcgcgcgtcctgaccgacaatatcagcgaatttgaaattaacggcggcacggtaaacaatacctgcgccccttacgaattggtacggacgatgcgcgcctcgattttggtgctgggcccgacgctggcgcgtttcggcgaggcgcaagtcagcctgccgggcggctgcgccatcggttcgcgccccgtcgatcagcatttgaaaggcttggaagcgatgggtgctgagattgttatcgaacacggttacgtcaaagccaaaggcaaactcaaaggtacgcgcgtggcgatggatgtcgttaccgtcggcggcacggaaaacctgctgatggcggcgactctggcggaaggtacgacggttttggaaaactgcgccatcgagcccgaggtggtcgatttggcggaatgcctggttaaaatgggcgcgaaaatcagcggcatcggaacatcgaccatgatcgtggaaggtgtggacgagctgcacggctgcgaacacagcgtcgtccccgaccggatcgaggcggggacgttcctgtgcgcggtggcgataaccggcggcagggtggttttgcggaatgccgccccgaaaacgatggaagtggtgttggacaaactggttgaggcaggtgcggtgattgaggcgggcgacgattggattgccatcgatatgcgtcaacgtccgaaggcggtggacatccgcacggtcgtccaccccggcttccccacggatatgcaggcgcagtttatggcattgaatgccgtggcggagggaagctgccgcgtggtggaaacgatttttgaaaaccgctttatgcacgtccccgagttgaatcgaatgggggcgaacattacaaccgagggcaatacggcatttgtgcagggtgtggaacagctttccggcgcggtcgttaaggcgacggatttgcgtgcgtccgccagcctcgttatcgccggtttggcggcgcgcggcgaaaccgtggtcgaacagatttaccacttggatcgcggttatgaaaatattgaaaaaaaactcggcagcgtcggcgcgaaaatcgagcgcgtatccggctga

SEQ ID NO: 40841 - DNA, 1104 bp, Neisseria meningitidis
atggaagccgaagtaatcaaccagctcaacaataccctgaatgatttggaaaagcgcagcgaagacatccgagtttatatggattatcagggtaagaaagaccgattggaagaagttgtcggtctttccgaagaccccgaactttggaacgacccgaaacgcgcccaagaaatcggcaaagagcgcaaaatcctcgaaggcatcgtgttgacgctcgacaacatcgcttcgggcatcgaagacaaccgcatgctgattgaaatgaccgtcgaagaaaacgacgaagaaggttttgccgccgtgcaggaagatgtggcggggctggaaaaacagatggcggatttggagttcaaacggatgttcaaccagcccgccgacccgaacaactgctttatcgacatcaccgcaggcgcgggcggtacggaagcggaagactgggcgggtatgctgttccgtatgtacagccgctacgccgagcgcaaaggcttcaaaatcgaaatcctcgaagaagacgacggcgaaatcgcgggcatcaaccgcgcgactatccgagtggaaggcgaatacgcctatggtttgctgcgtaccgaaaccggcgttcaccgcttggtgcgctattcaccgtttgactcgaacaacaaacgccatacttcgtttgcctccgtgttcgtttaccctgaaatcgatgattccattgaaatcgaaatcaaccccgccgatttgcgtatcgacacctatcgcgcatcgggcgcgggcggtcagcacatcaacaaaaccgactccgccgtgcgtattacccacgagccgacggggattgtggtgcaatgtcaaaacgaccgttcgcaacacgccaacaaagcggccgcgatggaaatgttgaaatccaaactgtatgaattggaaatgcgcaaacgcaacgaagagaaacaggcgttggaagaaggtaaatccgatgtaggttggggcagccaaatccgttcgtatgttttggattcctcacgtatcaaagacttgcgtacaggctacgaagtcggcaacaccaaagccgtattggatggcgatttggacggctttatcgaagccagcctgaaacagggcgtgtag

SEQ ID NO: 40842 - DNA, 204 bp, Neisseria meningitidis; identical to SEQ ID NO: 37144

SEQ ID NO: 40843 - DNA, 957 bp, Neisseria meningitidis
atgaaagtcctctttatcgccgacccgatggcaagtttcaaaacctacaaagacaccacctacgccatgatgcgcgagatggcaaaacgcggttggcggctgtttcataccttgagcagcggattgtcggttaaaaacggtctggtggttgctgatgcgtctgcttttgagtttctcggcgcacaagacgaccacgacaaaaactggtttgccgccgccgacaaagttcagacggcattgaaagcatttgatgccgtgattatgcgtaccgatccgccgttcgatatgcaatacctctacgccacacagcttctgacgctggcggaacagcagggcgtgaaagtctttaacagcggacaggcgatgcgtgatttcaatgaaaaactggcgattttgaacttcagccgctttatcgcgcccacgctggtaacgacccgttccgccgatgtccgcgtatttttgaaagaacacggcgacatcatcattaaaccgctcgacggcatgggcggtatgggcatcttccgcctgaccgaaaaagaccccaacatcggcagcatcctcgaaaccctgatgcagcttgattcccgcaccattatggcgcaacgctacattcccgaaatcgtacacggtgacaaacgcatcctgattatcggcggcgaagtcgtcccctatgctttggcgcgtatcccgcaaaacggcgaaacacgcggcaaccttgcggcaggcgggcgcggcgtggcgcaggaattgggcggacgcgaccgcgaaattgccgaaacgctcgcccccgaactcaaacggcgcggtatcctgctggccggtttggacgttatcggcagcaacctgaccgaagtcaacgtaaccagcccgaccggattccaagaaatcatgaaacaaaaaggtttcgacgtggcggcaatgtttgccgatgccgttgccgcgtggtcggtacgttaa

SEQ ID NO: 40844 - DNA, 1569 bp, Neisseria meningitidis
atgagtcaaaccgatacgcaacgggacggacgatttttacgcacagtcgaatggctgggcaatatgttgccgcacccggttacgctttttattattttcattgtgttattgctgattgcctctgccgccggtgcgtatttcggactatccgtccccgatccgcgccctgttggtgcgaaaggacgtgccgatgacggtttgattcacgttgtcagcctgctcgatgctgacggtttgatcaaaatcctgacgcataccgttaaaaatttcaccggtttcgcgccgttgggaacggtgttggtttctttattgggcgtggggattgcggaaaaatcgggcttgatttccgcattaatgcgcttattgctcacaaaatctccacgcaaactcactacttttatggttgtttttacagggattttatctaataccgcttctgaattgggctatgtcgtcctaatccctttgtccgccatcatctttcattccctcggccgccatccgcttgccggtctggctgcggctttcgccggcgtttcgggcggttattcggccaatctgttcttaggcacaatcgatccgctcttggcaggcatcacccaacaggcggcgcaaatcatccatcccgactacgtcgtaggccctgaagccaactggttttttatggtagccagtacgtttgtgattgctttgattggttattttgttactgaaaaaatcgtcgaaccgcaattgggcccttatcaatcagatttgtcacaagaagaaaaagacattcggcattccaatgaaatcacgcctttggaatataaaggattaatttgggctggcgtggtgtttgttgccttatccgccctattggcttggagcatcgtccctgccgacggtattttgcgtcatcctgaaacaggattggtttccggttcgccgtttttaaaatcgattgttgtttttattttcttgttgtttgcactgccgggcattgtttatggccgggtaacccgaagtttgcgcggcgaacaggaagtcgttaatgcgatggccgaatcgatgagtactctggggctttatttggtcatcatcttttttgccgcacagtttgtcgcattttttaattggacgaatattgggcaatatattgccgttaaaggggcgacgttcttaaaagaagtcggcttgggcggcagcgtgttgtttatcggttttattttaatttgtgcttttatcaatctgatgataggctccgcctccgcgcaatgggcggtaactgcgccgattttcgtccctatgctgatgttggccggctacgcgcccgaagtcattcaagccgcttaccgcatcggtgattccgttaccaatattattacgccgatgatgagttatttcgggctgattatggcgacggtgatcaaatacaaaaaagatgcgggcgtgggtacgctgatttctatgatgttgccgtattccgctttcttcttgattgcgtggattgccttattctgcatttgggtatttgttttgggtctgcccgtcggtcccggcgcacccactttgtatcccgcaccttaa

SEQ ID NO: 40845 - DNA, 339 bp, Neisseria meningitidis
atgtcggatgaaagccctattatttttactgacagctgctgtgccaaagttgccgatttgattgccgaagaaaacaatcccgatttgaaattgcgggtttttgtcaatggcggcggctgttcgggtttccagtacggatttacttttgacgaaatcaaaaacgacgacgattttgaaattgagaaaaacggtttggtctttttggtcgatccgatgagctatcaatatctggtcggtgcggaaatcgactatacggaaaatttgcagggttcgcaattcgtcatccgcaatccgaatgcggaaacaacctgcggttgcggatcgtcgttttccgtatga

SEQ ID NO: 40846 - DNA, 1347 bp, Neisseria meningitidis
atgtcggataacgttccaacgattgcggcagtcgccaccgcgcccggacgcggcggcgtgggcgtgatacgcatatcggggaaaaacctgctgccgatggcgcaggctttgtgcgggaaaacgcccaagccgcgtaccgcaacctatgctgattttacggacgcggacggtcaggcaatcgacagcgggcttttgctgttttttgccgcaccggcaagttttacgggtgaagatgtcatcgagcttcagggacacggcgggccggtggtgatggatatgctgctgaaccgctgtttggaattgggcgcgcgccttgccgaaccgggcgagtttaccaaacgtgcgtttttaaacgacaaactggacttggcacaggcggaaggcgtggcggatttgattgacgcatccagccgttcggcggcgcgtctggcgttgcgctcgctcaagggcgatttttcgcggcggatacacggtctggtcgaagatttgattaccttgcggatgctggtcgaagcgacgttagattttcccgaggaagacattgattttctcgaagcggcagacgcacgcggcaaactggacggcttgcgccgcgccgtggatgatgtgcttgccaacgcgcagcagggcgcgattttgcgcgaaggtctgaatgtcgtattggtcggcgcgccgaatgtgggcaagtccagcctgttgaacgcgctggcgggcgacgaagtggcgattgttaccgatattgcgggtacgacgcgcgacgcggtcagggaacgtatcctgattgacggcgttccggtgcatattgtcgatacggcaggtttgcgcgagacggacgacgtggtcgaacgcatcggcatcgaacgcagccgcaaagccgtatccgaagccgatgtcgcgctggtgttggtcgatccgcgcgaaggcgtgaacgacaagacacgggcgattttggacgcgctgccgccggagttgaaacgcatcgaaatccacagcaaatccgatttgcacgcacacgcggcaggcgggttcggtacgggcgcggaaaccgtcatcgcgctgtcggcgaaaaccggcgacggcttggacgcgctgaaacggacgctgttgcgcgaggccggttggcagggcgaaagcgaagggctgtttttggcgcggacgcggcacgtcaacgcactcaaagcggcgcaggaagaattgtcgctggcggcattgtgcggcaaccatcaaatcgagctgcttgcggaacacttgcggctggcgcaggtcgcgtgcggcgaaatcacgggcgagtttacggcggacgacctgctcggcgtgattttttcgaggttttgcatcggaaaataa

SEQ ID NO: 40847 - DNA, 720 bp, Neisseria meningitidis
atgctgaccacaccgccgctcgcccccaaaaccgtcgccgccctgcacaggctcggtatccgtacgctcgaagaactgcggcaaaacggttcggtcaaagcctttctgctgctcaaagcatcgggtttgaccctcacgaaaagcacgctgtggcagcttgagtcgctgctgaacggcacactcccgcaagaaatcacgcaacacgacaaaacgcgcctttttgccgaattgaaaaaccatccgcccgtcgccgcctttccgccgcaggaagaaatggaacacttcatgcgcgaagcactgcgccaagcagaacaatccgccgctgacggcgaaatacccgtcggggcagtcatcgtttcagacggcaaaatcatcgcatcggcacacaacacctgcattgccgactgcaatgtcagccggcacgccgaaatcaacgccttggcacaggcaggcagcgaaatgcaaaactaccgccttgacggatgcgacatatatatcaccctcgaaccctgcgccatgtgcgcgtccgcactgatacaggcacgaatcaggcgcgtgatctacggggcggcagaacccaaaaccggcgcggcaggcagcatcgtcaacctgtttgccgacaaacgcctcaatacgcacaccgccatacggggcggaatcctgcaagaagaatgccgcgccgtgttaagccgtttttttcaaaacaaaagaaaaggttga

SEQ ID NO: 40848 - DNA, 729 bp, Neisseria meningitidis
atgactacttaccgtatcgcacccagcattttatcggcagactttgcccgcctcggagaagaggtggaaagcgtcattgcggcaggtgcagatctgatccattttgacgtgatggacaaccattatgtgccgaacctgaccttcggccctatggtttgcgcggcgttgaagccttatgcaagcgtgccgattgatgtgcatctgatggtcgaacccgttgacgacctgattcagtcgtttgccaaagcaggagcatcaatcatcacgttccatcccgaggcgagccgccatatcgaccgcagcttgagcctgattcgtgatatgggctgtcaggcggggctggtgttgaatccggcaacgcccgtatatctgttggaaaacgtattggacaggctggatatggttttgctgatgtcggtcaaccccggattcggcggacaaagcttcatcccgcacacccttgaaaaaatccgccgggtgcgggcgatgctggatcggtacgaagcacaaagcgggcggcacatcgccatcgaagtggacggcggcatcaaaaccgacaatattgccgccgttgcccgagctggtgcggatacctttgttgccggttctgcgattttcggcaaaccagactataaggcggtgattgatgcgatgagggcggaactggaaaaaagcggcaggctgaaccttgcgccaatgattgaaatagaaatgccgtctgaaaattag

SEQ ID NO: 40849 - DNA, 882 bp, Neisseria meningitidis
atgtgtatcgagatgaaatttatattttttgtactgtatgttttgcagtttctgccgtttgcgctgctgcacaagattgccgacctgacgggtttgcttgcctaccttctggtcaaaccgcgccgccgtatcggcgaaatcaatttggcaaaatgtttttccgaatggagtgaggaaaagcgtaaaaccgtgttgaaacagcatttcaaacacatggcgaaactgatgttggaatacggtttatattggtacgcgcctgccggacgtttgaaatcgctggtgcgctaccgcaataagcattatttggacgacgcgctggcggcgggggaaaaagtcatcatcctgtatccgcacttcaccgcgttcgagatggcggtgtacgcgcttaatcaggatatcccgctgatcagtatgtattcccatcaaaaaaacaagatattggacgaacagattttgaaaggccgcaaccgctatcacaacgtcttccttatcgggcgcaccgaagggctgcgcgccctcgtcaaacagttccgcaaaagcagcgcgccgtttctgtatctgcccgatcaggatttcggacgcaacgattcggtttttgtggattttttcggtattcagacggcaacgattaccggcttgagccgcattgccgcgcttgcaaatgcaaaagtgatacccgccatccccatcagggaggcggacaatacggttacattgcatttctaccctgcttgggaatcctttccgggtgaagatgcgcaggctgacgctcagcgcatgaaccgttttatagaggaacgcgtgcgcgaacatcccgagcagtatttttggctgcacaagcgtttcaaaacccgtccggaaggcagccccgatttttactga

SEQ ID NO: 40850 - DNA, 939 bp, Neisseria meningitidis
atgcaattcacatcattagaaatttgtgccggagcaggcggacaggctttgggcttagaaagggcaggcttttcccatgttgcgttaatcgaaatcgaaccgtcggcttgtcaaaccctacgtttaaaccgtcctgattggaacgttattgaaggagatgtccgcttgtttcagggcaagggatatgacggtattgatttattggccggcggcgtgccttgcccacctttttccaaagcaggtaaacaattaggaaaagatgatgaacgcgatttattccctgaggctattcgtctagctaaggaaactgaccctaaagccatcatgttagaaaatgtgcgagggttacttgacccaaaatttgaagattatcgcaaccatattacagaacaatttgccaagttgggttaccttggacaatggaaactactttatgctgccgattacggagtatcgcaactcagacccagggttttatttgttgcgttgaaaaacgaatacaccaattttttcaaatggcctgaaccaaattcggaacaaccgaaaaccgttggagaactgctttttgacttaatgtcagaaaataactggcagggggcgcataactggcgtttgaaggccgcgcagattgcaccgaccttggtcggcggttcaaaaaaacacggcggtgctgacttggggcctacacgatccaaacgcgcatgggcagagttgggtgtggatggttcaggtttgtggaatagtgcgccgcctgaagacttttcggggatgcctagattgactgcccgaatgacagcgcgtatccaaggatttcctgatgactggcaattttttggtaagaaaacgcctatgtaccgccaaatcggcaacgcttttcccccgccggtagccgaagcggtgggtcagcagattatcaaagccttaaaaaaggaaaattga

SEQ ID NO: 40851 - DNA, 2664 bp, Neisseria meningitidis
atgtccacccaattacacgatgttgaccctatcgaaacccaagagtggctggacgcgttaagctccgtcctcgaatatgaaggcggcgaacgcgcgcaatacctcttggaaaacctggtcaaatactgccgcgacaagggcgtacgtatgccacacggcacgaccaccccgtatttgaataccgtttcggttgaaaacgaaaaaggcattccgggcgaccaaaacatcgaacaccgcatccgcgcattcgtgcgctggaacgccgccgccatcgtattgcgcgccggcaagaaagatttggaactgggtgggcacatcgcatctttccaatctgccgccaccatgtacgaagtcggtttcaaccacttttggaaagccaaaggcgaaggcgaagaaggcgatttggtcttcttccaaggtcacgtcgccccgggcatctatgcacgcgcattcgtcgagggccgtctgaccgaagaccagctgaacaacttccgccaagaagtggacggacacggtctgccttcctatccgcacccccacctcttgcccgacttttggcagttcccgaccgtatccatgggcttggggcccatcatggcgatttatcaggcgcgtttcctgaaatacttggaatcgcgtggtttggcaaaaaccaaaggccgtaaagtatggtgtttctgcggcgacggcgaaatggacgaacccgaatctcaaggtgcaatcgcactggctgcacgcgaaggcttggacaacctgattttcgtcatcaactgcaatctgcaacgcttggacggtccggtacgcggcaacggcaaaatcatccaagaattggaaggcaactttgccggcgccggctggaatgtcgtcaaagtcatttggggccgccgctgggaccgcctcttggcgaaagacaaagacggtatcctgcgccaacgtatggaagaatgtttggacggcgactaccaaacttacaaatccaaagacggcgcgtatgtgcgcgaacacttcttcaatacgcccgaactgaaagcattggttgccgatatgaccgatgagcaactctgggcattgaaccgcggcggccacgacccgcaaaaagtgtacaacgcctacgaccgcgcagcgaaccatgccgacggcaaacctaccgtcatcttggcgaaaaccattaaaggttacggtatgggcgcatccggcgaaggtcagaacgttgcccaccaagccaaaaaaatggacaaagcgtccctgaaacaattccgcgaccgctttgacattccggttaccgacgaacaaatcgaaagcggcgatctgccttacctgacttttgcccccgatacggaagaatacaaatacctgcacgcacgccgcgatgctttgggcggctacctgccgcaacgcaaaccgacgcaggaagtattggaagtgcccgagctgtcagcattcgacgcacaactcaaatccagcggtgaacgcgagttctcgaccacgatggcattcgtccgcatcctgtccactttgctgaaagacaaaaaaatcggcaaacgcgtcgtacctatcgttcccgacgaaagccgtactttcggcatggaaggtatgttccgccaatacggtatttggaatccgaaaggtcagcaatatacccctcaagacaaagaccaactgatgttctataaagaatccgttgacggtcaaatcttgcaagaaggtattaacgaaccgggcgcgatggccgactggattgcggctgcaaccagctacgccaacagcaacttcgcgatgattccgttctacatttactattctatgttcggtttccaacgtatcggcgacttggcttgggcggcgggcgatatgcacgtgcgcggcttcctgctgggcggtactgccggccgtacgacgctgaacggcgaaggcctgcaacacgaagacggccacagccacatccaggccgacctgattccgaactgcgtatcttatgacccgactttccaatacgaagtcgccgtcatcgtacaagacggtctgcgccgtatgtatgccaataatgaagacgtgttctactacatcaccctgatgaacgagaactacacccatccggatatgcccgaaggtgcggaacaagacatcttgaaaggtatgtacctgctgaaagccggcggcaaaggcgacaagaaagtccaactgatgggttccggtacgattttgcaagaagtgattgccagtgccgagctgctgaaagccgacttcggcgtggaagcagacatttggtcttgcccatccttcaacctgctgcaccgcgacgctgtcgaggtagaacgcttcaaccgcctgcatccgctggaagccgaaaaagtacctttcgttacttcccaactgcaaggtcatgacggtccggttattgccgctaccgactatatccgcagctatgctgaccgtatccgcgcctacatcccgaacgactaccacgtcttgggtactgacggcttcggccgctccgacagccgcgccaacctgcgccgcttctttgaagtggatcgctacaacgttgccgtggcagcattgagcgcattggcggaacaaggcaaagtcagcaaagaaaccgttcaacaagccattgagaaatacggcatcaaagccgattcagctcctagctggaaacgctga

SEQ ID NO: 40852 - DNA, 750 bp, Neisseria meningitidis
atgaaagcactggtcgcagtaaagcgcgtagtggactacaacgtcaaagttcgtgtaaaagccgatggttcggatgtggatatcggcaatgtcaaaatgtcgatgaatccgtttgacgaaatcgctgtggaagaagctgtccgtttgaaagaagccggaaaagtaagcgaaatcgtagcggtttctttgggtgagaaaaaatgcgaagaaaccttgcgtacagctttggcgatgggtgccgaccgtgccattcatgttgaaaccgatactaaactggagtctctggccgttgctaagttgctgaaagccgttgcggacaaagaaaatccgcaaattttctttttgggcaaacaagcgattgatgatgatgccaatcaagtggcgcaaatgctggcagctttgctgaatgcggcgcaaggtacgtttgcttcaaaagtacacattgaaggtggtgaagtacagattgtgcgcgaaattgatggcggcgaagaaaccatagcattaaaactgcctgctgttatcagtgctgatttgcgtttgaacgagccgcgctttgtcaaactccccaatattatggcggcaaagaaaaaacctctggaaaaactggcgcctgccgatttggctaccgatattttacctcgtctgaaaacggtgaaatttgccgaacctaaggcgcgtcaggcaggcgtaaaagtagcaagcgttgccgaattggttgaaaaattgaaaaacgaagccaaagtgatttga

SEQ ID NO: 40853 - DNA, 966 bp, Neisseria meningitidis
atgagctacacgcaactgacccaaggcgaacgataccacatccaatacctgtcccgccactgcaccgtcaccgaaatcgccaaacagcttaaccgccacaaaagcaccatcagccgcgaaatcagacggcaccgcacccaagggcagcaatacagcgccgaaaaagcccagcggcaaagccggactatcaaacagcgtaagcgacaaccctataagctcgattcgcagctgattcagcacatcgacacccttatccgccgcaaactcagtcccgaacaagtatgcgcctacctgtgcaaacaccaccagatcacgctccaccacagcaccatttaccgctaccttcgccaagacaaaagcaacggcagcacgttgtggcaacatctcagaatatgcagcaaaccctaccgcaaacgctacggcagcacatggaccagaggcaaagtacccaaccgtgtcggcatagaaaaccgacccgctatcgtcgaccagaaatcccgtatcggcgattgggaagccgacaccattgtcggcaaaggacagaaaagcgcattattgaccttggtcgaacgcgttacccgctacaccatcatctgcaaattggatagcctcaaagccgaagacactgcccgggcagctgttagggcattaaaggcacataaagacagggtgcacaccattaccatggataacggcaaagagttctaccaacacaccaaaataaccaaagcattgaaagcggagacttatttttgtcgcccttaccattcttgggagaaagggctgaatgagaacaccaacggactcatccggcaatacttccccaaacaaaccgatttccgtaacatcagtgatcgggagatacgcagggttcaagatgagttgaaccaccgaccaagaaaaacacttggctacgaaacgccaagtgttttattcttgaatctgttccaaccactaatacactag

SEQ ID NO: 40854 - DNA, 765 bp, Neisseria meningitidis
atgaaacagaaaaaaaccgctgccgcagttattgctgcaatgttggcaggttttgcggcagccaaagcacccgaaatcgacccggctttggtggatacgctggtggcgcagatcatgcagcaggcagaccggcatgcggagcagtcccaaaaaccggacgggcaggcaatccgaaacgatgccgtccgtcggctgcaaactttggaagttttgaaaaacagggcattgaaggaaggtttggataaggataaggataaggatgtccaaaaccgctttaaaatcgccgaagcgtctttttatgccgaggagtacgtccgttttctggaacgttcggaaacggtttccgaaagcgcactgcgtcagttttatgagcggcaaatccgcatgatcaaattgcagcaggtcagcttcgcaaccgaagaggaggcgcgtcaggcgcagcagctcctgctcaaagggctgtcttttgaagggctgatgaagcgttatccgaacgacgagcaggcgtttgacggtttcattatggcgcagcagcttcccgagccgctggcttcgcagtttgcagcgatgaatcggggcgacgttacccgcgatccggtcaaattgggcgaacgctattatctgttcaaactcagcgaggtcgggaaaaaccccgacgcgcagcctttcgagttggtcagaaaccagttggaacaaggtttgagacaggaaaaagcccgcttgaaaatcgatgccattttggaagaaaacggtgtcaaaccgtaa

SEQ ID NO: 40855 - DNA, 507 bp, Neisseria meningitidis
atggctcacccgcaagaaatccgtgaaaagttacgccggctctatgtgagcggcgagcaaactttggaaacggcggccttgatgtgcgaaatcccgcagaccactgcgcgtgcgtggaaacgtgcggataaggaaaaaggcgacgactgggataagatgcgcgccgcctacactttggccggcggcggtattgaggatttgagccgcgcgatgttggccggttttatggtgcagtacaacagcacgatgacgatgctgcaggattcgagtaccgaagatttgcctccgtccgaccgcgccaagctgttggccagcctgaccgatgcgtttacgaaaaccgtatccgccaatgcccgtgtgatgccggaaacatcaaaactggcgacggctttggaattgattgagttcttgatggcgtttgtgcaagaaaaacaccccaaacatttgcctgcctttgtggaggtattggagccgtttggggtggaagtggagaagaagtttggttag

SEQ ID NO: 40856 - DNA, 1416 bp, Neisseria meningitidis
atgaacctgcatgcaaaggacaaaacccagcatcccgaaaacgtcgagctgctcagtgcgcagaagccgattaccgactttaagggcctgctgaccaccattatttccgccgtcgtctgtttcggcatttaccacatcctgccttacagccccgatgccaataaaggtatcgcgttgctgattttcgttgccgcactttggtttaccgaagccgtccacattaccgttaccgcgctgatgatccctatcctcgccgtcgtactcggtttccccgacatggacatcaaaaaggcgatggctgatttttccaacccgattatctacatttttttcggcggcttcgcgcttgccaccgccctgcatatgcagcggctggaccgtaaaatcgccgtcgccctgctgcggctgtcgcgcggcagtatgaaggccgccgtgctgatgttgttcctcgttaccgcctttctgtccatgtggatcagcaacaccgccaccgccgcgatgatgctgcctctggcaatgggtatgctgagccacctcgaccgggaaaaagaacgcaaaacctacgtcttcgtcctgctcggcatcgcctattgcgccagcatcggcggcttgggcacgctcgtcggctcgccgcccaacctgattgccgccaaagccctaaatctggacttcgtcggctggatgaagctcggcctgccgatgatgctgttgattctgcccttgatgctgctctccctgtacgtcatcctcaaacctaatttgaacgaacgcgtggaaatcaaagccgaatccatcccttggacgctgcaccgcgtgatcgcgctgttgattttccttgccacagccgccgcgtggatattcagctccaaaatcaaaaccgccttcggcatttccaatcccgacaccgttatcgccctgagtgccgccgtcgccgtcgtcgtcttcggcgtggcgcaatggaaggaagtcgcccgcaataccgactggggcgtgttgatgctcttcggcggcggcatcagcctgagcacgctgttgaaaacatccggcgcgtccgaagccttgggacagcaggttgccgccaccttttccggcgcgcccgcatttttggtgatactcatcgtcgccgccttcattatttttctgaccgagttcaccagcaacaccgcctccgccgcattgcttgtaccgattttctccggcatcgctatgcagatggggctgcccgaacaagtcttggtattcgtcatcggcatcggcgcatcttgtgccttcatgctgccggttgccacaccgcctaacgcgattgtgttcggcacgggcttaatcaagcaacgcgaaatgatgaatgtcggcatactgctgaacatcctctgcgtagtattggttgctctgtgggcttatgctgtactgatgtaa

SEQ ID NO: 40857 - DNA, 1110 bp, Neisseria meningitidis
atgttttcggacacagatatatccatgatggaaaccgccctccgacttgccgctttggggcgtttttccacttcgcccaatccgcgcgtcggctgcgttatcgcacacggcagccaagttgtcgggcagggcttccacgtcaaagcgggcgaaccgcacgccgaagtccacgccctgcatcaggcgggcgaaatggctcaaggcgcgaccgcctttgttaccctcgaaccatgcagccattacggacgcacaccgccctgcgccgaagcactggtgcgggcgggcgtgtcccgcgtcgttgccgccatgcgcgaccccaacccgctggttgcaggcaaagggcttgccctgctcgaagcagcaggcatcaagacggaatgcggtttactcgaacatcaggcaagggaactcaaccgaggcttcctgtcgcgcatcgaacgccgccgcccctttgtccgcctcaaatgcgccgtttcgctggacggcaaaaccgccctttcagacggcagcagcttttggattaccggcgaagacgcgcgtgccgacgtacaggttttgcgtgccgaaagctgcgcggtgctgaccggcatcggcacggtgttggcggacaatccccggctcaacgtccgcgcttttccaactttgcgccaacccgcacgcatcgttttagacagccgcctgcgcctgcccttggacagccaccttctgaccgacggacaatctccaacctacatcgccaccttggaacgcgatgaagacaaactccgcccctatcgcaaacacgcccacgtccgcatcctgatgccgtctgaaacggcaggcggcaaaatcgatttgaacagcctgatgcgcctgcttgccgacgaaggcataggggaactcatagtcgaagcaggctccgaactcacatctgcatttttggcagaagatttggcagacgaaatcgtgctgtaccgttcgcccaaaatcctcggcagcggcaaagacctgttttccctgcccgaaaaccgcgccgccctttccgcaccgcccttgtggacacccgtttcaagcgaaatcctcggacacgacatcaaaaccgtgttccgaaaaaacggcaacgccttttaa

SEQ ID NO: 40858 - DNA, 1176 bp, Neisseria meningitidis
atgcagaatatttttgaccctttggttattcgtggaaaatcccttacccccatcgtgcaaggcggtatgggggtcggtgtttccgcatcgggtttatccagcgcggtggcacgtgaaaacggtatcggaacgattgccagtgtggatttgcgccaccttcacgaagacctactcgccgaatcacaaatcaatccgagtgaagagaaatatacatctttgaactgtaccgcattagacagggaaatccaaaaagccaagagtgcttcagagggaaaaggactgattgcggtcaacgtgatgaaggcagtcaaagaccacgccgcgtatgtccgccaggcttgcgaatcaggggcggatgcggttgtaatgggtgccggtctgcctttagacctgccggaaatgaccgagggctatcataaatatgtcgcgctgctgccgattctgtccgaatcgcgcggtattaatatcgttttgaaacgttggatgaaaaaaggcatattgcccgatgcgattgtagtcgaacatcctgcccacgcggccggacatttgggtgcatcaaccgttgaaggcgtaaacgatgccaagttcgacttcaaacgcgtgattgaggaaacgtttgaagttttcaaaagtttagggctggaaagcgaaaaaatcccgcttattcttgcgggaggcatggcaaattttgaaaaagtcaaaaccgccctaaagaactggggagcatccgccgttcaaatcggtacggcttttgccgttaccgaagaaggagatgcacaccttaacttcaaaaaaacgctcgccggtgcggaaactgaaaaagtagtcgaatttatgtctgttgccggtttgccggcgcgcggtgtccgcaccaaattcctagacagctacatcaagcgtgaaagcaaacttcagacaaacgccaaagccgacccgcgccgctgtacccaaggtttaaactgcctaaccagttgcggtctgcgcgacgggctttccaaagccggacaattctgcattgatatccagcttgccgccgcattccgtggagaagtagataaaggcctgttcttcagaggtaaagacccgctgcccttcggcaatgccatccgcaccgtccgcgagacgatacaatatctgctgacagggagcgaacctgttgcaacagtaggacgctga

SEQ ID NO: 40859 - DNA, 969 bp, Neisseria meningitidis
atgaacgagaaaaccatcatccttgccaatccgcgcggcttctgcgccggagtggatcgggcaatcagtattgtcgaacgtgctttggaagagttcggcgcgccgatttatgtgcgccacgaagtcgttcacaacaaattcgtcgtggacaacctgcgtgaaaaaggtgcggtgtttattgaagacttggcggaagtgccgccgggcgcgacactggtttattcggcacacggcgtatcgaaggcggtgcggcaagaagcggcggagcgcggtttccgcgtgtttgatgcgacttgcccgctggtgacgaaagtgcataaggaagtcgcccgactggatgcccaagactgtgaaatcatcatgatcgggcataaggggcacgtcgaggttgaaggaacgatggggcagcttgcgccgggcaaaatgcttttggtcgaaacggtcggagatgtggcaaaactcgaagtcagaaaccccgacaaactcgcctatgtcagccaaaccacgctctcggtcgatgaaaccaaagacatcatcgccgcgctgaacgcgcgtttccccaatatccgcaatccgcacaaggaagatatctgctatgcgacgaccaaccggcaaaccgccgtcaaagagttggcagaacagtgcgacatcgtgattgtggtcggttcgcccaattcgtctaacagcaaccgcttgcgcgaagtggcggcatcgcgcggaatcgatgcgtatatggtggataatgcaggctacctgcaacgtgcatggtttgagggcaaaaacaaagtcggcgtaacggcaggcgcgtccgcgcccgaagtgttggtgcaggaagtgctggcaaccatacgcggatgggggcacgaaactgtacgcgaaggcgagggtgcggaagaaagcatcgtgttcgtcctgcccaaagagttgcgccgcgagggcgaaaccaaacccgatttgtgcaaacgttga

SEQ ID NO: 40860 - DNA, 378 bp, Neisseria meningitidis
atgacgattcaacagcctgaattaaaaaatccgacgattgtggtagttaccgaccgcaacgatttggacggtcagttgttccaaaccttttcttctggcaaagatttaatcaaacaaacaccgcaacaagtagaagaccgagaacaactacgccaactgctcgcacaaaatgaagtgggaggcgtgttttttactaccattcaaaaattcgccttaaacgaggaagaaagccgcttccctgtcttaaatgaacgcagcaatattattgtgattagcgatgaggcacaccgcagccaatacggttttacacaaaaactatataacggcaaattccaagcaggttatgctcgccataagtttcccgaaattccaacataa

SEQ ID NO: 40861 - DNA, 219 bp, Neisseria meningitidis; identical to SEQ ID NO: 37472

SEQ ID NO: 40862 - DNA, 1554 bp, Neisseria meningitidis
atgccgtctgaaaggtcggcggattgttgcccggcgcactttgtggtaaagtttagaaaattaactctaaactgtggcaggcggtttgaccggccgccgattaatgggaaccgacagagaaagccgatgatacacaccgaaccgagcgcgcagccgtcaactatggacacggctgcttttttaaagcacatcgaatccgcattccgccgcattttttcagacggtatcgacctgatgcgatacctgcccgaagacaaatggcttgccttgaagcaggcgggtttgctgttgcccttcctcgacaaaaaacacggcggccgcaagggcagccagtttgaaattcaggaagtattgcggattgcggggcattacggcgtgcccgttaccctgcgtaccggcatcgaaggcgcgctggtgttgcagcctctgcaagagttcggtgacgaagcgcaaatcgcgcaaggcttggatatggttttcaaaggcgagggcggcggtttgggcattaccgaacccgaaacctccggcgcggcgattgcacgcgaaatgcagtcctactacgaatataccgacgataaaaccatttacgtcaacgccgcgaaatactggcagggcaactcgcaaggcgacttcctcctcgttgccgccaaagagcgcaaaaacggcaaactcgccaaagttatcgacctgctgctcgtccccaaaacatatatccgctgcgaaaccctcacatccgaaggcttgcgcgccgtccgttacgccgtcaaccacattgatgcccaaatgcctgccgctgccgtcatgaaactctctcagagcgacgccgccggtttgcgcgcgttccaaaacatctttatccgcagccgcctgcaactgatcggcatgacgcacggcattatggaatacatccttgaaaacctggaacgatacgtccgcaacgacatcagattcgtcgattacgaacgccgcgaaatccggcgccgccatcaggtttccgagattctttaccgctacgtctgccattccgtttcgcctgttgcccccgtcgcccatcagctgatggaggcgaacatcgtcaaaaccctcgccacggaatacacttatgccgccgcgcaaatgttgcaaaaactcttgggcgcgaagggttttgaacgcggacacaccgccggcaatatcgccatcgacatccgtcccttcacgatttttgaaggcccgaacgatatgctttatgccgaaatttacgaccagtttgtccgcgccaccgccgaagaaaaagaagcaggcatgaagttggacaaaaaccaaaccctgctcgaccgcctgcaaaccgatgcccgctttgccgccgtcgcccgcgactacactttgcctgaagacatccgcagcttcctgcaggaacacaccctgaccgatgcctgcgccctgcaaaaagtctttatcggcaaaatcatcgcccgactctttgtcttcgtacaggcgaaacacgaagacgcggcagcctgcctgctgaacgacatccgcaaagacatattggactgccgatattgcggatag

SEQ ID NO: 40863 - DNA, 453 bp, Neisseria meningitidis
atgaatattgaagtagaaatgaaagtattggacgagaggatggcggattttatccctgcctatgcaacggagggttctgcaggtttagatttgtgcgcctgtttggatgaggaagtcgttttgcagccgggtgaaacgtttcttgtgccgacgggtttggcaatttatttggcgaatcccgcatatgccgccgttttgctgccccgttccggcttggggcataaacacggcattgttttgggcaatttggtcggtttgattgactccgattatcaaggggaattgaaggtgtcgttatggaacagaagcagcgaaccgtttactgtcaaaccgtttgagcgtatcgcgcagatggttgtcgtgccaatcgtgcaggcgcgtttcaaacgtgtcgaggaatttgtcggaagcagccggggtgagggcggcttcggcagtacgggtttgcattga

SEQ ID NO: 40864 - DNA, 984 bp, Neisseria meningitidis
atgagtgaaatcaaaaccgacgaccccaaacgcggcatcaaactcagaggcgcggacaaaaccgcgcgcatccccatcaaagtcgtcccccttcaggaaaaactgaaaaagcccgaatggatacgcgccaaactcccatcgcgcaaattctttgaaatcaaagacattttgcgcgaacaaaagatgcacaccgtttgcgaggaagcctcctgccccaacatcggcgaatgcttcagcaaaggcacggcgaccttcatgattatgggcgatatctgcacccgccgctgcccgttctgcgacgtgggacacggtcggcccaatatgctcgaccccgacgaaccgaaaaacctcgccgaatccgtcaaagccatgaacctgcgttacgtcgtcatcacctccgtcgaccgcgacgacctgcgcgacggcggcgcacagcatttcgccgactgcatcaaagccatccgcgaaaccagcccgaacaccaaaatcgaaatcctcgtccccgacttccgaggacgcttggacatcgcactcaaaatccttgccgaaaccccgcccgacgtgatgaaccacaacctagaaacccatccgagcctgtacagaaaagcccgtcccggtgccaattatcaacattctttagacttattaaaacgttataaagaaatgatgccgcacatcccgaccaaatccggcatcatggtcggcttgggcgaaacagacgaagacgtgcgtgaaattatgcgcgatatgcgggcgcacaatatcgaaatgattaccatcggacagtacctccagccttcagacggacacctgcccgtcctgcgctacgttacgcccgagcagttcaaaatctttgaaaaagaagcatacgaactgggcttcagcaatgccgccatcggcgcgatggtacgttccagctaccacgccgacgaacaggctgccgaagccttacgcgaaagccacggcggttgcgggcatcattaa

SEQ ID NO: 40865 - DNA, 1083 bp, Neisseria meningitidis; identical to SEQ ID NO: 38655

SEQ ID NO: 40866 - DNA, 564 bp, Neisseria meningitidis
atgaaactcatcattctcgaccgcgacggcgtcatcaatcaggaccgcgacgacttcgtcaaatccgttgacgagtggatacctgtcgaaggcagcatggatgcggtggcatttctgacgcaggcaggctgcaccgtcgccgttgccaccaaccaatccggcatagggcgcaaatattttaccgttcaagacctcaccgaaatgcatgccaaaatgcaccgcctcgtccgtcaggcaggcggcgaaatcaacggcatctggttctgccctcataccggcgccgacggctgcggctgccgcaagcccaaaccgggtatgattgaagacatcctcgaacgcttcaacgcccaagcttcggaaacttggctggtcggcgacagcctgcgcgatttgcaggcaatcgatgccgtcggcggcaaacccgcgctggttctgaccggaaaaggcaaaaaaacgctctcccaacacggacacgaattacccgaacacacacaggttttcgataccttgctcgatttctcacaatacatcatgcaggaaaacgccgcaccgcaagccgactga

SEQ ID NO: 40867 - DNA, 480 bp, Neisseria meningitidis
ttgaaaattttttggcgcatttttatgcgtcaaatttcgttaacagactatttttgcaaaggtctcggcttgtgcggtttgctggaagaaggcgatgagcgcggcgagataaaaaaatctgccgtcgccgtctttttaacttgtctgattgttggtttttatgatggttttttcggaccgggtacgggcagcattttcatcattgctttgtttgccattaataaattgtcgttgttgcaggcttcggctacttccaaaattttcaattttgcttctaatatcggggcatttgttgccttcttgatagcagggaaaatggcgttcctaatcggaatcccgatgattttggcaaatttgttgggcaaccattttggcagcctccatgctatcaattcaaacggggaagttattcgtaaggttttggtcgtaacggttttgctgattatcatttcaatggcatataaggctttttcagcttaa

SEQ ID NO: 40868 - DNA, 2064 bp, Neisseria meningitidis
atgatgacccaaacccttttaatcgaactccttaccgaagaactcccacccaaagccctgaataatctgggcaaccattttgccgccgccgttgccgaaggcttggaaaaagcgcaattggttgacggcactgccgaatttacggcttatgcctcgccgcgccgtttggcggttcaagtcaaaaacgtcaaagccgttcaggcagatcaaaaaatcgtgaaaaaaggccctgccgtggcgaatgccatgaaagacggtgcgccgaccaaggctttggaaggtttcgcacgcggtgcgggcgcgaaaatcgaagacttgaccatcgtccacgacggcaagcaggacgtgtacgcctacgaatatgtccaaaccggcaagccgttgggcggacttttggaagacatcatcaatgccgcagtgaaaaagctgccgattcccaaagtcatgcgttggggcagcagcacatttactttcgtgcgccccgttcacgggctgattgtgctgcacggcggcgacatcgtaaacgtcagcgttttgggtctgcaaagcggcaacaaaaccttgggacaccgcttcttgtccaacggcgaaatcaccattgaaaacgccgacagctacgccgaacaaatgcgcgagcaaggcaaagtggaagcttcgtttgccgagcgcaaagccgcgattcagacggcactggaagggcaggcacgccgtctgaacgcgactgttgccgccgatgaagcattgttggacgaagtaaccgcgctggtcgaatggcctgttgttttggaagccggttttgaggaacacttcctcgccgtgccgcaagaatgcctgattctgacgatgcagcaaaaccaaaaatactttccgctgctcgaccaaaacggcaagctgatgaaccgcttcctgctggtctccaacctgcaaaccgaagatccgtcgcacatcatccgaggcaacgaacgcgtcttgcgtgcgcgcctgtctgatgccgagttcttctacaaacaagaccaaaaagcgactttggaaagccgcctgccgaaattgtccagcgtggtttaccacaacaaaattggttcgcaagccgagcgtatcgaacgcctgcaaagcatcgccgcccatatcgccaaagcattgggcgcggatgccgccgccgccgaacgcgccgcgcgtcttgccaaagccgacttggttaccgaaatggtcggcgagttccccgaactgcaaggcacgatgggcaaatactatgcccgtttggacggcgaaaccgaagaaatcgccgaagctgtcgagcagcactatcagccgcgttttgccggcgacaagctgcccgaaagcaaagtcgccactgccgttgcacttgccgacaagctggaaaccctggtcggcatttggggcatcggtctgattccgaccggcgataaagacccctacgccctgcgccgcgccgccttgggtattttgcggatgctgatgcagtacggtttggacgtgaacgaactgattcagacggcattcgacagcttccccaaaggcttgctcaacgagcaaacgccgtctgaaaccgccgactttatgcaggcgcgccttgccgtgttgctgcaaaacgattatccgcaagacatcgttgccgccgtattggcgaaacagccgcgccgtttggacgacgtagtggcgaaactgcaagccgttgccgcgttcaaacaactgcccgaagccgccgcgctcgccgccgccaacaaacgcgtgcaaaatctgctgaaaaaagccgatgccgagttgggcgcggttaacgaaagcctgctgcaacaggacgaagaaaaagccctctttgccgccgcgcaaggcttgcagccgaaaatcgccgccgccgtcgccgaaggcaatttccaaaccgccttgtccgaactggcttccgtcaagccgcaagtcgatgccttctttgacggcgtgatggtgatggcggaagatgccgccgtaaaacaaaaccgtttgaacctgttgaaccgtttggcagagcagatgaacgcggtagccgacatcgcgcttttgggcgagtaa

SEQ ID NO: 40869 - DNA, 987 bp, Neisseria meningitidis
atgcagaatagcacaaccgaatttttgaaacctcgtcaaattgatgtaaatactttttctgcaactcgtgcaaaagtatctatgcagccatttgaacgtggtttcggtcataccttaggtaatgctttgcgccgtatcttactgtcatccatgaatggttttgctcctactgaagtagctattgccggtgtattacacgaatattctactgttgatggtattcaggaagatgttgttgacattttgctgaatattaaaggtattgtgtttaaactccatggtcgtagccaagttcaacttgtgttgaagaaatcaggttcaggtgtcgtatctgccggtgatattgagttgccgcatgatgtagaaattctgaatcctggtcatgtcatttgtcatttggctgataacggtcaaattgagatggaaattaaagtagagcaaggtcgtggttatcaatctgtttcaggtcgtcaggtagttcgtgatgagaaccgtcagattggtgcaatccagttggatgcgagcttttcgcccatcagccgtgttagctttgaggttgaacctgcacgtgtagagcagcggacggatcttgataagttggttttggatatcgaaaccgacggttctattgatcctgaggaagctgtacgcagtgcggcacgtattttgattgatcagatgtctatttttgctgatttgcagggtactcctgtggaggaggttgaagaaaaagcacctcctatcgaccctgttcttttgcgtccggtggatgatctggaattgacagtacgttcagctaattgtttgaaagctgaggatatttattatattggcgatttgattcaacgcactgaaaccgagcttcttaaaacgccgaatttgggacgtaaatctttgaatgagattaaggaagtattggcatctaaaggtttgacactgggttctaagttggaagcatggccacctgtaggcttggaaaagccttaa

SEQ ID NO: 40870 - DNA, 864 bp, Neisseria meningitidis; identical to SEQ ID NO: 38990

SEQ ID NO: 40871 - DNA, 888 bp, Neisseria meningitidis
atgtacacaggacgtttcgcccccagcccgaccgggctgctccacatcggctcgctgctgaccgccgccgcttcctatgccgatgcacgctcaaacggcggcaaatggctggtccgcatggaagacctcgatccgccgcgcgaaatgccgggggcggcaagccatatcctgcacacgcttgaggcattcggattcgagtgggacggagaagtcgcctatcagagccgccgttacgccctgtatgaagaaaccctatgccgtctgaaaaccgccggactggtctatccctgccattgcagccgcaaagactggcaggctgcggcagtccacggcgcagacggattcgtctataacggacgttgccgcaatccgcagcaacgccctgcaccgcaaggcaaacagcctgcgtggcgcatccgcgtccccgaccgcgacatcggcttttcagacggcatcgtcggcggttacgcccaaaacctcgcccgcgacatcggcgatttcgtcctgcttcgtgcagacggttactgggcataccagctcgccgtcgttgccgacgatgccgaacagggcgttacccacatcgtccgcggacaagacctgcttgtttctacgccgcgccaaatctatttgcagcaatgtttgggcgttccgacaccgcaatatgcccacctgccgctgctgaccaacgcacaagggcagaagtggtcgaaacagacgctcgcccccgcattagatttaaaccgccgcgaacaactcctccgccaagtgttccgttacctcaagctgcccgaagcaccggaagccgaccgccctgccgaactgctcgactgggcggtggcacactgggatatggacaaagtgccgaaacacgccattaccaccccctaa

SEQ ID NO: 40872 - DNA, 660 bp, Neisseria meningitidis
atggacacttggcacgatgcactcggcggcgaaaaacagcagccgtattttcaggaaattttaaatgcagtcaggcaggaacgtttgtcgggacaaatcatctatccgccggcggcggatgtgttcaacgcattccgcctgacagcgttcgaccgggtcaaagccgtcattctcggacaagatccgtatcacggggcagggcaggcgcacggtttggcattttccgtcaggcagggcgtccgcatacccccgtctttactcaatatctacaaggagttggaaaccgacatcgaaggcttttccattcccgcgcacggctgtctgacagcgtgggcggagcagggcgtattgcttctgaacacggttttgaccgtacgcgaaggacaggcgcattcgcacgcccttttaggctgggaacgctttaccgataccgtcatcaggcagcttgcgacacaccgcaagcatcttgtctttatgctgtggggtgggtatgcacaacaaaaagggaaactgatagacagtcaaaatcatttgatactgaccgcaccgcatccatctcctctgtcggcatatcgcggttttttcggctgccgccatttttcacaggcaaacagctatttgagccggcacggtatcgatccgataaactggaagctgtga

SEQ ID NO: 40873 - DNA, 312 bp, Neisseria meningitidis
atgaaatacaaaagcgaggcattagccgccattcatgaaatgatggaaggggcttacaacatcggcgcaatcgacaaaaagactatgcgcggctttgacaagtcctgcctgaccgaaatcaaaccgttgagcggcggagacatcaaggcaatcagggagaaggaggcactatcgcaagccgctttcgccatctatctcaacgtgggaaaaaatcacgtttcggcttgggagcggggcgttaaaaagcccagcggcgcggcgttgaagctgctgaccatcgtcaaaaacaagggtatcgaagccattgcgtag

SEQ ID NO: 40874 - DNA, 669 bp, Neisseria meningitidis
atgttaccctcgaaatatgaagataacacactgcaaattaaagaaaaaagtacagaaagaactgctccgttttttgtgctggaagttaccgcccgttctgccgccgatattttgggtatccatcccaattcggcagcactgttctaccgtaaaatccgcacggttatcaaccatcatttggccttggctgccgatgaggtttttgagggccctgtcgagccggacgaaagcgatttcggcggacggcgtaaaggcagacgtggtcgcggtgcggcaggaaaagtggttgtcttcggcattctgaaacgcaacggacgggtctataccgttgtggtggataatgccaagtctgaaacgttactccctgtcatcaagaagaaaatcatgccggacagtattgtttataccgatagtctgagcagctgcgacaagttggacgtgagcggttttatccattaccgcatcaaccattccaaggaatttgcagaccgtcagaaccacattaacggcattgagaacttttggaatcaggcaaaacgcgtcttgcgaaaatacaatggaatcgattgcaaatctttcccactgttcttgaaagaatgcgaatttcgatttaacttcggcacaccgtctcaacagcttaaaatcctgcgggattggtgtggaatttag

SEQ ID NO: 40875 - DNA, 498 bp, Neisseria meningitidis
atgaacgttaaagttcataaagacacacaccatttcggtattcacaacctcaacaataccgatgttcatctgactgccgaagacagcgataatgtgattgagattaaaggggaactcgccgaccttatgccgacaggaaatgttgagagtacaagttttttaaggggcattgaaacggcttttaaatccaataccgtattaacggggaataacaataaaatatccatcgccactgagggcaagggcttgggattgggcgtaaatggtctccagtccaactccccctattccggacacacgacgggcattttcatcaataatcaatcaagcgaccttacccaaccttcccttgatggcatcagcaccatcaaactcaaagccgtcaagggaaataatgaagttgatttaaatgtaaaaaaccacgcctccgtaaaagacattatcgcgtcgcattctgcaaaagcaacgcttgaagccgaaggggacaatattgtctag

SEQ ID NO: 40876 - DNA, 396 bp, Neisseria meningitidis
atgaaaaaacaaatcaccgcagccgtaatgatgctgtctatgattgccccctcaatggcaaacggcttggacaatcagacatttgaaaaccaagtgttccacacgcaggcagatgcgccgatgcagttggcggagctttctcaaaaggagatgaaggagactgagggggcttggggaccggtaggtgcatttatcggaggagtcggaggcggaatcggatatatgatgaaccagcaacttagcggaagcagattttctcccacagcattcactcttgccgtaggggcgggagcttttggaggggcgacagcaggtccggcaggggttgtatggggatttaaccgatctttggcaacaggtatggttacgggtgttgcccaacgatatggtaaataa

SEQ ID NO: 40877 - DNA, 1194 bp, Neisseria meningitidis
atgtaccgacacatcgaatactatcccggcgacccgattttgagtttggtcgaaaccttcaaaaacgacccgcgccccgaaaaagtcaatttgagcataggcatttatttcgacgacgaaggcaaaatgcccgtgttggaatccgtgagccgcgccgaaaccgcccgtgccgccgcgcctgcgccgtcgccctacctgccgatggaaggcttggacacttaccgcagcgcggtacagcatttattgttcggcaaagacaaccgcgcgcttgtgcaaggacgcatcgctaccgtgcaaaccttgggcggctcgggcgcactcaaagtcggggcggacttcctgcaccgctggtttcccgaagcgcgcgcctacgtcagcgacccgacttgggacaaccatcgcggcatttttgaaggcgcaggtttcgaggtcggcacttacccatattacgaccctgctgccgtcggcgtgaaattcgacgaaatgaccgcgtttttcaacaccctgcccgaaaacagcgtcctgatcctccatccctgctgccacaacccgaccggcgtggatatgtcggaacaacaatgggacgaagtgttgcacatcatcaaaacgcgcaaactgattccgtttatggacatcgcctaccaaggcttcggcggcgatttggacagcgatgcctacgccgtccgcaaagcggtggaaatggaattgcccttgttcgtcagcaattccttctcaaaaaacctgtcgctctacggcgagcgcgtcggcggcctgagcgtggtttgcccgaataaggaagaagcggatttggtgttcggacagctcaaattcaccgtccgccgcatctactccagcccgcccgcgcacggcgcgtatatcgccgccgacgtgatgaacagccccgaactttacgccttgtggcaaaacgaggtttatatgatgcgcgaccgcatccgtgcgatgcggcagaaactttatgatgtcttaactgcgcaaatccccgatcgcgatttcacttatttcatcaaacagcgcggcatgttcggctacacaggattgagcgtggaacaagtccgcaggctgcgcgacgaatttgccgtttacctgctggattccggcaggatgtgcgtcgccggactgaatacgtcgaataccgactatgttgcccgcgcatttgcggaagtcttgaaataa

SEQ ID NO: 40878 - DNA, 543 bp, Neisseria meningitidis
atgaagataacgcactgcaaattaaagaaaaaagtacagaaagaactgctccgtttttttgtactcgaagttaccgcccgttctgccgccgatattttgggtatccatcccaattcggcagcactgttctaccgtaaaatccgcacggttatcaaccatcatttagccttggctgccgatgaggtttttgagggccctgtcgagccggacgaaagcgatttcggcggacggcgtaaaggcagacgtggtcgcggtgcggcaggaaaagtggttgtcttcggcattctgaaacgcaacggacgggtctataccgttgtggtggataatgccaagtctgaaacgttactccctgtcatcaaaaagaaaatcatgccggacagcattgtttataccgatagtctgagcaactgcgacaagttggacgtgagcggttttatccattaccgcatcaaccattccaaggaatttgcagaccgtcagaaccacattaacggcattgagaatttttggaatcaggcaaaacgcgtcttgcgaaaattatag

SEQ ID NO: 40879 - DNA, 219 bp, Neisseria meningitidis
atgttcccagaataccgtgatttgatttccaaattgaaacaggaaaattcccgcttcgcccgtctgttcgacgaacacaacgagctggacgataaaattaccggtctggtcaacaatccggttaccagcggtgcggaaaccatcgatgagctgaaaaaagccaaattgaaactgaaagacgagttgtacgccatcctgcaaaaagcagcgggaaaataa

SEQ ID NO: 40880 - DNA, 2754 bp, Neisseria meningitidis
atgcggcatttggggtacatttacagtatttacggcaatgagagaaaaatcatgcaactgcatattctgaacaatccaaaggacgcggctttggcggcggacgcggaatttctgaaacaatccctgttcaacctcctgcacgaagaagcctcgccgttggttgtcgaaacggtcaaactcttgtccacttccgacgacagcgcggcattgattgaaaaagtattgccgcaattggacgaacaacaaacccacgatttaaccttggcctgcggcctgttcgcccagattttgaacatcgctgaagacgtgcaccacgaacgccgccgccaaatccacgaagaagccggacgcggcggcgcggaaggcagcctgacggaaaccgtccgcaggctcaaggcggggaaagccgacggcaaatcggtgcagcggcagttggacaatacgtccgttaccgccgttttgaccgcacacccgaccgaagtgcaacgccaaaccgttttgaatttcaaccgccgcatccgcgcgctgctgccgcaacgagaacgctgcaccaatgccgacgcgctggcacggctgcgccgcgaaatcgacactatcctgctgggcttgtggcagaccagcgaaacgcgccgccacaaactcagcgtcaacgacgaaatcaacaacggcgtgtccatcttcccgatgagctttttcgaagccctgcccaagctctaccgcaatatggaacacgactttcagatggtctatcccgatgtctgcgttccgaatatcctcaaaatcggcggctggatcggcggcgaccgcgacggcaatccgttcgtttctgccgaaaccttgcgttttgccttccgccgccacgccgatgccgtgttccgtttttaccgtggcgaactcgacaaactttaccgcgaactgccgctctccatccgccgcgtcaaagtcaacgacgacgtaatggcactggcagccctctcgcctgacgaagaacttgcccgcacggaagaaccctaccgccgcgccattgcctacattatggcgcgcgctatgggcaaagcgcgcgcgctcggtttgggcatgggctgcaaattcggctttctcgagccttatgcttcggcacaagaatttctcgatgatttgaaaaaattgcaacgttcccttatcgacaacggcagccgcctgcttgccgaaggccgtttggcagacctcatccgttccgtgtccgtgttcggcttccacatgatgccgcttgatttgcgccaacacgcgggcaaacacgccgatgtggttgccgagcttttccaacacgcaggcttggaagactacaacagtctggacgaagagcaaaaacaagccgccctgttgcgcgaactgggccatcaacgtccgctgtacagcccgttcatcacatacagcgaccatacccgccgcgaactggcgattttcaacgaagcgcgcaaaatcaaagacgaattcggcgaagatgccgtaacacaaagcattatttccaactgcgaacaacccggcgacctgcttgccttggcattgctgctgaaagaaagcggcctgctggcggtggaaaacggcaaaccgcgcagccgcatcaatatcgtgccgctgtttgaaaccatcgaagcactcgaaaacgcctgtccggtgatggaaaccatgttccgcctcgattggtacgacgcactgctcgaaagccgcggcaacatccaagaaattatgctcggctattccgactccaacaaagacggcggctacgttaccagctcatggtgcctctatcaggcggaattgggcttggtcgaactcttcaaaaaatacgatgtccgcatgcgcctgttccacggacgcggcggcagcgtcggacgcggcggcggcccgtcttaccaagccattctcgcccaaccggcgggcagcgtggcgggacaaatccgcatcaccgaacaaggcgaagtcattaccgccaaatacgccgaccccggcaatgcccaacgcaacttggaaaccttggttgccgcgactttggaagccagcatcctgccggataaaaaagaccctgatgccaaactgatgcaggcattgtcggacgtatcgttcaaatactaccgcgaactgattacccatcccgacttcatcgactacttcctgcaaaccagcccgattcaggaaatcgccaccctcaacctaggcagccgtcccgccagccgtaaaactttggcgcggattcaggacttgcgcgcgattccgtgggtattctcatggatgcaaaaccggctgatgctgccggcttggtacggtttcggcagcgcggtggaaaccttgtgcgaagacaaacccgaaacgctcgccgccctgcgcgaacacgcccaaagcaacccgttcttccaagccatgctctccaatatggaacaagtgatggcgaaaaccgacatcaccctcgcggaaaactatgccggcttgagcgaatcgcccgataaggcaaaaatcatcttcgggatgattaaggaagaataccggcgcagccgcaaagccctgctcgacctgctgcaaaccgaagaacttttgcgcgacaaccgcagcctcgcccgttcgctcgctttgaggattccctacctgaacgcgctcaacggtttgcaagtcgccatgctcaaacgcctgcgtaaagaacccgacaatccgcacgcccttctgatggtgcacctgaccatcaacggcgtggcgcaaggtttgcgcaatacaggctga

SEQ ID NO: 40881 - DNA, 516 bp, Neisseria meningitidis
aaatcctacacctgctccttccacggcagcaccttggtcaaaacggcagacggctacaaagccatcgcccatattcaagccggagaccgcgtcctttccaaggacgaggcaagcggagtaacgggatacaaacccgttaccgcccaatacggcaatttgtatcaagaaaccgtttacattaaagtttcagacggcatcggcaacagccaaaccctgatttccaataaaatccacccgttttattcagacggaaaatggattaaagcggaagatttgaaaacgggaaacaggctgttatccgaaagcggcaaaacccaaactgtccgcaacatcattgtcaaaccaacaccgctcaaagcctacaatctgaccgttgccgactggcatacttactttgtcaagggcgataaggcggaaacggaaggggtttgggttcataatgagtgtccgccatataagagaccaaataacgcaacgagaaagtgtacaaggaaaaccctgcgtcgaatgcggtaa

SEQ ID NO: 40882 - DNA, 4476 bp, Neisseria meningitidis
atgcgcttcacacacaccaccccattttgttccgtattgtccaccctcggtctttttgccgtttcccctgcttactcatccattgtccgcaacgatgtcgattaccaatattttcgcgactttgccgaaaataaaggcgcgttcgccgtaggtgcaagcaatatttccatccaagacaagcaaggcaaaatattaggcagggttctcaacggcatccccatgcccgacttccgagtcagcaaccggcaaaccgccatcgccaccctgattcacccccaatacgtcaacagtgtcaaacacaacgtcggctacggttccatacaattcggcaacgacacccaaaatccagaagaacaagcctatacctaccgcctcgtatcacgcaacccgcacccggactacgactaccaccttccccgcctcaacaaactggttaccgaaatctcacctgccgcactcagcagcgtacccttgcttggaaacggccagccaaaggccaatgcctacctcgataccgaccgcttcccctactttgtacgactcggctcaggcacgcaacaagtccgcaaagcagacggcacgcgtacacgaaccgccccggcataccaatacctgaccggcggcacgccgctgaaagtattggggttccaaaaccacggcttactcgtcggcggcagcctgaccgaccaaccccttaacacctacgcaatcgccggagacagcggttcccccctgtttgccttcgacaagcatgaaaaccgctgggtgcttgcgggcgtactcagcacctacgccggcttcgataatttcttcaacaaatacatcgtcacgcaacccgaattcatccgttccaccatccgccaatacgaaacccggctggatgtcgggctgaccaccaacgaactcatatggcgcgacaacggtaatggcgacagcaccctgcaagggctcaacgaacgcatcaccctgcccattgcaaacccttcgcttgccccacaaaacgacagcaggcacatgccgtctgaagatgccggcaaaacgctcatcctatccagcaggttcgacaacaaaacactgatgctggcagacaatatcaaccaaggcgcaggcgcattgcagttcgacagcaacttcaccgtcgtcggtaaaaaccacacatggcaaggtgcaggcgttatcgtagccgacggcaaacgcgtcttctggcaagtcagcaaccccaaaggcgaccggctctccaaactgggcgcaggcacgcttatcgccaacggacaaggcatcaaccagggcgacatcagcatcggggaaggcactgtcgtactcgcccaaaaagctgcttcagacggcagcaaacaagcattcaaccaagtcggcatcaccagcggcaggggcacggccgtcctcgccgacagccagcaaatcaaacccgaaaacctctatttcggcttcaggggcggacggctcgacctcaacggcaacaaccttgcctttacccatatccgccatgcggacggcggcgcgcagatcgtcaaccacaaccctgaccaagccgcgacactgacgctgaccggcaaccccgtcctcagtcccgagcatgtcgagtgggtgcaatggggcaaccgtccgcaaggcaacgcggcggtttacgaatacatcaacccgcaccgcaaccgtcggaccgactacttcatactcaaacccggcggcaacccgcgcgaatttttcccgttaaatatggaaaactcaacaagctggcaatttatcggcaacaacaggcaacaggccgccaaacaagtcgcccaagccgaaaatgcccgccccgacctaattaccttcggcggatacttgggtgagaacgcgcaaacgggcaaagccgcaccgagttacagcaaaaccaatatcgaatgggtgaatggtccaaacaccccacacaagccctcgccctatacgaatacgccaacccgcacaggggcaggcgtaccgacgattaccgcctcaaagaaagcggcaaccccggcgcctacttcccatggaatgcctacagcacccaagactgggaatttctcggacatgaccggcgaagcagccatagaaaaaaaccgccatatcgcaaatgccgccgtatacggccggcccgaataccgttacaacggcgcactcaacctgcactatcgtcccaaacgcaccgacagcacgctgttgctcaacggcggcatgaaccttaacggggaagtcttgattgagggcggcaatatgattgtgtcaggcaggcccgtaccccatgcctacgaccaccaggccaaacgcgaacccgttcttgaaaacgaatggaccgacggcagcttcaaggctgcacggttcaccctacgaaaccatgcccgactgacagcagggcgcaataccgcgcatctggacggcgacataaccgcatacaatctgtccggcatcgacctcggctttacccaaggcaaaacaccggaatgctaccgctcctaccatagcggcagcacccactgcacacccaacgccgttttaaaagccgaaaactatcgtgcactacctgcaacgcaagtacgcggcgacattacccttaacgaccgttcagagctccgcctgggcaaagcacacctgtacggcagcatccgtgccggcaaagacaccgcagtccgcatggaagcagacagcaactggacactttcccagtccagccacaccggcgcactgacgcttgacggcgcacaaattaccctgaaccccgatttcgccaataatacacacaacaaccgcttcaacacactgaccgtcaacggcacacttgacgggttcggcacattccgattcctgaccggcatcgtccgaaaacaaaatgccccccccctcaaactggaaggggacagccgcggcgcattccaaatccacgtcaaaaacaccggacaagaacctcaaacaaccgaatcgcttgcacttgtgagcctcaatccgaaacacagccaccaagcccgattcaccctccaaaacggctatgccgatttgggtgcctaccgctacatcctccgcaaaaacaacaacggatacagcctgtacaacccgctcaaagaggccgaacttcaaattgaagccacgcgtgcggaacatgagtgcaaccaacaggcatacaaccaattacaggcaaccgacatcagcagacaggttcaacatgactctgacgcgaccaggcaggcactacagacttggcagaacagtcaaaccgaacttgcccgcatcgacagccaagtccaatatctgtccgcccaattgaaacagacagacccgctgaccggcattctgacgcgtgcccaaaacctgtgtgccgcacaaggatacagtgccgatatctgccgtcaggttgccaaagccgccgacacgaacgacctgacactcttcgaaaccgaactggatacgtatatagaacgtgtagaaatggccgaatccgaacttgacaaagcacggcaaggcggcgatgcgcaagccgtcgaaacagcccggcacgcctacctgaacgcactcaaccgtctgtcccgacaaatccacagtttgaaaaccggcgttgccggcatccgtatgccgaacctggccgaactgatcagccggtcggccaacaccgccgtttccgaacaggccgcctacaataccggccggcaacaggcgggacgccgcatcgaccgccaccttaccgatccgcagcagcaaaacatctggctggaaaccggtacgcaacaaaccgactaccatagcggcacacaccgtccctaccaacaaactaccaactatgcacatatcggcatccaaaccggcatcaccgaccgtctcagtgtcggtacgattttaaccgatgagcgcacaaacaaccgttttgatgaaggcgtatccgcccgaaaccgcagcaacggcgcacatctgttcgtcaaaggggaaaacggcgcactctttgccgcggcagatttaggctacagcaacagccgtacccgatttaccgattatgacggggctgccgtccgccgccacgcatgggatgcaggcatcaacaccggcatcaaaatcgataccggcatcagcctcagaccctatgccggcatccgtataaaccgcagcaacggcaaccggtacgtactcgacggcgcagagataaacagcccggcgcaaatccaaaccacatggcatgccggcatccgtctcgataaaaccgtcgaactgggtcaagccaagctgacccccgccttcagcagcgattactaccatacccgccaaaacagcggttccgccctcagcgtcaacgaccgtaccttactgcagcaagccgcccacggcacactgcataccctgcaaatcgacgccggatacaaaggctggaacgccaaacttcatgccgcttacggcaaagacagcaacaccgcccgccacaaacaggcaggaatcaaaataggctacaactggtaa

SEQ ID NO: 40883 - DNA, 654 bp, Neisseria meningitidis
atgggattgggtatggaaatcggcaagctgattgtggcttttttggtgctgattaatccgttcagtgcgttgtcgctttaccttgaactgaccaatggacacagtacgaaggagcgcaggaaggtcgcgcggacggccgccgtcgccgtgtttgccgtgattgcggtatttgcgctgatcggcggtgcgctgttgaaggttttgggtatcagcgtcggttcgtttcaggtcggcggcgggattttggtgctgttgattgctatttcgatgatgaacggcaacgacaatcccgccaagcagaatctcggcgcgcaaccggaaacggggcaggcgcgccccgcccgcaatgccggggcgattgccgtcgtgcccatcgccataccgattaccatcggcccgggcggtatttcaaccgtgattatttatgcatcggcggctaaaacatacagcgacatcgcgctgattatcgcggccggtttggtggtcagtgcgatttgttatgccattttaatcgttgccgggaaggtcagccgccggctgggcacgacggggctgacgattttaaaccgcattatgggtatgatgctggcggcggtatcggtggagattattgtgtcgggactgaaaacgatattcccgcaactggcaggttga

SEQ ID NO: 40884 - DNA, 1023 bp, Neisseria meningitidis
atgctgacaaaaaaggagtttgagaagtttttagacgaggtttgcaccgtattgaggcaagaggcaaaaaacgcacctttcaaatcccaagatatttttgaaaacagagttcgtgcgctgtgcattgcaaaaattcccgcttatgctgacatagttatcaatcctgaacctgtgccgcaaattttccccgatgttccaataggggaatatggtgtagaagtcaaattcacgctaaaagatacttggcgcagcgtagcaaacagtatccaagagaaaaacaaagctgacggtgtacagcatatctatgtggtattcggaaaaatggggggcattcccgatgtgaaatggcaactttacgaagatagcgtaattcatgtccgcacatcgcatgttccgcgctttgaggtagaaatagaatctgatcgaccgtctctgtttgagggtttcggtatttcctatgctgaatttgccgatttggatatgcatgaaaaaatggaatatatccgaaaatatgcccgtaacaggttgaaagaaggcgagcggttatggtggatagaagacattgacgcagtagacagccatgatctgcctttggaagtgcgcctttacacttccctgccgcaggaagaaaaaatccgcctccgagctgaagcagcattagtctccccccgtattgtctgctcaggcagggcgaagcacaaatacgataatgccgtcctgtatctgattacctatcgcggtgtgctttgtcatcaggcgcgggacttattcagtgcgggcagcgttgccaactcggcggaagactaccgtggcggaaactatgtagaaaaatctttaaaattgattgagcatgaaattgaaaaagctgctttggaaatggatgatgctctaattgtcgaatattggggagaaagcgtcccgacagaaaaacgcctagagtattggattaagatgttggatgatttggcagatggctggataccttctgaatcgctattcaatggtaggtataaagccaaataa

SEQ ID NO: 40885 - DNA, 276 bp, Neisseria meningitidis
atgttaaacactgtcagcagcagggaatttaaccaatacccaagccaaacccaaaagaaagccgcaaaatcccccgtatttattaccacacgcggcaagccgagccatgtattaatcagttatgcggaataccgcaaactgacaggcaagccgcaaagcgcactggaggcactgacggcaaacgccgagcttgccgccaaactggaaagcatcgattttgaaataccgccgcgaagcaccgcgcaaagaccgcccgttgattttggggaggattga

SEQ ID NO: 40886 - DNA, 1554 bp, Neisseria meningitidis
atgaaccggacttatgccaatttctacgaaatgctcgccgccgcctgccgcaaaaacggcaacggcacggcagtgttcgacggcaaggaaaaaaccgcctaccgcgcgctcaagcaggaggccgaagccgtcgcggcgtatctgcaaaatatcggcgtgaagttcggcgacacggtcgcgctggcggtttccaattccacagaatttattaccgcctatttcgccgtctccgccatcggcgcggtcgccgtaccgatgaacacatttttgaaaaacagcgaatacgcgtatatcctgaacgactgcaaggcgcgcttcctgttcgcctcggcgggcctgtcaaaagagttggcgggcttgaaggcgcaaacgcccgtcgaaaaaatcatttggacggacaaaagccgtccgaccggcgaaatggcggaaggcgatgccttttttgaagacgtgcgccgcttccccgaaaaacccgacttgggccgacaaccccggataaatgatttggcacacatcatctacacctccggcacgacggggcatcccaaaggcgcgctaatcagttacgccaacctgttcgccaacctgaacggcatcgaacgcatctttaaaatctccaagcgcgaccgctttatcgttttcctgccgatgttccacagcttcacgctgacggctatggtgctgctgccgatttatatggcgtgttcgattattttggtcaaatccgttttcccgttttccaacgttttgaaacaggccctgctcaaacgcgcgaccgtgtttttgggcgtacccgcgatttacaccgcgatgagcaaggcgaaaatcccttggtatttcagatggttcaaccgcatccgcctgtttatcagcggcggtgcgcctttggcggaacaaaccatcctcgatttcaaagccaagttcccccgcgccaaattgctggaaggctacggactgagcgaagcctcacccgtcgtcgccgtcaatacgcccgagaggcaaaaagcccgcagcgtcggcatccccctgcccggtttggaagtcaaagccgtcgatgaagaactggtcgaagtgccgcgcggcgaagtgggcgaactgattgtcaggggcggttcggtgatgcggggctacctcaatatgcctgccgccaccgatgaaaccatcgtcaacggctggttgaaaacgggcgatttcgttaccatagacgaagacggctttatctttatcgtcgaccgcaaaaaagatttgattatttccaaaggtcaaaatgtctatccgcgcgagattgaagaagaaatctacaaactcgatgccgtcgaagccgccgccgtcatcggcgtgaaagaccgttatgccgacgaggaaatcgtcgccttcgtccaattgaaggaaggtatggatttgggcgagaacgaaatccgccgccacctgcgtaccgtgctggcaaatttcaaaatccccaaacaaatccactttaaagacgggctgccgcgcaacgctacgggcaaggtattgaaacgggtgttgaaggagcagtttgacggaaacaaatga

SEQ ID NO: 40887 - DNA, 726 bp, Neisseria meningitidis
atggattttctctcttgttggcggcgcatcgcagacgcgcccactatcaggcgttgcgtattatgccacggttcgtccggcgtttcagacggcatctgcgccggctgccgcgacgatttggcggcataccgcaccgacgcggcaaacagctgccccctgtgtttcagacacatccaaggcggcgcggtgtgcggcatttgccaaaggaaaccgcccgcattcgaccggatgtgggcctcgctgcattacgaaccgcccgtcagcaatataatacacgcgctgaagcacttggctgatttgagcatggtgcagccgctggcagacctgatgatgcagaatccgcccgaccggcttgcagacgaatgtttcgatttcgtcctgcccgtaccgctaagcagggagcggctgctgcaacgcggcttcaaccaaagtgaaagcatcgtcgggctgctggcacaacgctacggctggcagatactgccccgacacaccgttttccgacaccaccgcccgccgcaaagcacgctcaaaggcagcgaacggcggcgaaacatcaaaaacgcctttgaaatccgcacaccgataccggaaaactgtaatattctgttaatcgacgatgtctttaccaccggcgcgacgctggacgaattggcaaagacgctgaaaaaatcaggcgcaaaccgcatctgctgctggacgctggcacgcacgccaatgaaaaaataa

SEQ ID NO: 40888 - DNA, 369 bp, Neisseria meningitidis
atgcgtcattacgagatcgtgtttatcgttcatcctgatcaaagcgagcaagtgcccgctatggttgaacgttacaaaaccatgattgctgaagcaaacggtaagattcaccgtttggaagattggggtcgccgccaactggcttacccgattaacaaaatccataaagcccattacgttttgatgaacatcgaaaccactcccgaagtggttgaagagctggaaaccgcattccgcttcaatgatgccgtattgcgccatctaaccatcaaaaccaaacacgccgttaccgaagcatcccctatgttgggtggtgaaaaggctaagaacctgttgagcggtgcgtctgaagaagcggtcgcccaataa

SEQ ID NO: 40889 - DNA, 897 bp, Neisseria meningitidis
atggatgatattcgcggcatcgtccaaggtgcggttaatccttttttaacgggttttcaaggagtagggattggggcaattacagacagtgcggtaagcccggtcacagatacagccgctcagcagactctacaaggtattaatcatttaggaaatttaagtcccgaagcacaacttgcggctgcaaccgcattacaagacagtgcttttgcggtaaaagacggtatcaactctgccaaacaatgggctgatgcccatccaaatataacagctactgcccaaactgccctttccgcagcagaggccgcaggtacggtttggagaagtaaaaaagtaaaacttaacccgaccaaatgggattgggttaaaaataccggctatgaaacaactgttacccgaaagactttagatgggcaaatagctggcaagaacaagcctattaaaccttcttcaggagattatgtcttgccggtaggcagacaaatcatagatcctactcgtacatctttttcacaagctacagttagctatcagaagcgtggtgcaaattacaactatgattctcttgtagctgcaatgaacgaaaaaaaatcatgggttggcgacagggttgatgttgttaatatgcctgatggagcacctactagtatggataacacgcgtattatggcagcacgtgaagcaggagtaaaagtggaagcgaatgttcataattttaatgacccaattccattggaaagagcgaaaagtatttcatatcaaggtaaaattcctaaaacatggggagaagctattcaatttagaattaaaaaacaaagtgaaaatggactagcaccaccaaattggtctacccagtttcctaatggtagtatttatgatcccaaggtaacgaaatga

SEQ ID NO: 40890 - DNA, 213 bp, Neisseria meningitidis
atgtttaattttttaaataagaatatatttattaaagcaattaaagtaattgtaatgggctgtttttattcatttttagtttttggtctttttgtatctggtaaggaatttggttatccatatgcacctaatatggatgcgggtgggcttgcttttttgagtgtatatattggcttttttttaagcgtggctttgcatatttacgatatttaa

SEQ ID NO: 40891 - DNA, 432 bp, Neisseria meningitidis
atggatatccaaaccatcctcgaaaaaaccctgcccggcctgggctacgaactggtcgatttcgaactgaccgcgcaaggaacattgcgcgtgttcatcgacaaagaaagcggcattaccgtcgaagactgcgcaaccgtcagcaaccacttgagccgcgtcttcatggttgaagacatcgactacaaaaacctggaaatttccagccccggactcgaccgccccttgaaaaaagccgccgacttcgtgcgctttgccggtcagaatgccaaaatcaaaacccgcctgccgatagacggtcagaaaaactttatcggtaaaatcgaaggctgcgaaaacgataccgttaccatatccttcgacggcaaaaccgtacaaatcgaattgggcaacatcgacaaagcccgcctgcgccccgaattcaaattctaa

SEQ ID NO: 40892 - DNA, 1197 bp, Neisseria meningitidis
atggcgaaaatcattacgccgctgtcggcaaatcaggttaaaaatgcgaagccgcgcgataagctgtataagttgtcagacgggggcgggctggctttgtgggtctacccgacgggcgggcggagttggaagctgtcgtttgtgcaggatggaaggcagcagacaatttcgctggggcggtatcctgatttttcgctggccgatgcgcgggaatggcgggaggaggtgcgccgaaaacgggcgcacggggaaaatgtcgtcaataagaaggtgcgggcggattttgcttttgagaaggtgacgcgtgattggtttgtgcgttggtcgaaggggcggtctgaaaagtatgccggacaggttatgcggaattttgaacggtgggtttttccggctatcggcaatcttgatattcgccaggtcaggacggcggatgtggtcggctgcctccgtgtgatggaggcgcgcggtatcgttgatacgttgcgcaaaacgaaaaacagtctgaagatggtgtttgcgtttgcggtcggttcgggaatgatggaaatcaaccctgtcgcgcaaatcggttcgggtgtgtttgaacgggcgaaaacggggaatatggcggcgttgagtccgtctgaattgccgcgcctgattgattttttggagcagcgcaatgaatttgcggtttatgcgggcagggtgcgtatccatcctgtaacgcggctttgtatctattggctgctgttgacaatgacgcggattcaggaggcggcgttgatggagtggtcggagttggacggggaggtttggcgtatccccgccgaacggaaaaaggagcggcgggggcatgatgtgccgctgtcgcgggcgatgcagtgggtgttggatcaggcgcgggcgttgaatgtgaacgggcggtttgtgtttgaaagtgtgaattttcaagggcatatcaataaggaaagtccgcgcgtggcgatgcagcgggcggggctggatacgacggcgcacggtttgcgctcgcttgcgcgtacttatttgcgcgaggttctgaaggtggataatgatgtggcggaaaagctgcttgcccattcgttggggacgaggacgcaaacggcttacaaccgctcggagctttgggaggagcgtaaggatgcgctggaacggtgggggaatgatgttttgaggcttgccaaaaacggaaaatga

SEQ ID NO: 40893 - DNA, 840 bp, Neisseria meningitidis
atgaaacaactccgcgacaacaaagcccaaggctctgcactgtttacccttgtgagcggtatcgttattgttattgcagtcctttatttcctgattaagctggcgggcagcggctcgttcggcgatgtcgatgccactacggaagcagcaacgcagacccgtatccagcctgtcggacaattgacgatgggcgacggcatccccgtcggcgaacgccaaggcgaacagattttcggcaaaatctgtatccaatgccacgcggcggacagcaatgtgccgaacgctccgaaactggaacacaacggcgattgggcaccgcgtatcgcgcaaggcttcgataccttgttccaacacgcgctgaacggctttaacgccatgcctgccaaaggcggtgcggcagacctgaccgatcaggaactcaaacgggcgattacttacatggcgaacaaaagcggcggttctttcccgaatcctgatgaggctgcgcctgccgacaatgccgcttcaggaacagcttctgctcctgccgatagtgcagctccggcagaagcgaaggcagaagacaagggtgcggcagcccctgcggtcggcgttgacggtaaaaaagtcttcgaagcaacctgtcaggtgtgccacggcggttcgattcccggtattcccggcataggcaaaaaagacgattgggcaccgcgtatcaaaaaaggcaaagaaaccttgcacaaacacgcccttgaaggctttaacgcgatgcctgccaaaggcggcaatgcaggtttgagcgatgacgaagtcaaagcggctgttgactatatggcaaaccaatccggtgcaaaattctaa

SEQ ID NO: 40894 - DNA, 627 bp, Neisseria meningitidis
atggtttattttttcgcggtcggcttcaaccggaggattgcagcagccatccttcatgcaggaacaccggtcaatcacaagaaagtcagccgtctgatggcgaagacggggctgaaggcagtgatacggcggcgcaaataccgctcgttcaaaggagaagtcggcaaaattgcgccgaatatcctgcgacgctgtttccatgcagaaaagccgaatgagaaatgggtaacggacgttaccgagttcaatgtaggcggagaaaagatatacctttctccgattatggatttgtttaacggggaaatcgtcagttaccgtattcaaatccgcccgactttcgatttggccggcgagatactgaaaggtgcgccggagaaaccgggatcgtctgaaaagccgatactgcattcggatcaaggttggcaatatcagatgtttttttatagtggattaaatttaaatcaggacaaggcgatgaagccgcagacagtacaaatagtacggcaaggcgaggcaacgccgtactggtttaaatttaatccactatacaacaacgatagaatcaagttgaaattaaaagggctgagccttgttcagtacagaattcagtccctgaaagccgcttga

SEQ ID NO: 40895 - DNA, 1485 bp, Neisseria meningitidis
atgtttgaacgcagtgtgattgcaatggcttgtatttttgccctttcagcctgtgggggcggcggtggcggatcgcccgatgttaaatcggcggacacgccgtcaaaacctgccgcccctgttgttactgaagatgtcggggaagaggtgctgccgaaagaaaagaaagatgaggaggcggtgagtggtgcgccgcaagccgatacgcaggacgcaaccgccggaaaaggcggtcaagatatggcggcagtttcggcagaaaatacaggcaatggcggtgcggcaacaacggacaaacccaaaaatgaagacgcaggggtgcaaaatgatatgccgcaaaatgccgccgatacagacagtttgacaccgaatcacaccccggcaccgaatatgccaaccggagatatgggaaaccaagcaccagattccggggaatcggcgcagccggcaaaccaaccggatatggaaaatgcggcggacggaatacagggggacgatccgtcggcaggcggggaaaatgccggcaatacggctgcccaaggtacaaatcaagccgaaaacaatcaagccgccggttcttcagattccgcccccgcgtcaaaccctgcacctgcgaatggcggtggcgattttggaaggacgaacgtggctaatggcgttttgattgacggaccgtcgcaaaatataacgttgacccactgtaaaggcgattcttgtgataatggtaacttattggatgaagaagcaccgtcaaaatcagaatttgaatcgttaaatgattctgggcgaattgataaatataaaaaagatggacaggataaatttactaatttggttgcgacaaaagttgaaaagaaaggattgaataaatatgtcatcttttatacggacaccccccccactcgttctgcacggtcgagacggttgaggaggtcgcttccggctgagatgccgctgatccccgtcaatcaggcggatacgctgattgtcgatggggaagcggtcagcctgacggggcattccggcaatatcttcgcgcccgaagggaattaccggtatctgacttacggggcagaaaaattgtccggcggatcgtatgccctcagtgtgcaaggcgaaccggcaaaaggcgaaatgcttgctggcacggccgtgtacaacggcgaagtgctgcatttccatacggaaaacggacgttcgtacccgaccaaaggcaggtttgccgcaaaagtcgatttcggcagcaaatctgtggacggcattatcgacagcggcgatgatttgcatatgggtaagcaaaaattcaaagccgccatcgatggaaacggctttaaggggaattggacggaaaatggcggcggggatgtttccggaaggttttacggcccggccggcgaggaagtggcggggaaatacagctatcgcccgacagatgcggaaaagggcggattcggcgtgtttgccggcaaaaaagagcaggattga

SEQ ID NO: 40896 - DNA, 1284 bp, Neisseria meningitidis
atgactgcatcgaaatcaggttttatcgggcaaatcttttcccgaaatatgcttgtctgtatttttacggggtttacctcggggctgccgctgtactttctgattaacctgattccggcgtggttgcgcagcgagcaggtggatttgaagagcatcgggctgatggcgttaatcggtctgccgtttacttggaaatttttgtggtcgccgctgatggacgcggtcaggctgcccgttttgggacggcggcgcgggtggatgctgctgacgcaggcagggttgctggcggctttggcggcctatgcctttttaaacccccgtaatcatctgccgctgattgccggcttgtcggtgcttgtcgcttttttttccgccagtcaggatattgtattggatgcgttcaggcgcgagattttgtcagacgaagaattgggtttgggcaactcggttcatgtgaacgcctaccggattgccgccctgattcccggttcattgagtttggtgttggcagacaggatgccgtggtcagaagtatttgttatcacttcattatttatgctgcccggccttctgatgacgctgtttcttgcgcgcgaacccgtgttgcctcctgccgttcctaaaacgttgaagcagaccgtggtagagccgtttaaagaattttttacgcgcaagggcatcgcttcggcggtgtgcgtgctgctgtttatcttcctttacaaactcggcgacagtatggcaaccgcgttggcaacgccgttttatctggatatgggtttcagcaagacagacatcggtttgattgcaaaaaatgcaggactgtggccggcagtggcggcaggtatcttgggcggcgtgtggatgctgaaaatcggcgtaaacaaagccttgtggctattcggcgcggtgcaggctgtaaccgttttggggtttgtatggctggcagggttcggacatttcgacacggtcggcacaggcgagaggctgatgctggcggcagttatcggcgcggaagcggtcggcgtggggttggggacggcggcgttcgtatcgtatatggcgcgcgagaccaatcccgcatttaccgcaacgcagcttgcgctgtttaccagcctgtccgctgttccccgtacggtcatcaattcctttgccggttatctgattgaatggctcggttatgtaccgtttttccaactgtgtttcgtacttgccctaccgggtatgctgctgctgctgaaagttgcgccttggaacggggagaaaactcaggatgcaggcagatga

SEQ ID NO: 40897 - DNA, 825 bp, Neisseria meningitidis
atgttgaaaaaattcgtactcggcggcattgccgcattggttttggcggcctgcggcggttcggaaggcggcagcggagcatcttccgcgcctgcacaatcggcagtttccggttctttaatcgagcgcatcaacaataaaggcacggttaccgtcggcacggaaggcacttacgcaccgtttacctaccacgacaaggacggcaaactgaccggttacgatgtggaagtaaccctcgccgtggcggaaaaactgggcgtgaaagtcgagtttaaagaaacgcaatgggattcgatgatggcgggtttgaaggcggggcgtttcgacgtggtggcaaaccaagtcggtctgaccagccccgaacgccaagcgacattcgacaaatccgatccttacagctggagcggtgccgtattggttgcccgtaacgacagcaacatcaaatctatcgacgacatcaaaggcgtgaaaactgcacaatccctgaccagcaactacggcgaaaaagccaaagctgcaggcgcagatttggtggctgttgacggtttggcgcaatcgctgaccctgattgaacaaaaacgtgccgatgcaaccctgaacgacgaattggcggttttggactatctgaagaaaaacccgaatgcgggcgtgaaaatcgtttggtccgcacctgccgatgaaaaagtcggttccggcctgattgtcaacaagggcaatgacgaagccgtggcgaaattcagtacggcaatcaacgagctgaaagccgacggtacgctgaaaaaactgggcgaacaattcttcggaaaagacatcagtgttcaataa

SEQ ID NO: 40898 - DNA, 570 bp, Neisseria meningitidis
atgccgtctgaacgcggcggcattctgttaaaatgcgctattggaaaaaattcgagaatcaagatgtttgaacaagaagacgaatggatcagcaaaacccaaatgaaaaagcagatgaacggtttgcaggatttgggtatggaactgaccaagctctcaaacgatacgctgaaaaaaatcggcttggacgaagatttgtacgaagccgtcgttacctataaaaaaattacgtccaacggcgcgctcaagcggcaggcgcaatttatcggcaggctgatgcgcgacacggatcccgcgcccatcgaggcgtttcttgccaagctgcgcggcgacgatgcggcgcacaacgcctttttgcaacgcgtggaacaggcgcgcgtacggctgttggcagacgacggcgcgttgacgcagtttatgtcggattttccgcatgcggacgcgggcaagctgaggacgctcgtccgcaacaccaaaaaagagcaggagcaaaacaaaccgccgaaaaacttccgcgcgctgtttcaagaattgaaaaccgtgatggaaaacggggacgcggaaatttag

SEQ ID NO: 40899 - DNA, 396 bp, Neisseria meningitidis
atgatgcggcgacggggtaaaaaaatgttgtttgaagaaaatccgatagacggacattttacagagtatagccaccggtcgggtgaaatccgattggcgggtcaaagtttccataaacccgtgcttgtacataaggattcggtctgcctgtcgcaatgccgaaccttgtccgatctgactccggaaaacctgttgtccgacatcaaacctgttgactatccggaaatattgattatcgggacgggcgcggctcaggagtttatccatcccaaaatcatggcggatttttcccgaatcggaatcagcgtggaatgcatgaataccgattcggcattcaggacattggttttcctgcactcggaagggcgcagggcttgggcttggcttcagccgtaa

SEQ ID NO: 40900 - DNA, 1404 bp, Neisseria meningitidis; identical to SEQ ID NO: 39890

SEQ ID NO: 40901 - DNA, 171 bp, Neisseria meningitidis; identical to SEQ ID NO: 36504

SEQ ID NO: 40902 - DNA, 819 bp, Neisseria meningitidis
atgactgcccctaaacccgaattgcccgactatctcggcaacatccgcatcgtcctcacgcgcaccagccatcccgccaacatcggctctgccgcgcgcgcgatgaaaacaatgggtctgcacaaactgaccatcgtcgcccccaatctgatggcaacgccgatgacggagaatccgcccgtattcgatccggaatatccgcaatcgtttaaatcaccggaagaaagcttcatcctcgcttccggcgcggcagatgttttggaaaatgccaccattgccgcctctttggacgaagcccttgccgacaccaccatcgcctgcgccctgaccagccgccgccgcgaaattactgcgccgctgcaaaccccgcgcgatttggtatccgaattactgcagaccgcaaaccgaggcgagaaagtggcactggttttcggcaacgagactttcggcttgagcatcgaagaagtccaagcctgcaaccgactgatgaccatcaacggcaatcccgactatttctcgctcaacctcgcccaagccgtgcaggtcgtgtgctacgaaatcttcagccaaaccggttcgcccatgacccatcttcaacaagaagaccacgctgcgacccacgagcaaatcaaaggcatggtcgcccacatggaaagcgtgatgaacgacatcggctttttcaaccgccgcaacggcgagcgcctgatgcgccgtatgcagagcctcttcggacgcgccaacacgcaaacggaagacatcgacatcctgcgcggttttttcaatacgctgcaacagcgtctgaaggacgggcaatcctaa

SEQ ID NO: 40903 - DNA, 594 bp, Neisseria meningitidis; identical to SEQ ID NO: 37729

SEQ ID NO: 40904 - DNA, 1983 bp, Neisseria meningitidis
atggttattttgacgactttgttttttgtgtgtgttttggcggtattggttttaaccgtgccggatcaggtgcagatgtggctcgatcgggcaaaagaagtcatttttaccgagttcggctggttttatgttttaacgttttccatttttctgggtttcctgctgatactctcggtcagcagtttgggaaacatcaggctcggacgggatgaagatgtgccggaattcggcttcctgtcgtggctggcgatgctgtttgcggccgggatgggcgtgggtctgatgtttttcggcgtggcagagccgttgatgcattatttttcggacattacggccggcacgccggaacacaggcagcagcaggcattgctgcacacggtgtttcattggggcgttcacgcttggtcggtgtacggtacgattgcattggctttggcttatttcggtttccgctacaagctgccgcttgccctgcgttcttgtttttaccccctgttgaaagaaaaaatttccggaaggttcggcgatgccattgatattatggcgttgcttgctacttttttcggcatcatcaccacattggggttcggggcttcgcaactgggcgccggattgcaggaaatgggctggattgccgaaaacagcttcagcgtgcaggttttgattatcgccgccgtcatgtccctcgccgtcgtttcggcaatatccggcgtggggaagggcgtgaaggtgttgagcgagttgaacctgagccttgcgtttttgctgctgttttttgttttggcggcgggtcccactgtttacctgttgtcggcattcggcgacaacatagggaactacctcggaaatctggtgcgcctcagttttaaaacttatgcgtacgaacgggaacacaagccgtggtttgaatcttggacggtgctttattgggcgtggtggtgttcttgggcgccgtttgtgggtttgtttatcgcgcgcatttcaaaggggcgcaccatccgcgagtttgtcttcggggttttgctcatccccggcctgttcggcgttttgtggtttaccgtcttcggcaatacggcgatttggctgaatgacggggttgcggggggaatgctcgaaaagatgacctcctctccggaaacgctgctttttaaattctttaattacctccccctgcccgaattgacgagcatcgtcagcctgctggtcatttctctgttttttgtaacttctgccgattccgggatttatgtcctgaacaatattacctctcgggacaaaggcttgagcgcgccacggtggcaggcggttatgtggggcgtgctgatgtctgccgttgccgttttgctgatgcgctcgggcggactcggcaacctgcagtctatgaccctgattgtttccctgccgtttgccctgctgatgctgataatgtgtttcagcctgtggaaaggcttgagtgcggataagaaatattttgagacccgggttaaccctaccagtgtattttggacgggcggcaagtggaaagaacggctggtgcagataatgagccagacgcaggagcaggatattttaaaattcctcaaacataccgcatcgcccgctatgcacgagttgcaacgggagctttcggaagaatacggcttgagcgtccgggtcgataagatgtttcatcaggacgagcccgcaatcgagttcgtcattcggaaagagacgatgcgcgattttatgtacgggattaagtctgtcgggcaggatgtatccgaccagttgattaacgacggcaagctgccgcatatccggcatcagacaacttacaaaccctacgcttattttttcgacgggcgcgtcgggtacgatgtgcagtatatgaacaaggacgagctgattgccgacattttgaaaaactacgaacgttatttgatgttgttggatgatgtcggtcaggaactgatggcgcacgagcaggtggaattggcagagtaa

SEQ ID NO: 40905 - DNA, 2043 bp, Neisseria meningitidis
atgatgtcgcccgaaacccgaaaacagctcaaaatcaccgatgtttccgccaagaagctcgaaaaactcaacctccataccgcatgggatttggtgttgcacctgccgttgcgttacgaggatgagacgcacatcatgccgattaaggatgcgccgatcggcgtgccgtgtcaggtcgagggcgaagtcatccatcaggaagtaacgttcaaaccgcgcaagcagctgattgtccaaatcgccgacggctccggcagcgtccttttcctgcgcttcatccacttttacgccagccatcagaagcagacggcgatcggcaaacgcatccgcgccgtgggcgaaatcaaacacggcttttacggcgacgagatgattcatcccaaaatccgcgatgccgagggcggcggtttggcggaaagcctcacgccggtttacccgaccgtaaacggtttgaaccagcccactttgcgccgtattattcagacggcgttggacgttacgccgctgcacgacacgctgcccgatgccctgctgtgccgtctgaagctgccacacctcgccgaaagcctgcgtcttttgcattcgccgccgccgagtttcacgattcatcaactttcagacggcacgctcccctcatggcagcggctcaaattcgacgaacttttggcgcaacagctttcgatgcgcttggcgcggcagaagcgtatcggcggctcggccacagcattgagcggcgacggcacattgactcaagccctgcgccatgcgttgccgtttgccctgaccgatgcacaaaaaaaagttgtttccgaaatttgccgcgatatggcacaaacctatcccatgcaccgcctgttacaaggcgatgtcggcagcggtaaaaccattgtggctgctttgtctgctttgacggctatcgaatccggcgcgcaggtggctgtaatggcgccgaccgaaatccttgccgaacagcactttatcaagttcaaacaatggctcgaacccttaggtctcgaagtcgtttggctttccggcagccagcgcaaaaaagccaaagacgaagccaaagccaaactcgccgacggcagcgtcaaaatcgccgtcggcacgcacgccctgttttcagacggcgtggcgtttcacaatttgggcttgagcattgtggacgagcaacaccgcttcggcgtcgcccaacgcctcgccctcaaaaacaaagggtgcgacgtccaccagttgatgatgtccgccacccccatcccgcgcacgcttgccatgagtttcttcgccgacttggacgtatccgtcatcgacgaattgccgcccggccgcaccccgattaaaacccgcctcgtcaacaacgtccgccgcgccgaagtcgaaggcttcgtcctcaacatctgccgcaaagggcagcaggcgtattgggtttgtccgctgattgaagaaagcgaaaccctgcaactgcaaaccgccgccgaaaccctcgcccggcttcagacggcattgcccgaactcaatatcggactggtacacgggcgcatgaaggccgccgaaaaggccgaagtgatggcgcggttttcttcgggggggctgaatgtcttggtcgccaccaccgtcatcgaagtcggcgtagatgtgcccaatgccgccctgatggtcatcgaacacgccgagcgcatgggcttggcgcagctgcaccaattacgcggacgggtagggcgcggcgcggcagaaagcgtgtgcgtcctcctgtttgccgaacccttgggcgaactcgccaaagcgcggctgaaagtgatttacgaacacaccgacggctttgaaatcgcccgccaagacctcaacatccgcggccccggcgaatttctcggcgcgcgccaaagcggcgtgcctatgctgcgtttcgccaagctcgaagaagacttacaccttttggaacaagcgcgcgaaaccgccccgatgctgattgaacaaaaccccgaaatcgtcgaagcgcatttggcaagatggctttccggcagggaaggttatttgggcgtgtga

SEQ ID NO: 40906 - DNA, 1227 bp, Neisseria meningitidis
atgaataccgataacctgcacgacatcttggacgaaatggttcaagtgtattctcaaaaaaaacaaagccgatccgaaaccccggccgaaatcggcgcacacttccacccgctgctcgaccgcctgtgcgaaaccgcagaagcacaaaacgcgtccgacatccttatcagcaaaggattcccgccctcgttgaaaatcaacagcgcattaaccccgcagccgcaaaaggcgctgacgggcgaggaaaccgccgccatcgccgcatcgacgatgaacgccgaacaatcggaaatattccggcgcgacggcgaaatcaactactccgtccagtcgcgcagcggcacgcgctaccgcgccaacgcctaccacagccaaggcagcgcaggtttggttttgcggcgcatcaaccacgtcatcccgcaaatgcaggaattgggcctgcccgaaaaactcaaagacctcgccgtcgcaccgcgcgggctgctgattatcgtcgggcctaccggttcgggcaaatccaccacgatggcgactatgctcgaacaccgcaacaaaaccctgcccagccatatcgttaccatcgaagacccgattgagtttatctacaaaccgcgccgctgcatctttacccagcgcgaaatcggcgtcgacaccataaactggcagacggcggtacaaaacgctatgcgccagtcccccgacgtggtctgcatcggcgaagtccgcagcagggaaagtatggaatacgcgatgcagctcgcccaaaccggccacctgtgcatttttacgctccacgccaacaccgcgccgcagtcgctcgaacgcatactcaacttctaccccaaagaacagcacaaccaaatactgatcgacatcgccctcaacctgaccggcatcatctgccaacgcctcgccctcaaacaagacaaaacgggcaggacggcggttgtcgacttgctcatcaacacgcccgccatccaagacttcatcctgaagggcgacctgatgaacatcagtaaaatcatggaaaccgccaaaaccgacggaatgcagacgatggatcaaaaccttttcgaactgtaccgtcacggcatcatcagttacgaagaagccctgcgccagtccgtttccgccaacaacctgcgattgcacatccaactgcacaaagaaggcaaaacgcccgaactcctttacgacagggtcaacggtctcaacctcatttcctga

SEQ ID NO: 40907 - DNA, 333 bp, Neisseria meningitidis
atggagatagaaaaacggtttaccgtgtacgaaattgagcaagtcgcacagttgtctagtggttatgctatgcgcttgtacgagttttttatgcagtactttgataaacaaacaggaaaaggctggcttgaagtttcccttgttgatttgcgttttcgttttggtctacttcctaatgaatatgcaagaataggaaattttaaaactagggttattgattattctatcaatgaaatcaataagaaaactgatttaaccgctacttacgaacaaagaaaaaatgggcgcgttattactggttttcgctttgaattcacgagaaagcaacagcag

SEQ ID NO: 40908 - DNA, 1743 bp, Neisseria meningitidis
atgaaattttttcctgctccatgtctgttggttatcctggctgtcataccccttaaaaccttagctgccgatgaaaacgatgcagaacttatccgttccatgcagcgtcagcagcacatagatgctgaattgttaactgatgcaaatgtccgtttcgagcaaccattggagaagaacaattatgtcctgagtgaagatgaaacaccgtgtactcgggtaaattacattagtttagatgataagacggcgcgcaaattttcttttcttccttctgtgctcatgaaagaaacagcttttaaaactgggatgtgtttaggttccaataatttgagcaggctacaaaaagccgcgcaacagatactgattgtgcgtggctacctcacttcccaagctattatccaaccacagaatatggattcgggaattctgaaattacgggtatcagcaggcgaaataggggatatccgctatgaagaaaaacgggatgggaagtctgccgagggcagtattagtgcattcaataacaaatttcccttatataggaacaaaattctcaatcttcgcgatgtagagcagggcttggaaaacctgcgtcgtttgtcgagtgttaaaacagatattcagattataccgtccgaagaagaaggcaaaagcgatttacagatcaaatggcagcagaataaacccatacggttcagtatcggtatagatgatgcgggcggcaaaacgaccggcaaatatcaaggaaatgtcgctttatcgttcgataaccctttgggcttaagcgatttgttttatgtttcatatggacgcggtttggtgcacaaaacggacttgactgatgccaccggtacggaaactgaaagcggatccagaagttacagcgtgcattattcggtgcccgtaaaaaaatggctgttttcttttaatcacaatggacatcgttaccacgaagcaaccgaaggctattccgtcaattacgattacaacggcaaacaatatcagagcagcctggccgccgagcgcatgctttggcgtaacagacttcataaaacttcagtcggaatgaaattatggacacgccaaacctataaatacatcgacgatgccgaaatcgaagtgcaacgccgccgctctgcaggctgggaagccgaattgcgccaccgtgcttacctcaaccgttggcagcttgacggcaagttgtcttacaaacgcgggaccggcatgcgccaaagtatgcccgcacctgaagaaaacggcggcggtactattccaggcacatcccgtatgaaaatcataaccgccggattggatgcagcggccccgtttatgttgggcaaacagcagttttcctacgaaaccgctatccatgcacaatggaacaaaacgcctttggttgcccaagacaagttgtctatcggcagccgctacaccgttcgaggatttgacggtgaacagagcctttccggagagcgtggtttctactggcagaacactttgggctggcatttccatccgcgccatcaattctatctcggtgcggactatggccgcgtatctggcgaaagtgcccaatatgtatcgggcaagcagctgatgggtgcagtggtcggcttcagaggagggcataaagtaggcggtatgtttgcttatgatctgtttgccggcaagccgcttcataaacccaaaggctttcagacgaccaacaccgtttacggcttcaacttgaattacagtttctaa

SEQ ID NO: 40909 - DNA, 648 bp, Neisseria meningitidis
atgagaatagagatcacaccaatcagcgaatccgctttggtctgccgactgaatgcgccttccgaactgggcaaacagcaaaagttgtgggcgtttgccgctgcgctcgggcagcacgacaggattgaggaagtggtggtcggcatgaacaatctgaccgtgtttacccgtttcgataccgatttggcgacgcttgccgatgaattgcaatatgtgtgggaacacaccgccgttacagaccatcagggcaaactggtggaaattcccgtctgctacggcggcgaatacggcccggatttggcggaagtcgctgctttccatcagacggttatttccgaaatcgtccgccgccatacggcgcaaacttataccgtatttatgatgggcttccagcccggtttcccttatctgggcggcttgcccgaagcattgcacacgccccgccgtgccgtgccgagaacgtccgttcctgccggttcggtcggtatcggcggcagtcagaccggtgtgtatccgttcgcttcgcccggcggctggcagattatcggcagaaccgaattacccttgttccgagccgatttgaatccgccgaccctgctggcggcgggtgaccaagtccgctttgttgcagaaaggattgagccatga

SEQ ID NO: 40910 - DNA, 1071 bp, Neisseria meningitidis
atgtatcggaggaaagggcggggcatcaagccgtggatgggtgccggtgcggcgtttgccgccttggtctggctggttttcgcgctcggcgatactttgactccgtttgcggttgcggcggtgctggcgtatgtattggaccctttggtcgaatggttgcagaaaaagggtttgaaccgtgcatccgcttcgatgtctgtgatggtgttttccttgattttgttgttggcattattgttgattatcgtccctatgctggtcgggcagttcaacaatttggcatcgcgcctgccccaattaatcggttttatgcagaacacgctgctgccgtggttgaaaaatacaatcggcggatatgtggaaatcgatcaggcatctattattgcgtggcttcaggcgcatacgggagagttgagcaacgcgcttaaggcgtggtttcccgttttgatgaggcagggcggcaatattgtcagcagtatcggcaacctgctgctgcttcccttgctgctttactatttcctgctggattggcagcggtggtcgtgcggcattgccaaactggttccgaggcgttttgccggtgcttatacgcgcattacaggcaatttgaacgaggtattgggcgaatttttgcgcgggcagcttctggtgatgctgattatgggtttggtttacggtttgggattggtgctggtcgggctggattcggggtttgcaatcggtatggttgccggtattttggtttttgttccctatttgggcgcgtttacaggactgctgctggcaaccgtcgccgccttgctccagttcggttcgtggaacggcatcctatcggtttgggcggtttttgccgtaggacagtttctcgaaagttttttcattacgccgaaaatcgtgggagaccgtatcggcctgtcgccgttttgggttatcttttcgctgatggcgttcgggcagctgatgggctttgtcggaatgttggccggattgcctttggccgccgtaaccttggtcttgcttcgcgagggcgtgcagaaatattttgccggcagtttttaccggggcaggtag

SEQ ID NO: 40911 - DNA, 1311 bp, Neisseria meningitidis
atgaccgatttgtttgcccgagaacccgacgcgccgcttgccgaacgattgcgtccgcatacgcttgacgacgtggtggggcaggaacacctcatcggcgaaggtaaacctttgcgcgtggcggtagaaggcggcaagccgcattctatgttgctgtgggggccgccgggcgtgggcaagacgacgttggcgcggattttggcgcagagtttcaacgcccagtttttgcctgtttccgccgtattttccggcgtgaaggacatccgcgaggcaatcgataaagccgaaatcgctttgcagcagggacgcgcgacgattttgtttgtcgatgaagtccaccgcttcaacaaggcgcagcaggacgcgtttttgccgcatgtcgaaagcggtttgctaacctttattggtgcgacgacggaaaatccgtcgtttgaagtcaatcccgcgctgttgagccgcgctcaggtgtatgttttgcaacccttgtcttcagacgacctgaaaaagctgattgccaaggtattggctttgcctgaataccaagagtttacgattgaaacggatgcgcaaaaattactcgtgaataccgccgacggtgatgcgcgcaggttgttgaatctgttggaacaacttttacgcgccgccgacacgcgccgtctgaaaaccctgaccgccgaatttctcgccgacagtctcggggcgcaaatccgccgtttcgacaaaggcggcgagagtttctacaaccaaatctccgccctgcacaaatccgtgcgcggttcgcatccaaacgccgcgctgtattggttttgccgtatgctcgacggcggcaccgacccgcgctacctcgcccgccgcatcgtgcgtatcgcttgggaggacatcgggcttgccgacccgcgcgccttccaaatcgccaacgatgccgccaccacctttgaacgcttaggctcgcccgagggcgaactggctttggcgcaagccgtgctgtaccttgctgccgccgccaaatccaacgcgggctacaaagcgtataaacaaatgcgccgatttgttgcagaaaacagcagcgacgaagtgcctgtccatcttcgcaacgccccgaccaagctgatgaaggaattgggctacggacgcgaataccgctacgcccacgacgaaccgaacgcctacgccgccggcgaaagctatatgcccgacggactggacgaacccgatttctatcaacccgtcccgcgcgggttggaaatcaaaatcggcgaaaagctggcgtggctcaaatcgctggatgaagaggcattaaaggcaaaatga

SEQ ID NO: 40912 - DNA, 2283 bp, Neisseria meningitidis
atgacggtttttcggatttgctttattatccgtttatttttgaaatatctggggtggggagacgtgttccgtcgttggtttttgccgtgttgggttgtcggtgcggcggcttcgtttgcgctgccggtcgtgccgcattggctgttttggctggcggcttttgcggtttttgctgtgtttgcaaggcgttttgcgtttgccggtctgatgctgtgcgtgttggcgggcgcggcttacggcgtattcaggacggaggcggcattgtcttcccaatggtgggcagaagccgtttcaggcgtgcctttgacggtggaagtggcggatatgccgaggtcggacgggcggcgtgtgcagtttgcggcaaaggctgtggacagcggtggtcggacgtttgatttgctgctgtcggactacaaacggcgcgaatgggcggtcgggagcagatggcggataacggcacgtgtgcaccctgtcgtcggggagttgaacctgcgcggtttgaaccgtgaggcgtgggcattatccaacggaataggcggcgcggggacggtcggtgcggacagggttttgctgcatggcggaagcggttgggggattgcggtttggcgcagccgcatcagccgtaattggcagcaggcggatgcggacggcgggctttcagacggcatcgggctgatgcgcgcgttgagcgtgggcgaacagtcggcattgcgccccgaattgtggcaggcgttccggccgttggggctgacgcatttggtcagtatttcgggtttgcacgttacgatggtggcggtaatgtttgcgtggctggcgaagcggctgcttgcctgttccccgcgccttcctgcccggccgcgcgcgtgggttttggcggcggggtgtgcaggcgcgctgttttacgcgctgcttgccggtttttccgtgccgacgcagcgcagcgttttgatgttggcggcgtttgcgtgggcttggcgcaggggaagattgtcggcgtgggcgacgtggtggcaggcgttggcggcggtgctgctgttcgacccgtcggcggtcttgggtgtggggacttggctgtctttcggtttggtggcggccctgatatgggcgtgctcggggcgtttgcacgagggaaaacggcaaactgctttgcgcgggcagtgggcggcttcggtgttgtcgctggttttgctcggttatctgtttgcttcgctgcctttaatcagccctttggtcaatgcggtggcaattccgtggttttcttgggtattgacgccgctggcgttgctgggttcggtcgtgccgtttgcgcctttgcaacagttgggggcatttttggcggaatatactttgcggtttttggtgtggcttgccgatgtgtcgcccgagtttgccgttgcctccgcacctttgccgctgttggtgttggcggtgtgtgccgctttgctgttgctgctgccgcgcggcttgggtttgcgtccgtgggcggtgttgctgttggcagggtttgtgttttaccgttcacccggcgtgccggaaaatgaggttgcggttacggtttgggatgcggggcagggtttgtcggtgtcggttcagacggcaaatcatcatcttttgtttgacaccggaacggcagcggcggcgcagatggggattgtgccgagtttgaatgcggcgggtgtccgccgtttggacaagctggttctgtcgcatcacgacagcgaccacgacggcggttttcaggcagtcggcaagataccgaacggcgggatttatgccgggcagccggaattttatgagggggcgcggcattgtgcggaacagcgttggcaatgggacggcgtggattttgagtttttgatgccgtctgaacgcaaaaacatcgatgataatgggaaaagttgtgttttgcgtgttgtggcgggcggtgcggcactgctggtaacgggcgatttggatacgaagggcgaggaaagcctggtcggcaagtatggaggcaacctgtacagccaggttttggttttgggacatcacggcagcaatacgtcctcgtcgggcgtgttcctcaatgccgtctcgcccgaatatgccgttgcttcaagcggttatgccaacgcctacaaacatccgaccgaagcggtgcagaaccgtgtccgcgcacacggcatcaaactgctgcgtaccgatttgtcgggcgcactgcaattcggcttgggacgcggcggcgtgaaggctcaacgtttgagagggtataaattctattggcagaaaaaaccgtttgaatga

SEQ ID NO: 40913 - DNA, 630 bp, Neisseria meningitidis
atgagtgaaaccgaaaatcaagccctgacgtttgccaaacgtctgaaggcggataccacggcggttcacgacagcgtggataatctcgttatgtctgtccaaccgtttgtcagcaaagaaaactacatcaaatttttgaaactccaatccgttttccacaaggccgtcgaccacatctataaagatgccgaattaaacaaagccattcccgagctggaatacatggcgcgatacgatgccgtaacgcaagaccttgcagatttgggcgaagagccttacaaattcgacaaagaattaccgcatgaaaccggcaacaaagcaatcggctggctttattgcgccgaaggatccaatttgggcgcggcgtttttgttcaagcacgcgcaaaaactcgattacaacggcgaacacggcgcgcgccacctcgctccgcatcccgacgggcgcggcaaacactggcgcgccttcgtcgagcatctgaacgctttgaacctgactcccgaagccgaagcggaagccatccaaggcgcgcgcgaagcctttgcattctacaaagtcgtgttgcgcgaaaccttcggcttggcagccgatgccgaagcccccgaaggtatgatgccgcacaggcactaa

SEQ ID NO: 40914 - DNA, 4176 bp, Neisseria meningitidis
atgaatttgttgaacttatttaatccgttgcaaactgccggcatggaagaagagtttgatgccattaaaatcggtattgcctctcccgaaaccatccgctcatggtcttatggcgaagttaaaaaacctgaaaccatcaactaccgtacgttcaaacctgagcgtgacggtttgttctgtgccaaaatctttggcccggtcaaagactacgaatgcttgtgcggaaaatacaaacgcttgaaatttaaaggcgtaacgtgtgaaaaatgcggcgtggaagtaaccctgtccaaagtgcgccgcgaacgcatgggtcatatcgaattggctgcgcccgtcgcacacatttggttcttaaaatccctgccttcccgcttgggtatggtactggacatgactttgcgcgacatcgaacgcgtattgtactttgaagcatttgtggtaaccgatcccggtatgactccgctgcaacgccgccaattgctgactgaagacgattactacaacaagctggacgaatacggcgacgacttcgatgccaaaatgggtgcagaaggtatccgcgaattgctgcgtaccttgaatgtagcaggcgaaatcgaaatcctgcgccaagagttggaatcgaccggttccgacaccaaaatcaaaaaaatcgccaaacgcttgaaagtattggaagccttccatcgttccggtatgaaactggaatggatgattatggatgtgctgccggtattgccgcctgatttgcgtccgttggttccattggatggtggtcgttttgccacttccgatttgaacgatttgtaccgccgcgttattaaccgtaacaaccgtctgaaacgtctgttggaactgcatgcgcccgacattatcgtccgcaacgaaaaacgtatgttgcaagaagcagttgactcgctgttggataacggccgtcgcggtaaagccatgaccggcgccaacaaacgcccgctgaaatcattggcagacatgattaaaggtaaaggcggtcgcttccgtcaaaacctgttgggcaaacgtgtggactactccggccgttccgtgattaccgtaggcccatacctgcgtctgcaccaatgcggtctgccgaaaaaaatggctttggaactgttcaaaccgttcattttccacaaattggaaaaacaaggtttggcctctaccgttaaagcagcgaaaaaattggtagagcaagaagtaccggaagtatgggacatcttggaagaagtcatccgcgaacatccgattatgctgaaccgtgcgccgaccctgcaccgtttgggtattcaagcgttcgaacctatcttgattgaaggtaaagcaattcagttgcacccattggtgtgtgccgcgttcaacgccgactttgacggcgaccaaatggcggtacacgtcccattgagcttggaagcacaaatggaagcacgcacgctgatgctggcttcaaacaacgtattgtctcctgccaacggcgaaccgattatcgtaccttcccaagatatcgtattgggcctgtactacatgacccgcgaccgtatcaatgccaaaggcgagggcagcctgtttgccgatgtgaaagaagtgcatcgcgcataccataccaaacaggtcgagctgggtacgaaaatcaccgtacgtctgcgcgaatgggtgaaaaacgaagcaggtgagtttgagcctgtcgttaaccgttacgaaacaaccgtcggccgtgcattgttgagcgaaatcctgccgaaaggcctgccgtttgaatatgtcaacaaagcgttgaagaaaaaagaaatttctaaactgattaacgcatcgttccgcctgtgcggcttgcgcgatacggttatctttgctgaccacctgatgtacactggtttcggatttgcggcaaaaggcggtatttccattgccgttgacgatatggaaattccaaaagaaaaagcggccttgctggctgaagccaatgccgaggttaaagaaatcgaagaccaataccgtcaaggtttggttaccaacggcgaacgctacaacaaggtggtcgatatttggggtcgtgccggcgataaaatcgctaaagcgatgatggacaacctgtccaaacagaaagttatcgaccgtgccggcaacgaagtcgatcaagagtcattcaactccatctatatgatggctgactccggtgcccgtggttctgcggctcagattaaacagttgtccggtatgcgcggtttgatggcgaaacctgacggctcgattattgaaacgccgattacctcaaacttccgcgaaggtctgaccgtattgcaatactttattgcgactcacggtgcgcgtaaaggtttggcggataccgcgttaaaaacggcaaactctggttacctgacccgtcgtctggtagacgtaacccaagacttggtcgttgttgaagacgattgcggtacttcagacggctttgtgatgaaagcagtggtacaaggcggtgatgtgattgaagcattgcgcgatcgtattttgggccgtgttaccgcgtctgacgttgtcgatccgtcaagtggcgaaacattggttgaagccggtacgttgttgactgaaaaactggtggatatgattgaccaatccggtgtcgatgaagtcaaagtccgcaccccgattacttgtaaaacccgccatggcttgtgtgcgcactgttatggtcgcgacttggcacgtggtaagctggtcaatgccggtgaggcagttggtgtgattgccgctcagtctatcggcgaaccgggtacccagttgaccatgcgcacgttccacatcggtggtgcggcatcccgtgcggcagcagccagccaagtggaagccaaatccaacggtacggcacgattcagcagccaaatgcgttatgttgccaacaataaaggcgagttggttgtcatcggccgttcttgtgaagtcgtgattcacgacgatatcggccgtgaacgcgaacgccacaaagtaccttacggtgccatcctgctggtacaagacggtatggccattaaagccggtcaaaccttggcaacctgggatccgcatacccgtccgatgattaccgaacacgcaggtatggtgaaattcgaaaacgtggaagagggcgttaccgttgccaaacaaaccgatgatgtaaccggtttgtccactttggtggtgattgacggtaaacgtcgttcctctagtgcttccaaactgctgcgtccgactgtgaaactcttggacgaaaacggcgtggaaatctgtattcccggtacttctactccggtatccatggcattccccgttggtgcggtgattaccgtacgcgaaggtcaggaaatcggtaaaggcgacgtattggcgcgtattccgcaagcctcttccaaaacccgcgacattaccggcggtctgccgcgcgttgccgaattgtttgaagcacgcgtgccgaaagatgccggtatgttggcggaaattaccggtaccgtttccttcggcaaagagaccaaaggcaagcaacgtctgattgttactgacgtggacggtgtagcatacgagaccttgatttccaaagagaaacaaattctggtacacgacggtcaagtggtaaaccgcggtgaaaccatcgtggacggcgcggtcgatccgcacgatattctgcgtttgcaaggtatcgaagcactggcacgctacattgtccaagaggtgcaagaggtttaccgtctgcaaggtgtgaagatttctgataaacacatcgaagtcatcatccgtcaaatgttgcgccgtgtgaacattgcggatgccggcgaaaccgggttcattaccggagagcaggtcgaacgcggcgatgtgatggcggccaatgaaaaagctttggaagaaggcaaagaaccggcgcgttacgaaaacgtattgctgggtattaccaaagcttccctgtccaccgacagcttcatttctgccgcatcgttccaagaaacgacccgcgttctgaccgaagccgcgattatgggcaaacaagacgagttgcgtggtttgaaagaaaacgtcatcgtcggtcgcttgattcctgccggtaccggtttgacttaccaccgcagccgtcatcaacaatggcaagaggtggaacaggagactgctgaaacccaagtaacggatgaataa

SEQ ID NO: 40915 - DNA, 693 bp, Neisseria meningitidis; identical to SEQ ID NO: 37236

SEQ ID NO: 40916 - DNA, 279 bp, Neisseria meningitidis
atgtactaccaagtcggaaataaatgtcttgagaagcaccaggctgaaaacctttatttcagcttggtagtaccaagaatcaaagaaaacggacagattgtcaggccggaatataacggcagcctgtggaagatgtcggacggtcagccgctaaggcttttattggcggaatgcagtccgaaaacctgtgtttgggtttcggctgtcgggagggaaaggaattttgcaaaggtctccggttgtgttttaatcaggtgttggtgtcgccgcatcgcttga

SEQ ID NO: 40917 - DNA, 666 bp, Neisseria meningitidis
atgaacctttttcaaaacgccaaattcttcacgacggtaaaccatctcaaagacctgccggacacaccgctcgaaattgcctttgtcggcaggagcaatgccggaaaatccagtgccatcaataccctgaccaaccatgtccgtcttgcctacgtttcaaaaacacccggacggacgcagcatatcaacttcttcgagctgcagaacggcaattttatggtcgatttgcccggctacggttatgcccaagtccccgaagcagtacgcgcacattgggtcaatctgctcggcgactatctgcaacagcgcaaacagcttatcgggctggttttgattatggatgcccgccatcctttaaaagaactcgacatccgtatgctggactttttccacacgaccggcagaccggttcacatcctgctgtcaaaagccgacaaattatccaaaaacgaacagataaaaaccctgtcccaagtcaaaaaactgctcaaaccttattccgacaggcaaaacatcagcgtacagctgttttccagcctgaaaaaacaaggtattgacgaggccaaccgaactgtcggaagctggtttgacgcagcagatgccgccgcttcctctccaaaggaaaacttaccccaattatacggaaaccgtatttcccccacttga

SEQ ID NO: 40918 - DNA, 759 bp, Neisseria meningitidis
atgaaaatcacccccgtcaaagccctaaccgacaactacatctggatgatacagcacggcaaccatgccgtctgcgtcgacccttccgaaccctcgcccgtcttggaattcctcgtccgcaaccgcctcatgcttgcccaaacatgggtaacgcacccccaccccgaccacgagggcggtgcggcggcactctggcgcggctacatggaatcgcccgtttacggcgaatccgacatcgaagcagcaacccacaccgtaaccgccggcacccaattcaccttcggcgacggacaggttaccgtttgggcaacacccggccacacagaccgccacaccagctaccttctcgaaacttcagacggcatacacgtcttttgcggcgacacccttttttccgccggctgcggacgcgtgtttaccggcacaatcgaacagctttacgacagcttccaacgcttcaaccgcctgcctgaaaacaccctgttctacccggcacacgaatacaccgccgccaacctggattttgccgcccatatcgagccggacaacgccgacattcagacggcactgaaagcggcggcgcatacgcctaccctgcccgttaccctcgcgcacgaacgccgcgtcaatccgtttttgcgcgtcgacctgccgcacgtcagagaccgcgccgaggcattgagcgggaaaacgttaaacagcagcctcgatacctttgtcgcgctgcgtgaacttaaaaaccaataccggacgaaataa

SEQ ID NO: 40919 - DNA, 1275 bp, Neisseria meningitidis
atgaaaacactgcaagactggctctcgcatttggaaaccgcccacagcggtggcttgatcgatatgggcttggaacgcgtaggcgaagtgaaaaaacggatgaagctcacgccgcaatgccccgtcgtcgttgtcgcgggaacaaacggcaaaggttcggtctgcgcctacctgacacagatttacaaacaggcaggctttaaagtcggtacgctgaccagcccgcatttattgcgttacaacgaacgcatcgccgtcaacgccgaacccgtttcggacgatacgattattgcctctttcgagcgcatcgaagcggcgcgcggcgaaatatcgctgacttattttgaattcaatgccttggcggcggtcgacatcttcatgcgcgaacaggttgacgtgatgatattggaagtcggcttgggcggacgcttggacgcggtcaacgcgtttgacggcgattgcgcggtggttaccagcgtggatttggaccatcaggcatttttgggcgatacggtcgagcaggtcggctttgaaaaagcaggcgtgttccgcagcggcaaacccgccatctgcggtcaaaaccccgcgcccaaatcgttgctttcacacgccgaagccataggcgcgaaactgctgatggtgcagcgcgatttcgagtttcacgcgatggaaaacatccaatggaactaccgcttccggccgcaacattcagacggccccgcacgcaaccgcaatgccctgcctttccctgcattacgcggcacataccagctttccaacgccgcctgcgcgttgaccgtattggaatgcttgaacgacaaattgcctgtggacatcggcgccatcaaacgcggtttgctgctggttgaaaaccccggccgcttccaagtcctgcccggccgtccgctgaccgttttggatgtcggacacaatccccacgctgcccgcgccctgcgccgcagcctgattaatttggcgtttgcgcaaaaacgcaccgccgtattcagtatgctgtccgacaaagacatagacggcgtgttggaaatcgttaaagaccagtttgacgagtggtatatcgcaccgttggacgtaccgcgcggcatgacgctcgagagcctgcaaaacaaactgcacgaacacagcatcgaaaacatacagacattcgccgccgtccgcgaagcataccgggcggcagcctcaaaagcgggcgagaacgacagaatcgtcgttttcggctcatttcataccgttgccgatgtcatgtcggtactttaa

SEQ ID NO: 40920 - DNA, 855 bp, Neisseria meningitidis
atgaaaatcgtcctgattagcgggttgtccggttcgggcaaatccgtcgcactgcgccaaatggaagattcgggttatttctgcgtggacaacctgcccttggaaatgttgcccgcgctggtgtcgtatcatatcgagcgtgcggacgaaaccgaattggcggtcagcgtcgatgtacgttccggcattgacatcggacaggcgcgggaacagattgcctatctgcgcggactggggcacagggttgaagttttgtttgtcgaggcggaagaaagcgtgttggtccgccggttttccgaaaccaggcgaggacatcctctgagcaatcaggatatgaccctgttggaaagcttaaagaaagaacgggaatggctgtttccgcttaaggaaatcgcctattgtatcgacacttccaagatgaatgcccaacagctccgccatgcagtccggcagtggctgaaggtcgaacgtacagggctgctggtaattttggagtccttcgggttcaaatacggcgtgccgaacaacgcggattttatgttcgatatgcgcagtctgcccaacccgtattacgatcccgagttgaggccttacaccggtatggacaagcccgtttgggattatttggacggacagccgcttgtgcaggaaatggttgacgacatcgaaaggtttgttacgcattggttaccgcgtttggaggatgaaagcaggagctacgttaccgtcgccatcggttgcacgggaggacagcaccgttcggtctatattgtcgaaaaactcgcccgaaggttgaaagggcgttatgaattgctgatacggcacagacaggcgcaaaacctgtcagaccgctaa

SEQ ID NO: 40921 - DNA, 321 bp, Neisseria meningitidis; identical to SEQ ID NO: 37761

SEQ ID NO: 40922 - DNA, 291 bp, Neisseria meningitidis
atgaccatccgtcctttacacgaccgcgttgtcgtcaaacgcttggaagctgaagagaaaaccgcatcgggcatcgttttgccgggtgcggccgccgaaaaacccgatatgggcgaagtcatcgccgtgggcgcgggcaaaatcggcaaagacggcgcgcgccgtccgctggatgtcaaagtcggcgacaaaatcattttcggcaaatacagcggccaaaccgtcaaagccgacggcgaagagctgttggtaatgcgtgaagaagatattttcggcatcgttgaaaaataa

SEQ ID NO: 40923 - DNA, 1773 bp, Neisseria meningitidis
atgatactgccagcccgtttttcagacggcatcagcctttccctacgcctgaaactcctgaccggactgtgggtcgggttggcggcattgtctgtcgttttgacactgctgctctctttgcgtctggaaaacgcggcctccgtcatcgaagaggcgggcaacttgagaatgcaggcataccgtctggcatacatggcgggtgaaggctcgccccgtgcgcaaattgacaatcaggttgccgaatttgaaaaaagtttaaaacgcattgcccaaagcgatgccatccatccgctgattccttcggacacccctcttgcttatgatttgatacaatccatgctgattatagattggcaggcacacatcctccccccgctccagtcctaccggcgaccgactcaggtcgatctctaccgctttgccggaaacatcgaactgtttttgcaggcattggaaaatgccaacgaaaaaaacacatggtggctcaggcgttttcaatgggcaattatgttgatgacgctggtgtcgtctgtactgatgctgttttggcaccagatttgggttatccggccgctgcaggcgttaagggaaggtgcggaacgcatcggacggaggtgtttcgatattccggttcccgaaggcggtacgccggaattcaaacaggtcgggcgttgtttcaatcaaatgggcggcaggttgaaaattttatatgatgatttggaaggacaagtcgccgagcagacacgcagtctcgaaaaacaaaatcaaaacctgaccctgctgtaccaaactacacgggacctgcaccaatcctacataccgcaacaggctgcagaacattttctaaaccgtatcctgcccgccgtaggagcagattccggcagagtttgtttggacggcggatccgatgtttatgtttccattcatcatgcggattgcggcacagcagcttcggatttggggaagtaccatgaggaaatcttccccattgagtaccagaacgaaacattgggcaggctgttgctcagctttccaaacggcatttctcttgatgaagacgaccgcatcctgcttcaaacactaggcaggcaattgggcgtatcgcttgccggcgcaaaacaggaggaagaaaaacgcctgcttgcagtattgcaggaacgcaacctgattgcgcaaggattacatgacagcatcgcacaagcattaacgttcctaaacctacaggtacagatgctggaaaccgcctttgccgaaaacaaacgggaggaagccgcagaaaacatcggcttcatcaaaacaggcgtgcaggaatgttatgaagatgtccgcgaactgctgctcaacttccgtaccaaaatcagcaataaagaatttcccgaagccgttgccgacctattcgcccgctttacgcaacaaaccgggataacggtcgaaaccgtttgggaaaacggcacgcacctgcctacacaggacgagcagctccaaatgattttcatccttcaagaaagcctgtccaacatccgcaaacacgcccgcgccacccatgtaaaattcaccctttccgaacacggcggacgctttaccatgaccatccaagacaacggacaaggtttcgacacggagaaaataggagaacctacgggcagccatgtcggactgcacatcatgcaggagcgtgccaagcgcatccatgccgttttagaaatccgttcccaagctcaacagggaaccaccgtctcattgacggttgcatctgaagaaagcttgaaatga

SEQ ID NO: 40924 - DNA, 423 bp, Neisseria meningitidis
atgaacacaacccgactgccgaccgccctcgtcttgggctgcctctgcgccgccgcttctgccgccgacaacagcatcatgacaaaagggcaaaaagtgtacgaatccaactgcgtcgcctgccacggcaaaaagggcgaaggccgcggaaccatgtttccgccgctctaccgctccgacttcatcatgaaaaaaccgcaggtgctgctgcacagcatggtcaaaggcatcaacggtacaatcaaagtcaacggcaaaacctacaacggattcatgcccgccactgccatcagcgatgcggacattgccgccgtcgccacttatatcatgaacgcctttgacaacggcggcggaagcgttaccgaaaaagacgtaaaacaggcaaaaaacaaaaaaaaactaaacagacaaaatgccgtctga

SEQ ID NO: 40925 - DNA, 369 bp, Neisseria meningitidis; identical to SEQ ID NO: 37026

SEQ ID NO: 40926 - DNA, 1179 bp, Neisseria meningitidis
atggcaaaaatgatgaaatgggcggctgttgcggcggtcgcggcggcagcggtttggggcggatggtcttatctgaagcccgagccgcaggctgcttatattacggaaacggtcaggcgcggcgacatcagccggacggtttctgcaacaggggagatttcgccgtccaacctggtatcggtcggcgcgcaggcatcggggcagattaagaaactttacgtcaagctcgggcaacaggttaaaaagggcgatttgattgcggaaatcaattcgacctcgcagaccaatacgctcaatacggaaaaatccaagttggaaacgtatcaggcgaagctggtgtcggcacagattgcattgggcagtgcggagaagaaatataagcgtcaggcggcgttgtggaaggatgatgcgacttccaaagaggatttggaaagcgcgcaggatgcgtttgccgccgccaaagccaatgttgccgagctgaaggctttaatcagacagagcaaaatttccatcaataccgccgagtcggaattgggctacacgcgcattaccgcaacgatggacggcacggtggtggcgattctcgtggaagaggggcagactgtgaacgcggcgcagtctacgccgacgattgtccaattggcgaatctggatatgatgttgaacaaaatgcagattgccgagggcgatattaccaaggtgaaggcggggcaggatatttcgtttacgattttgtccgaaccggatacgccgattaaggcgaagctcgacagcgtcgaccccgggctgaccacgatgtcgtcgggcggttacaacagcagtacggatacggcttccaatgcggtctactattatgcccgttcgtttgtgccgaatccggacggcaaactcgccacggggatgacgacgcagaatacggttgaaatcgacggcgtgaaaaatgtgctgattattccgtcgctgaccgtgaaaaatcgcggcggcaaggcgtttgtgcgcgtgttgggtgcggacggcaaggcggcggaacgcgaaatccggaccggtatgagagacagtatgaataccgaagtaaaaagcgggttgaaagagggggacaaagtggtcatctccgaaataaccgccgccgagcaacaggaaagcggcgaacgcgccctaggcggcccgccgcgccgataa

SEQ ID NO: 40927 - DNA, 3210 bp, Neisseria meningitidis
atgttttatctgtatcaatccaaccgtcttgaaacgctggcggcattgtttgcccgcattcaaaaagtcaaaccgctgaaatcggctttacagcccgaacagattattgtgcagagtcaggggatgcgccgctatctcaatacctgcctcgcccgcgatttgggcgtggcggcgaatttgtcgttcagcctgcccgccggcctgacgtggaagttgatgaaaaaactgattcccggtattccggaactcagcccgtttgcacccgaagtcatgcgctggcggctgctggatttgttccgcagtgaagcattccggaatacggcagaatttgaagatgtgaggaatgtgctgcaagactatctgggcagcggcgaatcggcagattaccagcttgcgggacagcttgcggacatattcgaccaataccttgtctatcgtccgcagtggatagacgcgtggcagcagggcaggatactcggtttgggcgacgatgagatctggcagtccaaactgtggcgttacctcgacgacggcaggcaaagcgcgccgcatcgtgtcgcgttgtgggaaaagctgttggaatctttaagcagtgataagctgcccgagcgttatttcgttttcggcatttccacgatggcaccgatgtatcttcagcttttgcacaagctgtccgaacattgcgacgtgttcgtgttcgcactcaatccgagcgggatgtattggggcaacgtcatcgaagcggcgcaaatcctcaaaggcggcggcgatcccgatttaactcaggcagggcatccgctgctcgcttcattgggcaagcaggggcgggactttttcgactttttgaacgaaatggaaatagaaggagaaacgccggtatttgaagaaggcgggcgcgatacgcttttgcacgccctgcaaaccgatattcaaaacctgaaaatgccgtctgaaaatgtgggaagcgtcggtacggatgacggctcgatacgcatcgtctccgcacacagccccttgcgcgaattgcagatactcaaagacaaactgttgaaaattctgcatgaacatcccgattggcagccgcatgatatcgccgtattaaccccgaacatcgaatcctatacgccttttatcgaagccgtgttcggacaggcgcagcccggtgcgcaggcattgccgtattccgtttcggacgtgaaaataagccgccgacaaccgctgtttcatgctttgtcatgcctgttcgacttgttggaaagccgatttgaagtcgataaagtgcttgtgcttttagaaaccgcacccgtgttgcgccgtttcggactgactgaggacgatttgccgcttttgcacgacatggttgccgatttgaacgtccgctggggtttggacggagaaatgcgcggcggcacggatcagctgtttacctggaagcaggcggtagaacgcatgatattgggctggatgctgcccgaaagcggcaatccgatgtggcaggatgtcagcgcgtggtatgccgacgtgaaccaaaccgccctgttcggacgttttgccgccctcctcgaaaccctgtcggatattgtacggatatggcagcaacctgcgacggtcggcgaatgggtggcgcgttgccgggatttgcttgaaacattgttccaaaccgaagccgatgaccaaaaggcagtccaaaacctcgaaaacgaatgggtcaaatggcaggcggaaaccgaattggcgcaattttccggacagttgccgccgcacaccgtcatccgccatatccgacgtttcctcgacagtgaaagcgaggcaggctttttacgcggcggcatcaccttttgcagtatggtgccgatgcggagcctgccgttcaaagtcatctgcctgttgggtttgaacgacggagattttccccgcaataccaaagccgccgtattcgacctgattgccaaacatcccgccaaaggcgaccgcgcccgccgcgatgacgaccgctacctcttcctcgaagccctcatcagcgcgcgcgaaatcctctacctgtcctacatcgggcgcgacatccgcaaagacgaagagcttgctccgtcttcgctgttgggcgaactcatcgacacagttgccgctatggcgggcatcggtagccgccaacttgcacaaaactggatagaacagcatccgctgcaagccttctcgcgccgatattttcaagaaggcggacgttcagacggcatattcggcacgcgtaccgactacgccaccgcgctcggacaaacgcccgaaccgccgcaaccctttttcgatcaacccgtagaaaacgccgaacctgttgccgaaatcggacaggacgaatttatccgcttctggcgcaaccctgtcaaagtatggcttcagcagcagcttgcgtggagcgaaccccatatcggcgaagcttgggagcctgccgaacccttcgagccgcaacacgccgatcaaatcgccgaaacctacatcgaagcacggcgcgaaggacgggattttgcccaaaccgccgcccgcatcggggcggaaagcctcctgccgtcgggagagttgggcagactttggcagcaggacttccaaactgctgccaaacaaatcgacacggcggttttaaacagccccaaactgccaccgctttcatatgccataccgtcggacgggcaaatcctgaaaggcagcttgggcaatctgtaccgctgcggacaagtgttttacgcctacggcaaacccaacgcgccgcaacgtatcgcttttctgctggaacacctgatattttgcgccgttatgccgtctgaagccgaaacgcggcaaacctttatcgtccaatccggagaaaccgaaatattggcggaaatcgcgcaagacagggcattgcagctattgtcggaatggatggcgtttttcaatatcgggcaaaaccgcccgctgccgttttttgccaaaacctcgcttgccaccgccgaagcgtttgcccaaaaacaagattgggaagccgccctgaaaaaagcccaaaccgcctaccacggcaacaaagtcagcaaagggcagaaagactataccgaagtcgccctcgtgttcggcaacgcaagccaaaacccgctcgaacagcccctgtttgaaaacctcgtccgtctgcttgccgacacgtttgccgcagcggaaaaaaaggaagaggccggagcagcctga

SEQ ID NO: 40928 - DNA, 1302 bp, Neisseria meningitidis
atgccgtctgaaaccgcccgccccctttatgcggacacgcgcgccgcacacacgctcgtctggttccgccaaaacctccgcatccgcgacaacgccgccttatgcgccgccgttgccgaaggtttgcccgttatcggtatttggattgacgatgccgaaacagacaaccctcgccgcgccgcgttctaccgccaatccgccgccgaactcgcccaagggcttgcagggcgcggcatcccgctctacacggcggcatcgcctgccgagctcgtccggctcgccgtccgcctcaatatccgcgccgtcatcgccgacgaatcccatacttttgccgacaaactcgccgacaacgccctttggcacgaattggacaaacacggcatcgcgttaaccttcgtcaacgaccgcgccgttttcggcaaaaccgacctgatacccgacggcggcacggcacacaccgatttcgaccgctaccgcgaagtatggctcgaccgcttttccaagcagccccccgccggtccggacctattcgcggcataccgccaacccttccccgaaaacctttccgccccgccgcctgccgccctttcagacggcatcttcctgccgcaaaacagcggcgaaacggcggcttggcggcagtggcggcggtttctcgaacaggcggattcctactccgttttaaaggatttcccctcgcgcaaacacacttcgctgatgggcgcgtatttgagtgccggctgcatctcgccgcgcctgctcgcgcgggaaagcctcgaacgccgtctgaacgcgtgggcggacaacatcatccgccgcgattttttccttcaacttgccttgcagtacgcggatgacgacccttcagacggcaatccggaacacaccctgcgcctgacgctttggcagcagggccagaccggcattccgattatcgatgccgcgatgcgctgtttgcacaaaaccggcagcctccaccccgccctgagacgcttgagcgcggactttttctgccacgttttaaacctcccccgccgcgaaggcgagatatggtttgcccgacagctgaccgatttcgatgcggcaatcaaccaaggcaactggcggcttgccgcctcacggcacacctgtcccgacattgccgccgcctcataccgtaccgacccggacggtacttttatcaaacggcacattcccgaactcgcccacctgtccgccgacaccgtccacacgccttggcggtttgcctgttcggtcgatacccacggctatcccgcccatcctgtcgccggtattccctaa

SEQ ID NO: 40929 - DNA, 306 bp, Neisseria meningitidis
atgattaccttgacgcattatctggtattgggtgcgctcctgttcggtatcagcgcaatgggtatctttatgaaccgcaaaaacgtgctggtcttgctgatgtccatcgagctgatgcttttggcggtgaacttcaactttatcgccttctcgcaacatttgggcgatgctgccggacaaattttcgtattctttgtattgaccgttgccgctgccgaatccgccatcggtttggcgattatggtgctggtgtaccgcaaccgacaaacaatcaacgttgccgatttgaacaaacttaaaggttga

SEQ ID NO: 40930 - DNA, 303 bp, Neisseria meningitidis
atgacttgggtcggaggctcaggtaatgcgcaacaaagctcatattattgcgaaatttgcgaatctgcagggcttaacgatacgggaaatcctgataaatctttaggattgccaaacaatacgttcagtaatccgcctggttggggagctacaatcggagctttagcaggtagccgcatagggatgcctgaatttggtacgtttgcgagccatgccattgaaaatttcgactggtcatggtatcgacgttatagggaaattgccgaaacgattgaacgagaatattcaggcggtttgccttaa

SEQ ID NO: 40931 - DNA, 1545 bp, Neisseria meningitidis
atgatgaccgaaatacaacaacgcgcccaactgcaccgccaaatttggaaaattgccgacgaagtacgcggcgcggtggatggctgggacttcaaacaatacgttctcggcacacttttctaccgatttatcagcgaaaacttcaccgactatatgcaggcaggcgacagcagtattgattacgccgctatgccggacagcatcatcacacccgaaatcaaagacgatgccgtcaaagtcaaaggttatttcatctaccccagccagcttttttgcaatattgccgccgaagcccatcaaaacgaagagctcaacaccaagctgaaagaaatttttaccgcgattgaaagctccgcctccggctatccgtccgaacaagacattaaaggcctgtttgacgacttcgataccaccagcagtcggctcggcagcactgttgccgacaagaacaaacgccttgccgccgtcctcaaaggcgtggcggaactcgatttcggcaattttgaagaccaccgcatcgaccttttcggcgatgcctacgaatacctgatttccaactacgccgccaacgcaggcaaatccggcggcgaattttttaccccgcaaagcgtctccaagctgattgcgcggctggcggtgcacgggcaggaaaaggtaaataaaatttacgatcccgcctgcggctcgggcagtctgcttttgcaggcgaaaaaacagtttgatgagcacatcatcgaagaaggcttcttcgggcaggaaatcaaccacaccacctacaacctcgctcgcatgaacatgtttctgcacaacgtcaattacaacaaattccacatcgaattgggcgacacactgaccaatcccaagctcaaagacggcaggccctttgatgccatcgtttccaatccgccttattccatcaactggataggcagcgacgaccccaccttaatcaacgacgaccgctttgcccccgcaggtgtactcgccccgaaatccaaagccgattttgcctttatcctgcacgcactgaactatctttctagcagaggccgcgccgccatcgtctcattccccggcattttctatcgcggaggtgcagagcagaaaatccgccaatatctggtggagggcaactacgtggaaaccgtcatcgcccttgcgcccaatctcttttacggcaccggcatcgccgtcaatatcttggttttgtccaaacacaaagacaataccgacatccaatttatcgatgcaagcagcttctttaaaaaagaaaccaacaacaacgtcttaaccgaagaacacattgcagaaatcgtcaaactcttcgccgataaggctgatgtgccgcatatcgcccaaaacgctgcccagcaaaccgtcaaagacaacggctacaacctcgccgttagcagctatgttgaagccaaagacacctgcgaggccgtcgacatcaaacagctcaacgccgaaatcagcgaaaccgtcgccaaaatcgaacggctgcggcgtgaaattgacgaagtgattgcagagattgaggcctag

SEQ ID NO: 40932 - DNA, 663 bp, Neisseria meningitidis
atgatacaagccgtattgttcgacctcgacggcacgctcgccgacaccgccctagacctcggtggtgcactcaataccgtattgcgccgccacaacctgcccgaaaaaagcatcgcggaaatccgcccgtatgccggacacggtgcggcaggactgctcaaactcggcgcaggcatcacgcccgaccaccccgactacgcccggtggcgcaccgaatacctcgacgaatacgaccgccgctacgcccaagacaccgccctcttcgacggcgtggacgaactcatcgccgaactcggcaggcgcggcatcaaatggggcatcatcaccaacaaacccgcccgctttaccgacaaactcgttcccaaactcggctttgccgttccgcccgccgtcgtcgtcagcggcgacacctgcggcgaacccaaaccaagcgtcaaacctatgctgtatgcgtgcggacaaatccacgccgagccgcaacacactgtctacgtcggcgatgccgaacgcgacatccaagcaggccgcaacgccggcatgaaaaccgtcctcgccgaatggggctacatctcagatgaagacgataccgactcatggcaggcggatttccacatccgaacgccgctcgatctgctcgaatgtctggacaaaatacagccctga

SEQ ID NO: 40933 - DNA, 824 bp, Neisseria meningitidis
ttgttaattcactatatcgacatcgccaaacgaaacttcgtcatcaaaggtattgcccatactatcgaataccttaaaaaacacaaggtcgccctcgtcgtgacggaaagtaccggcggtctcgaaatcctcgccgccaaagccatccgccgggcaggcatagccgtgattatcgccaacccgcgtcagacgcatcagtttgcccaatcgcagccgctgaccaaaaccgacgccaaagatgccaaaatgcccgccttcttcacacagatgatgacgcagaaagaagattggcaaaccatgccctaccacccgcccaccgaagcggaagaagtgttggaagccttaaacaactgattgcccattttgaccggctgattgacgaatcggacaaacaaatcgacgaccacacccacacgcattttgacggcaaagcccaagtggcggagcaaatcaaaggcatcggttcgataacgacggctacgctgatggcgatgctgcccgaattgaggcggctgtcgcacaaacggatagcgggtttggccggcattgccccgcacccgagagagagcggggaaaccaaattcaaaagccgctgctttggcggaaggtctgcggtgcgtaaggcactgtatatggctaccgtggtagcgacacgttttgaaccgcttattcgggatttctaccaacgcctgctgtccaagggtaagccgtataatgttgccgttacggcatgtatgcgtaaactgctgacgatatcgaatgcccggatgcgtgattattttgccgaaaacgataccgccgaaaacggtatccggacggcttga

SEQ ID NO: 40934 - DNA, 984 bp, Neisseria meningitidis
atggctgcgtacgacagtttgatggtatttacaggcaatgccaatcccgaattggcacaacgtgttgtcaggcatttggacatttctttgggcaatgcttccgtatccaagttttcagacggcgaagttgccgtcgaactgttggaaaacgtacgcgggcgcgatgttttcatccttcagccgacctgtgcgccgaccaatgacaacctgatggaaatcctgacgatggcggatgcactgaagcgtgcttcggcaggtcgtattaccacagccattccgtatttcggctatgcgcgccaagaccgccgtccgcgttccgtccgcgttccgatttctgccaaactggtggcaaatatgctgtattcggcagggatcgaccgtgttttgactgtcgatttgcatgccgaccagattcaaggtttcttcgatattccggtggacaatatttatgccaccccgattctgttgaacgacatcaaacaacagcggattgaaaatctgaccgtggtcagcccggacatcggcggtgtcgtccgcgcccgcgccgtggcaaaatccttgaatgccgacttggcaatcatcgataaacgccgcccgaaagccaatgtggcagaagtcatgaacatcatcggcgatattcaaggcagaacctgtctgattgtggacgatatgattgacactgcaaatacgctgtgcaaagctgccgtcgccctgaaagagcggggggcggaacgtgttttggcctatgccagccacgcagtattctccggagaggcggtcagccggattgcctcgtccgaaatcgatcaagttgttgtaacagataccattcctttgtctgaagcggctaaaaactgcgaccgtatccgtcaggtaacgattgccggtctgttggccgaaaccgtccgccgcatcagcaatgaagaatccgtttcatatctctttaatgaagaagtgatgacaggcagtatgttgctgccataa

SEQ ID NO: 40935 - DNA, 1035 bp, Neisseria meningitidis
atgagtacttcattgagttaccgcgatgcaggtgtcgatatcgacgcaggcgaccaactggtcgaaaacatcaaaccgtttgccaaacgcaccatgcgtccggaagtattgggggatttgggcggttttggcgcattggtcgaaatcggcaagaaatataaaaatcccgtattggtcagcggtacggacggcgtgggtaccaagctcaaacttgcctttgattgggataaacacgatacggtgggcatcgaccttgttgcaatgagtgtcaacgatattttggttcaaggagcagaacctctgtttttcttggattatttcgcctgcggcgaattggatgttccgcgcgcaaccgatgtcatcaaaggcattgcacaaggttgcgaagaatccggctgcgccctgattggcggggaaactgccgaaatgccgggtatgtatcccgttggtgaatacgatttggcgggttttgccgtcggcgtggtggaaaaagagaatgtcattaccggccgcagcatcggcgcgggcgatgtggtattgggtttggcttccaacggcgcacattcaaacggctattcccttatccgtaaaatcatcgaacgcgacaatcccgatttggatgccgagtttgataatagcaaaaccttgcgtgaggctgttattgcgccgacccgtctgtatgtgaaaccgattcttgccgctttggaaaaatttaccattaaaggtatggcacacattaccggcggcggcattaccgaaaacgtgccgcgcgtgttgcctgaaaacacggttgcacaaatcgatgctaaatcgtgggaattgcccaagctcttccaatggcttcaaaaggcgggcaatgtggaaacccaagaaatgtaccgaacctttaactgcggcatcggcatggtcgttattgttgctgccgaagatgccgatgcggttcagggtctcttgggtgaacaaggtgaaacagtttaccgtttaggtttgatccgtgagcgtcagggagacgagcatcaaacccaggttgcctga

SEQ ID NO: 40936 - DNA, 408 bp, Neisseria meningitidis
atgactgtatggtttgttgccgctgttgccgtcttaatcatcgaattattgacgggaacggtttatcttttggttgtcagcgcggctttggcgggttcgggcattgcttacgggctgaccggcagcacgcctgccgccgtcttgaccgccgctctgctttccgcgctgggtatttggttcgtacacgccaaaaccgccgttagaaaagttgaaacggattcatatcaggatttggatgccggacaatatgtcgaaatcctccgacacacaggcggcaaccgttacgaagttttttatcgcggtacgcactggcaggctcaaaatacggggcaagaagagcttgaaccaggaactcgcgccctcattgtccgcaaggaaggcaaccttcttattatcacacacccttaa

SEQ ID NO: 40937 - DNA, 432 bp, Neisseria meningitidis
atgaaccgactcgaccaacttggcacccgtatcaacctgatttgcaatgtcttcgacaaatggatcgggcagcaggatttgaattacaacctctttgccgtactttataccctggcaaccgaaggcagccgcacgcaaaagcatatcggcgaagagtggagtttgcccaaacagaccgtttcaggcgtatgcaaaacccttgccggacaagggttgattgaatggcaggaaggcgaacaggaccggcgcaaacggttgctgtcgttgaccgaaacaggcaaagcctatgccgcacctttaacagaaaacgcgcaggaattcagcgacaaagtatttgccacattcggcgacacgcgcacaactcggctgtttgccgatttggatacactggcggaagtgatggaaaaaacaatctcggaaaataaaaaatag

SEQ ID NO: 40938 - DNA, 438 bp, Neisseria meningitidis
atgcctgtgaaaaaagttgaaaaaaacatcttggtgctgcacggcgcggacaaaatgttcgagctggtcgataaggttgaagactatccgcactttctgccgtggtacagcaagaccgaggtcatcgggcgtagcggcaacgaactgaaggcgcggctgtttatggactatatgcacgttcgccaatcattcgccacgcacaaccgcaacattccgggcagggaaatccgtatggaactgctcgagggtccgttcaaaaccttacgtggaacgtggaaatttatcgatttgggcgacgatatgtgcaaaatcgaattcaatttggaatacgatttttccaatgccgttttgtccgccttaatttcccccgtcttcaaccacctttccgtcacgctggtcgaagcgttcgtcaaagaggcagaccgccgttatgcttga

SEQ ID NO: 40939 - DNA, 756 bp, Neisseria meningitidis
atgatggatttggatttgttaagtgaagaagcccgccgcgaaatgctggcgtgtgctgaagaagccgtaccgtctgaaatgtgcggggttttggttttcagttatgaaggctatgagtttctgcctttgtccaattgcgccgaaaatccgcatgaaacctttgagatttccgctgacgactggatggcggcggagcgcgtcggcgagattgtggcagtcgtgcattcccatccgcgcggcgagccgtttttatcgggtgcagacagacggatgcaggtcgaaacgggcttgccttggattttggttacacaaggccgtctgaaactgttccgccccgttccgcatttgcgcgggcgtgtattcgaatacggcaagacggattgcggcgcgctggtgcgcgatgccttcatgctgatggggctggtttttcccgaccatccacgcggtgatatggatgaggacgcagcggcgggcttttgggaaaagcatttggaaaactgcgggttttcccgtgtttcagacggcctttgcgccggcgatgtggtcttgacggcaacgggcgggcatgcgtcccatgccgtcctgtatttgggcaacgactggatgctgcaccatgcctacaatcaattgagctgccgtgtaccttatacccgctattgggcggatgttacgcacagcgtttggcggcatcccgatttcgagccggccatgatgcaggcacttgagaacgattttacccatatggagcaagcatga

SEQ ID NO: 40940 - DNA, 1638 bp, Neisseria meningitidis
atggattttaaaagactcacggcgtttttcgccatcgcgctggtgattatgatcggctgggaaaagatgttccccactccgaagcccgtccccgcgccccaacaggcagcacaacaacaggccgtaaccgcttccgccgaagccgcgctcgcgcccgcaacgccgattaccgtaacgaccgacacggttcaagccgtcattgatgaaaaaagcggcgacctgcgccggctgaccctgctcaaatacaaagcaaccggcgacgaaaataaaccgttcatcctgtttggcgacggcaaagaatacacctacgtcgcccaatccgaacttttggacgcgcagggcaacaacattctaaaaggcatcggctttagcgcaccgaaaaaacagtacagcttggaaggcgacaaagttgaagtccgcctgagcgcgcctgaaacacgcggtctgaaaatcgacaaagtttatactttcaccaaaggcagctatctggtcaacgtccgcttcgacatcgccaacggcagcggtcaaaccgccaacctgagcgcggactaccgcatcgtccgcgaccacagcgaacccgagggtcaaggttactttacccactcttacgtcggccctgttgtttatacccctgaaggcaacttccaaaaagtcagcttctccgacttggacgacgatgccaaatccggcaaatccgaggccgaatacatccgcaaaaccccgaccggctggctcggcatgattgaacaccacttcatgtccacctggatcctccaacccaaaggcggacaaagcgtttgcgccgctggcgaatgcagcatcgacatcaaacgccgcaacgacaagctgtacagcgcaagcgtcagcgttccccttgccgccatcccggccggcgcgaaagccgaaaccgccgtcaacctgtatgccggcccgcaaaccacttccgtcatcgcaaacatcgccgacaacctgcaactggccaaagactacggcaaagtacactggttcgcctcccccctcttttggcttttgaaccaactgcacaacatcatcggcaactggggctgggcgattatcgttttaaccatcatcgtcaaagccgtactgtatccattgaccaacgcctcttaccgctctatggcgaaaatgcgtgccgccgcacccaaactgcaagccatcaaagagaaatacggcgacgaccgtatggcgcaacaacaggcgatgatgcagctttacacagacgagaaaatcaacccgctgggcggctgcctgcctatgctgttgcaaatccccgtcttcatcggattgtattgggcattgttcgcctccgtagaattgcgccaggcaccttggctgggttggattaccgacctcagccgcgccgacccctactacatcctgcccatcattatggcggcaacgatgttcgcccaaacctatctgaacccgccgccgaccgacccgatgcaggcgaaaatgatgaaaatcatgccgttggttttctccgtcatgttcttcttcttccctgccggtctggtattgtactgggtagtcaacaacctcctgaccatcgcccagcaatggcacatcaaccgcagcatcgaaaaacaacgcgcccaaggcgaagtcgtttcctaa

SEQ ID NO: 40941 - DNA, 882 bp, Neisseria meningitidis
atgccgtctgaaaacaccctcttttccctgcccgacaccctgttgcgccccatagtcgaacaagccttgagcgaagacttgggcaggcgcggcgacattacgtccgccgccgttatcgcccccgacaaaaccgccaaactcttcctcgtcagccgcgaagacggtgttatcgccggtatggacttggcgtgtctcgcctttcagacgatggatccgtccgtccgtttccaagccgaaatccaagacggacaagccgtccgcgcaggtcagacgctggccgtcgtcgaaggcaacgcctgcgcgctgctcaccgccgaacgcaccgcactcaactacctcacgcacttaagcggcatcgccaccgccaccgcgcgtgccgttgccgaagtcgccgaatacggtacagacatcgtgtgcagccgcaaaaccatccccctgctgcgcgtcctgcaaaaatacgccgtcagggcaggcggcggcgtgaaccaccgcatgggcttggacgacgccgtgctcatcaaagacaaccacctcgcctattgcggcagcatcgcccaagccgttcggcaggcaaaacaggcggtcggagcattgacctgcgtggaaatcgaagtggacacgttggcacaactggacgaagccatcgcagcgggcgcggaacggattttgctggacaacatggacgacgaaaccctgaaagaagcggcaaaccgctgccacacgcaaaccgcccacccccacaccgtctattgcgaagcatcgggcggcatcggcttcgaccgcctgaagcgcgtggcgcaaaccggcgtggacggcatcgccctcggctatctgacccacagcagccgctcgttggacataggtttggatttcttggcatga

SEQ ID NO: 40942 - DNA, 1008 bp, Neisseria meningitidis
atgagcaccttcttccggcaaaccgcccaagccatgattgccaaacacatcgaccgtttcccgctattgaaattggaccgggtgattgattggcagccgatcgaacaatacctgaaccgtcaaaaaacccgttaccttagagaccaccgcggccgtcccgcctatcccctgttgtccatgttcaaagccgtcctgctcggacaatggcacagcctctccgatcccgaactcgaacacagcctcattacccgcatcgatttcaacctgttttgccgctttgacgaactgagcatccccgattacagtactttatgccgttaccgcaactggctggcgcaagacgacaccctgtccgaattgctcaaactgattaaccgccaactgaccgaaaaaggcctaaaaatagagaaagcatccgccgctgtcgttgacgccaccattattcagaccgccggcagcaaacagcgtcaggctatagaagttgacgaagaaggacaaatcagcggccaaaccacaccgagtaaggacagcgatgcccgttggatcaagaaaaacggcctctacaaactcggttacaaacaacatacccgtaccgatgaggaaggctatatcgagaaactgcacatcacccccgccaatgcccatgagtgcaaacacctgccgcctttgctggaagggatagccgaaggtacgaccgtctatgccgacaaaggctatgacagtgcggaaaaccggcaacatctggaagaacatcagttgctggacggcattatgcgcaaagcctgccgcaaccgtccgctgtcggaaacgcaaaccaaacgtaaccgatatttgtcgaagacccgttatgtggtcgaacaaagcttcggtacgctgcaccgtaaattccgctacgcccgggcagcctatttcggactgattaaagtgagtgcgcaaagccacctgaaagcgatgtgtttgaacctgttgaaagcggccaacaggctaagtgcgcccgctgccgcctaa

SEQ ID NO: 40943 - DNA, 1101 bp, Neisseria meningitidis
atggcaggcaacactttcggacaactcttcaccgtgaccacgttcggcgaaagccacggcgcaggtttgggctgcatcatcgacggctgcccgcccggcttggaattaagcgaagcggatatccaatttgacctcgaccggcgcaaacccggcaccagccgccacgttacccaacgccgcgaagccgaccaagtcgaaatcctctccggcgtattcgaaggcaaaaccaccggcacacccatcgccctcttaatccgcaataccgaccagcgcagcaaagactacggcaacatcgccaccagcttccgccccggccacgccgactatacctattggcacaaatacggcacgcgcgactaccggggcggcggcaggagttccgcccgcgaaaccgccgcccgcgttgctgccggagccgttgccaaaaaatggttgaaagaaaaattcggcacggaaatcaccgcctacgtgacccaagtcggcgaaaaagaaatccggtttgaaggctgcgaacacatttcccaaaatcctttttttgccgccaaccatagccaaattgccgagctggaaaactatatggacagcgtgcgcaaatccttggattccgtcggcgcaaaacttcatattgaagcagccaacgtccctgtcggcttgggcgaaccggtttttgaccgcctcgatgccgaaatcgcctacgcgatgatgggcatcaacgccgtcaaaggcgtggaaatcggcgcaggttttgacagcgtaacgcaacgcggcagcgagcatggcgacgagctcacgcctcaaggcttcctatccaaccactcaggcggcatcctcggcggcatcagcaccggacaagacatccacgtcaatatcgccatcaaacccaccagctccatcgccaccccgcgccgcagtatcgacatcaacggcaaccccatcgaactcgccacgcacggcaggcacgacccctgcgtcggattgcgcgccgcgccgattgcagaagctatgctggcattggttttaatcgaccacgccctgcgccatcgcgcgcaaaatgcggatgttcaggttaatacgcccgacattaccctttcaaacaaataa

SEQ ID NO: 40944 - DNA, 2391 bp, Neisseria meningitidis
atgtcaacagtccaaatgaataaaaatattaaatctttaaatttacgggaaaaagacccgtttttaagtcgtgaaaaacagcgttatgaacatcctttgcccagtcgggaatggataatcgaattgttggagcgcaaaggtgtgccttcaaaaatcgaatcgcttgcgcgcgagctgtcgattacggaagacgagtatgtcttttttgaacgccgtctgaaggcgatggcgcgggacggtcaggttttaatcaaccgtcggggcgcggtttgcgcggcggacaaattggatttggtcaaatgccgcgtcgaggcgcataaggacggtttcggcttcgccgtaccgctcatgccgacgggcgaaggagatttcgttttatacgaacgccagatgcgtggtgtcatgcacggcgacattgttaccgtccgccctgtcggcatagatcgcagggggcggtgcgaagggacggttctggatattgtcgaacgcgcgcaaagcaaagttgtcggtcgtttctatatggataggggcgtggcgattttggagccggaagacaagcgtctgaaccaaagcatcgtattggaaccggacggcgtggcgcgtttcaaacctgaatccggtcaggtcatcgtcggcgaaattgaggtttatcctgagcaaaaccggccggcagtggcaaaaatcatcgaagttttgggcgattatgccgacagcggcatggagattgaaattgccgtgcgcaagcatcatttgccgcaccaattcagtgaagcgtgtgccaaagccgtgaaaaaaattcccgaccatgtacgcaaaagcgatttgaaaggccgcgtcgatttgcgcgacctgcctttggtaacgattgacggcgaaacggctcgagattttgacgatgcggtgtttgccgaaaaaatcggacgcaattaccgtctggtcgtggcgattgccgatgtcagccattatgtccgccccgatgacgctatcgacacggacgctcaggaacgcagcaccagtgtttacttcccgcgccgcgtgattcccatgttgccggaaaacctgtccaacggcatctgctcgctcaatcctaatgtcgagcgtttgtgtatggtgtgcgatatggttatcacttacgcgggcaatattaaagaataccgcttctaccccgccgtgatgcgctctcatgcccgcctgacctacaaccaagtttggaaatggctttcaggcggcatcgggcatccgttcaaagcccaaatcgacacgctttacaaactcttcaaaatccttcagaaaaagcgtttcgaacgcggggcggtggagtttgacagcatcgaaacccaaatgcttttcgacgacaacggtaaaattgaaaaaatcgtccccgttgtccgcaacgatgcccacaagctgattgaagaatgtatgttggcggcaaacgtttgcgcagcggattttctgttgaaaaacaagcataccgcattgttccgcaaccatttggggcccacgcccgaaaaactcgccgccttgcgcgagcagttcggtctgttggggcttcaacttggcggcggcgacaacccgtcgccgaaagactatgccgcgcttgccggacagttcaaaggcaggccggatgccgaattgctgcaagtcatgatgttgcgctccatgcaacaggcggtttacgaaccgcattgcgacggacactttggtcttgcctacgaagcatacgcccacttcacctcgcccatccgccgctatcccgacctgaccgtacaccgcgccatcaaagccgtgttgaatcagcaaacctacacgccaaaaaaaagctggcaggctttgggcgtgcatacctcgttctgtgagcgccgtgccgacgacgccagccgcgacgtggaaaactggctgaaaacctactatatgcgtgacaaagtcggcgaaatatttgaaggcaaaatttccggggtggcaaattttggaatatttgtcactttggacgatatccatatcgacggtctggtgcatatcagcgatttgggcgaagactatttcaacttccgccccgaaatcatggcaatcgaaggtgaacgcagtggcatccgtttcaatatgggcgacagggttgccattaaagtggcccgtgccgatttggatgatggaaaaatcgattttgtcctgattgccgaggggagcggcagagggcggaaagttaaatcatccgcgtctgccaaaccggcagggacggcggggaaagggaaaccgaaaaccgccgccgagaaaaaaacagcccgaggcggcaaagtaaggggaaggggcgcgtctgccgccgcagaatcggggaaaaaggcaaagaaaccggttccgattaaggtaaaaaaacggaaaggcaaatcataa

SEQ ID NO: 40945 - DNA, 510 bp, Neisseria meningitidis
atgacagacactcaaaaccgggtagccatgggctacatcaaaggcgtattcggcataaaaggctggttgaaaattgccgccaacaccgaatattccgacagccttttggactaccccgagtggcatttggtcaaggacggcaaaaccatcagcgttacccttgaagccggaaaagtcgtcaacggcgaactccaagtcaaattcgaaggcataaacgaccgcgacttggcattctcattgcgcggttacaccatcgaaataccccgtgaagcattcgccccgacagaagaagacgaatactactggacagacttggtcggcatgaccgtcgtcaacaaagaccataccgttttaggcaaggtaagcaacctgatggaaaccggcgcaaacgacgtattgatgattgacggagaacacgggcagattctgattccgttcgtttcccaatatatcgaaaccgtcgataccggcagcaagattattactgccgactggggtttggactactga

SEQ ID NO: 40946 - DNA, 1131 bp, Neisseria meningitidis
atgattaaaatcagcacccgcttcgatgccggctcggtcgtcgtcaaagacctgaccgacccttccaacatccgcctcgccctgcgtcccgacaacgcctccgattttgcacaatggttctacttccggctgcaaggcgcggcatatcaaaactgcatcatgcattttgaaaacgcggcagaagccgcctacccgaaaggctgggaaggctatcaggcgtgtgcctcatacgaccgccgcaactggttccgcgtaccgacttcctacgaaaacggcgtactgaccgtcaatcatacgccgctgtccaacagcgtgtattacgcctatttcgaaccttactccgaagaacagcatttaaacctcctcggcgacgcgcaaggcagcggcctgtgccgcatcgacgacttgggcagcaccgtgcaagggcgcgacatcaatctgctgaccatcggcaatcaggtcgaaagcgatctgaaaatctggattaccgcccgccagcatccgggcgaaaccatggcggaatggtttgtcgaggggctgctcggcaggctgctcgatccgcaagacccgacagcgcgcaccctgctcgaccgcgccacgttctatatcgtccccaatatgaaccccgacggttcggcactgggcaaccttcgtaccaacgccgccggtgcgaacctcaaccgcgaatgggaaaatccgactttggaaaaaagccccgaagtgttcttcgtgcgtgaaagaatgctggaaaccggcgtggatttgtttttggatatccacggcgacgaagggttgccctttgtctttgttgcaggaactgaaggcgtgccgaactacaatccgcgcatttccgcgttggaaacacagttcaaaaccgcccttttgaacgccagccccgatttccaagatgaatacggttacgaaaaagatgcgcccggtcaggcaaacatgaccttggcaacaaactgggtcggcaaccgtttcaactgccttgcctatacgttggaaatgccgttcaaagacaatgccaacctgcccgacgacgatttcggatggaacggtcagcgttctttgcggcttggggaagcggtgctttccgccattttgaacgtcgccggcgatttgcgttga

SEQ ID NO: 40947 - DNA, 522 bp, Neisseria meningitidis
gtgaaagatagtttaatggatttctttgatttttttgcgcaaggtaagtataaaaaaattgcaactgaacaaggtttagaccgtaaatattttatattccactatatcgtatgtaatttatctgccatttcttctttttgtttaatgaaggttatccatagttatactatcctttatttattaataatgataattggcattgcatttggatttatcttgagaaatagggttctatctatagtaaaaaataaacaaaagtttttatctgatatgtttcccttggaaatgcctttcttttctagagtatacaaaatacctatcttggccagattcttgaataggggaatgaaatggctttatctccaaaattttttctgtttagttatgatttgtttctcgatatctcttatccttaatgaagaaagggggtggatgccttattttatctgctattggtttggactttgttatccagcaaacacttattacgtttttttatccagagattataaacatatctaa

SEQ ID NO: 40948 - DNA, 516 bp, Neisseria meningitidis
atgaaaatcaaacaaatcgtcaaaccgggcttggcagtattggcggcgggcgttctgtctgcctgcgcaaccaaaagcaacgtcaaagccgacggaacgaccgacaatccggttttcccgaaaccctattccgtaacgctcgacaacaagcgcggcacattcccgacctatgacgaactggatcagatgcgccccggcctgaccaaagacgacatctacaaaatcctgggtcgcccgcattacgacgaaggcatgtacggcgtacacgaatgggattacctgttccacttccataccccgggcgtaggtatcgaccctgaaaacacgtccggcgtggaaggcgttactacctgccaatacaaagtgattttcgataaagacaaatttgcccgcagcttttactggaaccccgtcttcccgaaagatgccgcctgcccgccgccagcacccaaagccgagccgcaagtcatcatccgcgaaatcgtgccggcaaaaccgaaacgtatccgccaataa

SEQ ID NO: 40949 - DNA, 639 bp, Neisseria meningitidis
atgcaaaccgccattatcgattacggtatgggcaacctgcattccgtattgaaatccgtccggacggcggggcagcttgccggaaaaaataccgaaatctttttaagcggcgaccccgaacgcgtgtcccgcgccgacaaagtcatttttcccggtcagggcgcgatgcccgactgtatggcggcactgacgcgcgacggcttggacgaggcagtcaaagatgctttaaaaaacaaaccctttttcggaatctgcgtcggcgcgcaacttttattcgaccacagtgaagaaggaaacaccgacggcttgggctggttcggcggcaaagtcagacgctttgcccgcgacctccgcgaccggcagggatgccgtctgaaagtcccgcatatgggctggaacaccgtgcgccaaacccaaaaccacccgctttttcaaggcatcccccaagacacgcgtttttacttcgtccacagctactatttcgcccccgaaaatcccgaaaccatattgggcgaaagcgactacccgtccccgtttgcctgcatcgtcggcaaagacaacgtattcgccacgcaatttcacaccgaaaaaagccacgatgccgggctgacgatgttgaaaaactttttaaactggtaa

SEQ ID NO: 40950 - DNA, 795 bp, Neisseria meningitidis; identical to SEQ ID NO: 39726

SEQ ID NO: 40951 - DNA, 1005 bp, Neisseria meningitidis
atgcaacgacaaatcaaactgaaaaattggcttcagaccgtttatcccgaacgggacttcgatctgacttttgcggcggcggatgctgatttccgccgctatttccgtgcaacgttttcagacggcagcagtgtcgtctgcatggatgcaccgcccgacaagatgagtgtcgcaccttatttgaaagtgcagaaactgtttgacatggtcaatgtgccgcaggtattgcacgcggacacggatctggggtttgtggtattgaacgactttggcaatacgacgtttttgaccgcaatgcttcaggaacagggcgaagcggcgcataaagccctgcttttggaggcaatcggcgagctggtcgaattgcagaaggcgagccgtgaaggggttttgcccgaatatgaccgtgaaacgatgctgcgcgaaatcaacctgttcccggaatggtttgtcgcaaaagaattggggcgcgaattaacattcaaacaacgccaactttggcagcagaccgtcgatacgctgctgccgcccctgttggcgcagcccaaagtctatgtgcaccgcgactttatcgtccgcaacctgatgctgacgcgcggcaggccgggcgttttagacttccaagacgcgctttacggcccgatttcctacgatttggtgtcgctgttgcgcgatgcctttatcgaatgggaagaagaatttgtcttggacttggttatccgctactgggaaaaggcgcgggctgccggtttgcccgtccccgaggcgtttgacgagttttaccgctggttcgaatggatgggcgtgcagcggcacttgaaggttgcaggcatcttcgcacgcctgtactaccgtgacggcaaagacaaataccgtcccgaaatcccgcgtttcctcaattacctgcgccgcgtatcgcgccgttatgccgaactcgccccgctctacgcgctcttggtcgaactggtcggcgatgaagaactggaaacgggctttacgttttaa

SEQ ID NO: 40952 - DNA, 621 bp, Neisseria meningitidis
atggcacagtttttcgctattcatcccgacaacccccaagaacgcctcatcaagcaggcggtcgaaatcgtcaataaaggcggcgtggtcgtttatccgaccgattcctgttatgccttgggctgcaaactcggcgataaggcggcgatggaacgcatactctccatccgcaaaatcgatttgaaacaccacctgaccctgatgtgcgccgatttgagcgagttgggcacgtacgccaaaattgacaacgtacagtttcgtcagcttaaagccgccacacccgggccttatacttttattttacaggcgacgaaggatgtgccggcgcgcacgctgcacccgaaacgcaaaaccatcgggctgcgtattcccgataatgccattgcacaagccctgctgggggaattgggcgagccgcttttaagctgcaccctgatgctgcccgaagacggcgaaccattgaccgatccttatgaaatccgcgagcgtttggaacacgccgtcgatttggtaattgacggcggctggtgcggaaccgagccgaccaccgtcgtcgatatgaccgacggcacggaattggtgcgccgaggttgcggcgatacggcggtgttcggtttgtag

SEQ ID NO: 40953 - DNA, 903 bp, Neisseria meningitidis
atgtctgtttttcagacggcattttttatgtttcagaaacacttgcagaaagcctccgacagcgtcgtcggagggacattatacgtggttgccacgcccatcggcaatttggcggacattaccctgcgcgctttggcggtattgcaaaaggcggacatcatctgtgccgaagacacgcgcgttaccgcgcagcttttgagcgcgtacggcattcagggcaaacttgtcagcgtgcgcgaacacaacgaacggcagatggcggacaagattgtcggctatctttcagacggcatggttgtggcacaggtttccgatgcgggtacgccggccgtgtgcgacccgggcgcgaaactcgcccgccgcgtgcgtgaggtcgggtttaaagttgtccctgttgtcggcgcaagcgcggtgatggcggctttgagtgtggccggtgtggcgggatccgatttttatttcaacggttttgtaccgccgaaatcgggagagcgcaggaaactgtttgccaaatgggtgcgggcggcgtttcccgtcgtgatgtttgaaacgccgcaccgcatcggtgcgacgcttgccgatatggcggaactgttctccgaacgccgattaatgctggcgcgcgaaattacgaaaacgtttgaaacgttcttaagcggcacggttggggaaattcagacggcattgtctgccgacggcaaccaatcgcgcggtgagatggtgttggtgctttatccggcgcaggatgaaaaacacgaaggcttgtccgagtccgcgcaaaacatcatgaaaatcctcacagccgagctgccgaccaaacaggcggcggagcttgccgccaaaatcacgggcgagggaaaaaaagctttgtacaatctggcactgtcttggaaaaacaaatga

SEQ ID NO: 40954 - DNA, 1059 bp, Neisseria meningitidis
atgtcttcacgcaaaattatccacatcgacatggacgcattctacgcatcggtagagctgcgcgaacagccgcatttgaaagggcggccggtggtcgtcgcgtgggagggcgcgcgttcggtgatttgcgccgcatcgtatgaggcacggcagttcgggctgcattccgcgatgtcggtggcaacggcgaaaaggctgtgtccgcaagcggtgtatgtgccgccgcatttcgatttgtaccgtcaggtttccgcgcagattcacgccgtattcaggcgttataccgatttaatcgaacccttgtcgctggacgaagcctatcttgacgttacccgtaatttcaaaaacatcccttacgccagtgaagttgccaaagaaatccgtgccgccatttttgcggaaacaggtttgactgcatccgcaggcatcgcgccgaacaaatttctggcgaaaatcgcgtcggactggcgcaagccgaacgggcagtttgtgttgccgccgcacaaagtcatggcatttttggaaaccctgcctttgggcaaaatccccggcgtgggcaaggtaacgctgaaaaaaatgcagtcgctgggtatgcggacggcgggcgacttgcgccgtttcgagcgcggcgaactcttaaaccatttcggacgctacggataccgcctctatgatttggtgcgcggtacggacgaacgccccgtcaaagccgaacgcgaacgcctccaaatctccacagaaattaccctgcccgaagacctgccgctcgagcaggctgccggacacctgccccatcttgccgaagacctgtggcggcaaatcacgcgcaaaaacgtcgaagcccaaagcgtaacgctcaagctgaagacctacgatttccgcatcatcacgcgcacgctgacttattcctccgtattgcccgactgcgcagctctgctgcaggctgcgcaaatgttgatggcgcgtgtcccgccgcagacggaagacgcgttccgccttatcggcatcggcgtgggacatcttgtgccgaaaaaccagcagcagggcttgtgggcgtaa

SEQ ID NO: 40955 - DNA, 1245 bp, Neisseria meningitidis
atgtccaacgaaaaccgtacctgttccttttgcggaaaatccaaatcacacgtcaaacatttaattgagggcgaaaacgcctttatctgtgacgaatgcgtctcaaactgtattgaaatattgcatgaagacggaaatgacggcacgccttcggaaagtgccggaggggagccggaagaatccggcaagctgcccacgcccgccgaaatcgtcgccaacctcaacgaccacgttatcggtcaggaacaagccaagaaagccttggcggtgtcggtgtacaaccattacaaacgcctgcgccacccgaaagccggagctaatgtcgaattgtcgaaatccaacatcctgcttatcggcccgaccggatcgggtaaaaccctgctggcgcaatctttggcgcgcaaactggatgtgccgttcgtgatggcagatgcaactacgctgaccgaggcaggttatgtcggtgaagacgtcgagcaaatcattaccaagcttttgggtaaatgtgatttcgatgttgaaaaagcacaacgcggtatcgtctatatcgacgaaatcgataaaatttcacgcaaaagcgacaatccgtccatcacgcgcgacgtgtccggcgaaggcgtgcagcaagccttgctgaaactgattgaaggtacggtggccagtgttccgccccaaggcggccgcaagcatccgaatcaggaatttatcaacgtcgataccaccaacattctgtttatctgcggcggcgcgtttgcaggcttggaaaaagtcatccgccggcgtactgaaaaaggcggtatcggtttcggtgcgtccgttcacagcaaggacgaaaatgccgacattaccaagctgttcggcatcgtcgaaccggaagacttgattaaattcggtctgattccagaattaatcggacgtttgcctgtgattgcaactttagaagaattggacgaagacgcgctgattaatattttgaccgagccgaaaaatgctttggtcaagcagtatcaggcgttgttcggtatggaaaatgtcgaactggagtttgaagaaggcgcattgcgttccatcgcgcgtcaggcaatggaacgaaaaaccggcgcgcgcggcctgaggtccatcgtcgaacgctgcctgctcgatacgatgtaccgcctgcctgatttgcaaggcttgaaaaaagtggtggtcggtaaggcagtcatcgaagagggcagggaaccggaattggtgttcgagtcctga

SEQ ID NO: 40956 - DNA, 441 bp, Neisseria meningitidis
atgaaacgccaagtatctgccgatttgaccgtatgtttccgtggtacggaatacagtgtgaaagccgtcccccacgtcttggtcggcgaacatttggaaatctgcctctatgacggcaaagtgtgtgcggcctattcttatgacgacgaccagccggaaaccgtttacctgccgctgcccgaagtgtgcaaacaggaaaaccggcaggaaaactggtttgcgttcaaaggcgaaacctgctgcgccctgcgcgaagacagccgcctggatatggaggttgccaattccgccctcgccgcgctccacgcgctgctgctggacaacaaatcggctaagaccaaaagctgggatgccgaggggctggcggatatcatcggctgcatttccgaacggctcgcccgcgccgtgaacgaaacggaagaaatcaaccgcgccgcctga

SEQ ID NO: 40957 - DNA, 570 bp, Neisseria meningitidis
atggaaatcctgacacagttgggctaccgcgtcatccaactgcccgccggtatcgacgaatccgttaaagccgatgaaacacctgcctgttacgttcaaagaatggcggcagaaaaaaatcagacggctttggccctgtttctcgaaaccaacggcgcaatgcctgactttcccttgattacagcggatacctgcgtcgtttcagacggcatcatattgggcaaaccccgctcccaagctgaagcaatcgaatttttaaaccgattgtccggcaaacaacataccgtcctgactgctgtctgcattcattatcgcggcaaaacgtcaagccgcgtccaaaccaaccgcgtcgttttcaagcccctgagttcggaagaaatttccgcctatgtgcaaagcggcgaaccgatggacaaagccggcgcctacgccgtacaaggcataggcggcatctttatccaatctatcgaaggcagcttcagcggcattatgggactgcccgtttatgaaaccgtttcgatgttgcaggatttgggataccgctcccccttgtccgcccttaaaccgtaa

SEQ ID NO: 40958 - DNA, 183 bp, Neisseria meningitidis
atgccgacaccgcctgccgcattgatggtcgcgccggtacgcccaaatccgccgaaagacggcaagacagtaacgctgttggaacacgccgccgagtttggcggctatgtggcggagttggaaaatcaaaatcaggcttggcgcgactgggcgggcaatcactcccgcaaagtcggaaactga

SEQ ID NO: 40959 - DNA, 381 bp, Neisseria meningitidis
atgcctttaaaattccaaccaagggaacgttcggttatcatgtgcgactttcgcggctatgaagaaccggaaatggtcaagaaacgccctgtcgtcgtcatagcgcgaaacaggcacaacggcaaactggtaacggccgtacccttaagcagcacagaacctgtccctttggcggactaccaccacaaaatgagtggaaaccccttaccggacaagccgcacatccaatgttgggcaaaatgcgatatgacggcaacagtcggattggcacggttagaccgatacaaacccaaagggcgcgaccgctgcattccaataatcagtgaagaggattttcaggcgattaaaacagccgttgccaaggcattcaaactgtactag

SEQ ID NO: 40960 - DNA, 1062 bp, Neisseria meningitidis
atggcggcatttccatctgaagcagaaagccctgtcatgtatccacttgcccgccgcatcctgtttgcactcgatgccgaaaaagcccaccacttcacgctcgacgcgctctacacggtttataaattgggtctgattcccgtaaccggcaaccgtaccaaacctgtaaaactgatgggtttggatttgcccaaccctgtcgggcttgccgccggactcgataaaaacggcgaatatatagacgcattgggcgcgctcggcttcggtttcatcgaaatcggcacggtaacgcccaaaccgcagcccggcaacccacagccgcgcctctttcgcgttcccgaacaccaaggcatcatcaaccgcatgggtttcaacaaccacggtatcgacaccatgatacgcaacatcgaaaaaagtaaattcagtggcgtattgggcatcaacatcggtaaaaacgcggttacacccatcgaaaacgctgccgatgattatttaatctgccttgaaaaagcctacgcacacgcaagttacattaccgtcaatatttcctcgcccaacactaaaaacctccgcgcgctgcaaggtggcgacgagttgagcgcattgcttgaggctttgaaaaacaaacaggcacagcttgcctctgtacacgggaaatacgtcccgctcgccgtcaaaatcgcccccgatttggatgaagcacaaattgaagacatcgcccacgttgtcaaatccgtcgaaatggacggcatcatcgctaccaacaccaccatcgacaaatcaagcctcggcagccatccgcttgcaggcgagcagggcggtctaagcggtctgcccgtttatgaaaaaagtaatcgggtgttgaagctgttggcagaccacatcgacggcaagctgccgattatcggcgtaggcggcattatggaaggcagggacgcggcagagaaaatccgcttgggcgcgaccgccgtccaagtgtacagcggattgatatacaaaggtccggcattggtcaaagaatgtttgaaggctttggcgcgatccgcccaaaatgccgtctga

SEQ ID NO: 40961 - DNA, 501 bp, Neisseria meningitidis
atgacccgtttgacccgcgcgtttgccgcggctctgatcggtttgtgctgcaccgcaggcgcgcacgccgacaccttccaaaaaatcggctttatcaacaccgagcgcatctacctcgaatccaagcaggcgcgcaagattcaaaaaacgctggacagcgaattttccgcccgtcaggacgaattgcaaaaactgcaacgcgaaggtctagatttggaaaggcagcttgccgaaggcaaactcagaaacgcaaaaaaggcgcaagccgaagaaaaatggcgcgggctggtcgcagcgttccgcaaaaaacaggcgcagtttgaagaagactacaacctccgccgcaacgaagagtttgcctccctccagcaaaacgccaaccgcgtcatcgtcaaaatcgccaaacaggaaggttacgatgtcattttgcagaacgtgatttacgtcaacacccaatacgacgttaccgacagcgtcattaaagaaatgaacgcccgctga

SEQ ID NO: 40962 - DNA, 1044 bp, Neisseria meningitidis
atgattccggccacctacaccctgtcccaaatcaccgcgcggctcggcggcgaatggcgcggcgaggacatttccgttaccgccgtgcgcccgctcgcagacgcgcaggcggaacacatcagcttccttgccaatccgaaatacaaagccgaagtccacgacagcagcgcgggcgcggtcatcgtttccgccaaagcggcagacggatttgaagggcgcaacctgattgtcgccgacgacccctatctctatttcgccaaagtcgcccgcctgttttcacccgtcgtcaaagcgcgcggcggcatccatccgaccgccgtcgtcgaaccgggcgcgaccgttcccgccagctgcgaaatcggcgcgaacgtctacatcggcgcaaacaccgtgctcggcgaaggctgccgcatcttggcaaacgccgtcgtccaacacgattgcaaactgggcgacgaagtcgtcctgcatcccaacgccgtcgtttattacggctgcacactgggcagacgcgtcgaaatccacagcggcgcggtcatcggcgcggacggtttcggactcgcttttgccggcgattcatggtttaaaatcccgcaaaccggcgcggtaacgctgggcgacgacgtggaaatcggctcgaacaccaacatcgaccgcggcgcgatgagcgacaccaccgtcggcaacggcaccaaaatcgacaaccaagtccaaatcggacacaactgcaaaatcggttcgcacaccgtcatcgccgccaaaaccggcatctcaggcagcgtaaccataggcagctactgcatcatcggcggcggtgtcggcacggtcggacacatcgaaatcgccgacaaaaccaccatcggcggcggcacgtccgtcacccacagcattaccgaaagcggcaaacacctcgccggcatcttcccgatgtccacccataaagaatgggcgcgcaacgccgtccatatccaccgcttaagcgaaatgaacaaacgcctcaaaacgctggaacagcagctttcagacggcaaagacacgcaataa

SEQ ID NO: 40963 - DNA, 681 bp, Neisseria meningitidis
atgattttccaaacagtctggttttcagatatggtactgtcggtttcgtggattgtccttatcctgatactggcagcttccgcgccgtcggcattccgctcgcttgcccgctaccgttccgcccttcccctgtgtaccgtaattttttccgcagcatggtgtctgaacgcctctgccggcggcggacagcttgcccagatgaactaccatctgctcgccgtcaatctggttgcactgatggtgggcacttccgccgccttttggcttgccgcgctgctgatgctgccctactgcctgctgtttgccagttctgccggcgcatatccgccgaacgctttggtgctgattctgcccgcgctggccgtcaaccgcctgtcgcgtatactggtcaaccgcctgccacccaatattttcatctttattttcgtcaacggctttctcgcttccgccgccggcattctgctgaccgggctggtgctgaccggtattttggatgccgcaaacgcttttccgtccgaaatattgtggacgaccgccctgcccgtctttattctgctggcgtgggcggaagccttcctcagcggcatttcaactgccatatttgttgcactgaagccccattggatcaacactttcgacgacaaccgctatctgaagtccgaccgcggcatatggcggtag

SEQ ID NO: 40964 - DNA, 534 bp, Neisseria meningitidis
atggcagacttcaaccaaatcctgacccccggcgatgtggacggcggcatcatcaacgtcgtcaacgaaatccccgccggcagcaaccacaaaatcgagtggaaccgcaaactcgccgcattccaactcgaccgcgtcgaacccgccatcttcgccaaaccgaccaactacggcttcattccccaaactttggacgaagacggcgacgaattggacgtgctgctcgttaccgaacaacctttggcaaccggcgtattcttggaagcgcgcgttatcggcgtgatgaaattcgttgacgacggcgaagtggacgacaaaatcgtctgcgttcctgccgacgaccgcaacaacggcaacgcctacaaaactttgtccgatttgccgcaacagctgatcaaacaaatcgagttccacttcaaccattacaaagacctgaaaaaagcaggtacgaccaaagtcgaatcttggggcgatgcggaagaagcgaaaaaagtcatcaaagaatccatcgaacgttggaacaaacaggcataa

SEQ ID NO: 40965 - DNA, 408 bp, Neisseria meningitidis
atgtttttgttagccgaatttttaggaatactaaccaagaaaaggagtataaaaatgattgaacttcaacttcatgaattgaagctggtttcagggggaggtcctgtaacagacaatatagctggaaatgtagctaatgttgccacaaccaaaggaggtcccacatggggggatttggttgcaatacctgctgccgcagcggcagtttattatctgccgaaaaatgcttacggtgctgctggtgcaaatggtgtatacaatgtgactcgtaattgggtaaatgatgccgttaatgcacctccttataacggaagaccaatctttgagattgaacatggattaactgctcccgcaacaaaagcagataaatcaggaaacggctacactgacggtacagattactgctga

SEQ ID NO: 40966 - DNA, 1128 bp, Neisseria meningitidis
atgacccttatcaaacccgtcattgccgcgctcgcactcatcgggcttgccgcctgctccggcagcaaaaccgaacagcccaagctcgactaccaaagccggtcgcaccgcctgatcaaacttgaagtcccacccgatttgaacaaccccgaccaaggcagcctctaccgcctgcctgccggttcgggcgccgtccgcgccagcgatttggaaaaacgccgcacacccgccgtccaacagcctgccgatgccgaagtattgaaaagcgtcaaaggtgtccgcctcgagcgcgacggcagccaacgctggctcgttgtcgacggcaagtctcatgccgaaatctggccgctcctgaaagccttttggcaggaaaacggcttcgacatcaaatccgaagaacccgccatcggacaaatggaaaccgagtgggcggaaaaccgtgccaaaatcccccaagacagcttgcgccgcctattcgacacagtcggtttgggcggcatctactccaccggcgagcgcgacaaattcatcgtccgtatcgaacagggcaaaaacggcgtttccgacatcttcttcgcccacaaagccatgaaagaagtgtacggcggcaaagacaaagacacgaccgtatggcagccctccccgtccgatcccaacctcgaagccgctttcctgacgcgctttatgcaatatttgggcgttgacggacagcaggcggaaaacgcatcggcaaaaaaaactacccttcccgccgccaacgaaatggcgcgtatcgaaggcaaaagcctgattgtctttgacgactacggcagaaactggcggcgcaccgcgctcgccctcgaccgcatcgggctgaccgtcgtcggtcaaaacaccgaacgccacgctttcctggttcaaaaagccccgaacgaaagcaatgcagttaccgaacaaaaacccggcctgttcaaacgcctgctgggcaaaggcaaagcggagaaacctgccgaacagccggaactgattgtctatgccgagcctgtcgccaacggctcgcgcatcgtcctgctcaacaaagacggcagcgcatatgccggcaaagacgcatccgcattattgggcaaactccattccgaactgcgttaa

SEQ ID NO: 40967 - DNA, 834 bp, Neisseria meningitidis
atgccgcacgccctcgtcctccaatttccctccgccgaagccctgccttccgacttcccctcacgcctgcccgaacctgattacgccgatgaaaagcgtatgcgttttatcgttgaagaagggttttctttaagcggggcggacgcggcgttgcttggcagccgtcaaatcgaccacgccgtgttgtcggatatggattttggcgaactcggtttgattgtcagcgatatggattcgacgctgattaccatcgaatgcgtcgatgaaattgcggcaggcgtgggtttaaaagacaaggtagcggaaattaccgagcgttcgatgcgcggagagttggatttcgagcagtcgttgcgcagccgcgttgcgctgttggcgggattggacgaacagattttggcggacgtttatgaaaacgttttgaagctctcgcccggtgcggaatttttgttggacgaatgcaaaaggcacgatgtgaaattcctgctggtgtcgggcggcttcacgttttttaccgaaaggctgcaacaacgcctcggcttcgaataccagcacgccaatgttttggaaattgaaaacggcaggctgaccggacgtttgaaaggcagaatcatcgacgcgcaggcaaaggcggatttattgcgcgaataccgcagccgcctcggattgcagccacatcaggtgttggcggtgggcgacggtgcgaacgatattccgatgctcaaagaagcgggcataggcgtggcttaccgtgccaaaccgaaagtgcgggcagccgccgatgtctgtatcaacttcggcggtttggagcgtgtacgcggcctgttcaggtag

SEQ ID NO: 40968 - DNA, 669 bp, Neisseria meningitidis
atgacgacccatctgtccaatgtcgcccccgacctgcaaaactatttgaacgccatcggcgaacccgaacatcccgttttgacgcggctgcgtgagaagaccgggcatcaccgtatgggcaaaatggcgattgcgcgcgaacaggcggcggttttggtttggctggcaaagctgattcgcgcggaaaaatatctggaaatcggcgtgtttaccggatacagcagcaccgcgcttgcattggcgctgcccgaacacgggcggattaccgcctgtgacatcaatgtaacctttaccgatacggcgcgtcaggtttggaacgaggcaggcgtggcacataaaatcagcctgcacctgcaacctgcattgctgacattggatgatttgattgcacagggtgaagccggaagctacgatttggcactgatagacgcagacaaaccgcccacgccgcaatatttcgagcgttgcctcaaacttgtccggcaaggcggcatcatcgccatcgacaatattttgttgaacggaagggtgatgcgcgaagcggcttccgatgcgccgcccagcgtcggcatcctcaaagatttcaatcaaaacctgccgaacgatacgcggattgtccccatcaccctgcccgtcggcgacggtttgaccctgcttctgaaaaaataa

SEQ ID NO: 40969 - DNA, 993 bp, Neisseria meningitidis
gtgtatgcttgccttcccttaaaaacaaacacgcaacgcattattatgaatatcctcagtaaaatcagcagctttatcggaaaaacattttccctctgggccgcgctctttgccgccatcgcttttttcgcgcccgacaccttcaaatgggcggggccttatattccttggctgttgggcattattatgttcggtatgggtttgacgctcaaaccttccgacttcgatattttgttcgaacatcccaaagtcgtcatcatcggcgtaatcgcacaattcgccattatgccggcaaccgcctggctgctgtccaaactgttgaacctgcctgccgaaatcgcggtcggcgtgattttggtcggctgctgcccgggcggtacggcttccaatgtgatgacctatctggcgcgcggcaatgtggctttgtcggttgccgttacgtctgtttccaccctgatttccccattgctgactcccgccatcttcctgatgcttgccggtgaaatgctggaaatccaagcgggcagtatgttgatgtccatcgtcaaaatggttttgctccccattgttttgggtttgattgtccataaggttttgggcagtaaaaccgaaaagctgaccgatgcgctgccgctggtttccgttgccgccatcgtgctgattatcggcgcggttgttggggcaagcaaaggcaagattatggaaagcggcctgctgatttttgcggttgtcgtactccacaacggcatcggctacctgctcggcttctttgccgccaaatggaccggcctgccttatgatgcacaaaaaacgctgaccatcgaagtcggtatgcaaaactcgggcctggccgccgcgcttgccgccgcacactttgccgccgcgccggtcgttgccgttccgggcgcattgttcagcgtgtggcacaatatctccggctcgctgctggcaacttattgggcggccaaagccggtaaacataaaaaaccctaa

SEQ ID NO: 40970 - DNA, 666 bp, Neisseria meningitidis
atggattcatggtttgaagatacggcgatggggcggtatgttgcaaaattggaacaggatttcttcgggcggtatctggattcataccgtttttcgggaatgtgtgcggttcaggtgggcggtccgtggctgagcctgtctgaagatgttgtctgtgtgccgcgagatatgtcgatgtcggcggaaaatatggctttggcggatgtttctgcggatatgctgcttttcccgcatactctggaaggcggtgttccttcgcaaatcctgtcggaagcgcaccggatattgaaaccgtgcggacgtttgatgctgacgggtttcaatccgtattcgctctggggattcagccgttggtttgacggcgaacgcctgccggaaaaacggttttgtctgccgttgcccgagttgaaaaggcggcttgccgatgccggtttcgatattgaatttgggaaatttatggtgtatctgccgcccgtttcgtcgctcgggcaaatacgcttttggcggtttatggaaaaggcgggcgaccgttggtggccgcagtgtgccgcagtgtacggtttggttttggtcaaaagggcggcgggcgtaacgcccctgcccgcgtgggacgggtatttgggcggcaaagcccttgcggcgggtgcggcaagggttgcggattag

SEQ ID NO: 40971 - DNA, 1497 bp, Neisseria meningitidis
atgtcgcttgccttggtttacagccgcgctttgagcggtatgaatgcgccgttggttgaagtagaagcccaccttgccaacggcctgccgcatttcaacatcgtcgggctgcccgatacggaagtaaaggaaagtcgcgaccgcgtccgtgccgccattattcaaagcggttttgaattccccgccaaaaaaattaccgtcaacctcgcccccgccgacctgcccaaagagtcggggcgtttcgatttgccgattgcaatcggcatccttgccgcatcggggcaggttgcgcccgaaaaactggcggaatacgagtttgcgggggaattggcactgtcggggctgttgcgccccgtgcgcggcgcgttggcgatggcgtggcagggtatgcaggcaaaacgtgcatttgttttgcctgaagaaaacgcaggacaagccgccgtgatgcgcggcattaccgtttacggcgcgcgctctttgggcgaagtcgccgcccatttgaacggcatcgaacctttggcgcaaaccgaatgccaagttcctcagatgccgtttgaacatggcggacaacctgatttgtgcgatgtgaaaggtcagcacaccgcgcgccttgctttggaaatcgctgccgcaggcggacacagcctcttgatgatgggtccgccgggaacgggcaagtctatgctctcccaacggctgcccggcatcctgccgccgctgaccgaagacgaattggtagaagtttgggcattgcgttcgctcctgcccaaccaccagcaacaactcgacagccaccgtcctttccgcagtccgcatcacagcgccagtgcggcggctatggtcggcggcggttcggatccgcgtccgggcgagatttcattggcgcaccacggcgtattgtttttggacgagctgcccgagttcgaccgcaaagttttagaagttttgcgcgaaccgttggaaaacggcgaaatccacatttcccgcgcggcgcgccaagccgtctatccggcgaaattccaacttgttgccgccatgaacccctgcccgtgcggttatctcgggcatcccgtcaaaccctgccgctgcacacccgaaagcgtcgcgcgttaccgcagcaaaatttccggcccgttgcttgaccgcatcgatttgaccatcgaagtcccgagcctgtccgccgccgaactgatgcagcaggaagcaggggaaagcagcgcgtccgttttggaacgcgttatcgccgctagagacaaacaatacgcacggcaaggcaaagtgaatgccgccttgagtgtcagtgaactcgacacatccgcccgcattcaaaaagaagcgcaggaagcattgggcggcctgctggaaaaactctccctttccgcccgcagcttccaccgcattatgcgcgtggcgcgtacattggcggatttggcgggcgacgaagaagtcggcagaagccacgtcatgaaagccataggtttccgtcgtgctttatag

SEQ ID NO: 40972 - DNA, 657 bp, Neisseria meningitidis
gtgaacaaacggctgttttgcagccgcaacggcttgcgctattacctgttgggcggtttctgtttgagtgtttttccgtttttgctggtgtttgcctcatccgtttgggcggtttatcggacgggcgggcaggttttgccgccgtatgtccgggcggatgccgcgctggtgttgggtgccgccgcgtgggacaaacacccttctccggtttttcgggaacgcatcaaccacgccatcgcgctttatcagagccgcagggtaggcaaaatcgtgtttacgggaggccggaccaaaaaaggctatatgaccgaagccgaggtcgggcggcggtacgcgctcaaacagggggttccggcgcgcaacatcctgtttgaaaacacttcgcgcaacacttatgaaaacctgaacaacatccgtccggttttgcgtgccaacggtattgccagtgtggtgattgtcagcgatccctaccatttggcgcgggcggcggaaatggcggaggatttgggtgtccgcgtttatatgtctgccacgccgaccactcggtttgatgcgggaaataagaaaaaaatctttatgctgcaagagggatatgcgttatccctctaccgtttggaaaaatgggggtgggattttttcaattggctgtttcattga

SEQ ID NO: 40973 - DNA, 990 bp, Neisseria meningitidis
atgaaacagcctgtttttgccgttacttccggcgagcctgccggcatcggccccgatatttgtttggacttggcgtttgcacgcctgccctgccgctgcgcggtattgggcgacaaacacctgttgcgcgcgcgcgccgaagccttgggcaaaagcgtcgtcctgcgcgacttcaatccggaatcaggcggcgcggcatacggcgagctggaagtgctgcacattccgaccgccaaagcggttgaggcgggcaaactcaatcccgccaacgccgcctatgtgctgcaacttttggataccgcgcttacaggcatttcagacggcattttcgacggcatcgttaccgcgccgctgcacaaaggcatcatcaacgatgcgcgcgcaagcacaggttttttcagcggacacaccgaatatctggcggaaaaaagcggcacggggcaggttgtgatgatgcttgccggcaaaggcctgcgcgtcgccctcgtaacgacccacctgccgctgaaagacgttgccgccgccatcacgcaaccgctgattgaaagcgtcgcacgcattctgcatcacgacttaaaacacaaattcggcatcaaaaatcccaaaatcctggtcgccggactcaacccccacgccggcgaaggcggacacctcggacacgaagaaaccgacaccattatccccgcgctcgaaaacctgtgccgcgaagggataaacctcgccggcccgtatccggcggataccttgttccaaccgtttatgctcgaaggtgcggatgccgtattggcgatgtaccacgaccaagggctgcccgtgttgaaataccacagcttcggacagggcgtgaacatcacactggggctgccctttatccgcacctccgtcgatcacggcaccgcgctcgatttggcggcgaccggcagagcggactccggcagcctgataaccgccgtggagaccgccgtagaaatggcgcgcggcagcctttaa

SEQ ID NO: 40974 - DNA, 1218 bp, Neisseria meningitidis
atggagattattttaggtatcgtgatgtttaccgtcatcgttttggttttggcactgatgattctgtttgccaaatccaaactggtcagcgaaggcgacatcaccatcaaagtcaacggcgaaaaagagctgacgatgcccgccggcggcaaactcttgggcgcgcttgccaacgaaggcatctttatcccctccgcctgcggcgggggcggttcgtgcggacaatgccgcgtcgtcgtaaaaagcggcggcggcgacatcctgccgaccgagctgtcccacatcagcaaacgcgaagcacgcgaaggctgccgtctgtcgtgccaagtcaacgtcaaaaccgacatggacatcgaagtccccgaagaagtgttcggcgtgaaaaaatgggaatgcaccgtcatctccaacgataacaaagccacgttcattaaagaactcaagcttgccattcccgaaggcgaagaagtccccttccgcgccggcggctacattcaaattgaagccccgccgcacaccgttgcctacaaagacttcgacattcccgaggaataccacgaagactgggacaaatacaatttgtggcaatacgtttccaaagtggacgagccgattttgcgtgcctactctatggcttcgtatcctgaagaaaaaggcatcattatgctgaacgtgcgtatcgccacgccgcccccgcgcgtacctgatgcgcctccgggacaaatgtcttcctacatctggtcgctcaaacccggcgacaaagttacgatttccggcccgttcggcgaatttttcgccaaagacaccgatgccgaaatggtatttatcggcggcggtgcgggtatggctccgatgcgttcccacattttcgaccagttgaaacgtttgaactccaaacgtaagattaccttctggtacggcgcacgttccaaacgcgagatgttctatgtcgaagactttgaccaactcgcggcagagttcccgaacttcacgtggcacgtcgccctgtccgacccgctgccggaagacaactgggacggctacacgggcttcattcacaacgtggtttacgaaaaccacctgaaaaaccacgaagcaccagaagactgcgaattttatatgtgcggccctccgattatgaaccagtccgtcatcaaaatgctcaaagacttgggcgtggaagacgaaaacatcctcttggacgatttcggcggttaa

SEQ ID NO: 40975 - DNA, 414 bp, Neisseria meningitidis
atgaataagttcttggcaacatggcttgcaccgattttggttttgtcgggttgtgcaacgattatgggagagtccagtcagaccgtgccgattaaaagtcaaccatccggtgcggtatttaaaattcaggatgaaacaggtgtgattgttcaatcaggtgtaacgcccgcaaatgtttcgttgcctaaaggcaacggcaaatatttcggcaggaaaaaatatcaggtttcttttgagaagaaaggttatcagccgttggtttacaagttagaaaccaatccgaatggttggtatattggtggaaacctgattttcggtggcctgattggttatctgattgttgatccgttgagtaacggtaagatgtttacgatttcacccaagcaggtagatgtaccgttaattgcgaaataa

SEQ ID NO: 40976 - DNA, 330 bp, Neisseria meningitidis; identical to SEQ ID NO: 39065

SEQ ID NO: 40977 - DNA, 924 bp, Neisseria meningitidis
atgctgcaaagaactttggcgaaatccatcagcgttaccggagtcgggctgcattccggcgaacgcgtcgcgctgaccctgcaccccgcgcctgaaaacagcgggatttccttccgccgtaccgatttggacggcgagatgggcgaacaaatcaagctgaccccttatttgatcaacgatacccgcctttcctccaccatcgttaccgacaaaggcgtgcgcgtcggcacgatcgaacacattatgtccgcgctgtccgcctacggcatcgacaatgcgctgattgagctgaacgcgcccgaaatcccgattatggacggctccagcctgccgtttatttaccttttgcaagatgcgggcgtggtcgatcaaaaggcgcaaaagcgttttttgaaaatcctcaagcctgtcgaaataaaagaagcgggcaaatgggtgcgctttacgccgtatgacggctttaaggtaacgctgaccatcgaattcgaccatccggttttcaaccgcagctcgcccacttttgaaatcgatttcgccggcaaatcctacatcgacgaaatcgcgcgcgcgcgcactttcggctttatgcacgaagtggaaatgatgcgcgcccacaatctgggtttgggcggcaatttgaacaacgccatcgtgattgacgacacggatgtcctgaatcctgaaggcttgcgctatcccgatgagtttgtgcgccacaaaatccttgatgccatcggtgatttgtatatcgtcggacatccgattgtcggcgcgtttgaaggctacaaatcgggacacgccatcaacaacgcactcttgcgcgcggttttggcagacgaaacggcttacgaccgggtggaatttgccgacagcgatgatttgcccgacgcatttcacgagctgaacatcagaacttgtggataa

SEQ ID NO: 40978 - DNA, 1077 bp, Neisseria meningitidis
atggagaggatagtgatgggtaaggaaatggcgatgatgcctgccgattatgggcaatggctggcagacattaaaaaccgggtgctgaccgcacggctgcgggtggcactagcagtaaatgtcgagctgatatcgctttactggcatatcgggcgggatattttgcagcggcaggcggcgcaagactggggcagcaaagtgattgaccgattggggcgggatttgcgcgaggcgtttcctgaaatgaaggggttttcccgtgccaaccttctgtatatgcgggctttcgcagaagcttggactgattttgaaattgtccaacaggctgttggacaattgccgtaggggcataatgtgcttttgcttaaccgtatgaaggaacaagaagcacgtttgttttatgtgcagaaagcgatagcgaaaaattggtcgcgcgccacattagaagtccacattaaaaaccgcttgcacgagcgacaaggaaaagcggttaccaacttcgccgcccgtttacccgcgccgacttccgcattggagcaagaaacattaaaagatccttatttgttcgactttttgagtttgggcgaagacgcgcaagagcgggaaattgaaaacgccttaatgcagcacatcacccgttttctgctggaactgggtaacggctttgcttttgttgggcggcaataccgcttggaagtgaacggcgacgagttttttattgatttactgttttatcacatccgcctgaaatgctatgtggtggtggaattaaaagccacggcatttaaacccgaacacgcagggcaattgaatttttatttagcagcaatcgatgcacaaataaaagctcctgacgatcatccgaccatcggcttgctgttatgtaaaacgcaaaaccgcttggtggcggaatatgccttatcgggcatagacaagccgataggcattgctgaatacgaattggtgcgcgccctgccggaacctttggtaacgaatttgccgacagtcgaacagttggaaaatgagttgtcggattggcaggaagcaagagatgaactgtccggaaattcggaatag

SEQ ID NO: 40979 - DNA, 189 bp, Neisseria meningitidis
ttgcaaaggtctcagtccgtatcaacaggggactttctgtatctctctcctgaaacgggcgacatcggacataccaaattaatcaccaatgccgattatttctacgacttcgaagaagcgattaacgcaggtttggaagaaatcggcaaccaatacgaatttgtcgtattcggatttttgaaagactga

SEQ ID NO: 40980 - DNA, 870 bp, Neisseria meningitidis
atgaaacccatacggaaagccgttttccccgtcgcagggatgggaacacgcttcctgcccgccaccaaggcaagcccgaaagaaatgctgcccatcgtcgacaagccgctgatccaatacgccgtagaagaagccgtggaagccggctgcacggaaatggtgtttgttaccggacgcaacaaacgcagcatcgaagaccatttcgacaaggcatacgaactcgaaaccgagttggaaatgcgccataaagacaaattgttggaacacgtccgcaacatcctgccgccgaacattacctgcctctacatccgtcaggcggaagcactgggcttgggacacgccgtcttgtgcgcccgcgccgccatcggagacgaaccctttgccgttatccttgccgacgacctgattgatgcccccaaaggcgcgctcaaacaaatggtcgaagtgtacgaacgcagcggcaacagcattttgggcgtagaaactgtcgaaccgtcgcaaaccggctcatacggcatcgtcgaaaccgaacatctcaaacagttccaacgcattaccggcattgtcgaaaaacccaagcccgaagacgcgccctccaaccttgccgtcgtcggacgctacatccttaccccgcgcattttcgacttactgaccggactgccgcgcggcgcgggcaacgaaatccagcttacagacggcatcgccaagctgctcgatcacgaatttgtcctggcgcacccctttgaaggcacgcgctacgactgcggcagcaaactgggctatctggaagccaccgtcgcctacggcctgaaacaccccgaaaccggcgaacccttccgccgccttttggaaaaataccgtaccgaataa

SEQ ID NO: 40981 - DNA, 321 bp, Neisseria meningitidis
atgaataaaatcattaaaggcgatagggttgtagtaattgctggtaaggataaaggtaagcagggtcaagtagttcgagtgttgggtgataaagttgttgttgagggcgttaatgttgtaaaacgccatcaaaaacctaatccaatgcgtggcattgagggcggtattattactaaagaaatgcctttggatatttctaatatcgcaatcctgaatccggaaactaataaagcggaccgtgttggtattaagctgattgaaaatgaaggcaaagttaaacgcgttcgtttcttcaaatcaaatggctctatcattggggca

SEQ ID NO: 40982 - DNA, 1134 bp, Neisseria meningitidis
atgtttaaaaaattcaaaccggtactgttgtcattttttgcacttgtatttgccttttggctgggaacgggtattgcctatgagattaatccgcgttggtttttgagcgatacggcaactgaaatacctgaaaatccgaatgcttttgtggcgaaacttgcccgcctgttccgaaatgccgacagggcggttgtcatcgtgaaggaatcgatgaggacggaggaaagtcttgccggagctgtggatgacggtccgttgcagtcggagaaggattatctcgcgctcgctatccggctcagtcgtttgaaagaaaaggcgaaatggtttcacgtaacggagcaggaacatgggaaagaggtttggctggattaccatatcggcgagggcggtttggttgcggtttcgctttcgcaacgctcgccggaagcgtttgttaatgccgaatatctgtatcggaacgatcgtccgttttctgtaaatgtgtacggcggaacggctcacggagaaaattatgaaacgacaggagaatatcgggttgtttggcaaccggacggttcggtatttgatgcgtcggggcgcgggaaaatcggggaagatgtttatgagcattgcctcgggtgttatcagatggcccaggtatatttggcgaaataccgggatgtcgcgaatgatgagcagaaggtttgggacttccgcgaagagagcaaccggattgcgtcggactcgcgcgattctgtgttttatcagaatatgcgggaattgatgccccgggggatgaaggcgaacagtcttgtggtcggctatgatgcggacggtctgccgcaaaaagtctattggagtttcgacaatggaaaaaaacgccagagtttcgaatattatttgaaaaacggaaatctttttattgcacaatcttcgacggtagcattgaaagcggatggcgtaacggcggatatgcagacctatcatgcgcaacagacgtggtatttggatggcgggcggattatccgcgaagagaaacagggagacagactgcctgattttcctttgaacttggaagatttggaaaaagaggtgagccgttatgcagaggctgcggcgagacgttcgggcggcaggcgcgacctttctcactga

SEQ ID NO: 40983 - DNA, 798 bp, Neisseria meningitidis
atggcggctgttttttctgtgtgtgcctgttttatgtgttcctgccttgttgtcaaaaataccgttatcggaagcggacgcaccaaaatcgccgtgccgcttgtcgcccgcgatgccgccgtactttccgccgtacttgaccaaatcaaaaacctgcccttcgacatcgtcgagttccgcgccgattttttggaatgcgcgggcagcatcggcgaagtattgcgccacacgcagaccgtccgtgacgcgctgcccgacaaaccgctgctgtttacgttcagacggcatggcgaaggcggcgcgttcccgtgttcggacggttattattttgaactgctcgacgcgctgatcgaaagccgcctgcccgacatcatcgacatcgagctgttttccggcgaaaccgccgtccggtgcgccgtggcaaatgctcaaaaaaacggcatcgccgccctgctctgcaatcatgagtttcaccgcacgccgccgcaagaagaaatcgtatgccgtctgaaacagatggaggactgcggcgcggacatctgcaaaattgcggtgatgccgcaaagcgcggaagatgtgctgactttgctttccgccacgctcaaagcgaaagagcttgccgccaaaccgattgttacgatgtcgatggggcagacgggggcggtcagccggcttgccggacaggtgttcggctcaagcatcacgttcggttcgggaacgcaaaactccgcgccggggcaaatcggcgtatccgccctccgtgcgacactcgactgcctcgaaaacggcgcagactga

SEQ ID NO: 40984 - DNA, 390 bp, Neisseria meningitidis
atgtggaaaatcataaaagaggatagtgatgatttagaatttgcaattaaatgcttattctctcaatctattgatttaaatgaattcaaattatggattgaacaagtaatacgagatatgcccatcgaggacatccctttttatatttttgacttggcggattttgatgggggaattgccgatattgacaatattgtaggttttgtttcgagttacagcctatcaaaatcgaaaaaaaatgccttgacaggcattgccttcttaagggggatagatgtctatgatccgcctatttcaaaagaaaaagcattaaaagccttaaagaaacatcctgaaatttatcagaagtttcagcatttctttccgtttgtagaactgcccccgctttaa

SEQ ID NO: 40985 - DNA, 1374 bp, Neisseria meningitidis
atgagtaatccattttcctctttaggtttgggtacggaactggtttccgcactgaccgcgcaaggttacgaaaacccgacgcccatccaagccgccgccattcccaaagcactcgccggtcatgatttactagccgccgcccaaaccggcacaggcaaaaccgccgcctttatgctgcccagtctggaacgcctcaaacgttacgccaccgccagcacctcgcccgcgatgcaccccgtgcgtatgctcgtgttgaccccgacgcgcgaactcgccgaccaaatcgaccaaaacgtgcagggctacattaaaaacctgccgctgcggcataccgtcctcttcggcggtgtcaacatggacaaacaaaccgccgacctgcgtgccggctgcgaaatcgtcgtcgccaccgtcggacggctgctcgaccacgtcaaacaaaaaaacatcagtttaaacaaagtcgaaatcgtcgttttggacgaagcagaccgcatgttggatatggggtttatcgacgacatccgcaaaatcatgcagatgctgccccgccaacgccaaaccctgctcttttccgccaccttctccgcaccgatacgcaaactggcgcaagacttcatgaacgcgcccgaaaccgtcgaggttgccgcgcaaaacaccaccaacgccaacgtcgaacaacacatcatcgccgtcgataccattcagaagcgcaacctgctcgaacggctgattgtcgatttgcatatgaaccaggtcatcgtgttctgcaaaaccaaacaaagcgtcgaccgcgtaacgcgcgaactggtgcgccgcaacctgtccgcacaggcgatacacggcgaccgttcccaacaaagcaggctcgaaacactcaacgccttcaaagacggcagcctgcgcgtcctcgtcgccaccgacatcgccgcgcgcgggctggacattgccgaactgcccttcgtcatcaattacgaaatgcccgcccagcccgaagactacgtccaccgcatcgggcgcacggggcgcgcgggcgcggacggcgtggcgatttccctgatggacgaatccgaacagaaaatgtttgaatccattaaagagctgaccggcaacaagctgctcatcgagcgcatcgagggcttcgagccgcaatggtgggaacagggcggcgcaaaaccggaaaaacccgaaatgcgcgaaccaagacaacgcaaccgctacgaatccgccaaagcgcaacgcgaaaaaaacacccggccggaaaatgcggcaaacgatgcgggcgcggcttgcggaaaaatcgccggacgcagccgccgaagccgccgggaacaccggacgtgcgccctgctccaaccgcgttacggcgtaaaataa

SEQ ID NO: 40986 - DNA, 840 bp, Neisseria meningitidis
atgaccgccacagccgccgccatagaccgcctgcttccccaaacccaatgccgcgaatgcggctacgacggctgcctgccctatgcacaggcagtcgcaacaggcgaagcgtacaacctctgcgccccgggcggagaaaccgtcattcgggacatttccgccctgctcggcaaaccctttgtcgcacctgccaaaacccaagccaaagcactcgcccggatagacgaaaccgcctgtatcggctgcaccgcctgcatccgagcctgccctgccgatgccattatgggcgcgggcaaacttatgcacaccgtcatcgccgacgaatgcaccggctgcggactctgcgtcgccccctgccccgtcgactgcatccatatgcagcccgttgccgataccgtcctgccccgcgcgcgccgcttcagcctgtccgccgacagccgttttgccgccgccgaacacgcacgcgcgcgctaccacaagcgtactgcccgcaaacagcgcgaagccgacgaacgcaaggccatgcttgccgaacgcgaagccgccgtccgcaacgcgcgtccgcaaacacccgacacaccgaaaaaaccggcgtttaaccctgccgacctcatcgccaaagccatggcaaaagcgcaaacccaacaagaccgcctcgccgccgccgacaaccgcaaagactatcaggcgaaacagatagcccaagcccgcgaacgcgccgagttgcgccgcgcccaacgcgatatgaaatacggcagcgacagcgaaaaagccgccgccctcgaatacctcaaacaatacaaagccaaacaggaagccgcacagaataccgcctcctga

SEQ ID NO: 40987 - DNA, 207 bp, Neisseria meningitidis; identical to SEQ ID NO: 39219

SEQ ID NO: 40988 - DNA, 561 bp, Neisseria meningitidis; identical to SEQ ID NO: 37658

SEQ ID NO: 40989 - DNA, 486 bp, Neisseria meningitidis
atgagatttttcggtatcggttttttggtgctgctgtttttggagattatgtcgattgtgtgggttgccgattggttgggcggcggttggacgctgtttctaatggcggcaacctttgccgccggcgtgctgatgctcaggcatacggggctgtccggtcttttattggcgggcgcggcaatgagaagcggcgggagggtatccgtttatcagatgttgtggcctatccgttatacggtggcggcggtgtgtctgatgagtccgggattcgtatcctcggtgttggcggtattgctgctgctgccgtttaagggaggtgcagtgttgcaggcaggaggtgcggaaaattttttcaacatgaaccaatcgggcagaaaagagggcttttcccgcgatgacgatattatcgagggggaatatacggttgaagagccttacggcggcaatcgttcccgaaacgccatcgaacacaaaaaagacgaataa

SEQ ID NO: 40990 - DNA, 447 bp, Neisseria meningitidis; identical to SEQ ID NO: 38915

SEQ ID NO: 40991 - DNA, 795 bp, Neisseria meningitidis
gtgttacaccgtttgcagaaagtcgtgcgccatatcgcgcaaaccgaaattatgccgcgttttttgaatacgccgtctcaccgcaaggaagacggttcgatgttgagcgaggcggacattgccgcgcagacggcttttgccgccgcgttgccgcttttaatcgacagtccgatgttgggcgaggaaatgtcgcgacaggaacagtcggctctgtgggaacaatattcgggggaaaaggggctgtggattgtcgatccgatagacgggacgaacaattttgtcaacgggctgccgcattttgccgtgtcggtggcgtttgtccgcaacgggcgcgccgaattgggtgtgatttacaatccggtcagcggcgaatgtttttatgccgaacgggggcagggtgcgtttcttaatggaacccgcctgcctttgcgtctcgtggataaaaaactcaatgaggcgattgcgggcgtggaaatcaaatatttgcgttcgggcaaactttccagccgtatgagtacgctcgcgccttttggaacgatacggagtatgggcagcagtacgttggattggtgttatctggcgtgcgggcgttatgatgtttatgtccacggcgggcagaagctgtgggattatgccgccggtgcgctgatttttgaggaggcgggcggcaggctgacgactttggaaggcgacgggttttggagtggtgaacacgtgttcaaacgctcggtcgttgccgcgctcgaaccgaagctgtttgaacgctgggtcgggtggatacgggaaaaccaatag

SEQ ID NO: 40992 - DNA, 393 bp, Neisseria meningitidis
atgggtaagcgaatgactttcgataccgccaaatcacgctttcaagagaaatttccacatttagaattgttggagttcagtggcatttataaaccttccagtgttagatgtcctacgcacgaggttgtccaacttttgtattacgacacagctataaagtcaaagtatgggtgtccggagtgtgcgagacttaaaatgaagaaaaatacgcctccccaaaaccaaaaaaccgtctccatcctcgacactaccacaggcgaaacactcacgttccccagcgtacaagctgccgccaaagccctaaacacctcctacggctctatacgaaccaagctcgacggacgttcgtcccccgacaaccttgtctgtaacaggtataaggttttgctataa

SEQ ID NO: 40993 - DNA, 291 bp, Neisseria meningitidis
atggcactgacacttgccgacgtagacaaaatcgcccgactctcccgactgcacctgactgcggaagaaaaagaaaaatcgcttcaagaattaaacgacattttcgctatggtcgaacagatgcaaaccattaacacagacggtatcgaaccgatggcgcacccgcacgaggccgccctgcgcctgcgcgaagacgaagtaaccgaaaccgaccgcgccgctgaatatcaggcggtcgcaccggaagtacgcaaccgcctgtacatcgtaccgcaagttatcgaagaataa

SEQ ID NO: 40994 - DNA, 357 bp, Neisseria meningitidis
atgttgtccgcttactttcccgtctttgtctttatcctcgtcggcctcgcggccggcgtgctgtttatcctgctcggcacaattttgggcccgaaacgccactatgccgaaaaagacgcgccttacgaatgcggttttgaagcctttgaaaacgccaggatgaagttcgacgtgcgctattacctcgtcgccatcctctttatcctgtttgatttggaggtcgcgtttatgttgccgtgggcggtggtgtttaaagaattgggcgcatacggcttctggtctatgctggtgtttatcgtcgttctgacggtaggctttgtttacgaatggaaaaaaggtgcgctggaatgggaatag

SEQ ID NO: 40995 - DNA, 729 bp, Neisseria meningitidis
atgtgggataatgccgaagcgatggaacggctgacgcgctggctgcttgtcatgatggcgatgctgcttgctgcgtccgggctggtttggttttacaattcgaatcatctgcccgtcaagcaggtgtcgctgaagggcaacctggtttattccgataagaaagcattgggcagtttggcgaaagaatacatccatgggaatattttgaggacggacatcaatggcgcacaggaggcctaccgccggtatccgtggattgcgtcggtcatggtgcgccgccgttttcccgacacggttgaggtcgtcctgaccgagcgcaagccggtcgcgcgttgggacgaccatgccttggtggacgtcgaaggcaatgtttttgaagcccgcttggacagacccggaatgccggtattcagaggcgcggaaggaacgtctgccgaaatgctccgccgttatgacgaattttcgactgttttggcaaaacagggtttgggcatcaaagagatgacctatacggcacgttcggcgtggattgtcgttttggacaacggcatcaccgtcaggctcggacgggaaaacgagatgaaacgcctccggctttttaccgaagcgtggcagcatctgttgcgtaaaaataaaaatcggttatcctatgtggatatgaggtataaggacggattttcagtccgctatgcttccgacggtttacccgaaaaagaatccgaagaatag

SEQ ID NO: 40996 - DNA, 582 bp, Neisseria meningitidis
atgaggaacgaggaaaaacgcgccctgcgccgcgaattgcgcgggcggcgttcgcaaatggggcgggacgtgcgggcggcggcaacggtaaaaatcaaccacctgctcaaacgttatattaaaaaagggcggaaaatcggcgtgtattggccgatgggcaaggaattgcgtttggacggctttgtccgcgcggcgcaaaaacgcggtgcggaactctacctgccttatatcgaaccgcgttcgcggcggatgtggtttacgccgtatcctgccgatggagtaaaacaagaacgcaagcgcggtagggcgaagctgcatgtccctcagtttgcaggtcggaaaaagcgtgtgcatgatttgaacctcctgcttgtgccagtggtcggtatggacaggctgggctaccgcttggggcaggcaggcggctattacgatgcgacgcttgcagcgatgaaataccgtttgcaggcaaaaaccgtgggcgtgggctttgcctgccaactggtcggcacgctgccgcgcgaggcgcacgacctgccgctggacggttttgtgtcggaggcggggatattgtgtttttag

SEQ ID NO: 40997 - DNA, 789 bp, Neisseria meningitidis
atgctcaccctgtacagcgaaactttcccttcgcggctgctgctcggcacagccgcctacccgacccctgaaatcctcaaacaatccgtccgaaccgcccggcccgcgatgattaccgtctcgctgcgccgcgcgggatgcggcggcgaggcgcacggtcaggggttttggtcgctgcttcaagaaaccggcgttcccgtcctgccgaacacggcaggctgccaaagcgtgcaggaagcggtaacgacggcgcaaatggcgcgcgaagtgtttgaaaccgattggataaaattggaactcatcggagatgacgacaccttgcagccggatgtgttccagcttgtcgaagcggcggaaatcctgattaaagacggcttcaaagtgctgccttattgcaccgaagacctgattgcctgccgccgcctgctcgacgcgggctgtcaggcgttgatgccgtgggcggccccgatcggcacgggtttgggcgcggttcacgcctacgcgttgaacgtcctgcgcgaacgcctgcccgacacgccgctgattatcgacgcgggcttgggtttgccctcacaggcggcacaagtgatggaatggggctttgacggcgtgcttttgaatactgccgtttcccgcagcggcgatccggtcaatatggcacgcgccttcgcactcgccgtcgaatccggacggctggcatttgaagccggaccggtcgaagcacgcgacaaagcgcaagccagcacgccgacagtcggacaaccgttttggcattcggcggaatattga

SEQ ID NO: 40998 - DNA, 747 bp, Neisseria meningitidis; identical to SEQ ID NO: 38630

SEQ ID NO: 40999 - DNA, 1722 bp, Neisseria meningitidis
atgccgtctgaagccatctgttcaaagaaaactatgctcaataaagaccaatttgcggacaaccattttatccgcaccttcatcgaagaagacctcaaaagcggcaaacacgaaaccatccaaacccgttttccgccggagcccaacggctacctgcacatcggacacgccaaatccatctgcctgaacttcggtttggcgtatatttacgacggcttgtgcaacctgcgttttgacgataccaaccccgaaaaagaaaacgacgaatacgtcaacgccatcaaagaagatgtcgagtggctcggtttccattgggcgggcgagccgcgtttcgcttccaactatttcgaccagctttatgactacgccgtcggtttgattaaagacggcaaagcgtatgtcgatgatttgacgcccgaagaaatgcgcgaataccgcggtacgctgaccgaagcgggtaaaaacagcccttaccgcgaccgcagcgtcgaagaaaacctcgacctgttcacacgcatgaaaaacggcgagttccccgacggcagcaaaaccctgcgcctgaaaatcgacatggcatcgggcaacatcaatatgcgcgaccccgtcatctaccgcatccgccgcgcccatcaccacaacaccggcgacaaatggtgtatctacccgatgtacgactacacgcattgcatttccgatgccatcgaaggcatcacgcattccttgtgtacgcttgagtttgaagcgcaccgtccgctgtacgactgggtgttggataacatccccgcgccgcacgccacacgtccgcgccaatacgagttttcccgtttggagcttttgtacaccattacctccaaacggaaattgaatcagttggttgtggaaaaacacgtttccggctgggacgatccgcgtatgccgaccatttccggtatgcgccgtcgcggctacacgcccgaaggcctgcgcctgtttgccaaacgcgccggtatttccaaatctgaaaacatcgtcgatatgagcgtgttggagggtgcgattcgcgaagagctggaaaactccgccccgcgcctgatggcggtgttgaacccgctcaaagtaaccctgaccaactttgaagccggcaaaacccaaagccgccgtgccgcgttccatccgaaccacgaagaaatgggcgatcgcgaagtacctgtttcacaaaccatttacatcgaagccgacgactttgccgaaaatccgcccaaaggcttcaaacgcctgattcccggcggcgaagtacgcttgcgccacggctatgtcatcaagtgcgatgaagtcgtcaaagacgaagcaggcaatgtggtcgaactcaagtgcagcatcgaccacgacaccttgggcaaaaatccagaaggccgtaaagttaaaggcgtgattcattgggtttccgccgaacacgccgccgaaatcaaagtccgtctgtacgaccgcctctttaccgtcgagcgtcccgatgccgtgcgcggcgaagacggcgaatacctgccgttcaccgatttcctcaatccggaatccgtcaaggaaatcaccgcctacgccgaacctgccgccaaagatttgccggcagaaagccgttggcagttcgagcgtatcggctacttcgtaaccgaccgtaaagaccacggcaaagacacgccggtgtttaaccgcacggtcacgctgaaagattcttggcagcctaagtaa

SEQ ID NO: 41000 - DNA, 1068 bp, Neisseria meningitidis
atgtactcaatcgaacaattccctcccgaaatagattttgaaacggtcgccatcttgaaaaaattggcttccgcccatcgttatctggccgaattaaaaggcatctgccgcagtatccccaaccaaggtattctgattaacacgctgtctttgcaggaagccaaggacagttccgaaattgaaaatatcattaccactcatgacgagctgttccgtgcaggaatatcggtaatcccgtccagtcctgccattaaagaagtgcagaattatgcttcagcactgcattgcggcttcggccttatccaaaaacacggaatactgaccaacaatcatattttgacgatacaggcagaattggaaaagaaccgtgccggattccgcaaacagtcggggacgatgctgaaaaacgactacaccggcgaaaccgtctatacgccgccgcaacatacggacgacatcatccgcctgatgggcaggctggaggcatttgtcaatgacggcagcacggcaaaacccatcgatccgctgattcgtatggcactgatccaccatcagtttgaaagtatccacccgttttacgacggcaacggcaggacaggtaggattatcaatgtgctgtatctggttttaaccggattgctggatattcccgtcttatacctcagccgctatctggtacggaataaaagcgaatattaccgcctgctgcaacacgtgcgcgatacgggtgaatgggaaggctggctgctctatatgctggaagccgtggaacaaaccgccaaagacggcatcgataccgtgcagcacatccatcaggagatgttgaactacaaacaccgcatcaggaaaaacttcagtttctacagccaagacctgattaaccacctgttcaatcatccctacacaaaaatcgatttcctgatgaaaacgctgaaagtttcccgccccagtgccgccaaatacctggatgaactgacagaaggcggattcctgcacaaagaaaagataggcagaagcaactactatatcaatatcgcgctgatgaatattttattgccgactaattga

SEQ ID NO: 41001 - DNA, 762 bp, Neisseria meningitidis
atgccttttaagccatccaaacgaatctctttattacttgtccttgccttgggcgcgtgcagcacttcctaccgcccctcgcgggcagaaaaagccaatcaggtttccaatatcaaaacccagttggcaatggaatatatgcgcggtcaggactaccgtcaggcgacggcaagtattgaagatgccttgaaatcagaccctaaaaacgagcttgcctggctggtccgtgccgaaatctatcaatacctgaaagttaacgacaaggcgcaggaaagtttccggcaagccctctccatcaaacccgacagtgccgaaatcaacaacaactacggttggttcctgtgcggcaggctcaaccgccctgccgaatctatggcatatttcgacaaagccctggccgaccccacctacccgaccccttatattgccaacctgaataaaggcatatgcagcgcaaaacaggggcaattcggattggcggaagcctatttgaaacgttccctcgccgcccagccgcagttcccacccgcatttaaagaactggcgcgcaccaaaatgctggccgggcagttgggcgatgccgattactactttaaaaaataccaaagcagggtagaagtccttcaggccgatgatttgctgctaggctggaaaattgccaaagcactcggcaacgcacaggcggcatacgaatatgaagcacaattgcaggcgaatttcccctactcggaagaattgcaaaccgtcctcaccggtcaataa

SEQ ID NO: 41002 - DNA, 1470 bp, Neisseria meningitidis
atgccgtctgaaaccgatatgttctgtgtcggcaatgtttcagacgaaaacggaaggacaaagattatgaaaaaaattcaagcggatgtcgtcgtaatcggcggcggtactgccggtatgggtgcgtttcgcaatgcccgtttacattcggataatgtttacctgattgaaaacaatgtgttcggcacgacctgcgcgcgcgtgggctgtatgccttccaaactcttgattgccgccgcagaggcgcgtcatcacgcattgcataccgacccgttcggcgtgcatttggacaaagacagcatcgtcgtcaacggcgaagaggtcatgcagcgcgtcaaatccgagcgtgaccgttttgtcggctttgtcgttgccgatgtggaagagtggcctgccgacaagcgcatcatgggttcggctaaatttatcgacgagcataccgtccaaatcgacgagcatactcaaattacggcaaaaagtttcgtgattgctaccggttcgcgtcccgtcatcctgccgcaatggcagtctttgggcaatcgtttgattatcaacgatgacgttttctcatgggatacgctgcctaagcgcgttgccgtgttcgggccgggtgttatcggtttggaactgggtcaggcattgcaccgtttgggcgtgaaagttgaaattttcggtttgggcggaatcatcggcggcatttccgaccccgtcgtttcagacgaggcgaaagccgtgttcggcgaagaattgaaactgcatttggatgctaaaaccgaggtcaagctcgatgcagacggcaatgtagaagtccattgggagcaggacggcgaaaaaggcgtatttgttgccgaatatatgctggcagccgtgggccgccgtccgaacgttgacaatatcggtttggaaaatatcaatatcgaaaaagatgcgcgcggcgtacccgttgccgacccgctgaccatgcagaccagcattccgcatatctttattgcgggcgacgcgtccaaccaactgcccctgctgcacgaagctgccgaccaaggcaagattgccggcgacaatgcaggccgttacccgaatatcggcggcggtttgcggcgcagcaccatcggcgtggtgtttaccagtccgcaaatcggctttgtcggtctgaaatacgcgcaggttgccgcgcaataccaagccgacgaatttgtcatcggcgaagtatcgttcaaaaaccaaggccgcagccgcgtgatgctggtgaacaaaggccatatgcgcctgtatgccgaaaaagccaccggccgctttatcggcgcggaaatcgtaggccctgccgccgaacatttggcgcacttgttggcatgggcgcatcaaatgaagatgaccgttccgcaaatgctggatatgccgttctaccatcccgttatcgaggaaggtctgcgtaccgcgttgcgcgatgccgatgcgaaattgaaagcctga

SEQ ID NO: 41003 - DNA, 444 bp, Neisseria meningitidis; identical to SEQ ID NO: 38644

SEQ ID NO: 41004 - DNA, 2286 bp, Neisseria meningitidis
atgaataccaaactgacaaaaatcatttctggtctctttgtcgcaaccgccgcctttcagacagcatcggcaggaaacattacagacatcaaagtttcctccctgcccaacaaacagaaaatcgtcaaagtcagctttgacaaagagattgtcaacccgaccggcttcgtaacctcctcaccggcccgcatcgccttggactttgaacaaaccggcatttccatggatcaacaggtactcgaatatgccgatcccctgttgagcaaaatcagtgccgcacaaaacagcagccgtgcgcgtctggttctgaatctgaacaaaccgggccaatacaataccgaagtacgcgggaacaaagtttggatattcattaacgaatcggacgataccgtgtccgcccccgcacgccccgccgtaaaagccgcgcctgccgcaccggcaaaacaacaggctgccgcaccgtctaccaagtccgcagtatccgtatccaaaccctttaccccggcaaaacaacaggctgccgcaccgtttaccgagtccgtagtatccgtatccgcaccgttcagcccggcaaaacaacaggcggcggcatcagcaaaacaacagacggcagcaccagcaaaacaacaggcggcagcaccagcaaaacaaaccaatatcgatttccgcaaagacggcaaaaatgccggcattatcgaattggctgcattgggctttgccgggcagcccgacatcagccaacagcacgaccacatcatcgttacgctgaaaaaccataccctgccgaccacgctccaacgcagtttggatgtggcagactttaaaacaccggttcaaaaggttacgctgaaacgcctcaataacgacacccagctgattatcacaacagccggcaactgggaactcgtcaacaaatccgccgcgcccggatactttaccttccaagtcctgccgaaaaaacaaaacctcgagtcaggcggcgtgaacaatgcgcccaaaaccttcacaggccggaaaatctcccttgacttccaagatgtcgaaatccgcaccatcctgcagattttggcaaaagaatccgggatgaacattgttgccagcgactccgtcaacggcaaaatgaccctctccctcaaagacgtaccttgggatcaggctttggatttggttatgcaggcacgcaacctcgatatgcgccaacaagggaacatcgtcaacatcgcgccccgcgacgagctgcttgccaaagacaaagccttcttacaggcggaaaaagacattgccgatctgggcgcgctgtattcacaaaacttccaattgaaatacaaaaatgtggaagaattccgcagcatcctgcgtttggacaatgccgacacaaccggaaaccgcaatacgcttgtcagcggcaggggcagcgtgctgatcgatcccgccaccaataccctgattgttaccgatacccgcagcgtcatcgaaaaattccgcaaactgattgacgaattggacgtacccgcgcaacaagtgatgattgaggcgcgtatcgtcgaagcggcagacggcttctcgcgcgatttgggcgttaaattcggcgcgacaggcaagaaaaagctgaaaaatgatacaagcgcattcggctggggggtaaactccggcttcggcggcgacgataaatggggggccgaaaccaaaatcaacctgccgattaccgctgccgcaaacagcatttcgctggtgcgcgcgatttcctccggtgccttgaatttggaattgtccgcatccgaatcgctttcaaaaaccaaaacgcttgccaatccgcgcgtgctgacccaaaaccgcaaagaggccaaaatcgaatctggttacgaaattcctttcaccgtaacctcaatcgcgaacggcggcagcagcacgaacacggaactcaaaaaagccgtcttggggctgaccgttacgccgaacatcacgcccgacggccaaatcattatgaccgtcaaaatcaacaaggactcgcctgcgcaatgtgcctccggtaatcagacgattctgtgtatttcgaccaaaaacctgaatacgcaggctatggttgaaaacggcggcacattgattgtcggcggtatttatgaagaagacaacggtaatacgctgaccaaagtccccctgttgggcgacatccccgttatcggcaacctctttaaaacacgcgggaaaaaaaccgaccgccgcgaactgctgattttcattaccccgaggattatgggtacggccggcaacagcctgcgctattga

SEQ ID NO: 41005 - DNA, 1407 bp, Neisseria meningitidis
atgaacgattacgcagctatgccgtctgaagaccgtgagatcggcgcattgtcgctgcctccacattcgatggaggcggaacaatccgttttgggcgggttgatgctggaaaatccggcttgggacaggattgccgatgtggtttcgggagaggatttctaccgccacgaacaccgcctgattttccgatccattgccaaattgattaatgagagccgtcccgccgatgtgattacggttcaggaagatttgcagcggaacgaagaattggaagcggcaggcggattcgaatacctgattacgctggcgcaaaacaccccgtctgccgctaacatccgccgctatgccgaaatcgtgcgcgagcgttccatcatgcgccagctcgccgaagtggggacggaaatcgcccgcagcgcatacaatccgcaaggcagggacgcgggtcagcttttggacgaggcggaaaacaaagtattccaaatcgccgaaagcaccgccaaatccaagcagggctttttggagatgcccgatttgctgaaagaagtcgtacagcgcatcgatatgctctactcgcgcgacaatcccgatgaagttaccggcgtgccgacagggttcatcgacctcgacaaaaaaacctcgggtctgcaacccggcgacctgattatcgttgccggtcgtccgtctatgggtaagaccgccttttccatcaatatcgccgaacacgttgccgtagaaggcaagctgccggttgccgtcttctcaatggagatgggcggtgcgcaactggtcatgcgtatgctcggctcggtcggacgcttggatcaaagcgtcctgaaaaccggcaggctcgaagacgaacactggggtcgtctgaacgaagcagtcgtcaaactctccgacgcgcccgtgtacatcgacgagaccccgggtctgaccgcgctcgaactgcgcgcccgcgcccgccgtctcgcccgtcaatttaacaataagctgggattgatcgtcatcgactacctgcaactgatggcgggatccggccgttccgacaaccgagcttcagagctgggcgaaatttcacgttcgctcaaagcgttggcgaaagaattgcaagtccccatcatcgccctgtcgcaactgagccgcacggtcgaatcgcgtaccgacaaacgcccgatgatgtccgaccttcgcgaatccggcgcaatcgagcaggatgccgacctgattatgttcatgtaccgcgacgaatactacaaccaggactcacccatgaaaggccttgccgaatgtatcatcggcaaacaccgcaacggtcccgtcggtaaaatcttcctcacatggacgggacaattcaccaaattcgacaatgctgcctatattcccgaggaggcaaagatagaggattaa

SEQ ID NO: 41006 - DNA, 1677 bp, Neisseria meningitidis
atgagcgtaggtttgctgaggattctggttcaaaaccaggtggttactgttgagcaggccgagcattactacaatgagtcgcaggcgggtaaggaagtgttgccgatgctgttttcagacggtgtcatttcgcccaagtcgcttgcggcattgattgcgagggtgttcagttattcgattcttgatttgcgtcattatccgcgccacagggtgctgatgggggtgttgacggaggagcagatggtggagttccactgtgtgccggttttccgtcggggcgacaaagtattttttgcggtttccgatccgacacagatgccgcaaattcagaaaaccgtttctgccgcagggattgaggttgagttggtcattgtcgaggatgaccagttggcgggtttgctcgattgggtgggttcgcgttcgacatcgctgcttcaggagcttggggaggggcaggaggaagaggaaagccacaccctgtatatcgacaacgaggaggcagaagacggccctgttccgaggtttatccataagactttgtcggatgccttgcgcagcggggcatcggacatccatttcgagttttacgaacacaatgcccgtatccgtttccgtgtggacgggcagctccgcgaggtggttcagccgcccattgcggtaagggggcagcttgcttcccggattaaggtaatgtcgcgtttggacatttccgaaaaacggataccgcaggacggcaggatgcagctgacctttcaaaagggcggcaagcctgtcgatttccgtgtcagcacattgccgacgctgtttggcgaaaaggtcgtgatgcggattttgaattccgatgccgcgtctttgaacatcgaccagctcggttttgagccgtttcagaaaaaattgttgttggaagcgattcaccgtccctacgggatggtgctggtaaccggtccgacgggttcgggtaagacggtgtcgctctatacctgtttgaatattttgaatacggagtcggtaaatattgcaacggcggaagaccctgccgagattaacctgccgggcatcaatcaggttaacgtcaatgataagcagggcctgacttttgccgctgctttgaagtctttcctgcgtcaggacccggacatcattatggtcggtgagattcgtgatttggaaactgccgatattgcgattaaggcggcacaaacagggcatatggtgttttccaccctgcacaccaataatgcgccggcgacgttgtcgcgtatgctgaatatgggtgtcgcgccgtttaatattgccagttcggtcagcctgattatggcgcagcgtcttttacgcaggctgtgttcgagctgcaaacaggaagtggaacgcccgtctgcctctgctttgaaggaagtcggcttcaccgatgaggaccttgcaaaagattggaaactttaccgcgccgtcggttgcgaccgttgccgggggcagggttataaggggcgtgcgggcgtgtatgaggttatgcccatcagcgaagaaatgcagcgtgtgattatgaacaacggtacggaagtggatattttggacgttgcctataaggagggtatggtggatttgcgccgggccggtattttgaaagttatgcagggcattacttcattggaagaggtaacggcaaataccaacgattag

SEQ ID NO: 41007 - DNA, 1074 bp, Neisseria meningitidis
atgaacatcaccatagtcgccccctactgctcgctgccgtccgaaccgtatttcaaccgcttttggtatctggcagaacgattgtcgcaatcgcacgacgtgttgctgattaccagccgtttccgccactacgacaaatccttcagacggcatgaagatgctgccgccacttcaaacggcaggctgcacagcccgcaggcggcggaacaggacatcgtctattctgcctatccgctgattgccaccaacctgctgttgggcaaacacaaagcgcgtttgggttacaaactgattgtcgatgtgcaggacgtatggccggagtccttctcatcggtcgtaccgtttttgaaaaaagtaccgcataagctgctgccctttgcctcacgcgccaaccaagcctaccgctacgccgacgcgctggttgccgtatcgcagacttatctcgaccgcgccaaagaaaccaatccgaacgtacccggcgaagtcatctatattggtgctgactttcccaaactcgatgccgcacctgccaaagattttggcgacgacaaaacccgctttttctacttgggcacgctcagttacagctatgacgtggaaaccgtgtgcaaaggcgttcggaaacttttggacgacggcgaaaatgtagagctgcacatcatgggcggcggccccgatttggacaggctcaaacaatacgcctgcgagggcatcaagttttacggctatatcccctacgccgaaatgatgtcagtcgccaaaggctgcgacatctccgtcaacgccatccattcctactccatggcatcgataaccaacaaactgtccgactacatggcattgcaaaaaccgattttaaacagccaggtcaacgacgaagtcgccgaagtcctcaccctgctgccgcatgcggactaccgttccggcgatgtggacagcttcatccaagccgccaaagacattctggcgcgcaaaaacgaccccgttcaatccgacgaaatcgtccgccgcttcaagcgcgatgtagcgtaccaaaaaatcgtcagcctgattgaaagattagctcatgagtaa

SEQ ID NO: 41008 - DNA, 1386 bp, Neisseria meningitidis
atgttaagcaaagagtatattaaacaaattaaacaacatacccctcatattttccctttacttattgaagaataccaaaataatgttggtagtatattgtttattttgaaaaatttaggaaacctgcctaaaaattttcgaactgattggattgagaaattattacaaaatgataatgagcaagtccgtttttgggcagttaagacattaggaaaggtagaaaatagtcagttacttgatttgttaaattatgtagtcctaagcgatagtagcacaatagtaaaacgagaggctgtttcatctattggacgcatgcgagatccaaaaattcagacgctgctattacaatatttgcagagttacgatcctaaaattatttgtcaggcaatacgaggtttattgccatttaaaggacaacctgaaattgataatgctttacgtaaattagtaaatcatgagaatgaaatggttcgttctgttatctataaagaatatttcacacagaaggtaaataaaaaaacattattgccccatactgaaacctatccttttttgaaaaatgtcgtagttaatagcgatgtccgagatgtgttgcagttagtacctgaagatagtgttcatctaacttttacatcgccaccatattataatgcacgtgattattctatttatccaagttatgaggcctatttggtttttttacaagaagtatttaaagaaattcatcgcattacaaaagaaggacgatttttaattgttaatacttcccctgttattgtgccacggattagtcgtgctcattctagtaagcgttatccaattccatttgatttacaccaccgtttaattcaaataggttgggagtttattgatgacattgtttggatgaaaccagaatatagtgttaaaaatcgaataggtggatttcaacaacatcgtaaacctttagcatataaacctaactcagtaacagaatatttaatggtttaccgaaaacaaactgatagattactggattggaatatgaaccaatatgataaacaaactattgaggaaagcaaagtagctgatggctttgaaacaacgaatgtttggcaaattcatccaaaatctgacaaagtacattcagctatttttccggcagatttgtgtaaacgtatagtggaatattattcgtttaaagatgacttggtatttgatccatttggcggaagtggcacattgggtcgtgtagcgaaaaaattagggaggcatttctttttgactgagaaagatgaaaaatattttgaatatatgcaaactttccagaaaaaagatagcttatttcttgaacgagataccaaatttttaacattaactgaatttgcaggcagtataataaaatga

SEQ ID NO: 41009 - DNA, 1167 bp, Neisseria meningitidis
atgaatttacacgagtatcaggctaaagaactgctggctggctacggtttgcccgtacaaggcggtattttggcacacaacggcgaagaagccgctgcagcttacgacaaattgggcggcaaattcgctgttgtcaaagcacaagtacacgccggcggccgcggtaaagcgggcggcgtaaaagtcgttaaaagccgcgaagaagctaaagaagtggctgaaagcctgattggcaccaacttggtaacttaccaaactgatgccaacggccaacctgtcaacagcgttttggtttgcgaagacatgtatcctgttcaaaccgagctgtacttgggcgcagtggttgaccgttctacccgccgcgttacattcatggcttctaccgaaggtggcgtagaaatcgaaaaagttgctgccgaaactccagaaaaaatcttcaaagtaaccgttgatccgctggtcggcctgcaaccttgccaagctcgcgaagttgccttccaactgggcttgaaagacaaacaaatcaacgagttcgtcaaactgatgaccggcgcgtacaaagcgtttgttgaaaacgacttcgccctgtttgaagtcaacccgctggcagttcgcgaaaacggcgcactggcttgcgtggacggcaaaatcggcatcgacagcaacgcgctctaccgcctgccaaaaatcgctgaattgcgcgacaaatctcaagaaaacgaacgtgagctgaaagcttctgaattcgacctgaactatgttgccctggaaggcaacatcggctgtatggttaacggtgccggtttggcgatggccaccatggacatcatcaaactcaaaggcggtcaacctgccaacttcttggacgttggcggcggcgcaaccaaagaccgcgtggttgaagcgttcaaactgattctggaagacaaatccgttcaaggcgtattgatcaacatcttcggcggtatcgtacgttgcgacatgattgcggaagccatcgtggcagccgttaaagaaatcaacgtcgacgttcctgtcgttgttcgtttggaaggtaacaacgccgaactcggcgcgaaaatcctgaacgaatcaggcctgaaactgacttctgcagacggcctgaatgacgcagccgaaaaaattgttgcagccgtaaacgcctaa

SEQ ID NO: 41010 - DNA, 624 bp, Neisseria meningitidis
atggaacgcaaagaacgcctgcgtgcaggcattgccgcgatggggctggatatttcggaaacggcgcaggacaggcttttggcctatgtggatttgttgaaaaagtggaacaaaacctacaatctgaccgccctgcgcgacgaggaaaaaatgattgtccatcatcttttggacagcctgacgctgctgccccatatcgagggtgtgcaaacgatgctggatgtcggttcgggcggcggtcagcccggcattccggcggcggtgtgccgtccggatgtgcagataacccttttggatgcgaatacgaagaaaacggcttttttacagcaggcggttatcgagttggggttggacaatgtgcgcgtggtatccggacgcgtggaggcggtttcggacgtgcgtgccgacgtggttaccagccgtgcgtttgcagaactggcggattttgtgtcgtggacggtgcatctgttgaaagacggcggctactgggcggcgatgaagggcgtgtatccgcaggaagaaatcggccgcctgccgcaggatgtgtgcgttgaaaaagtccaaaggctcgacgtgccgggcttggatgcggaacgccatatcgtcatcctgagcaagcgttga

SEQ ID NO: 41011 - DNA, 687 bp, Neisseria meningitidis
atgacggtgttgcaagaacgttattgtgaggtgtccgaccgtatcggaaaattggttctgcaggcgggaaggaagccgcattccgtcagcctgattgccgtcggtaagactttcccttcagacggcatccgcgaagtttacgccgccggacagcgtgatttcggcgagaactatattcaggagtggtacggcaaaacggaagagttggcggatttgaccgacatcgtgtggcacgtcatcggcgatgtgcagtccaacaaaaccaagtttgtcgccgaacgcgcgcattgggtgcataccgtatgccgtctgaaaaccgctgtccggttgagcgaacagcgtccttcctcaatgccgcccttgcaggtgtgtatcgaggtgaatattgcgggcgaggcggtgaagcacggtgtcgcgcccgaagaagcagtcgcgcttgctgtggaagtggcgaagctgccgaatatcgtcgtacgcggactgatgtgtgttgccaaagccaacagcagtgaaacggagttgaaggtgcaatttcaaacgatgcggaaactgcttgccgacctcaatgcggctggcgttaaggcagacgtgctgtctatggggatgtcggacgatatgcctgccgccattgagtgcggtgcgacacacgtccgtatcggcagcgcgattttcgggaaaaggggctga

SEQ ID NO: 41012 - DNA, 648 bp, Neisseria meningitidis
atggttcgatctcgacccggcggaaaccgaagaaggctgggcgcgcttgagcgggacaaaacgctgacaagcaaaggaaacatcatgcaggataaaaacaacctctgctggctcgatatggaaatgacggggcttaatcccgaaaccaaccgcattatcgaagtcgcgatgattattaccgactcggatttgaatgtattggcgcaatccgaagtttacgccgtccaccaaagtgacgagctgctcgacaatatggacgagtggaacaccgccacacacggcaggacggggctgacacagcgcgtacgcgaatcgtcgcataccgaagccgaagtcgaacagaaactgctggactttatgtcggaatgggtacccggacgcgccacgccgatgtgcggcaactccatccaccaagaccggcgttttatggtcaaatatatgccgaaactggaaaactacttccactaccgcaaccttgacgtttccacgctgaaagagcttgccaaacgctggaatccgtccgttgccaaaagcgtcgtcaaacgcggttcgcacaaggcattggacgacattttggagagcatcgaagaaatgcgccactaccgcgaacactttctgatttccgccccgagagccgaagcgcaataa

SEQ ID NO: 41013 - DNA, 777 bp, Neisseria meningitidis
atggctaagaaattcgataaagacagcttcagcggcactctgattgtcgtgttggcggtcagcctgatttgctcggtcatcgttgccggtgcggtcgtcggcttgaaacccatccaagagaaacaaaaactccaagacaaacaaggctatatcttgagcgtagccggtttgatggataaggacaccgacatcggtaaaacctttgccgagcgtatcgagcaacgtgttgtcgatttggcgaccggcgaatatgtgaaagacgcgccgaaagacttcagcgcgcgtgttgctgccaaagatcccgcgcaaagcatccaaatcaaacccgaagacgatttggcaggcatcaaaagccgtgccaaatacactgaggtttatttggtaaaaggtgaagacggcaaaatcgggcaaatcatcctgcctatgcacggcaacggtttgtggtcggtcatgtacggcttcgtcgccatccaacctgacggcaacaccatcaacggcattacctactacgaacaaggcgaaaccccgggcttgggcggcgaaatcggcaatccgttgtggcagcaaaaattcgtcggcaaaaaactgtttgacggacaaggcaaactcgccctgcacgtcggcaaaggcgcgggttcggacaaagaacacggcgtagatgccctctccggcgcatcgctgacatccaaaggcgtgcaaggttcgttcgcctactggttcggcgaaaacggctatatcccctacctgaacaaattgaaatcagcaggagcgcaataa

SEQ ID NO: 41014 - DNA, 1677 bp, Neisseria meningitidis
atgaaacggaaaaatatgactgacaacagccctcctccaaacggacacgctcaagcacgcgtccgcaaaaacaacaccttcctctctgccgtctggctggtcccgctgattgcgctgattgccggcggctggctttgggttaaggaaatccgcaacagggggcctgtggttacgctcttgatggacagcgcggaaggcattgaggtcaacaatacggtcatcaaagtattgagcatcgatgtcggacgcgttacccgaatcaaactgcgcgacgaccaaaaaggcgtggaagtaaccgcccaactcaatgcggacgtatccggcctcatccgcagcgatacccagttttgggtggtcaagccgcgtatcgaccaaagcggcgtaaccggtttgggtacgctgctttcgggttcgtacatcgcctttacacccggcaaaagcgacgaggcaaaagacgtgttccaagtgcaggacattccgcccgttaccgccatcgggcaaagcgggctgcgcttgaatttgattggtaaaaacgaccgcatcctcaacgtcaacagccctgttttgtatgaaaactttatggtcgggcaagtcgaaagcgcgcatttcgacccgtccgaccaaagcgtgcattacaccatcttcatccaaagccccaacgacaaactgattcattccgccagccgtttctggctggaaagcggcatcaatatcgaaaccacaggcagcggcatcaaactcaattccgcccctctgcctgccctgctgtcgggcgcgatttcatttgattcgccgaaaaccaaaaacagtaaaaacgtcaaaagcgaagacagcttcacgctttacgacagccgcagcgaagtcgccaacctgcctgacgaccgctcgctgtactacaccgcgtttttcaaacaatccgtgcgcggactgaccgtcggttcgcctgttgaatacaaagggctgaatgtcggcgtggtttccgacgttccctatttcgaccgcaacgacagcctgcatttatttgaaaacggctggatacccgtgcgcatccgcattgagccttcccgtttggaaatcaatgccgacgaacaaagcaaagaacattggaaacaacaatttcagacagccttaaacaaaggcctgactgccaccatctccagcaacaacctgctgaccggcagcaaaatgattgaattgaacgatcagccttccgcctcgcccaagctgcgaccgcataccgtttatgcaggcgataccgtcatcgccacacggggcggcggtttggacgacttgcaggcgaaagtggtggatttgctggacaagttcggcaaactgcctttggataagacggttaccgaattgaacggctcgcttgccgagctcaagtccacactcaaatctgccaatgctgctttaagctccatcgacaaactggtcggcaaaccgcagacgcaaaacattccgaacgaactgaaccaaaccctgaaagagttgcgcataaccctgcaaggcgtatcgccgcaatcgcctatctacggcgacgtacaaaatacgctgcaaagtttggacaaaaccttaaaagacgttcaacccgtcattaacactttgaaagaaaaacccaacgcgctgattttcaacagcagcagcaaagaccctatcccgaaaggaagccgataa

SEQ ID NO: 41015 - DNA, 222 bp, Neisseria meningitidis; identical to SEQ ID NO: 36405

SEQ ID NO: 41016 - DNA, 621 bp, Neisseria meningitidis
atgatgagccacaaaaaacaagatgccttccaaggattgatcgacgcgctgaaggttttacccaacgttgggccgaaatcggcacagcggatagcgtatcatttgctccaacacaagcgcaaagaggctgaaaaactggtggatgccttgcagacggcattgaagcaggtttaccattgcgcgatgtgcaacacgttttgcgaaggcggattgtgcgatatttgtgccgatgaaacacgcgacgggcggcggctgatggtggtgcatatgcctgccgacgtgtcgaatatggaagcggcaaactgccacgacgggctgtatttcgtcctgatggggcaaatcaatacggcattgggaatggacgtatccgccatcgcattggacaggctggcgcaacggctgggcggcggggaagtcgaagaaatcattattgcaaccgcttttaccgcagaaggcaatgcgacggcgtatgtcctgtccgagttttttaaaaacctgccttacaaagtcagcaggctgtcgcagggcatccccttgggcggcgaattggaatatgtcgatgcgggaacgctggcgcaggcggtgtacgaacgccgcctgattaaagaaggcggggcgtaa

SEQ ID NO: 41017 - DNA, 2151 bp, Neisseria meningitidis
atgctcaccgacttagaaaaaaacgccatccgcgaccattaccaaaatattggcaaaaacctgcccggtttccgtccgcgtgcttcgcagcgggaaatgattgcggcggttgccaacgctttttcgcggacgttggcgcgcgaagaaggcggcgagccgcccaagcgcgaaggcgagagcatcgccgtaatcgaaggaccgaccggcgtgggcaaatcgcttgcctacctgctggcgggcggcatcatggcgcaaacacgcggcaagcggctgattgtgagcagcgcgacggttgccttgcaggagcagttggtagaccgcgacctgccgtttctggtcgaaaaaagcggtttggaactgaccttcgcacttgccaaagggcgcggccgctatctctgcccctacaaactctatcaactgacgcaaagcaatgcccagcaaaacctgctcggctttgaagcccccgccgtcttgtgggacagcaaacccaagcccgaagaattgaagctgctgcgcgacatcgccgacgaattttccgcccgacggttcaacggcgaccgcgacacttggccggaaaaaatcgatgacgcgatttggctcaaagtgaccaacgaccgccacggctgcctgaaaaccgcctgtcccaaccgtccggaatgtccgttttacctagcacgcgatgtcttggaaaccgtcgatgtcgtcgttgccaaccacgatcttctgcttgccgacatcagtatgggcggcggcgtgattctgcctgcgcccgaaaacagtttctattgcatagacgaagcgcaccacctgcccaaaaaagccctcagccgttttgccgccgaacattcatggaatattgccgtttggacgctggaaaaactgccgcagctgaccggcaaaattgccgcgcttaccgataaagccgaacttgccaacctggccgacgaagccgccgcatccttgctcgacagcctgcacgaatggcagttccatttggcggaagagccgtctttaagtatggggccgtctgaaaacgacagacgaaccaacagcgaaccgacttggctgtgggaagacggcaaaatccccgaaggcctcgaaaccaccgtttccaacacagccattgccgcacgcagcctgctcaaacacgttgtcgggctgaacgatgcgctttccgccgcgcgccgcgaaaaagaacaggacggcgcgctcctcgaccgcctgaccggcgatttcggcatcttcatcgcccgtatcgaacaaatcagcgcggtttgggatttgctctctaccgttcccattgagggcgaagagccgttggcgaaatggataacccgccgcgccgacgacaaaaacgactacattttcaacgccagccccatcagcagcgcgtcccacctcgccaacagcctgtggcggcgtgcggcaggcgcggtgttgacctccgccaccctgcaatccttgggcaactttaacctgatgctgcgccaaaccgggctgcaatggctgcccgaaaccaccaccctcgccctcaaaagcccctttgactttgaaaaacagggcgaactctacatcccccccatatacgccagccccaaagaccccgaagcccacaccgccgccatcatcgaatggctgcccaagcttatttcgcccaccgaagccatcggcacgctcgtcttgttttcctcgcgcaaacaaatgcaggatgtcgccctgcgcctgcccggagactacctgccgctcttgctcgtacaaggcgaattacccaaagccgtcctcctgcaaaaacaccaccgggccatagaagaaggcaaagccagcatcatcttcggactcgacagtttcgccgaaggactcgacctgcccggcaccgcctgcgtgcaagtcatcatcgccaagctgccgtttgcgatgcctgacaaccccatcgaaaaaacccaaaaccgctggatagaacagcgcggcggcaatccttttattgaaatcaccgtccccgaagccggcatcaaactcatccaggccgtcggccgcctcatccgcaccgaacaagactacggccgcgtaaccatcctcgacaaccgcatcaaaacacagcggtacggccaacaattattggccggcctgccgccgtttaaaaggatagggtaa

SEQ ID NO: 41018 - DNA, 975 bp, Neisseria meningitidis
atgctcgagaatctgccctatttccagcgacatctgcctgaagaccttgccaaagtcaatgaagtcatcaaccgtgcggtgcaatccgatgtcgcactgatttcgcaaatcggtacatatatcatcagcgcgggcggcaaacgcctgcgtccgattatgacgattttggcgggtaaggcggtcggttatgatgacgagaaactgtatgcgctggcggcgatggtcgagtttatccacacttccaccctcctgcacgacgatgtcgtcgatgaaagcgatttgcgccgtgggcgggcaacggcaaacaatctgttcggcaatgcggcggctgtgttggttggcgactttttatacacgcgcgcctttcaactgatggttgcctcgggcagtatgcgcgttttggaagtgatggcggatgcaaccaacattattgccgagggcgaagtcatgcagctgatgaacatcggcaatacggacattaccgaagaacaatatatccaagtcatccaatataaaacggcaaaattgtttgaagctgccgctcaagtcggcgcaattttgggcaaggcttcccccgaacacgaacaggcgttgaaagactacggtatgtacgtcggtacggcattccaaattattgacgatgtgctggactattctggcgaaaccgaagaaaccggcaaaaacgtcggcgacgatttggcggaaggaaaaccgactttgcctttgatttatctgatgcgtcagggttccgaacaggttgcgaacgatgtgcgtactgctttggaaaatgcagatcgcagctattttgagaaaatccacgattatgtcgtccgttcggatgcgttggcatattcgataggcgaggcgcgcaaagcagtcgattgtgccgttaccgccttggatgccctgcccgacagcgaagtgaaggatgccatgattcagctggcgaaggaatctttggtcagggtgtcttga

SEQ ID NO: 41019 - DNA, 978 bp, Neisseria meningitidis
atgtgcgtattattgcaattattcagttgtgtttctcgtttaatcatctcattttatggttcaaaaagatttatggacattctggacaaactggtcgatttcgcccaattgacgggcagtgtggatgtgcagtgccttttgggcggacaatggtcggtacggcatgaaaccttgcaacgcgaaggactggtacacattgttacatcgggcagcggctatctctgcatcgacggcgaaacttccccgcgtccggtcagtacaggggatattgtatttttcccgcgcggcttgggtcatgtgttgagccacgacggaaaatgcggagaaagtttacaaccggatatgcggcagcacggtgcgtttacggtcaagcagtgcggcaacggacaggatatgagcctgttttgcgcccgtttccgctacgacacccacgccgatttgatgaacgggctgcctgaaaccgtttttctgaacattgcccatccgagtttacagtatgtggtttcaatgctgcaactggaaagcaaaaaacctttgacggggacggtttccatggtcaacgcattgtcgtccgtcctgctggtgcttatcctgcgcgcctatctcgaacaggataaggatgtcgaactctcgggcgtattgaaaggttggcaggacaaacgtttgggacatttaatccaaaaggtgatagacaaaccggaagacgaatggaatgtcgacaaaatggtggcggctgccaatatgtcgcgcgcgcaactgatgcgccgtttcaaaagccgggtcggactcagcccgcacgcctttgtgaaccatatccgcctgcaaaaaggcgcgttgctgctgaaaaaaaacccggattcggttttgtcggtcgcactgtcggtaggctttcagtcggaaacgcacttcggcaaggcgttcaaacggcaatatcacgtttcgccgggtcaataccggaaagaaggcgggcaaaaataa

SEQ ID NO: 41020 - DNA, 387 bp, Neisseria meningitidis
atggcatacagcgataaagtaatcgaccactacgaaaatccccgcaacgtcggtactttcgacaaaaacgacgaatctgtcggcaccggcatggtcggcgcaccggcctgcggcgacgtgatgcgcctgcaaatcaaagtgaacgatgaaggcatcatcgaagatgcgaaattcaaaacttacggctgcggttccgccatcgcttcgtccagcctgattaccgagtgggttaaaggcaaaagcctggatgacgcgctggcaatcaaaaacagcgaaatcgccgaagagttggaattgccgccggtaaaaatccactgctccatcttggctgaagatgcggtaaaagcggccgttgccgactaccgcaaacgtcaggaaaacagataa

SEQ ID NO: 41021 - DNA, 1608 bp, Neisseria meningitidis
atgagtatcgtagaaatcaaagtccccgatatcggcggtcacgaaaacgtcgacatcatcgccgtagaagttaaagcgggcgacaccatcgccgttgacgacaccctgattacactggaaaccgacaaagccacgatggatgtgcctgccgatgctgccggtgtcgtgaaagaagtaaaagtcaaagtcggcgacaaaatctccgaaggcggcgtaattttgaccgttgaaaccggtgccgccgctgccgaagccgcctcggctgctgccgaagcacaacctgcacctgctgccgcacccgttgccgcaggcggtgcaaccgttcaagtagccgttcccgatatcggcggccataccgatgtggatgtcatcgccgttgaaatcaaagtgggcgacaccgttgccgaagacgacacgctgattactttggaaaccgataaagcgacaatggacgtaccttgtaccgctgccggtgtcgttaaagccgtattcttaaaagtcggcgacaaagtatccgaaggctctgccattatcgaagtagaaaccgtcggctctgccgcagcagcccctgctcaagccgctcaagctgccgcaccggctgccgctccgcctccgactgctgccgccgcacccgccgccgcgcctgcaccttctgcacctgccgctgccaaaatcgacgaggccgctttcgccaaagcacacgccggcccttccgcacgcaaactggcgcgcgaattgggcgtggatttgggccaagtcaaaggtaccggcttgaaaggccgtatcgtgggcgacgacatcaaagcctttgtgaaatccgtaatgcagggtggcgcggcaaaacctgccgcagccggcgcatctttgggcagcggtctggacttgctgccgtggcctaaagtggacttctccaaattcggcaatgtcgaagttaaagaattgtcccgcattaagaaaatctccggtcaaaacctgtctcgcaactgggtggtgattccccacgttaccgtacacgaagaagcagatatgaccgagctggaagaattccgcaaacaactgaacaaagaatgggaacgcgaaggcgtgaaactgtctcctctggcgttcatcatcaaagcctccgtttccgcgctgaaagccttccccgaattcaacgcttctctggacggcgacaacctggtgctgaaaaactacttcaacatcggtttcgcagccgatacgccgaacggcttggttgttcccgtcatcaaagacgtggatcaaaaaggcttgaaacaaatcagccaagagctgacagaattgtccaaaaaagcccgcgaaggcaagctcaaaccgcaagaaatgcaaggcgcgtgctttaccatttccagcttgggcggtatcggcggcacaggcttcacgccgattgtgaacgctcccgaagtcgccatcttgggcgtgtgcaaatcccaaatcaaaccggtttggaacggcaaagagtttgccccgcgcctgatgtgcccgttgagcctgtccttcgaccaccgcgtcatcgacggtgcggccggtatgcgcttcaccgtattcttggcgaagctgttgaaagacttccgccgcattaccctgtaa

SEQ ID NO: 41022 - DNA, 879 bp, Neisseria meningitidis
atgatgagtcaacactctgccggagcacgtttccgccaagccgtgaaagaatcaaaccctcttgccgtcgtcggttgcgtcaatgcttactttgcacgattggccacccaaagcggtttcaaagccatctatctgtccggcggcggcgtggcagcctgctcttgcggtatccctgatttgggtattaccacaatggaagatgtgctgattgacgcacgacgcattacggacaacgtggatacgcctctgctggtggacatcgatgtgggttggggcggtgcattcaatattgcccgtaccattcgcaactttgaacgcgccggtgttgcagcggttcacatcgaagatcaggtagcgcaaaaacgctgcggccaccgtccgaacaaagccattgtgtctaaagatgaaatggtcgaccgtatcaaagctgccgtagatgcgcgcgttgatgagaacttcgtgattatggcgcgtaccgatgcgctggcggtagaaggtttggatgccgctatcgaacgcgcccaagcttgtgtcgaagccggtgcggacatgattttccctgaagccatgaccgatttgaacatgtaccgccaatttgcggacgcggtgaaagtgcccgtgctggcgaacattaccgagtttggttccactccgctttatacccaaagcgggctggctgaaaacggcgtgtcgctggtgctgtatccgctgtcatcgttccgtgcagcaagcaaagccgctctgaatgtttacgaagcgattatgcgcgatggcactcaggcggcggtggtggacagtatgcaaacccgtgccgagctgtacgagcatctgaactatcatgccttcgagcaaaaactggataaattgtttcaaaaatga

SEQ ID NO: 41023 - DNA, 327 bp, Neisseria meningitidis
cttttagtatgcgggttccctttttcagataatgaaatagattatactgatgatggtgagattaaaaaagtatcgcatcaagtgcatatatatgctggtaaatgtaaaaaagacgatataggcttttttgttgaaaaagaagataaaaatgtttcatttgattgtaatggtgttagtggtggaattgtgatgagaatgatagatggacacagtgagtgggttggaattgctgttagggcaaataatgacatcattcgttttattccttattatctcgtagcgaaatcaataatccagaatatcttaaatagaaatcaacaagcgtag

SEQ ID NO: 41024 - DNA, 1185 bp, Neisseria meningitidis
atgggtaaacatattcttttaggtgtaacgggcagtattgcggcgtataagtcttgcgagttggttcgtctgctgaaaaaacaggggcattcggttacggtggttatgagccgctcggcaactgaatttgtttctccgctgacttttcaggctttaagcggcaatcctgtcctgaccgacacgcacggcggcaacggttcaaacggtatggaacatatcaacctgacccggaatgcggatgtttttctgattgcgccggcaagtatgaataccgtggcaaaaatctgtaacggcgtggcagataacctactgaccagtctggcagccgcacggaaatgtccgcttgccatcgctcccgcgatgaatgtggaaatgtggctcaaccctgccaaccaacggaatatcgcacaactggtttcagacggcattactgtctatatgccgggcttgggcgaacaggcttgcggagaaaatggtatgggaaggatgccggaacctgccgaattgctggatttgcttccggacttgtggacaccgaaaattttaaggggcaagaaaatcttgattaccgcaggtgcgacatttgaagccattgaccctgtcaggggcatcacaaatacctccagcggaaaaatgggggtagctttggcgcgggcgtgccgtgccgccggtgcggaagtcagcctgattcacggacagcttcaaaccgaactgcctttcggcatatccgatacggttcaagccgtcagcgctgaagatatgcatcgcgcagtgcatcgtttgattgaaaaacaagatgcttttatttctgttgccgccgtctcagactataaggttaaaaacaggagtacgcaaaaattcaaaaaagataaaaatgccaaaccgttatccatcgaattggatgagaaccccgatattttggcttctattgcctcattgccgaacccgccgttctgcatcggttttgccgctgaaacggagaatgtaatggcatatgcacgagaaaaacgtattaagaaaaaaataccggtaatagttgccaatgatgtttcaatcgcgatgggcaaaccgaccaaccggattaccattatcggggacgacggggaactatcttttcccgaaacaagtaaagatgaagcggcgatgcagattgttgaaaggcttgccgtatatttgaacaaataa

SEQ ID NO: 41025 - DNA, 441 bp, Neisseria meningitidis
atgccgaaagccaccttttacacgcacgttgcccaagttccgattttcacctgctgcctgattgcccgtgcgattcgggacggcggcaggatactggtgtggtccgattcgttcgggcagcttcaggaattggacaaaatgctttggcaatacgaagctgagagttttattccgcacgaaatttgggaaacggaagaagccatgccgtctgaaccatccgtcctgcttgcctgcggcggcaatctgccccgaattcccgaaggcatgaccgttttgaacctgtccgacggtttttggaacaccgctccggtcttgcccgcgcgcgttttggaaatcgtcggcaacagcttggaagatctcgccgacgcgcgcgaacgctttaccgcctaccgccgaagcggttttgccatcgaacatcacggcatggagggcaaggcataa

SEQ ID NO: 41026 - DNA, 573 bp, Neisseria meningitidis
atgacttatgaaattcaagcctctgttcgtgaagcacaaggcactggtgcgagccgccgcctgcgtcgcgaaggccaaatccccggcattctgtacggtgaaggtcaagagcccgttgccattgccgtggatcacaaaaccgtattctacgcattggaaaaagaatctttccataccgcgttgattaaattgtctctgaacggcgaaaccaaagacgttatcgtccgcgatttccaaatgcacccgttccgccgcgaagtccaacacatcgacttccaagccgttaaagccgatcagcttgtacgcatccgtgttcccctgcacatcgttaacgctgaaaattcccaagcggtcaaactgcaaggcggtcgtgtatctctgttgaacacgacggttgaagtgcttgcgttgcctgccaatatccctgctttcttggatttggattgtgccgaagtggttgccggcgacattctgcacttgtcagacatcaaactgcctgaaggtgtagaaagcgtttccctgaaacgtaacgaaaatctggctgttgccactgttaccggtaaaaaacgctaa

SEQ ID NO: 41027 - DNA, 1134 bp, Neisseria meningitidis
atgagcacccccgccctcctcgtcctcgctgacggcagcgtattccacggcacatcaatcggttacgaaggttcgacttccggcgaagtcgtgttcaatacttcgatgactggctatcaggaaatcctgaccgacccgtcctactgcaaacaaatcgttaccctcacctacccacacatcggcaacaccggcaccaacgccgaagatgaagaaagccgcagcgtttatgcctccggcctgattatccgcgacctgccgctcttgcacagcaacttccgcgcctccgaaagcctgcacgactatttggtacgcaaccaaaccgtcgccatcgccgacatcgacacccgccgcctgaccacgctgttgcgcgaaaaaggcgcgcaaggcggcgcgattctgaccggcgcggatgccacaatcgaaaaagcgcaagaactcatcgccgcgttcggcagtatggtcggcaaagacttggcaaaagaagtttcctgcacggaaacttacgaatggacggaaggcgaatgggcattgggcaagggtttcgttacccctgacgaacagccttaccacgtcgtcgcctacgatttcggcgtgaaaaccaacatcctgcgtatgctcgcctcgcgcggctgccgcctgaccgtcgtccccgcccaaacgagcgcacaagacgtgttggcactcaatcccgacggcgtgttcctgtccaacggccccggcgaccccgagccttgcacctacgccatcgaagccgtgcaaaaactgatggaaagcggcaaaccgattttcggcatctgcttgggacaccagctcatcagcctcgctatcggcgcgaaaaccctgaaaatgcgcttcagccaccacggtgcgaaccaccctgtgcaagatttggacagcggcaaagtcgtcatcaccagccaaaaccacggttttgccgttgatgccgacaccctgcccgctaacgcacgcattacccacaaatccttgtttgacaacactttgcaaggcatcgagctgaccgacaaacctgtgttctgcttccaaggccaccccgaagccagccccggtccgcaagatgtcggctatttgtttgacaaattcattggcaatatgaaagcggcaaaacgggcataa

SEQ ID NO: 41028 - DNA, 651 bp, Neisseria meningitidis
atgcccgtgacccgccccgccaaaatcaatacttacacacgcatcatcgacgccagccttgcgctcttcaacgaggaaggcgagcgcaacatcagcaccaaccatattgccgcccacttgggcatcagtccgggcaacctctattaccacttccgcaacaaagacgaaatcatcgtccaactgttcaaacgttacagcgaagccctgcttgcctacctgaatgaagctgtgttgccgtctgatgtggaagactccatcaactatatggcgggcatttacgacgtgatgtgggaataccgcttcctattcagcgacgtgaacaccctgcttgcacgcagtgccgaactattaggcgaacacaatactttcacccaagccaaagtctccccgctcttggtcaacctgctgacccagctcaacggtctgaacatcatccaagccgaccaaaccgctatgaacgatctcgccgtcaatatgtggatggttacgaaatactggttcgacttcgacagctccctgcgcggccgcaccaagctgaccgaagactccaaagcacgcggcatccgccgcaccttaagcctccttcgtccttatcttttgcccgaacaccgcaagaaatacgaccggaaaatcggcaacggcaacccgtaa

SEQ ID NO: 41029 - DNA, 846 bp, Neisseria meningitidis
atgctcagttacagacacgcattccacgccggcaaccacgccgatatgctcaaacacttcaccttgtttttagtgctgcaatatttcaaccgcaaagacaagccctactggtacatcgacacgcacggcggcgcgggtgtgtacaatctcgaaggcagcgaggcacaaaaagtcggcgaataccggcaaggcatcgccctacttcgacaagcaaaaaacctgccaaccgagttaaacggctttatcgcgcacatacaaaaaatcctgccctcgcccgaactttactgcggttctccgtggctggcgcaatcgctgacccgcgtcggcgacaaattacgcctgtttgagctgcaccccaccgactttgtccatctgcaaaacaatatgggcgaagcaggattgggcaaacgcggacaagtgttgcgcgaagacggttacaaagggctgatttccctgctgccgcccccgccgcgccgtgccgccgtcctcatcgacccgccttacgaggaaaaacaggactaccggcgtgtaacggaaacgctgaaatccgctttaaaacggtttgagtccggctgttatctcatctggtatccctgcctcagccgcgaagaaagccgcaagctgccggaagaattgaaaaaactcgttcccgacaactaccttcacgccgaactgcacgtccacgcgccgaaagccgacggtttcggtatgcacggcagcggaatgttcgtgattaatcccccttaccttttagccgagcaattggcggcaaacctccccgccctaacgcggctgctggcgcaagacgaaggcgcgcgctaccttttggacagcaaaatctgctga

SEQ ID NO: 41030 - DNA, 1152 bp, Neisseria meningitidis
atgcagacatggcagcttccggaacatatcgccgacgtactgcccacgaacgcgcggcagcttgaaagcgcgagggagcagttgttggcactgttccgcgtacacggttatgaactggtacagcctccgctgatggagtacgcacattccctgctgacgcatatcgatgcggggctttccctgaaaaccattttggtaacggacaggctcagcggcaggcagttgggcatacgcgccgacatcacgccgcaggtggcgcgtatcgatgcccatcttttatccgccaaccaagggattaatcggttgtgttatgccggtccggtgttgcacgcgcagcccgacggtctgctgaatatgcgcgaacccttgcaggcaggggcggaaatgtacggttttgccgacatccgtggcgacatcgagctgatagaccttatgctgaaaagcatgaaaattgccgatatgggcaaagtgctgctttcgctggggcatatcggcatatttcgcgccttgtccgatgcggcacatttggatgcggggcagtccgcaacgctgcttgccttgatgcaggataaagataccggggcggtcgaagcgcaggtcaaggcttggaagctggacggcatgtgggcaaaagcattctcgctgttgccgcgcctgtacggcgggcgtgaagtgttgtccgacgcgcgcggacggttgccggatttgtcggcggtcggcggcgcgttgggcgaattgcaggcggtgtgcgacgcattccccgattgtgaaatccatatcgacttgtccgagctgcgtgtcgacaattaccacacgggcttgctgtatgccgcctatgccgccgatttccacgacgcggtcgcgcgcggcgggcgttatgacggattgggcggatatttcggcagggcgcgcccggcaacgggattcagtttcgacttgcgcagctttatcgggcgtttgcccaccatcgaacggcagcccgccgtgttggtcgatgcggaagatgccgaagcggcgcgcgaagcagtcgaagccttgcgtgaacaagggcagtgtgtcgtgattgactacggtatcggacacaatgtttcggaagagcttgcaggccgtctgaaaaagacggacggcgtttggcaggtcgtgaaacgctaa

SEQ ID NO: 41031 - DNA, 135 bp, Neisseria meningitidis
atgaaacgcacttatcaaccttccgttaccaaacgcaaacgcatccacggcttcctggtgcgctccaaaacacgcggcggccgcgcagtattggccgcacgccgtgccaaaggccgcaaacgcctggcggtataa

SEQ ID NO: 41032 - DNA, 579 bp, Neisseria meningitidis; identical to SEQ ID NO: 36924

SEQ ID NO: 41033 - DNA, 426 bp, Neisseria meningitidis
atgacacaagaaaccgctttgggcgcggcactgaaatccgccgtccaaactatgagcaaaaagaaacagaccgaaatgatcgccgaccacatctacggcaaatacgatgtattcaaacgcttcaaaccgttggcgctcggcatcgatcaggatttgattgccgctttgccgcaatacgattccgcactgattgcacgcgtcctcgccaaccactgccgccgtccgcgttatctgaaagccttggcgcgcggcggcaaacgtttcgatttgaacaaccgtttcaaaggcgaagttacccccgaagaacaggcgatcgcgcaaaaccatcctttcgtgcagcaggctttgcaacagcagtccgcccaagctgtcgtcgaaacgccgtctgttgaagccgaagcagccgaatcttccacagcagaataa

SEQ ID NO: 41034 - DNA, 324 bp, Neisseria meningitidis
atgaaaaaattattgattgccgcaatgatggcggctgccttggcagcttgttcgcaagaagccaaacaggaggttaaggaagcggttcaagccgttgagtccgatgttaaagacactgcggcttctgccgccgagtctgccgcttctgccgtcgaagaagcgaaagaccaagtcaaagatgctgcggctgatgcaaaggcaagtgccgaggaagctgtaactgaagccaaagaagctgtaactgaagcagctaaagatactttgaacaaagctgccgacgcgactcaggaagcggcagacaaaatgaaagatgccgccaaataa

SEQ ID NO: 41035 - DNA, 738 bp, Neisseria meningitidis
atgattattttggacaaggtttccaagcattaccaaacgcgcgacaagacccgttttgccgctgtcgagccgaccagcctcgaaatccgcgacggtgaaatcttcgggctgatgggttattcgggtgcaggcaaatccaccctgttgcgcctgattaacctgttggaacgtcccgacagcggcaaggtcaacgtctgcggacaagagctgaccgcgctcgatgccgccgcattgcgtcaggctcggcagaatatcggcatggtgtttcagcagttcaacctgttgaacaaccgcaccgtcgccggcaacgtcgccttcccattggaaatcgccggatggccgtctgaaaaaatcaaagcgcgcgttgccgaatgtctcgaaatcgtcggactgaccgaacgcgccggccactatcccgcccagctttcaggcgggcagaaacagcgtgtcggcatcgcccgcgcactcgcgcccaaaccccaagtcatcctcgccgacgaacccacttccgccctcgaccccgccaccacgcgcagcgtcttggaatgtttggaagacatcaacaaacgattcaacgtaaccatcgtcatcgtaacccacgaaatgagcgttatcagacgactgtgcgaccgcgccgccctgttggataaaggcaaagtcgtcgaaatcgtcgaagtacgcggcaaccaaatccacgcccgatccgacatcgggcgcgaactgattcgggaggactga

SEQ ID NO: 41036 - DNA, 2019 bp, Neisseria meningitidis
atgaataaatctttatccgggtcggtagaagaataccgcgaactgacgctccgaggcatgatactcggtgcattgatcactgtaatttttactgcgtccaacgtttacctcggtttgaaagtcgggctgacctttgcctcgtcgattccggcggcggtgatttcgatggcggttttaaagtttttcaaaggcagcaatattttggaaaacaacatggtgcagacccaagcttcggcggcgggtacgctttcgaccatcatcttcgtcctgcccggtttgctgatggcgggctactggagcggtttcccgttctggcagacgacgcttttatgtattgccggcgggattttgggggtgattttcaccattccgctgcgttacgcgatggtggtgaaaagcgatttgccttatccggaaggtgtggcggctgctgaaattttgaaagtgggcggtcatgaagaaggggataaccgtcagggcggcagcggcatcaaagagctggcggccggcggtgcgttggcgggattgatgagcttttgcgccggaggtctgcgcgtgattgccgacagcgcgagttattggtttaaaagcggtacggcgattttccagctgccgatgggcttttcactggcattgttgggcgcgggctatttggtcggactgacgggcggcatcgccattctgttgggcatttcgattgcttggggcattgccgtgccgtatttctcctcacacattccgcaaccttccgatatggaaatggcggcgtttgcgatgaaactgtggaaggagaaagtgcgttttatcggtgcagggactattggcattgcggcggtttggacgctgttgatgctgctcaagccgatggtggaaggcatgaagatgtcgttcaagagttttggcggcggtgcgcccgctacagaacgcgccgaacaggatttgtcgcctaaagccatgattttctgggtattgtctatgatgtttattctaggtgtgtcgttttaccactttatcggcgattcgcacattacgggcggcatggcgtggcttttagtggtcgtttgcacgcttttggcttccgtcatcggctttttggtcgccgccgcctgcggttatatggcgggtttggtcggctcgtcttccagcccgatttccggcgtgggcatcgtgtccgtcgtcgttatttcactggttttgctgctggtaggcgaatccggaggtttgttggcggatgaggctaaccgcaaatttttgctggcactgactttgttttgcggctcggcagtaatctgcgtggcttcgatttccaatgacaacctgcaagacttgaaaaccggctacctgctcaaagccacgccttggcggcagcaagtcgccctgattatcggctgtatcgttggtgcgctggttatttcgcccgtgttggaactgctttacgaagcctacggctttaccggcgcaatgccgcgcgaaggcatggatgcggcgcaggctttggcagctcctcaagcgactttgatgacgaccatcgcgtcgggcattttcgcccacaacctcgaatgggtctacatctttaccggcatcgcgattggagcggtattgattgccgccgatttggtgttgaaaaaatcatcaggcggcaaacttgccctgcccgtccttgcggtcggtatgggtatttatctgccgccgtccgtcaatatgcccattgtggcaggtgcggtgttggcggcagtgttgaaacacatcatcggtaaaaaagcggaaaaccgtgaaggccgtctgaaaaacgccgagcgcatcggaaccttgttctccgccggcctgattgtcggtgaaagcctgattggtgtgattatggcgtttattattgccttctccgtgaccaacggcggctcggatgcgccgctcgcgttgaatctgcaaaactgggatgccgccgcttcttggttgggtttggcgttcttcgttaccgggatgtttttctttgcacagcgcgtactgaaggcgggtaggtag

SEQ ID NO: 41037 - DNA, 558 bp, Neisseria meningitidis
atggatgctttaaaattattgacgaaccgccgatcttccaaaaagctgaagcaccccgcccccgatgcggcggagttggaacaaatatttcaggcggcaacccaagttcccgatcacggcaatatgcgccccttccgttttaccgtgattcaaggcgaggtaggattgcaacgttttcgcgatgtgttgaagcaaacggttgccgaattgaatttcggcgacgatgcgatgaaaaaggcggaaaaagtgggcaatatggcgccgatggtcattggtgtaacgtttgcgccgaaccgcgatgtgcctaagccgaaaccggaatgggagcagatgctgacggcgggttgtgcggcgtatgcgctgcaactggcggcaacggcgcaaggtttcgacaatgtctggataacggggatgtgggtcaacagccccttgttgcgtgaggctttcggatgtgcggataaggataaaatcatcgggctgatgatggtcggcacgccgacagaggaagtgcataagcccaagaataccgatttggaagcgtttgtcagccattggtaa

SEQ ID NO: 41038 - DNA, 2595 bp, Neisseria meningitidis
atgtccaaatccgccgtttccccaatgatgcagcaatacctcggcatcaaagcgcaacataccgacaaactggtgttttaccgtatgggcgatttttacgagatgtttttcgacgatgcggtagaagcggcaaaacttttggatattaccctgaccacgcgcgggcagatggacggcgtaccgattaaaatggcaggcgtgccgtttcacgccgccgaacaatatctggcgcgcctggtcaagttgggcaaaagcgtggcgatttgcgaacaggtcggcgaagtcggcgcaggcaaagggccggtggaacgcaaagtcgtgcgcatcgtaacgcctggcacgctaaccgattccgcattgctggaagacaaggaaaccaaccgcatcgttgccgtgtcccccgacaaaaaatacatcggtttggcgtgggcatcgctgcaaagcggcgaattcaaaaccaagctgacaactgtggataaattggacgacgaactggcgcgcctgcaggcggcggaaattctgttgccggacagtaaaaacgcaccgcaacttcagacggcatcgggtgttacgcgcctgaacgcgtggcagtttgccgccgacgcaggggagaaactgctgacggaatatttcggctgccaggatttgcgcggcttcggtttggacggcaaagaacacgccgttgcgattggcgcggcaggtgcgctgttgaactatatccgcctgacgcaaaacctgatgccgcaacatttggacggcctgtcgctcgaaaccgacagccaatatatcggtatggatgccgccacgcgccgcaatctcgaaatcacgcaaaccctctccggcaaaaaatcgccgaccctgatgtccacgctcgacctttgcgccacccatatgggcagccgcctgttggcattgtggctgcaccaccctttacgcaaccacgcccacatccgagcgcgccaagaagccgttgccgcactggaaagccaatacgaacccctccagtgccgtctgaaaagcattgccgacatcgaacgcatcgccgcccgtattgccgtgggtaacgcccgcccgcgcgacctcgccgccctgcgcgacagcctgtttgccctgtccgaaatcgaattgtccgccgagtgcagcagtctcttaggaaccctcaaagccgttttcccggaaaacctatccacagccgaacagctccgccaagccattttgcccgaaccttccgtctggctgaaagacggcaatgtcatcaaccacggttttcatcccgaactggacgaattgcgctgcattcaaaaccatggcgacgaatttttgctggatttggaagccaaggaacgcgaacgtaccggtttgtccacacttaaagtcgagttcaaccgcgttcacggcttttacattgaattgtccaaaacccaagccgaacaagcacctgccgactaccaacgccggcaaaccctcaaaaacgccgaacgcttcatcacgccggaactgaaagcctttgaagacaaagtgctgactgctcaagagcaagccctcgccttagaaaaacaactctttgacggcgtattgaaaaaccttcagacggcattgccgcagcttcaaaaagccgccaaagccgccgccgcgctggacgtgttgtccacattttcagccttggcaaaagagcggaacttcgtccgccccgagtttgccgactatccggttatccacatcgaaaacggccgccatcccgttgtcgaacagcaggtacgccacttcaccgccaaccacaccgacctcgaccacaaacaccgcctcatgctgctcaccggccccaatatgggcggcaaatccacctatatgcgccaagtcgcgctgattgttttattggcacacaccggctgtttcgtgcctgccgatgccgccacaatcggacccatcgatcaaatcttcacccgcatcggcgcatcggacgatctcgcctccaaccgctccaccttcatggtcgaaatgagcgaaaccgcctacatcctgcatcacgccaccgaacaaagccttgttttaatggacgaagtcggacgtggtacttccactttcgacggcctcgccctcgcgcacgccgttgccgaacacctgctgcaaaaaaacaaatccttcagcctgtttgccacccactatttcgagctgacctacctgcccgaaacccacgccgccgccgtcaatatgcacctttccgcgctcgaacagggacaggacatcgtgttcctgcaccaaatccaaccggggcccgccggaaaaagctacggcatcgccgtcgccaaactcgccggcctgcctgtacgcgcattgaaatccgcccaaaagcatttgaacgaactggaagaccaagccgccgcaaaccgtccccaactggatattttcagtaccatgccgtctgaaaaaggagatgaaccgaatgtggaaagctttgtggacaaagcagaggaaaaacattttgaaggtatattggcagcagccctggagaaactcgatcccgacagcctgaccccgcgcgaagcattgtcagaactgtaccgtctgaaagatttgtgcaaatccgtatcttaa

SEQ ID NO: 41039 - DNA, 354 bp, Neisseria meningitidis
atgtctgaaatcaaaattttccacaatccgcgttgcagcaaatcgcgtgccgccttgtccctattggaagaacgcggcattgctgccgaagtggtcaaatatttggatacgccgcccgacttgtccgaattgaaggatattttcaacaaattgggtttggcatcggcgcgcgggatgatgcgcgtgaaagatgatttgtataaggaattgggtttggacaaccccaatttggacaatgacgcgctgctgcgtgccatcgccgatcatcccgccctgttggagcgtccgattgttttggcgaacggtaaggcggctgtcggcaggccgttggaaaatatcgaagcggtattgtga

SEQ ID NO: 41040 - DNA, 471 bp, Neisseria meningitidis
atgctgccccgacagccaaccattaaggaaatcctaatgaactttgctttatccgtcattatgttgaccctcgcctctttcctgcccgtcccgcctgccggagccgccgtctttacttggaaggacggcggcggcaacagctattcggatgtaccgaaacagcttcatcccgaccaaagccaaatcttaaacctgcggacgcgccaaaccaaaccggcggtcaaacccgcccaagccgacgcagggaagcgcacagacggcgcggcacaggaaaacaatcccgacactgccgagaaaaaccggcagcttgaggaagaaaagaaaagaattgccgaaaccgaacggcagaacaaagaagaaaactgccggatttcaaaaatgaacctgaaggcggtgggaaattcaaatgcaaaaaacaaggatgatttgattcggaaatacaataacgccgtaaacaaatactgccgttaa

SEQ ID NO: 41041 - DNA, 717 bp, Neisseria meningitidis
atgtccgacaaaaaatataatgtcgatgagggggaaatcgccaaattcagccggattgccgacaaatggtgggacaagtcgggcgagttcaaaaccttgcacgacatcaatccgctgcggctggattatatcgacggacacgcggatttgcgcggcaaacgggttttggatgtgggctgcggcggcggcatcttggcggaaagtatggcgcggcgcggcgcggcgtttgtaaagggcatcgacatggcggagcagtcgttggaaaccgcccgcctgcacgcggctttgaacaatgtcgccgatatcgaatacgaatgtatccgcgtggaagaccttgccgaggcggaaccgcactcgttcgatgtggtaacgtgcatggaaatgatggaacacgtccccgatcccgccgccatcgtgcgtgcttgtgccaatctggtcaaaccggacggcatggtgtttttttccaccatcaataaaaacccgaaatcgtacctgcatctgattgtggcggcggaatatctgttgaagtttgtccccaaaggcacgcacgactggaaaaaattcatcgcacctgccgagctggcgcgaatgtgccgtcaggcaggcttggatgtggcggatacgaagggtatgacttaccatgtgttgtcgcaaacttatgccctgtgcgattcgaccgatgtgaattatatgtttgcctgccgtccggcgttctga

SEQ ID NO: 41042 - DNA, 1056 bp, Neisseria meningitidis
atgccgtctgaaacacgcctgccgaactttatccgcgtcttgatatttgccctgggtttcatcttcctgaacgcctgttcggaacaaaccgcgcaaaccgttaccctgcaaggcgaaacgatgggcacgacctataccgtcaaatacctttcaaataatcgggacaaactcccctcacctgccgaaatacaaaagcgcatcgatgacgcgcttaaagaagtcaaccggcagatgtccacctatcagcccgactccgaaatcagccggttcaaccaacacacagccggcaagcccctccgcatttcaagcgacttcgcacacgttactgccgaagccgtccgcctgaaccgcctgacacacggcgcgctggacgtaaccgtcggccccttggtcaacctttggggattcggccccgacaaatccgttacccgtgaaccgtcgccggaacaaatcaaacaggcggcatcttatacgggcatagacaaaatcattttgaaacaaggcaaagattacgcttccttgagcaaaacccaccccaaggcctatttggatttatcttcgattgccaaaggcttcggcgttgataaagttgcgggcgaactggaaaaatacggcattcaaaattatctggtcgaaatcggcggcgagttgcacggcaaaggcaaaaacgcgcgcggcgaaccgtggcgcatcggtatcgagcagcccaatatcgtccaaggcggcaatacgcagattatcgtcccgctgaacaaccgttcgcttgccacttctggcgattaccgtattttccacgtcgataaaaacggcaaacgcctctcccatatcatcaacccgaacaacaaacgacccatcagccacaacctcgcctccatcagcgtggtcgcagacagtgcgatgacggcggacggcttgtccacaggattattcgtattgggcgaaaccgaagccttaaagctggcagagcgcgaaaaactcgctgttttcctgattgtcagggataaaggcggctaccgcaccgccatgtcttccgaatttgaaaaactgctccgctaa

SEQ ID NO: 41043 - DNA, 420 bp, Neisseria meningitidis
atggcttatacagtttatagttttgagaagaaatttcttgagaagtttggtgtttatggtctgagtgttcttaatttccgagggtctatgtacccgttggatatacactgcccaaagcatgggaatcagacggtctccaatgcgacatcctgtctccgctctaaactcggctgccctgcttgcggaagggaacaccaacagtcaaaagcctctgaacgtctaaaacagtcaaacaagtctgccaaacccctcctcatcctcgacacaacgaccaacgaaacactcacattccccagcgttactgccgcaggtgctgctttaggtgtacatttccaacaaatcaatcacaggctcaagggtcgaacgtcgcccgacaaccttatttcaaacaggtacaaagtgcttgggtacgataggtaa

SEQ ID NO: 41044 - DNA, 1542 bp, Neisseria meningitidis
atggatggacggcgttgggcggtatggggtgcttttgccctgctgccttcggcttttttggcggtaatggtcgttgcgcctttgtgggcggtggcggcgtatgacggtttggcgtggcgcgcggtgctgtcggatgcctatatgctcaaacgtttggcgtggacggtatttcaggcagcggcaacctgtgtgctggtgctgcctttgggcgtgcctgtcgcgtgggtgctggcgcggctggcgtttccggggcgggctttggtgctgcgcctgctgatgctgccttttgtgatgcccacgttggtggcgggcgtgggcgtgctggctctgtttggggcggacggcctgttgtggcgcggacggcaggatacgccgtatctgttgttgtacggcaatgtgtttttcaaccttcctgtgttggtcagggcggcgtatcaggggtttgtgcaagtgcctgcggcacggcttcagacggcacggacgttgggcgcgggggcgtggcggcggttttgggacattgaaatgcccgttttgcgcccgtggcttgccggcggcgtgtgccttgtcttcctgtattgtttttcggggttcgggctggcattgctgctgggcggcagccgttatgccacggtcgaagtggaaatttaccagttggtcatgttcgaactcgatatggcggttgcttcggtgctggtgtggctggtgttgggggtaacggcggcggcagggttgctgtatgcgtggttcggcaggtgcgcggtttcggataaggcggtttcccctgtgatgccgtcgccgccgcagtcggtcggggaatatgtgctgctggcgtttgcggcggcggtgttgtctgtgtgctgcctgtttcctttgttggcaattgttgtgaaagcgtggtcggccggcgaatcgtggcgtgtgttaatggaaagtgaaacgtggcaggcggtgtggaatactttgcgcttctcggcggcggcggtgtatgcggcggcggttttgggtgtggtgtatgcggcggcggcgcggcggtcggcgtggatgcgcgggctgatgtttttgccgtttatggtgtcgccggtttgtgtttcggcgggcgtgctgctgctttatccgcagtggacggcttcgttgccgctgctgctggcgatgtatgcgctgctggcgtatccgtttgtggcaaaagatgttttatcagcctgggatgcactgccgccggattacggcagggcggcggcgggtttgggtgcaaacggctttcagacggcatgccgcatcacgttccccctcttgaaaccagcgttgcggcgcggtctgaccttggcggcggcaacctgcgtgggcgaatttgcggcgacattgttcctgtcgcgtccggaatggcagacgctgacgactttgatttatgcctatttgggacgcgcgggtgcggacaattacgcgcgggcaatggtgctgacattgctgttgtcggcgttcgcgctgggcattttcctgctgttggacggcggcgaaggcggaaaacagacggaaacgttataa

SEQ ID NO: 41045 - DNA, 627 bp, Neisseria meningitidis
atgtatacaggcgaacgcttcaatacttacagccatttgagcggtttgattctggcggcggcaggtttggcgctgatgctgctgaaaaccataggacacggggacggctaccgtatcttcagcgtatcggtttacggcatcagccttcttctgctctatttgagttcctcgctgtaccacggaattgcagccggaaaactgaaaagcattttgaaaaaaaccgaccactgcatgatttatgtgctgattgccggaagctacacaccgtttgcactggtttctttgagaaacgggccgggctggacggtattttcactgtcctggctgctggcggctgcaggaatcgcacaagaactcaccattggacggaaaagcgaaaaacgactgctgtctattgcgatttatatcgtaatgggctggatggtcttggcggtaatgaaatccctgacagcctcactcccgccggcaggactggcttggctggcggcaggcggtatgctgtacagcgtcggcatttactggtttgtaaacgatgaaaaaatccgacacgggcacggaatctggcatctgttcgtattgggcggcagcatcacccaatttgtcagcgtgtacggttacgtaatctga

SEQ ID NO: 41046 - DNA, 2853 bp, Neisseria meningitidis
atgaaactgtccgaactgttcaacccgaatgaatttgccgcgcggcatttgagtttcggcgacgaagcggcgttgcttgccgctgtcgacgagaagagcatggacgattttgtcggcaataccgtgccgcaaagcatccgtatgccgtccgaactcgatttgcccgaagccctgaccgaagcggacgcattggcgaaattgaaaggcattgcgtcgaaaaacgtaatcaacaagtcctatatcggtttgggttattacccgacccgcgtgccgaacgtgattttgcgcaacgtattggaaaatccgggctggtataccgcctacacgccgtatcaggcggaaattgcccagggtcgtttggaagctttgttgaacttccaacaagtgtgtatcgatttgaccggtttccctgtggcaggcgcgtctttgctggatgaggcaactgccgccgccgaagcgatggcgatggcgcaccgcgtgggcaaagtgaaatccgagcgtttctttgtggatgcgcgcgtgtatccgcagactttggacgtgatgaaaacccgcgccaaatatttcggcttcgagctggtggtcggcgattttgcccaagcggatgaaggcgaatacttcggtgcgctgctccaatacgtcggcaaagacggcgatgtacaagacttgcaggacgttatcggccgtctgaaagcaaaaggcacgatcgtggccgttgccgccgacatcatgagtttggttttgctgaagtctccggctgaattgggcgcggacattgcgttgggcaacactcaacgcttcggtgtgccgatgggcttcggtggtccgcacgctgcttatttcgcgtttaaagacgagttcaaacgttccgctccaggccgcatcatcggcgtatccaaagacgcatcgggcaaacctgccttgcgcatggcgttgtccacccgcgagcaacacatccgccgcgaaaaagcgacatccaatatttgtacggcacaagcattgctggcgaacttggccggtatgtatgccgtttaccacggccctgaaggcgtgaaacgcatcgccaaccgcattcacgcgctggcttctgcctttgccgatgcgctggtttcagacggcctgaatgtggttcataaggtcttcttcgataccgttaccgtcgatttcggcaacaaagagaaagcagaccaagtgtttgccgctgctttggaatcgggctataacctgcgccgcgttaacgatactcaagttgcggctgcattccacgaaacatcggcatgcgaagatttggttgatttgtaccgcgcgtttaccggcaaggatacgttcgcatttgccgatgatgtcaaaggccgtctgaatgcagaattgctgcgtcaggacgatattctgcaacatcctgtgttcaacagttaccacaccgaacacgaaatgctgcgctacctgaaaaaactcgaagaccgcgatttggcgatgaaccgcagcatgatttcgctcggtagctgcaccatgaagctcaatgcgactgcggaaatgctgccgattacttgggccgagttctccgacatccatccctacgctcccgaagcgcaaaccgcgggctaccgcgaattgctcgccgatatggaaaacagcttgaaagccatcaccggctttgacgcgatttccttccagcccaactccggcgcgcaaggcgaatacagcggtatgctctctatccgccgttatcaggaatcccaaggcgaagcgcaccgcaacatctgcctgattccgaaatccgcccacggtaccaaccctgcgactgcggctatgctcggtttgaaagtcgtcgtcgtcgataccgacgaacacggcaacgtcaacatcgacgatttgaaagccaaagccgagcaacaccgcgacgctttgtccgccatcatgattacctacccgtccacccacggcgtgtacgaagaaggcatccgcgacatctgccgcatcatccatgaaaacggcggacaggtttacatggacggtgcgaacctcaacgcccaaatcggcatcatgcagcctgccgaagtcggcgcggacgtgttgcacatgaacctgcacaaaaccttctgtatccctcacggcggcggcggaccgggcatgggtccgattggcttgaaagcccatctggctccgttcgcaccgggacacgctttgaccgacacccacagcgccagtgccgaccaaaccgccgttgctgctgcggccttcggttctgcgtccatactgccgattacttggatgtatctgaccatgatgggcaaacaaggcatggaacaggcgacacgctgggcattgctcaacgccaactacgttgccaaacgcctgagcgaagactatccgattctgtatacaggcaaaaacggccgcgtcgcgcacgaatgtatcgtcgacttgcgtccgctcaaagccgaaagcggcattaccgaaaccgacatcgccaaacgcctgatggactacggcttccacgccccgaccgtctccttccccgttgccggcacgctgatgatcgaaccgaccgaaagcgagagcaaagccgaactcgaccgctttatcgccgccctgaaatccattcgccgcgaagtgcagaaagtcatcgacggcgaatggccgaaagacgataatccgctggtcaacgcgccgcacaccgccgcagatataaccggcgactgggcgcgcccgtattcccgcgaagaagccgtcttcccattgccgttcgtccgcgaacacaagttttggcccttcgtcaaccgcgtggacgacgtgtacggcgaccgcaatctcgtgtgcagctgcccaccgatggaaaattatgaagactga

SEQ ID NO: 41047 - DNA, 1215 bp, Neisseria meningitidis
atgaccgtcaaaacccccgtttacctcgactacgccgccaccacccccgttgacaaacgcgttgccgaaaaaatgattccctatctgaccgaaaccttcggcaaccccgcctccaacagccacgcattcggctgggaagcagaagaggccgtcgaaaaagcccgcgccgacatcgctgccctgattaatgccgaccccaaagaaatcgtcttcaccagcggcgcgaccgagtccgacaacctcgccatcaaaggtgcggcaaacttctacaaaaccaaaggcaaacacctcattaccgtcaaaaccgaacataaagccgttttagatacaatgcgcgaactcgaacgccaaggttttgaagtaacctacctcggcgttcaagaaaacggtttgattgatttggaagaactcaaagccgccatccgcgacgacaccatcctgatttccgtaatgtgggcaaacaacgaaatcggcgtggtgcaagacattcccgccatcggcgaaatctgccgcgaacgtaaaatcgtcttccacgtcgatgccgcccaagcctgcggcaaagtgcctgtcgatgtcgaagccgccaaaatcgacctgctctcgatgtccgcgcacaaagtgtacggccccaaaggcatcggcgcgctgtacgtccgccgcaaaccccgcgtccgcctcgaagcccaaatgcacggcggcggccacgaacgcggcttccgcagcggcacattgccgacccaccaaatcgtcggtatgggcgaagccttccgcatcgccaaagaagaactcgaacaagatatggcgcactaccgcaaactgcgcgacatcttcctcaaaggcatcgaaggcatcgaagaagtctatgtcaacggcgacctcgaacaccgcgccccgaacaacctgaacgtcagcttcaacttcgtcgaaggcgaaagcctgattatggcagtgaaagaactcgccgtatccagcggctccgcctgcacctccgcctcgctcgaacccagctacgtcctgcgcgcattgggcagaaatgacgaattggcgcactcgtccctgcgcatcaccttcggtcgcatgaccactgaagaagaagtgcaatttgccgccgaactgattaaatccaaaatcggcaaactgcgcgaactgtcgccgttgtgggaaatgttcaaagacgggattgatttgaactcgattgaatgggcggcgcattaa

SEQ ID NO: 41048 - DNA, 342 bp, Neisseria meningitidis; identical to SEQ ID NO: 38375

SEQ ID NO: 41049 - DNA, 318 bp, Neisseria meningitidis
atgaacaagccgtttatcactcaggcgcagttggcactttataaatattagccgtcaagcaagtattttgggcaatcgatggcggttatagcgcaatctgaatttgttgaatttgcgaagattaataagtctgaaaatgttattgattgtttctcttttttctggaatagaagaattaaacatgatatttggctaatctcattttctgataattcagaaatggtaattaaagaatctctgaaagatggtcataaaatatacaaatttgaattttgcgaaattgtcgataattgcaattttgatgatgtattcgtttga

SEQ ID NO: 41050 - DNA, 1260 bp, Neisseria meningitidis
atgtgttctaatacgccccaagccgccaccaaaaatcgggagacacgccatatgaccggcatcatacattcgctgcttgacaccgacctctacaaattcactatgctgcaagtggttctgcaccagtttccgcagacgcacagcctttacgaattccgctgccgcaacgcctcgaccgtctatccgcttgccgacatcaaagaagacttggaagtcgaactcgacgcgctctgccaactgcgctttacccatgacgaactcggctacctccgcagcctgcgtttcatcaaaagcgactttgtcgattatctcgaactcttccagctccaacgccgctttgtcgaagtcggcacagacgataaaggccgtctgaacatccgcatcgaaggtccgatgatacaggcgatgttttttgaaatcttcatcctcgccattgtcaacgaactttacttccgccgcctggaaacccccgccgttatcgaagaaggcgaacgccgccttcaagccaaagccgcgcgcctgaaagaaatcgccgccgcacaaaaccccgacgaaccgcccttcctgatttccgacttcggcacgcgccgccgctacaagctcgcgtggcaggaacacgtcatccgcaccctgctcgaagccgccccaagcatcgtgcgcggcaccagcaatgtctttctcgccaaaaaactcggcatcacgcccatcggcaccatggcgcacgaattcctccaagccttccaagccctcgacgtgcgcctgcggaatttccaaaaggccgcgctcgaaagctgggtacacgaataccggggcgatttgggcgttgccctgaccgacgtggtcggtatggatgccttcctgcgcgatttcgacctctatttcgccaaactcttcgacgggctgcgccacgacagcggcgacccttatgtttggggcgacaaagcctatgcccactatcaaaagctcaaaatcgacagccgcaccaaaatgctgaccttctccgacgggctggacatcgaacgctcttgggcattgcaccaatatttcaaagaccgcttcaaaaccggcttcggcatcggcaccaacctgaccaacgatatggggcatacgcctttgaatatcgtcttgaaactggtcgaatgcaacgggcagtccgtcgccaagctgtccgactctccgggcaaaaccatgaccaacaacagcaccttcctcgcctacctgcgccaagtgttcgacgtacccgaacccgaaacgccgtaa

SEQ ID NO: 41051 - DNA, 621 bp, Neisseria meningitidis
atgaattcgaccgcaagtaaaactctgaaaggattgtcgctggtgtttttcgcctctggattctgcgccctgatttaccaggtcagctggcagaggcttctattcagtcacataggtatcgatttaagttcgattactgtcattatttctgtatttatggtcggcttgggtgtgggtgcgtatttcggtggacgcattgctgaccgttttccttcaagtatcatccccctgttttgcatcgctgaagtatccatcggtctgttcggtttggtaagcaggggtctgatttccggcttggggcatcttttagttgaggctgatttgcccatcatcgctgctgccaatttcctcttattgctgcttcctacctttatgatgggcgcgaccttgcccttgctgacctgtttttttaaccggaaaatacataatgttggcgagtctatcggtaccttatattttttcaacactttgggtgcggcactcggatcgcttgccgccgccgaatttttctacgtcttttttaccctctcccaaaccattgcgctgacagcctgctttaaccttctgattgctgcttcagtatggctgcgttacagaaaggatggatatagtgaacactaa

SEQ ID NO: 41052 - DNA, 1266 bp, Neisseria meningitidis
atgagcaaaaaccaacccgcacaaccgaccaggcgcactctttttaaaaccgcgatcgcagccggagcagtcggcgcaatcggaggttatctcggcggcaaaaaacagggcgaaaccgccgaacgcaccgccgaaagccaacactcgccccaagcctatccctgctacggcgaacatcaggcaggcatcgttacgccgcagcaggcgttttcgattatgtgcgccttcgacgtaaccgcgcaaagtgccaagcagctggaaaacctgttccgcacgctgaccgcccgcatcgagtttctcacccaaggcggcgaataccaagacggcgacgacaaacttccgccagccggcagcggcattttgggcaaagccttcaaccccgacgggttgaccgttaccgtgggggtgggcagcagcctgtttgacggccggttcggactcaaagacaaaaaaccgattcatttgcaggaaatgcgcgacttctccaacgataagctgcaaaaaagctggtgcgacggcgatttgagcctgcaaatctgtgccttcacccccgaaacctgccaagccgccctgcgcgacatcatcaaacacaccgtccaaaccgccgttatccgttggagtatcgacgggtggcagcccaaatccgaacccggcgcgatggcggcgcgcaacctgttgggcttcagggacggcacgggcaaccccaaagtttccgatcccaaaactgccgacgaggttttgtggacgggtgtggccgccaacagcctcgacgaaccggagtgggcgaaaaacggcagctatcaggcagtccgccttatccgccactttgtcgagttttgggacaggacgccgcttcaagagcaaaccgacattttcgggcggcgcaaatacagcggtgcgccgatggacggcaaaaaagaagccgaccaaccggattttgccaaagaccccgagggtgatatcacgcccaaagacagccatatacgcctggcgaatccgcgcgatcccgaattcctcaaaaaacaccgcctcttccgccgcgcctacagctattcgcgcggactcgcctcaagcggacagcttgatgtcgggctggtgttcgtctgctatcaggcaaaccttgccgacggattcatcttcgtgcaaaacctcctcaacggcgaaccgctggaagaatacatcagccccttcggcggcggctatttcttcgtcttgcccggcgtggaaaaaggcggctttttggggcaagggctgctgggcgtataa

SEQ ID NO: 41053 - DNA, 963 bp, Neisseria meningitidis
atgcaagcacggctgctgatacctattcttttttcagtttttattttatccgcctgcgggacactgacaggtattccatcgcatggcggaggcaaacgctttgcggtcgaacaagaacttgtggccgcttctgccagatctgccgttaaagacatggatttacaggcattacacggacgaaaagttgcattgtacattgcaactatgggcgaccaaggttcaggcagtttgacagggggtcgctactccattgatgcactgattcgtggcgaatacataaacagccctgccgtccgtaccgattacacctatccacgttacgaaaccaccgctgaaacaacatcaggcggtttgacaggtttaaccacttctttatctacacttaatgcccctgcacgctctcgcacccaatcagacggtagcggaagtaaaagcagtctgggcttaaatattggcgggatgggggattatcgaaatgaaaccttgacgactaacccgcgcgacactgcctttctttcccacttggtacagaccgtatttttcctgcgcggcatagacgttgtttctcctgccaatgccgatacagatgtgtttattaacatcgacgtattcggaacgatacgcaacagaaccgaaatgcacctatacaatgccgaaacactgaaagcccaaacaaaactggaatatttcgcagtagacagaaccaataaaaaattgctcatcaaacccaaaaccaatgcgtttgaagctgcctataaagaaaattacgcattgtggatggggccgtataaagtaagcaaaggaattaaaccgacggaaggattaatggtcgatttctccgatatccgaccatacggcaatcatacgggtaactccgccccatccgtagaggctgataacagtcatgaggggtatggatacagcgatgaagtagtgcgacaacatagacaagggcaaccttga

SEQ ID NO: 41054 - DNA, 954 bp, Neisseria meningitidis
atgacacataccgtccacctgcatttagaagaaaccgacaacttggcgttgcagcgtctgtgcggttcttttgacaacaaccttgatttacttgctaaagcactcgatatccacatcagccgccgttttgaacatttcactttcaacggcgcatttgcacacgccggcaaacgcgcactgctcaaactcttggaaacggcgcagacgcgcgacctaaacgacggcgacatcaggcttgccgccgtcgaagcccaaaccgaagatgccggtcatcaagaaaaaaaccatgaccacgcctattatttccgcaccaagcgcggcagcatcggcggcagaacgccacggcagaacggctatatccgcgccctactcaaccacgacatcgtattcggtctcgggccggcaggtacgggcaaaacctatctcgccgtcgccgccgccgtcgatgcgatggaaaaacaccaagtcgaacgcatcattttagtgcggcctgccgtcgaagccggcgagaaactgggttttctgcccggagacctgacccagaaagtcgatccctaccttcgtccgctttatgatgccctctatgacctgatgggctttgaccgtgtcaccaagctgattgaaaaaggcctgattgaaatcgccccgctcgcctatatgcgcggcaggacgctcaacggcgcatacatcatcctcgacgaagcgcaaaacaccacgcccgaacaaatgaaaatgttcctgacccgcatcggcttcggcgcgaaagccgtcattaccggcgacaccagccaaatcgacctgcccaaaaacatcaaatcgggattaaaagatgcgcgtgagaaactgcacaacgtggaagggctgtatttccacacctttaccggcgaagacgttgtccggcatcctctggtgcaaaaaatcgtcgaagcctacgaatcggcagaacacgactga

SEQ ID NO: 41055 - DNA, 2463 bp, Neisseria meningitidis
atgacacaaaaagaaaagcattttgaggaatatgccgccttggcaacccttcctttgcgggatgtcgtcgtttacccgcatatggttctgccgctgtttgtcggcaggccgaaatccatcgccgcactggaaaacgccattacccgcgaggagccggttttcctgttggcgcaaaccgatgcggcggtagaagaaccggttgccgccgacctgtatcagaccggtacggtcgcacaagtcctgcaagtgttgaaactgcccgacggcacggtaaaagtattggtcgaagggctgtatcgcggacgtgttctgaccattgaagacacgggcggtctgttcgtttcccatatagagacggtcgtggaagaagacacgggcggcaataccgacctcgaagccgtgcgccgcaccctgttggcgcagtttgaacaatacgccaaactcaataaaaaaatccccgccgaaattatcggcagcattaacggcattgccgaaaacagccggctaaccgatacggtcgcagcgcatttgcagttgaaactggcgcaacgccaacagattttggaaattcccgaaatcggcaaacggatggaattcctgctggcacagctggaatccgaactcgacattatgcaggccgaaaaacgcatacgcggacgcgtcaaacgccaaatggaaaaatcccagcgcgaatattatctgaacgaacagattaaagcgatacacaaagaattgggcgaagaagacgaaaacggcgaactggatgccttggaagcaggcatcaaaaaggcggggatgagcaaagaagcggaagaaaaatgcctgtccgaactgaaaaaactcaaaatgatgccgccgatgtctgccgaatccaccgtcgtacgcaactacatcgacaccctgctcgagctgccgtggaagaaaaaatcccgcgtcagcaaagacattgccaaagccggactggtgctggatgccgaccactacggcctggaaaaagtcaaagaacggattttggaatacctcgccgtccaaaaacgtatggacaaactcaaaggcccgattctgtgcctggtcggtcctccgggcgtgggtaaaacttctttgggcgaatctatcgccaaagcaacagggcggaaatatgtccgcatggctttgggcggcgtgcgcgacgaaagcgaaattcggggacaccgccgcacctatatcggctctatgcctggtaagattctacagaatatggcaaaagccggcgtaaaaaacccattgttcctgctcgacgaaatcgacaaattgggtagcgacttccggggcgatcccgccagcgcgttgctcgaagtgcttgatcccgagcaaaacaacaagttcgccgatcattatgccgaagtggattacgatttgagcgatgtgatgtttattgcgacttcaaacagcctgaatatcccgaccccgctgctcgaccgtatggaaatcatccgtctgtccggctacaccgaagacgaaaaaatcaatatcgcgatgcagtacctcgtgccgaagcaaatgaagcgcaacggcgtgaaagaaggggaattggcaatcgaagaaagcgcggtgcgcgatattatccgttactacacccgcgaggcgggcgtgcgttcgctcgaccgcgagattgccaaaatctgccgcaaggtggtgatgcagattaccttggacgaagataagaagaggttgtctgaaaccaagaaaaccagcaaagccaaacctaaagcggttaaagtaaatgagaaaaatctgcacgactatttgggtgtgcgccgcttcgattacggcgttgccgaaagcgaaaaccgtatcggacaagtaaccggtctggcgtggacagaagtcggcggcgaactgctgaccgtcgaagccgcagcattgccgggtaagggcgtgattcagtgcaccggccagttgggcgatgtgatgaaggaatccgtgtctgcagcgtggtcggttgtccgctcccgcgcggaatcagtgggcttggctcctgatttttacgagaaaaaagacatccatgtccatgttcccgaaggtgcgacgccgaaagacggtccgagtgcgggcattgccatgactttggcgatggtgtctgcattcaccaaaatcccggtgcgcgccgatgttgccatgacgggcgaaattaccctgcgcggcgaagtcctgccgattggcggtctgaaggaaaaactgttggctgcgcttcgcggcggcatcaaacacgttttaattccaaaagacaacctcaaagacttggaagaaatccctgaaaacgtgaaaaccggcctgaccatccatccggtcaaatggatagacgaggtattggctctgggtttggaaagccagcctgagccttgggcagaaccttctggtgcggaagcggcggcggaatccgcttcaaaaccaaaaccccgcagcagggcaaccaaacattga

SEQ ID NO: 41056 - DNA, 1218 bp, Neisseria meningitidis
atggcgttaatcgtacacaaatacggcggcacatccgtaggctcgcccgaacgcattaaaaacgtggccaaacgtgtcgccaaagcccgcgccgaaggacacgacattgtcgtcgtcgtatccgccatgagcggtgaaaccaaccgcctggtcgcgttggcgcacgaaatgcaggagcatcccgatccgcgcgaattggacgtggttttgtccaccggcgaacaagtaaccatcggccttttggcgatggcattgaaagacatcggcgtggatgccaaaagctacacaggctggcaggtcgccctcaaaaccgataccgcccacaccaaagcccgcatcgaaagcattgatgacgaaaaaatgcgtgccgacctcgatgcaggcaaagtcgtcatcgttgccggcttccaaggcatcagtagcgaaggcaatatttccacgctcggacgcggcggttccgacacttccgccgtcgcgcttgccgcagccctcaaagccgacgagtgccaaatctataccgacgtagacggcgtttacacaaccgacccccgcgtcgtacccgaagcgcgccgcatggatacggttacatttgaagaaatgatcgaactggcaagcctcggttcgaaagttttgcaaatccgttcagtagaatttgccggaaaatacaaagtgcgcctgcgcgtactgagcagcctgcaagacggcggcaatggcaccttaattacctttgaagaggacgacaacatggaaagagctgccgtaaccggtatcgcattcgataaaaaccaagcccgcatcaacgtgcgcggcgtacccgacaaacccggcgttgcctatcagattttaggcgcggttgccgatgccaacatcgaagtcgatatgattatccaaaatgtcggcagcgaaggcacaaccgatttttcctttaccgtaccgcgcggcgattacaagcagactttggaaatcctgtcggaacgccaagacagtatcggcgcggcttctattgatggcgacgacaccgtgtgcaaagtctccgcagtcggtttgggtatgcgttcgcacgtcggtgtagccgccaaaatcttccgcacgctcgccgaagagggtatcaacatccaaatgatttccacctccgaaatcaaagtttccgtattgattgatgaaaaatacatggaactggcaaccagggtattgcataaagcctttaatttgggctga

SEQ ID NO: 41057 - DNA, 1398 bp, Neisseria meningitidis
atgccaaggtcttggagctgggctgttcgatgggcggcaacatcatcacgcaggctctttattacccagatgcggaatttgtcggtatcgacttgtccggcaggcaggttgcgcagggcaacgccatcattgaaaaaaatgggcttgaaaaatgtgcgtctggaagaaaaagatattttgaccatcgatgagtcattcgggaagttcgactatatcatcgtccacggcatttggtcgtgggtgcctgacgcagttaaagacaaaatcttttcgatttgccggaacaacctgaccaaacacggcattgcctatatttcatacaatgtttaccccggctggaaacggcaggagcagttgcgcgaaattatgtactttgccggcagggatgtgcttgaagaacccttggaagcgcggacgcggaaaggcttggacgcgctcaaggcgctggcggaaattttggaaaacgacaaaggcttgggcggcggcggcaaacttccggcgattcaaaaaatattgaatcacaatacttattatgtcgcacacgaatatatggaaatattcaacgacccgatttacgttaacggcttcatcgaatgggcaaaccgccaccggctggcgtatatcggggataccgatttgtacgtgtcttttgtttcttggatggcggagcatacgcgggagcggattttggcattggcagggggcgattatattgccaaagaattttacagcgatattttatctgaccgccaattccgccgttcgcttttatgccgtgaggaagtcggggacaatatcaggcgtgatgagtcggttgccgtcgaagtgatagaaagtttgaatttccgcccggcaagaggggaaacgatcaactttgatgaaaacgataccctgctttcgggcatacgcgatgtgatgaaaaccggagagccgtttaaaacggaagatgttgcggaaaatcttgcccgccgatttcccggtctagaatttgaccgcatgaaaatcaattcccagcttttattgcaaaccattctcgggcgtttttctgtttcatcggacaatgcgggcaaaccattttttgaagaccataaaacctatgtgccggcgcgttttacaaactatgccgccgcctttgtggaacacggcgcggaagcgtttgtccggcctgccaaccgttacaacgaaagcacgccctcattcgggtacgggcatttgtacattatgcggcaattatcgcggccgacgagcaaacaggcggtgatagatgcggttgccgaaaacttgaacatcgtcagcaccacgcccgacggtttgacattccatccgcctgccgaagtgtatgtggaagaaatattggcagacttggcagacaggcattttctcgtttcggcggattga

SEQ ID NO: 41058 - DNA, 1368 bp, Neisseria meningitidis
atgcctgaccttcataccgaattttcccgactcctgccggcagatgaaattgccgaactttctccgacgcttttaaaagaccagcgcaaccgctttacgtctgcaccagacatcattttgcagccgcgcagcgttgaaagcgtgcaaaccattatgcgtttttgttacgaacaccgcattccggttacgccgcaaggcggcaataccggtttgtgcggcgcggcagtatcggaaaacggcgtattgctgaacctttccaaactcaaccgcatccgcagcatcaatttgtcagacaactgcataaccgtcgaagcaggttccgtactccaaaccgtccaacaggcagccgcagcctcaaacaggctgtttccactcagtctcgccagcgaaggctcgtgccaaatcggcggcaacatcgcctgcaatgccggaggtttgaacgtattgcgttacggcacgatgcgcgacctgattatcggtttggaagtcgtcctccccaacggcgaacgggtttcccatctccatcccctgcataaaaacaccaccggctacgacctgcgccatctgtttatcggcagcgaaggcacactgggcatcatcactgccgccacgctcaagctttttgcccgtccctcggacaaggcaacggcatgggtcggcattcccgacatcgaatccgccgtccgcctgctgaccgaaacccaagctcactttgccgaacgcctatgcagttttgagctgatcggccgttttgccgccgagttgtcttccgaattcagcaaattccccctgccgacacattcagaatggcatattttacttgagttgaccgactcattacccgacagcaatcttgatgatcggctcgtcgaatttctttataaaaaaggatttaccgacagcgtattggcacaaagcgaacaagaacgtatccatatgtgggcattgcgcgaaaacatctccgcctcccaacgcaaactgggcaccagcatcaaacacgatattgccgttcctatcggacgcgttgccgactttgtccgccggtgcgccaaagatttggaacagaattttaaaggcatacaaatcgtctgcttcggacatcttggcgacggcagcctgcactacaatactttcctgcccgaaatcctcagcaatgaagtctatcgttacgaaaacgacatcaacgacgcagtttatcgcaacgttcttgcctgcaacggcacgattgccgccgaacacggcataggtatcatcaaaaaacagtggctggacaaagtacgcacgcctgccgaaatcgccctgatgaaaagcatcaaacaacaccttgatccatataacattatgaatccgggcaaactgcttccgtaa

SEQ ID NO: 41059 - DNA, 1116 bp, Neisseria meningitidis
atgatttatcaaagaaacctcatcaaagaactctcttttaccgccgtcggcattttcgtcgtcctcttggcggtattggtctccacgcaggcaatcaacctgctcggccgtgccgccgacgggcgtgtcgccatcgatgccgtgttggcattggtcggcttctgggtcatcggtatgacgccgcttttgctggtgttgaccgcatttatcagtacgttgaccgtgttgacccgctactggcgcgacagcgaaatgtcggtctggctatcctgcggattggcattgaaacaatggatacgcccggtgatgcagtttgccgtgccgtttgccgttttggttgccgtcatgcagctttgggtgataccgtgggcagagctacgcagccgcgaatacgctgaaatcctgaagcagaagcaggaattgtctttggtggaggcaggcgagttcaacagtttgggcaagcgcaacggcagggtttattttgtcgaaaccttcgataccgaatccggcatcatgaaaaacctgttcctgcgcgaacaggacaaaaacggcggcgacaacatcatcttcgccaaagaaggtaacttctcgctgaacgacaacaaacgcacgctcgaattgcgccacggctaccgttacagcggcacgcccggacgcgccgactacaatcaggtttccttccaaaaactcaacctgattatcagcaccacgccaaaactcatcgaccccgtttcccaccgccgtaccattccgaccgcccaactgattggcagcagcaacccgcaacatcaggcggaattgatgtggcgcatctcgctgaccgtcagcgtcctcctactctgcctgcttgccgtgccgctttcctatttcaacccgcgcagcggacatacctacaatatcttgattgccatcggtttgtttttaatttaccaaaacgggctgaccctgctttttgaagccgtggaagacggcaaaatccatttttggctcggactgctgcctatgcacatcatcatgttcgtcatcgcaatcgtacttctgcgcgtccgcagcatgcccagccagcccttctggcaggcggttggcaaaagtctgacattgaaaggcggaaaatga

SEQ ID NO: 41060 - DNA, 621 bp, Neisseria meningitidis
atggaattgaaagtaattgacgctaaaggacaagtttcaggcagcctgtctgtttctgatgctttgttcgcccgcgaatacaatgaagcgttggttcatcagctggtaaatgcctacttggcaaacgcccgctccggtaaccgcgctcaaaaaacccgtgccgaagtaaaacactcaaccaaaaaaccatggcgtcaaaaaggtaccggccgtgcccgttccggtatgacttcttctccgctgtggcgtaaaggtggtcgcgcgttcccgaacaaacctgacgaaaacttcactcaaaaagtaaaccgcaaaatgtaccgtgccggtatggcgactattctgtcccaattgactcgtgacgagcgtttgtttgcgattgaggcgttgactgccgaaactcctaaaaccaaagtttttgctgaacaagtgaaaaatctgggtctggagcaagtgttgtttgtaaccaaacagctcgacgagaatgtttacttggcttcacgcaacttgccaaacgtgttggttttggaagctcaacaagttgatccttacagcttgctgcgttacaaaaaagtaatcatcactaaagatgcagttgcacaattagaggagcaatgggtatga

SEQ ID NO: 41061 - DNA, 354 bp, Neisseria meningitidis; identical to SEQ ID NO: 39889

SEQ ID NO: 41062 - DNA, 951 bp, Neisseria meningitidis
atgaaattacaacaattgaaatacgccttagaagtttaccagcacaacctgaacgtttccgaagcggccgaagccttgtttacttcgcaacccggcatctccaaacaaatcaaattgctggaagaagaaatcggcattcagatttttatccgcagcggcaagcgcgtggtttcggtctcgcagccgggcaaggtggttttggatattgcggaacgtattttacgcgatgtacagaacattaaaaatatcggcagcgagtttaccggacaggacagcggttcgctgacggttgccacgacgcatactcaggcacgctatgccctacccttgattgttgccgattttgtgaaacgctatccgaaagtcaacctgaccatcaaacaggggagccctgccgccatcgcacgtatggttacctcaggcgaggcggacttggcgattgttacggaacggatagacgaccatcccgaactgggaaaacttccctgctatgactggactcatgcggttatcgtgccgaacgaccatccgctgctcgaatgcaggaatcccctccgtattgaagatttggcgaggtttccactaattacctatgaatttgcattcaacacgggcagcagcatcgcgcgggcattttccaaagcccgtttggaacagccggatgtcgcattggcggcggcggatacggacgtattgaagacttatgtgcgcttgggtttgggcgtgggactgatggcgaaaatggcgtacaacccggatacggacggcgatttgcagcttgtggatgcggcacacctgttcgagccgtcgccgacgtggattgctttgcgcagcgatacttatttgcgcggatatgcctacgactttatccaagcgtttgcgccgcacctgacacgcgagaaagtggataggattctgtacacgcccatcagcgaggatttttcgatttag

SEQ ID NO: 41063 - DNA, 1797 bp, Neisseria meningitidis
atgaataccgtatcgaattacctgtccgcattgcgcgaagccatgaaggcgcaaggcttggacgctctcgtcatcccttccgccgacccccacctgtccgaatacctgcccgaacattggcaggcgcggcgcgaattgtcgggctttaccggctcggtcggcacattcgtcgttaccgccgacgaagcgggcgtatgggtggacagccgctattgggaacaagccgccaagcagcttgcgggcagcggcatcgaactgcaaaaaagcgggcaagtgccgccgtataacgaatggctcgcggcaaacctgcccgaaaacgccgccgtcggcatcccttccgatatggtctcgctcaccggcaaacgcactttggcgcaatccctgaccgccaaaaacatccgcatcgaacacccaaacgatctgcttgaccaagtgtggacaagccgtcccgctatccccgccgaaaccgtgttcatccacgaccccgcctacgtctccgaaaccgccgccgaaaaactcgcccgcgtgcgcgccgtgatggcggaaaaaggcgcggattaccacttggtttcctcgcttgacgacatcgcctggctgaccaacctgcgcggcagcgacgtacctttcaaccctgttttcgtgtccttcctgctgatcggcaaagacaacgccgtcctgtttaccgaccgatgccgtctgaacgccgaagccgccgccgcgctgcaaaccgcaggcatcacggtcgagccttacgcccaagttgccgacaaactcgcgcaaatcggcggcgcgttgcttatcgaaccgaacaaaaccgccgtcagcacgcttgtgcgcctgcccgaaagcgtgcgccttatcgagggaatcaacccgtccacgctgttcaaatcctgcaaatccgaagccgacatcgcccgcatccgcgaagcgatggaacacgacggcgcggcgttgtgcggtttcttcgccgagtttgaagacatcatcggcaacggcggcagcctgaccgaaatcgacgtggacaccatgctttatcgccaccgcagcgtgcgcccaggcttcatttcattgagtttcgacaccatcgcaggcttcaacgccaacggcgcactgccgcattacagcgcgacacccgaaagccacagcaccatcagcggcaacgggcttttgctcatcgactccggcgcgcaatacaaaggcggcacgaccgacatcacccgcgtcgtccccgtcggcacgccgagtgccgaacaaaaaagcgacaacaccctcgttctcaaagcccatatcgcgcttgccgaagccgtgttccccgaaaacatcccctcgccgctgattgatgcgatttgccgcaaacccctgtggcaggcgcaatgcgactacggccacggcaccggacacggcgtaggctatttcctcaacgtccacgaaggcccgcagcgcatcgccttcgccgcccccgccacgcccgaaaccgccatgaaaaaaggcatggttacctccatcgaacccggactctaccgtccgggaaaatggggcatccgcattgaaaaccttgccgccaaccaagccgtcgccgcccctcaagaaaccgaattcggcagcttcctctgttttgaaaccctgaccctctgccccatcgacacccgcctgatggacaccgccctcatgaccgacggcgaaatcgactgggtcaaccgctaccacgccgaagtccgccgccgcctcgagccgctgaccgaaggcgcggcaaaagcgtggctgatcaaacgcaccgaaccgctggcgcgttaa

SEQ ID NO: 41064 - DNA, 1128 bp, Neisseria meningitidis
atgaaacacttactcatcgattttgaaaacgtccagccgcaaaacttagacaaattaccaaccgaaaatacccatatttggctatttataggtgtattacacaaaatgttacctattagtctggtgcaatccctactacgtttcggcgaacgtgtccatcttgtccagttacaaaaaacggggaaaaacgcattggatttttacctgtcctattacctcggacaaattaccgccacagaccccaatgcccaagtcggcatactctcgcgtgatggaggatacgatgttctggtcgaacatattttgaaaaaccaccaggcgaagggtatcgtgcgcctagccaatatagatgaagtacaacatcagaaaattgctaccgaaccgccgtcagcattgcgggaaaacactcctcagcctgaaaccaccctcaaaccacagcaaccattaacttcctatttccaagcagccctaactgcactgcgccgccccgacgctttccgcccctgccgcctgcataacctgcgacaaaatctgcgtaagcatattttgagtgatttgtttaaagaaaaaaccgatgaagaatgcgaaataaccactgctaacgttatcaataaactcaaagcacaaaacttcatcagcattgatgaacaggaaaccgtttcctaccatctcagtgataatgatttgttacaaagaatccaacgccatattttaagccaacgtcccaaaacctacgctgattttcaagccgtcgtgcaaaaccgagcagatgcacttcacttaacagtcggtaccaacgacattcaatcctttgcgcgacatttgcgcgaccaaaacctgatccgccaaaacaatgggaaaattgaatatgcaccgtttactgaacctaaaccacagccaacgcccaagcagcctaaaaaaaccgcatgggaacctgatgaaattatttggaaaaaagtgattgccgcgttatcgttaaagaaccgtcctaataaaaccaaaactttacgcaatacaatccaggcactcacaaaatccaatgcacaagaaactgacaaactgctacaacatttacaagatacccaagtcctacgtattgacggtactaaaattgtgtatatcaagtag

SEQ ID NO: 41065 - DNA, 651 bp, Neisseria meningitidis
atgccgtctgaaccgccttcagacggcattgcccgacaccccaaaagcacaatcaaaatggcaaaaaaaccgaacaaacccttcaggctgacccccaaactcctgatacgcgtcgtattgctcatctgtatcaccgccatcggcgcattggcaataggcatcgtcagcacattcaacccgaacggcggcaaaaccctccaaaccgaaccgcaacacaccgacagcccccgcgaaaccgaattctggctgccaaacggcgtagtcggacaagatgccgcccaacccgaacaccaccacgccgcctcatccgaacccgcacagccggacggcacagacgaaagcggcagcggactgccgtcccctgccgcacccaagaaaaaccgggtcaaaccgcaacctgccgacacagctcaaaccgacaggcagccggacgacgccggaacacaagctgaaaacacactcaaagaaacccccgtactgcccacaaacgtcccccgtcccgaaccccgaaaagaaacacccgaaaaacaggcgcagcccaaagaaacacccaaagaaaaagaaacgcccaaagaaaaccataccaaaccggacaccccgaaaaacacgccgcccaaaccccataaagaaattctcgacaacctcttctga

SEQ ID NO: 41066 - DNA, 369 bp, Neisseria meningitidis
atgaaaccgttgaaacgacatcccgcccttatcgggctttcgcgtgaccaccaccattcgctttccctgtgcgtgcgtctgttgcggacgccggaagaaaggcatcgggacgaactcgaaccgcattttgccgaattggaaacccattttcgcgaagaagaagccaagtttgccccaatttggcagaatgtcgcccctgaattgaaacaacgtttcgagaaagaccacgcccgactgcggcagatgatggcaagccccgaatacggtaacgcggcgtggaataccgcttttgccacaaccctgcgcgaccacgcgcgctttgaagaacgcgagctgtttcccgccgccgaaccgtttttgccggcatga

SEQ ID NO: 41067 - DNA, 1377 bp, Neisseria meningitidis
atgaaacacatccacattatcggtatcggcggcacgtttatgggcgggcttgccgccattgccaaagaagcggggtttgaagtcagcggttgcgacgcgaagatgtatccgccgatgagtacccagctcgaagccttgggcataggcgtacacgaaggcttcgatgccgcgcagttggacgaatttcaagccgatatttacgtgatcggcaatgtcgccaagcgcggtatggatgtggttgaagcgattttgaaccgagggctgccttatatttccggcccgcaatggctggctgaaaacgtgttgcaccggcactgggtgctcggcgtggcagggacgcacggcaaaacgaccaccgcgtctatgctcgcgtgggttttggaatatgccggactcgcgccgggcttccttatcggcggcgtaccggaaaacttcagcgtttccgcccgactgccgcaaacgccgcgtcaagacccgaacagccaatcgccgtttttcgtcatcgaagccgacgaatacgacacggcgtttttcgacaaacgctccaaattcgtgcattaccgtccgcgtaccgtcgtgttgaacaatctggaattcgaccacgccgacatcttcgccgatttgggcgcgatacagacccagttccaccacctcgtgcgcaccgtgccgtctgaaggcctcatcgtctgcaacggacggcagcaaagcctgcaagatactttggacaaaggctgctggacgccggtggaaaaattcggcacggaacacggctggcaggccggcgaagccaatgccgacggctcgttcgacgtgttgcttgacggcaaaacggccggacgcgtcaaatgggatttgataggcaggcacaaccgcatgaacgcgctcgccgtcattgccgccgcgcgtcatgtcggtgtcgatattcagaccgcctgcgaagccttgggcgcgtttaaaaacgtcaaacgccggatggaaatcaaaggcacggtaaacggcatcactgtttacgacgactttgcccaccatccgaccgccatcgaaaccacgattcaaggtttgcgccaacgcgtcggcggcgcgcgcatcctcgccgtcctcgaaccgcgttccaacacgatgaagctgggcacgatgaagtccgccctgcctgtaagcctcaaagatgccgaccaagtgttctgctacgccggcggcgtggactggaacgtcgccgaagccctcgcgcctttgggcggcaggctgcacgtcggcaaagacttcgatgccttcgttgccgaaatcgtgaaaaacgccgaagcaggcgaccatattttggtgatgagcaacggcggtttcggcggaatacacaccaaactgctggacgctttgagatag

SEQ ID NO: 41068 - DNA, 996 bp, Neisseria meningitidis
atgttgaaaaaaatgttgaaatggtctgccgtttttttgaccgtgtcggcagccgttttcgccgcgctgctttttgttcctaaggataacggcagggcataccgaatcaaaattgccaaaaaccagggtatttcgtcggtcggcaggaaacttgccgaagaccgcatcgtgttcagcaggcatgttttgacggcggcggcctacgttttgggtgtgcacaacaggctgcatacggggacgtacagactgccttcggaagtgtctgcttgggatatcttgcagaaaatgcgcggcggcaggccggattccgttaccgtgcagattatcgaaggttcgcgtttttcgcatatgaggaaagtcatcgacgcaacgcccgacatcgaacacgacaccaaaggctggagcaatgaaaaactgatggcggaagttgcccctgatgccttcagcggcaatcctgaagggcagtttttccccgacagctacgaaatcgatgcgggcggcagcgatttacagatttaccaaaccgcctacaaggcgatgcaacgccgtctgaacgaggcatgggaaagcaggcaggacgggctgccttataaaaacccttatgaaatgctgattatggcgagccttatcgaaaaggaaacggggcatgaagccgaccgcgaccatgtcgcttccgtcttcgtcaaccggctgaaaatcggtatgcgcctgcaaaccgacccgtccgtgatttacggcatgggtgcggcatacaagggcaaaatccgtaaagccgacctgcgccgcgacacgccgtacaacacctacacgcgcggcggtctgccgccaaccccgattgcgctgcccggcaaggcggcacttgatgccgccgcccatccgtccggcgaaaaatacctgtatttcgtgtccaaaatggacggcacgggcttgagccagttcagccatgatttgaccgaacacaacgccgccgtccgcaaatatattttgaaaaaataa

SEQ ID NO: 41069 - DNA, 1812 bp, Neisseria meningitidis
atgaaacaaatccgcaacatcgccatcatcgcccacgtcgaccacggcaaaaccacattggtcgaccaactgctgcgccaatccggcacattccgcgccaaccagcaggttgacgagcgcgtgatggacagcaacgacctcgaaaaagaacgcggcatcaccatcctcgccaaaaacaccgccatcgattacgaaggctaccacatcaatatcgtcgacacgccgggacacgccgacttcggcggcgaagtagagcgcgttttggggatggtggactgcgtcgtcttgttggtggacgcgcaggaaggcccgatgccgcaaacccgtttcgtgaccaaaaaagccttggctttggggctgaaaccgattgtcgtcatcaacaaaatcgacaagccgtccgctcgtccgagctgggtcatcgaccaaactttcgagctgttcgacaacttgggcgcgaccgacgagcagttggatttcccgattgtttacgcttcagggttgagcggtttcgccaaattggaagaaaccgatgagagcaacgacatgcgtccgctgttcgatactatcttaaaatatacgcctgcaccgagcggcagcgcggacgaaacgctgcaactgcaaatttcccaactcgactacgacaactacaccggccgcctcggtatcggtcgtatcttgaacggacgcatcaaacccggccaaaccgttgccgtcatgaaccacgatcagcaaatcgcccaaggccgcatcaaccagcttttgggtttcaaaggtttggaacgcgtgccgcttgaagaagccgaagccggcgacatcgtgattatttccggtatcgaagacatcggcatcggcgtaaccatcaccgataaagataaccccaaaggcctgccaatgttgagcgtggacgaaccgacgctgacgatggactttatggtcaacaccagcccgttggcgggcacggaaggcaaattcgtaaccagccgccaaatccgcgaccgcctgcaaaaagaattgctgaccaacgtcgccctgcgcgtggaagataccgccgatgccgacgtgttccgcgtatccgggcgcggcgagctgcacctgaccattttgctggaaaacatgcgccgcgaaggctacgaactcgccgtcggcaaaccgcgcgtcgtgtaccgcgacatcgacggtcaaaaatgcgaaccgtatgaaaatctgaccgtggacgtacccgacgacaaccaaggcgcggtaatggaagaactcggccgccgccgtggcgaactgactaatatggaaagcgacggcaacggacgcacccgcctcgaataccatattccagcgcgcggcttgatcggtttccaaggcgaatttatgaccctgacgcgcggggtcgggctgatgagccatgtgttcgacgattacgcgcccgtcaaacccgatatgcccggccgccacaacggcgtgctggtgtcccaagagcagggcgaggcagtcgcttacgccttgtggaatctggaagaccgcggtcgtatgttcgtatcacccaacgacaaaatctacgaaggtatgattatcggcatccacagccgcgacaacgatttggtggtcaacccgctcaaaggcaaaaaacttaccaacgtccgtgccagcggtaccgacgaagccgttcgcctgaccacgccgattaaactgacgctggaaggtgcggttgagtttatcgacgatgacgaactcgttgaaatcacgccgcaatccatccgtctgcgcaagcgttacttgagcgaattggaacgccgccgccactttaaaaagctggattga

SEQ ID NO: 41070 - DNA, 1500 bp, Neisseria meningitidis
gtgttcaaaaaataccaatacctcgctttggcagcactgtgtgccgcctcgctggcaggctgcgacaaagccggcagctttttcggtgcggacaaaaaagaagcatctttcgtagaacgcatcgaacacaccaaagacgacggcagcgtcagtatgctgctgcccgactttgtccaactggttcaaagcgaaggcccggcagtcgtcaatattcaggcagcccccgccccgcgcacccaaaacggcagcagcaatgccgaaaccgattccgacccgcttgccgacagcgacccgttctacgaatttttcaaacgcctcgtcccgaacatgcccgaaatcccccaagaagaagcagatgacggcggattgaacttcggttcgggcttcatcatcagcaaagacggctatattctgaccaatacgcacgtcgttaccggcatgggcagtatcaaagtcctgctcaacgacaagcgcgaatataccgccaaactcatcggttcggatgtccaatccgatgtcgcccttctgaaaatcgacgcaacggaagagctgcccgtcgtcaaaatcggcaatcccaaagatttgaaaccgggcgaatgggtcgccgccatcggcgcgcccttcggcttcgacaacagcgtgaccgccggcatcgtgtccgccaaaggcagaagcctgcccaacgaaagctacacacccttcatccaaaccgacgttgccatcaatccgggcaactccggcggcccgctgttcaacttaaaaggacaggtcgtcggcatcaactcgcaaatatacagccgcagcggcggattcatgggcatttccttcgccatcccgattgacgttgccatgaatgtcgccgaacagctgaaaaacaccggcaaagtccaacgcggacaactgggcgtgattattcaagaagtatcctacggtttggcacaatcgttcggtttggacaaagccggcggcgcactgattgccaaaatcctgcccggcagccccgcagaacgtgccggcctgcgggcgggcgacatcgtcctcagcctcgacggcggagaaatacgttcttccggcgaccttcccgttatggtcggcgccattacgccgggaaaagaagtcagcctcggcgtatggcgcaaagacgaagaaatcacaatcaaagtcaagctgggcaacgccgccgagcatatcggcgcatcatccaaaacagatgaagccccctacaccgaacagcaatccggtacgttctcggtcgaatccgcaggcattacccttcagacacataccgacagcagcggcggacacctcgtcgtcgtacgggtttccgacgcggcagaacgcgcaggcttgaggcgcggcgacgaaattcttgccgtcgggcaagtccccgtcaatgacgaagccggtttccgcaaagctatggacaaggcaggcaaaaacgtccccctgctgatcatgcgccgtggcaacacgctgtttatcgcattaaacctgcaataa

SEQ ID NO: 41071 - DNA, 480 bp, Neisseria meningitidis
atgaaacacatactccccctgattgccgcatccgcactctgcatttcaaccgcttcggcacatcctgccagcgaaccgtccacccaaaacgaaaccgctatgaccacgcataccctcacctcaaaatacagttttgacgaaaccgtcagccgccttgaaaccgccataaaaagcaaagggatggacatttttgccgtcatcgaccatcaggaagccgcccgccgaaacggcttaacgatgcagccggcaaaagtcatcgtcttcggcacgcccaaagccggcacgccgctgatggtcaaagaccccgccttcgccctgcaactgcccctacgcgtcctcgttaccgaaacggacggcaaagtacgcgccgcctataccgatacgcgcgccctcatcgccggcagccgcatcggtttcgacgaagtggcaaacactttggcaaacgccgaaaaactgatacaaaaaaccgtaggcgaataa

SEQ ID NO: 41072 - DNA, 216 bp, Neisseria meningitidis
atggcgaaagaagatactatccaaatgcaaggtgaaattcttgaaactttacctaatgcaacatttaaagtaaaacttgagaatgaccatattgtattgggtcatatttctgggaagatgcggatgcattacattcgtatttctccgggagataaggtcacagtagagctgacaccttatgatttaactagggctcgaatcgttttcagagcaaga

SEQ ID NO: 41073 - DNA, 381 bp, Neisseria meningitidis
atggctttgctttcctgtcagctttcccacgccgccacggcttatatccccccgaacgattttcaaccgaactgcgacatacgccgactcgggctgacccaaagtcagcacaatgagctgcgtaaaatccgcaccgccttcaaaatggcgggcgacagggcgcgtttgaaggttatgcattccgaacacagccgccgccggtctgtcgtcgaaatcatttcctcggatgtttttaatcggaacgaggcgcgcgattatgtcgaaagccgctatttgtccggtatggattttgcggtggacgaattggaaatccaacaccggttcttccatatcctcacaccgcaacagcagcaaatgtggctttcttcctgcctcaaataa

SEQ ID NO: 41074 - DNA, 2262 bp, Neisseria meningitidis
atgttacaaatcgaaatcgacggcaaacaagtatctgtggagcagggcgcgacggtgattgaagccgcgcacaagctcggcacttatattccgcatttctgttaccacaaaaaactttccatcgccgccaactgccgtatgtgtctggtgaacgtagaaaaagcccccaaaccgctgcccgcctgtgccacgccggtaacggacggcatgatcgtgcgtacgcattcggcaaaagcccgagaagcgcaagaaggcgtgatggagttcctgctcatcaaccatccgcttgattgtccgacctgcgaccaaggcggtgaatgtcagttgcaggatttggcgatgggctacggcaaaaccaccagccgttataccgaagaaaaacgttctgtcgtcggcaaagacatgggttctttggtttccgccgaggaaatgagccgttgtatccactgtacccgttgcgttcgtttcactgaagaaattgccggcgtgcaagaaatcgctatggccaaccgcggcgaacattccgagatcatgccttttatcggcaaagcggtggaaaccgaattgtcaggcaacgtcattgatttgtgtcctgtcggcgcattgaccagcaaaccgttccgcttcaacgcgcgtacttgggaattgaaccgccgcaaatccgtttccgcccatgatgctttgggcagcaacctgattatacaaaccaaagaccataccgtccgccgcgtgttgccgctggaaaatgaagcgattaacgaatgttggctgtctgaccgcgaccgtttcgcctatgaaggcctgtatcacgaaagccgtctgaaaaaaccgaaaatcaaacagggcggcgagtggatggacgtggattggaaaaccgcgttggaatatgtccacagcgcaattaaatgtatcgccaaagacggcaaccaaaaccaagtcggtgtttgggccaatccgatgaatacggttgaagagctgtatctggccaaaaaatttgccaatggtttgggtgttaaaaactttgcaacccgtttgcgccaacaagacaaacgtctttcagacggcattaaaggtgcacaatggttgggacaaagcattgaatctttggctgacaacgatgccgtattggtagtcggcgcgaacttgcgcaaagaacagccgctcttgactgcccgcctgcgccgcgccgccaaagaccgcatggccttgagcgtattggccggcagtaaagaagaattgtttatgccgcttctgtctcaagaagccgcacatcccgacgaatgggcaggccgtctgaaaaacctgtctgccaatgcggaacacgctgttaccgccagcctgaaaaacgctgaaaaagcagcggtgattttaggagcggaagtgcaaaaccatcctgattacgccgcgatttacgccgccgcgcaagagctggcggacgcgaccggcgcggtgctgggtattttgccgcaagccgccaacagcgttggtgcagatgtcttgaaggtaaactccggcgagagcattgccgaaatggtaactgcgccgaaacaggcagtcttgctgctcaacgtcgagcctgaaatcgatacggttgacggtgcaaaagccgtagctgccttgaaacaggcgaaaagcgtgatggcgtttacgccgtttgtcagcgaaacgctgctggacgtgtgcgacgtattgttgccgattgcgccgtttaccgaaacctcgggcagcttcatcaatatggaaggtcgtctgcaatctttccacggtgtggtacaaggcttcggcgattcgcgtccgatgtggaaagtattgcgcgtattgggcaacctgtttgacctgaaaggttttgaataccacgataccgctgcgattctgaaagacgcgctggatgcggaaagtctgccgtccaaactggacaaccgcagtacatgggcaggggagggcgttcagacggcctcagaccgcctcgtccgtgtcggcggagtcggtatttatcacactgattctatcgtgcgccgttccgcgccgttgcaagaaaccagccatgccgccgtgcctgccgcgcgtgtaaatccaaatactttggcacgtttgggcctgcaagacggacagaccgctgttgccaaacaaaacggcgcaagcgtatcggttgctgtcaaagccgatgccggtttgcctgaaaacgtggtgcatctgccgctgcataccgaaaatgccgcgctgggtgcgttgatggacactattgaactggcgggagcttga

SEQ ID NO: 41075 - DNA, 2307 bp, Neisseria meningitidis
atggcgaaaaacctattaatcgtcgaatccccgtccaaagccaaaaccctgaaaaaatatttgggcggcgattttgaaatccttgcatcctacggacacgtccgcgacctcgtccccaaaagcggcgcggtcgatcccgacaacggctttgcgatgaaataccaattgattagccgcaacggcaaacacgtcgatgccatcgtcgccggtgccaaagaagctgaaaacatctacctagccaccgacccggatagggaaggcgaagccatttcctggcatcttttggaaatcctcaaatccaaacgcggcctgaaaaacatcaagccgcagcgtgtcgtgttccacgaaatcaccaaaaacgccgtgctcgatgccgttgcccatccgcgcgaaatcgaaatggacttggtcgatgcgcaacaagcccgtcgcgctttggactatctggtcggtttcaacctctcgccgttgctgtggaaaaaaatccgccgaggtttgagcgcaggccgcgtgcaaagccccgctttgcgcctgatttgtgagcgcgaaaacgagatccgcgcgtttgaagcgcaggaatattggacggtacatcttgacagtcacaaaggacgcagtaagtttaccgccaaactcgcccaatacaatggtgcgaaactcgaacaattcgacctgccgaacgaagctgcgcaagccgacgtattgaaagaactcgaaggcaaagaagccgtcgttaccgccattgaaaagaaaaagcgcagccgcaatcctgccgcgccgttcaccacttctaccatgcagcaggatgccgtgcgcaaactcggcttcaccaccgaccgcaccatgcgtaccgcccaacagctttatgaaggtatagacgtagggcagggcgcgatcggtctgattacctatatgcgtaccgacagcgtgaatttggcggatgaagcgttaaccgaaatccgccattacatcgaaaacaaaatcggcaaagaatatctgccgagtgccgccaaacaatacaaaaccaaatccaaaaacgcccaagaagcgcacgaagcgatccgcccgacttccgtgtaccgcacgcccgaaagcgtcaaacccttcctgagcgcagaccagttcaaactctatcaaatgatttggcagcgcaccgtcgcctgtcagatgacgcctgccaaattcgaccaaaccaccgtcgatattaccgtcggcaaaggcgtattccgcgtaaccggacaagtgcagactttcgcaggcttcttgagcgtttatgaagaaagcagcgacgatgaagaaggcgaagacagcaaaaaactgcccgaaatgagcgaaggcgacaaattgcccgtggacaaactctacggcgaacaacacttcaccaccccaccgccgcgctacaacgaagccacgctggttaaagccctcgaagaatacggcatcggccgcccctcgacctacgccagcatcatctctacgctcaaagaccgcgaatacgttacccttgagcaaaaacgcttcatgcccaccgacacaggcgacatcgtcaacaaattcctgaccgaacacttcgcccaatacgtcgattaccactttactgccaaactcgaagaccagcttgacgaaattgccgacggcaaacgccaatggattcccttgatggacaaattctggaaaccgttcatcaaacaagtggaagaaaaagaaggcatcgaacgcgccaaattcaccacgcaggaacttgatgaaacctgcccgaaatgcggcgaacacaaactgcaaatcaagttcggcaaaatgggccgtttcgttgcgtgtgccggttatcccgagtgcagctacacgcgcaatgtcaacgaaaccgccgaagaagctgccgaacgcatcgccaaagccgaagccgaacaggcagaactcgacggacgcgagtgcccgaaatgtggcggtcgcctagtgtacaaatacagccgcaccggcagcaaattcatcggctgcgccaactatccgaaatgcaaacacgtcgagccgctggaaaaaccgaaagataccggcgtccagtgtccgcaatgcaaaaaaggcaacctcgtcgagcgcaaatcccgctacggcaaactgttttacagttgcagcacctatcccgactgcaactacgccacttggaacccgcccgttgccgaagaatgcccgaactgccattggccggtcttgaccatcaaaaccactaaacgctggggtgtggaaaaagtctgcccgcaaaaagaatgcggctggaaagaacagatcgaaccgcctgcaccgaaagagtga

SEQ ID NO: 41076 - DNA, 444 bp, Neisseria meningitidis
atgaagtggttattaaatatgataatgagacctattaaatttagtatggtaaatacgttattatttattgttatatgtagttcattttttgatctgctcgttcaattatgtacaattttatttcatagccaaaaaatatactttattacattatttttattatttatttttaattttgttacaaaatctatctatatggcaattatttatcctattttatatttttttacgataaaaaaatattatccttactctaggaaagtgataattctattatcattagcattatctatatattttagttttatggacttttactttttttccatatattcagataaccttagctatgaaacggagcctttacatttatacatccctattattattaattttttctcacttttagtttctaattttattttatcttttatcaacaagtaa

SEQ ID NO: 41077 - DNA, 294 bp, Neisseria meningitidis; identical to SEQ ID NO: 38787

SEQ ID NO: 41078 - DNA, 297 bp, Neisseria meningitidis
atgaaaaaatccctgtttgccgctgctttgttgtctttggttctggcagcctgcggcggtgaaaaagccgctgaagctcccgctgctgaagcacctgccgctgaagctcccgctaccgaagcacctgccgccgaagctcccgctgctgaagctgccgctaccgaagctcccgctgctgaagctgccgctaccgaagcacctgccgctgaagctcccgctaccgaagcacctgccgctgaagctgccgctaccgaagcacctgccgctgaagctcctgctgccgaagctgcaaaataa

SEQ ID NO: 41079 - DNA, 1215 bp, Neisseria meningitidis
atgaggaaatgccgtctgaaaaccgacggaccaaacaccatgctgaacactttcctttccccgtggccctgcttcacccaagaagaagccgatgccgtttccaaagtcctgctgtccaacaaagtcaattactggacgggcagcgaatgccgcgaatttgaaaaagaatttgccgccttttctggcacgcgatacgccgtcgccctttccaacggcacgctggcactcgatgtcgcgctcaaagcaatcggcataggcgtaggcgacgatgtgattgttacttcgcgcactttcttggcttccgcttcctgcattgtgaacgcgggcgcaaatccggtgtttgccgatgtggatttgaacagccaaaacatcagcgcggaaaccgtcaaagccgcgctgacaccgactaccaaagccgtcatcgtcgtccacctcgccggtatgcccgccgaaatggacggcattatggctttggcaaaagaacataatctttgggtaatcgaagactgcgcccaagcgcacggcgcaaaatacaaaggcaaatccgtcggctctatcggacacgtcggcgcgtggtcgttctgccaagacaaaatcatgaccaccggcggcgaaggcggtatggttacgaccaacgacaaaaccctgtgggaaaaaatgtggtcgtacaaagaccacggcaaaagctacgatgccgtgtaccaccgcgaacacgcgcccggtttccgctggctgcacgaaagtttcggcacaaactggcgtatgatggaaatgcaggcggcaatcgggcgcatccagctcaaacgcctgcccgaatggactgcctgccgtcaagcgcacgccgccaagctggcggaaagcctaggcaaattcaaaagtatccgcttggttgaagtcgccgactacatcggacacgcgcaatataagttctacgccttcgtcaaacccgaacacctcaaagacggctggacgcgcgaccgcatcgtcggcgaactgaacgcgcgcaaagtcccctgctatcaaggcagctgctccgaagtctatttggaaaaagccttcgacaacacgccgtggcgaccgaaagagcgtttgacaaatgctgtcgagttgggcgacaccagcctgatgttcttggtgcacccgacgctgaccgacgacgaaattgcgttttgcaaaaaacacatcgaagccgtcttgaccgaagccgcacgataa

SEQ ID NO: 41080 - DNA, 1383 bp, Neisseria meningitidis
atggcaagcatcgcccgcgacatcttcaaagcctacgacatccggggtattgtcggcaaaaccctgaccgacgaagccgcctaccttatcggcaaagccatcgccgccaaagccgccgaaaaaggcatgacccgcatcgcgctcggacgcgacggacgcttgagcggtcccgaactgatggagcacatccaacgcggctttaccgacagcggcatcgacgtcctcaacgtcggtatggtcgccacgcccatgctctattttgccgctatcaacgaatgcggcggcagcggcgtgatgattaccggcagccacaatccgcccgattacaatggtttcaaaatgatgctcggcggcgacacgcttgccggcgaagccatccaagagcttttgtccatcattgaaaaagacggttttgctgccgccggcaaacaaggcagcgtaaccgaaaaagacatctccggcgaataccacaaccacatcgtcggacacgtcaaactcaaacgcccgatgaacatcgctatcgacgcgggcaacggcgtgggcggcgcatttgcaggcaaactctaccgcgctttgaggtgcggcgttaccgaacttttctgcgacgtggacggcaatttccccaaccaccatcccgacccatccaaacccaaaaacctgcaagatttgattgccgcgctgaaaaacggcgatgccgaaatcggcttggcgtttgacggcgatgccgaccgcttgggcgtggttaccaaagacggcaacattatttatcccgaccgccaactgatgctgttcgcgcaagacgtgttgagccgcaaccccggcgcgaaagtcatcttcgacgtgaagtccacccgcctgcttgccccgtggattaaagaacacggcggcgaagccataatggaaaaaaccggccacagcttcatcaaatcgaccatgaaaaaaaccggcgcactcgtcgccggcgaaatgagcggacacatcttcttcaaagaacgctggttcggcttcgacgacggcctgtacgccggcgcacgcctcttggaaatcctgtccgcctccgataatccgtccgaagtgttaaacaacctgccgcaaagcatttccacgcccgaactcaacatcgccctgcccgaaggcagcaacggccatcaggttatcgacgaactcgccgccaaagccgaatttgaaggcgcaaccgaaatcatcaccatcgacggtctgcgcgttgaatttcccgacggcttcggtctgatgcgtgcttccaataccacgccgattctggtgttgcgttttgaggcggatacgcaagaagccatcgagcggattcaaaaccaattcaaagccgtcatcgaaagcaatccgaatctaatctggcctctgtaa

SEQ ID NO: 41081 - DNA, 1125 bp, Neisseria meningitidis
atgaccgcaaccactgcgtcttcaaccaagccttatctgcaaatccaaggtttggtgaaaaagtttggtgacaattacgctgtcgataacatcgacttggacatttatcaacacgaaattttcgctcttttgggcagttccggcagcggaaaatccacgctgctgcgtatgctggcgggtatggaaagtcccaatcagggaaaaattatccttgatggtcaggatattaccaaacttgcaccctatgatcgccccatcaatatgatgttccaaagctatgccctgttcccgcacatgagcgttgaacaaaacatcgctttcggtctgaaacaagacaaaatgcctaaaggcgaaatcgccgcgcgcgtcgaagaaatgctccgcctggttcagatgaccaaatttgctaaacgcaaaccgcaccaattgtccggcggtcagcagcagcgcattgctttggcacgcagtctggcaaaacgtccgaaaattctactgctggatgagcccctcggtgcattggacaaaaaactgcgccaacaaacccagcttgagttggtcaatacgctggaacaagtcggcgtaacctgtattatggttacgcacgaccaagaagaggcgatgacgatggcgacccgcatcgccattatgtctgacggtcagttgcagcaagtcggcacacccagcgacgtgtacgactatcccaacagccgcttcactgccgagtttatcggcgaaaccaacatctttgacggtgtggtgattgaagatcatgccgactatgccgttatcgaatgcgaaggtttggaaaaccacgtccgcatcgatcacggtttgggtggtccgagcgagcaggacctttgggttagtattcgaccagaggatattgatttatataaagaaaaacccgaatatttgggcgactacaactgggcgaaaggcacggtaaaagaaatcgcctatttgggcagcttcgccatttaccatatcaagctcggcaacgggcgcgtcgtcaaaagccaagtccccgccccttactggtatgtgcgcaacattacaccgccgacttgggacgaaaccgtctatatcagctggccggaaaaccaaccgactccgttgttccgttga

SEQ ID NO: 41082 - DNA, 3615 bp, Neisseria meningitidis
atgtctgcacccatccaagcattcgacccgctaaccgtccccattgccggcaccaacctgattgaggcctctgccggcaccggaaaaacctacggcattgccgccctgtttacgcgcctgattgtattggaacaaaaaaacgtcgagcgcgtattggtcgttaccttcaccaaagccgccaccgccgagctgaaaacacgcctgcgcgcgcgtttggacgatgtgttgcaggttttagaaagcaaagaaattgccgaacttggagacggcgcgctttcagacggcatcgccgcctattgtgcggaacaccacaaaggcgacaccttcctgcccgcactcttaaaacaggctttgcaaaaagagggccggacgcgtctgattgtccgcctcaaggccgccatcgggcaattcgacaacgccgccatctacaccatccacggcttctgccagcgcatcctgcgcgactacgccttcttgtgccaagcaccgttcgatgtcgaactgaccgaagaagacggcgaccgcctgcttatcccggcgcaagatttttggcgggaacgcgtcagcaatgatccggtgcttgccgcattggcgtttaaacgcaaagctgtgccgcaaaccgtccttgcccaaatccgcgcctacctgtcccgcccgtacctgaatttccgccgtccgcaggcggatttgaaacaggcgcagcgcaacgccgaaacctcatggcaaaccgtctgccgcctgctgcccgagctggaagccggcttttggcgcatccatcccgacctcaacggcaacagttaccgcaaaaacagcttcggcaacctttttaaagaactggcacaaaaatccgccgccggacaactgccctttctggacaaagacacgcacgacagactcttgaaacttgcgtccgacaaactcgaagccggactgaaaaaaggcaaaacgcccgatgcggcagtatttgccgaattgcagaaactggcagacttcgggtacgatttgaacgcactcgaagaagcggaagaagcaacaataatccggctgcaactggatttaatcggatacctcaaccgcagccttgccgagatgaaaaaatcgcgccgcgaacgcggtttcgacgacctgctgctcgatgtccacaccgcgctgaccgacaatccgcacgccgaaaccctcgcccgcaccgttgccgaaaactgggaaaccgcgctgatcgacgagttccaagacaccgacccgctgcaatacgaaatcttccaaaaaatcttcatcgcccaaaaccgcccgctgtttctggtcggcgatcccaaacaggcgatttacagctttcgcggagcggacatttacgcctaccttcaggcggcggaagacgcgcggcaccgctacacgctcgccaccaactaccgcagccacgccgcgcttatcggcagcataggcgcgctgttccgcctcaaagaacgcccgttcgttttggaaaacatcggctattcggaagtcggtgcggcgcgtgccgaaagcagattgtcgcccaaacgtcctgccgtacaggttcgttggctgcacgaaaacgacaatgaaaaagccaacaaagacgttttgcgccgacgtgccgccgactattgcgccgacgaaatcgcccacgcgctcaacgaagccgccggaggccgtctgaatttcaaaggctgcccgttgcagtcgggcgatattgccgtgctggtacgcacgcacaacgaggcggtgatggtttccgccgccctgaaaaaacggcaggtgcaaagcgtcctgctttcgcgcgaatccgtgttcgcctcgcccgaagccgccgccctgtccgcactcatcggcttctggctcgaaccgcgccgcgccggaacgctgcgctttgtcctgacaagcagcatattcggctataacgcgcagcaattgcacgacttcaaccaaaacgaaagcgagattttgcattgggcggaatctgcccgaaccgcgctcgacaactggaatcaatacggcattttcgccgccatgcagcaattttcccaaacacacggcatcgaaacgcgcctcttaagccggaacaacgggcgcagcctgaccaattatttccaactgctcgaactgcttgccgccgaagacgcgcaaaaccgcaaccccgccgccttgcacaagtggctgcgcgaccaaatcagcctggccggtaacaacggcggcgacaaccgatccatccgtctggaaagcgacgaagatttggtcaaaatcgttactatgcacgcctcgaaaggtttgcagtatccgctggtgtactgcccgtttgcgtgggacgcgcaagataccgggccgtccgactggcaaatcctccaccaaagcgcaaatcgaaccgaactgttggcaaaggcgcaactgtcggaagacgaacagaagcaatacgccgatgaggaaatggcggaacgcctgcgcctgctttatgtcgcgctgacgcgtgccgaggaacagctcaacatctacgccgcctattcttccgataccgccgacaaccccctcgcctacctgatcgaaggcttgccgcaagacagccgcgaaaccgtccgccgtgcctatgcgtgtgaaaaagacggcatcgcgatgctcaaacgcaactggcagcgcgtggcggacaacgccccttccggcacaaatttctccttcacagaagatgctccgccgcctgccgtatattgcggcaacgccggtcaaaccgccgaatttgccgcctccgacattcccaagcgcggtttccgcttcatccgccacaccagcttcaccgccttaagccgccaaacccaaacgcccgacggcggcgaagaagatgcctgcccgtccttggatgccgccgaaacctcggtagcggcgatgccgtctgaaacgccgacggcttcagacggcatatcgatacacaacttcccgaaaggcacgcaggcggggctgtgcctgcacgaaattcttgaagatttcaaattcggacaagcagccgccggacaggaaaccctcattgccgacaagctgaaaaaatacggttttgaagaaatatggctgcccgccgttgccgaaatggcggaagcctgccgcaaaacgccgctgacgggggcatactgcctgtccgacatcccgcccgagtgccgctgtcccgaaatgggctttaccctccacaccgaagacttcggcctcaaacggctgcgcgactggtttgcccgcgacgacatcaggctgcccgaagtctgccgtgccgccgccgaaacgctcgacttccacaccgtcaacggctttttaaacggctttgccgatatggtctgccaagaccccgacggcaatatctgcgtcatcgactacaagtcgaaccacctcggcgcggacgcatccgcctacacgcaacaggcaatggacgaagccgtcgcacaccaccactattaccttcaagcactgatttacgccgttgccgccatgcgctacttcaaactgcgcggacaaccgcccgccgccgtttccgtccgctacctgtttttgcgcggattcgatggcaaaggcggcggcgtttggcgttgggacatagatgccgccgctttggaacagataaaataa

SEQ ID NO: 41083 - DNA, 921 bp, Neisseria meningitidis
atgaccttaaccgaattgcggtacatcgtcgcagtcgcccaagaacgtcatttcggcagggcggcgcggcgttgttttgtcagtcagcccactttgtctattgccattaagaaattggaagaagagcttgccgtctctttgtttgaccggagcagcaacgatattattacgaccgaggcgggggaacgtatcgttgcacaggcgcgtaaggtgttggaagaggcagagcttatcaggcatttggcaaatgaagaacaaaacgagctggagggtgcgttcaaactcgggctgatttttacggttgcgccgtacctgctgccgaaactgattgtctcgttgcgccgtactgcaccgaaaatgcctttgatgttggaagagaattacacgcatactttgaccgagtcgctcaaacgcggggacgttgatgcgattatcgttgccgaaccgtttcaagagccgggcattgttaccgaacccttgtatgacgaaccgtttttcgtgattgtcccgaaagggcattcatttgaggaactggatgccgtttcgccccggatgctgggtgaggagcaggttttgctgctgacggaaggcaactgtatgcgggatcaggtactctcaagctgttccgaattggcggcgaaacaacgtatacaggggttgaccaatacattgcagggcagctcgattaatacaatccgccatatggttgccagcggtttggcaatcagcgtgttgccggcaaccgcactgaccgaaaacgatcatatgctgttcagcattattccgtttgagggtacgccgccaagccggcgggtcgtattggcgtaccgccgcaattttgtccgtccgaaggcgttgtcggcgatgaaggcggcgattatgcagtcgcagcttcacggggtaagttttatccgcgactag

SEQ ID NO: 41084 - DNA, 456 bp, Neisseria meningitidis
atgttcggcggcgcacacgaattaagcatcgacagtaaggggcggttggctgttcctgccaaattccgcgacattctgtcgcgcctctatacgcctgccgtagtggtaacgctcgagtcgaaacataagctgttgatgtaccctgttgcggagtgggaaaaggttgcggcgcaacttttaaacttaaaagtggcggataaccctgttttacggcggtttcaaaatcttttgctgcataacgcggaaattttggaatgggacagcgccggccgggtgctggttcctgccggactgaggaagagggtggatttcgaccgtgaagtcgttttggtcggtcgtgccaaccgtttggagctttggggtcgcgagcagtgggaggctgagatggttcaggctttggatgacgatcctgacgaacttgccttccagttgagtcagacggatttgcaattgtga

SEQ ID NO: 41085 - DNA, 1881 bp, Neisseria meningitidis
atgaatattttttacgaagagtccggccaattcaaaatcgccgccatcatccaaaaaaacgacgctacctaccaagtcgataccccacacggcaaacgcaccaaagtgaaggcgaacaacgtctttgccgagtttgacggcgatatggcggcgtttttggaaaacgcgcaggcgcaggcggcggacatcgacaccgatttattgtgggaagtgtgcggcgaagaggaatttaccgccgaagccatagccgaagaatattacggccatgcgccgaccaaaaccgagctggcggcgaccttgattgcgctgtacgccgcgccgatgtatttctacaaaaaagccaaaggcgtgttcaaagccgcgcccgaagaaaccttaaaacaggcgcttgccgccatcgaacgcaaaaagcagcaagacgcgcaaatcgacgcttgggcggaagccttgaaacgcggcgagatgccgtctgaaatcgcggcggatttgaaaaccatcctgcacgcgcccgacaagcagtcgctgacctacaaagcctttaccaaagccgccgacgcgctgaaaacctctgcctacgaattggcgaaaaaaacgggcggcattacgtccattccccaatacctgcaagacgggtttgaaatcaaatatttccccaaaggaacaggcttccccgaccttccgcttcctgaaatgcctgacttacccaaagccgacgttaccgccttttccattgacgacgaatcgactaccgaagtggacgacgctttaagcctgaccgatttgggcaatggcataaaacgcgtcggcatccacattgccgcgccgtcgcttgccattaagcaaggcgacaaaatggaaaaaaacatcatggaacgcttaagcacggtttattttcccggcggcaaaatcactatgttgcccgaaaactggattgccgcgttcagccttgatgcaggtacataccgcccttccatcagcatttatttcgatgtggacaacgagttcaacgtcggcgcgccgacctgcaaaatcgaagcggtcaacatcgctgaaaacctgcgtatccaagccatcgaaccgcatttcaacgccgaagcgggcttggacgaagcgggcgaaatgatgttcgcccaccatcaagacctgatttggttttatcaattcgccaccgccctgcaaaaagcgcgcggcaaatacgaacccgaccgcgcgccgcaatacgattacagcatcgaattggataaagaagacaacgtatccgtcgtccgccgcgaacgcggttcgcccatcgatacgctggtcagcgagatgatgattcttgccaacagcacttgggcgcaaatgctccatgacaacgacctgcccggcctcttccgcgtccaacccaccggaaaagtacgcatgagcaccaaatccgagccgcatatcggcatgggcgtgcggcattacggctggtttacctcgccgctgcgccgcgccgccgactacatcaaccaaaagcagctgatcagcctgatagacgacactgccgagccgctgtatcaaaacagcgatgccgagcttttcgccgcactgcgcgactttgatgccgcctataccgcctacgccgacttccaacgccaaatggaagcctactggagcctggtttacctgcaacagcaaggcacgagcgagctgacggcgacgattctgaaagaagacctcgtccgcatcgaaggtctgccgctagtaacacgcgcgaccggtattccgtttgacgcgctgcccaaatcacaggcattgttcaaaatcaccgaattagatgccgagaagcagtttgtctcgctcaactacatcaaggcagtcgcacccgcaggcaaaacggcaggcaatgccgtctga

SEQ ID NO: 41086 - DNA, 474 bp, Neisseria meningitidis
atgtcccgcaacaacgaagagctgcaaggcatctctcttttgggcaatcaaaaaacccaatatccgaccggctacgcgcctgaaattctcgaagcattcgacaacaaacatcccgacaacgactatttcgtcaaattcgtctgcccagagttcaccagcctctgccccatgaccgggcagcccgacttcgccaccatcgtcatccgctacattccgcacatcaaaatggtggaaagcaaatccctgaaactctacctcttcagcttccgcaaccacggcgattttcatgaagactgcgtcaacatcatcatgaaagacctcattgccctgatggatccgaaatacatcgaagtattcggcgagttcacaccgcgcggcggcatcgccattcatccgtttgccaactacggcaaagcaggcaccgagtttgaagcattggcgcgtaaacgcttgttcgaacacgacagccaataa

SEQ ID NO: 41087 - DNA, 873 bp, Neisseria meningitidis
atgagctggttagataaaatcctgccacccaaaatcaagaatcgcggaaaagacggttcttccaatgttcccgagggtctatggcacaaatgcccgtcttgttcggcaaccgtttattctaccgagttgcagcagaacaatcaggtttgtccgaaatgcaaccaccacaatccgttgtcggcacgacaacgcctgaacctgcttttggatgaggatggcagggaggaagttgccggaaatgtcaaaccgacagatcctttgaagtttaaagacggcaaaaaatatccggatcgtttgagtgcggcacgcaagctgaccggggaagatgatgctttggtggtgatgaaaggcaagatgaacggcctgcccgtcgtcgttgctgcgtttgagttccgctttatcggcggttcgatgggttcggttgtgggcgaacgattcgtacaaggtatccgtcgggcggttgccgacaattgtccgttcgtctgtgtggcggcttccggcggcgcgcgtatgcaggagggtgtaaactcgctgatgcagatgacgaaaaccagtgccgcgctgcatttgctgacggaaaaacgcctgccatttatatcggtgttgaccgatccgactatgggcggcgtatccgccagcttcgcatttttgggcgatgtcgtgcttgccgaaccgaacgcgctgatcggttttgccggtccgcgcgtgattgagcagacggtgcgcgaaacgctgccggaaggcttccaacgcgccgagttcctgctggaaaaaggcgcaatcgaccagattgtcgaccgccgcgatatgaagcggcgcatcagtgatttgattacgctgttgtgccgtcaggacaaagtttccgccgcctga

SEQ ID NO: 41088 - DNA, 1104 bp, Neisseria meningitidis
atgttgattttacaagccgaacgcgacagcctgctcaagccgctgcaagccgttaccggcatcgtcgaacgccgccacaccctgcccatcctgtccaacgtcctgattgagggaaaaggcggtcagaccaaactcttggcaaccgatttggaaatccaaatcgacactgcgggtcccgagggcggcgcgggcgacttccgcatcactaccaatgccaagaaatttcaggacattttgcgcgcgctgcctgccggtgcgctggtgtcgctggattgggacgacagccgtctgacgctgaaggcgggcaaatcgcgttttgccctgcagaccctgcctgccgccgattttccgatgatgaatgtcggcgaggacatcagcgcgactttctcgctggagcaggagcgtttcaaaaccatgctgtcgcaagtgcagtacagcatggcggtgcaggacatccgctattatctcaacggtctgctgatgcaggttgagggcagccagttgcgccttgtggcgaccgacggacaccgccttgcctatgcagcctgcgcgattgatgcggatttgccgcacgccgaagtgattttgccgcgcaaaacggtgctggaactgttcaaactgttgaacaaccccgacgatccgattcaaatcgagctgctggacaaacaggtgcgtttccaatgcaacggcacgaccatcgtcagcaaggtcatcgacggcaaattccccgatttcaaccgcgtgattcctttggacaacgacaagattttcgttttgtcccgtgccgaacttttgggtgcgctggaacgcgtgtccattcttgccaacgaaaaattccgtggcgcgcgcctgttcctgcaacccggcctgttgagcgttgtgtgcagcaacaacgagcaggaagaagcgcgcgaagaaatcgaaatcgcctatcagggcggcgaactcgaagtcggtttcaatatcggctatctgatggacgtgttgcgcaacatccattccgacgatatgcagcttgccttcggcgatgccaaccgctcgacgctgtttaccgtgccgaacaatccgaatttcaaatatattgtgatgccgatgcggatttga

SEQ ID NO: 41089 - DNA, 780 bp, Neisseria meningitidis; identical to SEQ ID NO: 36766

SEQ ID NO: 41090 - DNA, 672 bp, Neisseria meningitidis
atgacgacacaagacgaactcaagcgcatcgccgccgaaaaagcagtcgaattcgtacccgaaaacgaatacatcggcatcggtaccggttcgaccatcaactttttcatcgaagccttgggtaagagcggcaaaaaaatcaaaggcgcggtatctacttccaaaaaatccagtgaactgcttgcccaatatgatattcccgtcgtttccctgaacgaagtatcggggttggcggtctatattgacggtgcggatgaagtgaaccacgccctgcaaatgattaaaggcggcggcggcgcacacctcaacgaaaaaatcgtcgccagcgcatccgaaaaattcgtctgcattgcggatgaaagcaaatatgtttcacgtttgggcaaattccctctgcctgtggaagtcgtcgaaagcgcgcgctctcttgtttcgcgcaaactgctcgctatgggcggacagcccgaactgcgtatcggctacaccacgttttacggcaaccaaatcgtcgatgtccacggcttgaatatcgatcagccgctgacgatggaagacgaaatcaacaaaatcaccggcgtactcgaaaacggaatattcgcccgcgatgccgccgatgtgttgattttggggacggaagagggtgcgaaagtcatctatccctgccaagggtaa

SEQ ID NO: 41091 - DNA, 984 bp, Neisseria meningitidis
atgtggcggatcggaggggcaggcggtcggcaaaccgtgcgcccggcggcggcattgccgtacattataacagccaaatccgcatcctgctttcagacggcaacggctgtcaagaaaaagcggcgcgtgtacaatacgcggattgtatgtttaggacggattggaaaaaggatggaaaatatcggtaggcagcgacccatcggcgtttttgactcgggaatcggcggtttgaccaatgtgcgcgcgctgatggagcggctgccgatggagaacatcatttatttcggcgacacggcgcgcgtgccttacggaacgaaatctaaggcgaccatcgaaaatttctcgatgcagattgtcgattttttattggaacacgatgttaaggcgatggttatcgcgtgcaacacgattgcggcggttgcggggcagaaaatccgtcaaaagacgggcaatatgcctgtgttggacgtgatttccgccggcgcgaaagccgcgttggcaaccacgcgcaacaacaaaatcggcattatcgccaccaataccacagtcaacagcaatgcttatgcgcgcgccatccacagggacaaccccgacacgctcgtccgcacgcaggccgcgccgctgctcgtccctttggtggaagagggctggttggaacacgaagttacccgcctgaccgtatgcgaatacctcaaaccattgcttgcagacggcatcgatacgctggtgttgggctgcacgcactttcccttgctcaagcccttaatcggcagggaggcgcacaatgtcgcgctggtcgattccgcgattacgactgccgaagaaaccgcacgcgtccttgctcaggaagggttgctcaataccgacaacaacaatcccgactaccgtttttacgtcagcgatattcctttgaaattcagaacgataggcgagcgttttctgggcaggacgatggagcagattgaaatggtgtctttgggttaa

SEQ ID NO: 41092 - DNA, 645 bp, Neisseria meningitidis
atgactttaggtctggttggacgcaaagttggtatgacccgcgtgttcgacgaacagggtgtttctgttccggtaaccgttttggatatgtctgccaaccgcgttacacaagtaaaatccaaagatactgacggctatactgccgttcaagttacctttggtcagaaaaaagccaatcgtgtcaataaagccgaagccgggcactttgcaaaagcaggtgttgaagccggtcgcggtttgattgagtttgctttgactgaagaaaaactggctgaattgaaagccggtgacgaaatcaccgtttctatgtttgaagtcggtcaactggtcgatgtaaccggtacctctaaaggtaaaggtttctccggcacgattaaacgtcataacttcggtgcccaacgtacttcccacggtaactcccgttctcaccgcgttccaggctctatcggtatggcgcaagacccgggtcgcgtgttccccggtaagcgcatggccggccaatacggcaacaccaaagcaactgttcaaaaattggaagttgtccgtgttgatgcagaacgccaactgctgttggttaagggtgctgttccgggtgcggtcaacagcgatgttgtagttcgtcccagcgtgaaagtaggtgcgtaa

SEQ ID NO: 41093 - DNA, 1041 bp, Neisseria meningitidis
atgaacacacccatccccttctccgaacggctcatccgctggcaaaaacaacacggtcgccaccacctcccttggcaggtcaaaaacccttattgcgtctggctttccgaaatcatgctccagcaaacgcaggtcgccaccgtgttggactactatccgcgtttcttagaaaaattcccgaccgttcagacgcttgccgccgcgccgcaagacgaagtgttgtcgttgtgggcgggcttgggctattacagccgcgcgcgcaacctgcacaaagccgcgcaacaagtcgtcaggcaattcggcggtatctttccacccgaacgcaaagacttggaaacgctctgcggcgtaggcagaagtaccgccgccgctatttctgcctttgctttcaaccgacgagaaaccatcttggacggcaacgtcaaacgcgttctctgccgtgtctttgcccaagacggcaatccgcaagacaaaaaatttgaaaactcgctttggacgcttgccgaaagcctgctgccgtctgaaaacgccgatatgcctgcctatacacaagggctgatggatttgggcgcaaccgtctgcaaacggacaaaacctttgtgtcatcaatgcccgatggcagagatctgcgaagcaaaaaaacaaaaccgtattgacgagctgccccgcaaaaaaaccgccgccgaagtaccgaccctgccgctttactggctgattgtccgcaaccgggacggcgcgattttgctggaaaaacgccccgccaaaggcatttggggcgggctgtattgcgtgccgtgttttgaaagtttgaacgggctttccgactttgccgccaaattctccctgaccatggcagatatggacgaacaaaccgccctgacccaccgcctgacgcaccggctgctattgattacgccctttgaagcacaaatgccgtctgaaagcccttcagacggcatttggataaagctggcgcatttgaaagattacggtttgcccaagcctttggaaatttatttaaacggtaataggttagaataa

SEQ ID NO: 41094 - DNA, 684 bp, Neisseria meningitidis
atgtttgcccttttggaagccttttttgtcgaatacggctacgcggccgtgtttttcgttttggtcatctgcggtttcggcgtgccgattcccgaggatttgaccttggtaacaggcggcgtgatttcgggtatgggttataccaatccgcatattatgtttgcagtcggtatgctcggcgtgttggcgggcgacggcgtgatgtttgccgccggacgcatctgggggcagaaaatcctcaagttcaaaccgattgcgcgcatcatgacgccgaaacgttacgcacaggttcaggaaaaattcgacaaatacggcaactgggtgttatttgtcgctcgtttcctgcccggtttgcggactgccgttttcgttaccgccggcatcagccgcaaagtatcgtatctgcgctttctgattatggacgggcttgccgcgctgatttccgtgcccgtttggatttacttgggcgagtacggcgcgcacaacatcgattggctgatggcgaaaatgcacagcctgcaatccggcatcttcatcgcattgggcgtgctggcggcggcgctggcgtggttctggtggcgcaaacgccgacattatcagctttaccgcgcacaattgagcgaaaaacgcgccaaacgcaaggcggaaaaggcagcgaaaaaagcggcacagaagcagcagtaa

SEQ ID NO: 41095 - DNA, 285 bp, Neisseria meningitidis
atggcttttcatcacggccgccgatgccgtattacgccgcttccagaaaccgagtcattacaggagagtaaaaaaatgaacatcaacgaactgggcgcaaggatagaccgcccgaccatccgcgaactgattgcctacgcaacctgccgcaaccgccccatttcaaactcgacactgctgcgtatggaaaaagacgggcggataccgtgccgtctgaaaaccccactcacatcccccgtatgggacacccgcgaagttttggaagccctggggttacagcaataa

SEQ ID NO: 41096 - DNA, 375 bp, Neisseria meningitidis
atgatagtccttcacggcatcccaaattgcgatacggtcaaaaaagccaaaaaccggcttgccggatacggcttggagtttgaatttcgggattttaaaaaacaggtgccttccgaagcggaaatctgctcgtggctggaacaagtgcctttggcaaccctgctcaacaaacgcgggacaagctggcgcaaactcgatgccgaaacacagcaaaaagccctgttctcgacagcggaggccgtcaaactgatgtccgaaatgccgagcctgatcaagcgtcccgtattggagtgcggcggcaaggtttacgccggcttcagcgaagaaacctacgacggcatcttcaaccggcaagccccgtgcagacagggataa

SEQ ID NO: 41097 - DNA, 420 bp, Neisseria meningitidis
atgacaagccgacttactgaaatccgcaatgcggcgacagatgtgctgaaaacgaagttccagcgcgtgtattccgggcgtggtttcgcgcctgcgcaatcgcagttgccgtgtgttgtggtgtacgttgaccgtcgccgaacagaacaggaaacgtttgattttccgcctacctaccggcatacggtgcggctggttacgttggtttgcgtgcaggctgcttccggtgcggacgaactggcggaagagatgctgtctttgattgggcagttgtttgccgaacattccgatttgggtgttggtgatttggaaaatctggtgcctgatttgctgaatatcgattccgacgaaagcggcgaggccgttaccgtctattatcagcaaggatggcaggcagtttattttgaacaggccgtctga

SEQ ID NO: 41098 - DNA, 864 bp, Neisseria meningitidis; identical to SEQ ID NO: 37982

SEQ ID NO: 41099 - DNA, 1011 bp, Neisseria meningitidis; identical to SEQ ID NO: 38121

SEQ ID NO: 41100 - DNA, 528 bp, Neisseria meningitidis
atgaaacagaaaatctggtacacctacgatgacatccaccgcgtcatcaaagcattggcagaaaaaatccggaacgccgacatcaaatacgatgccatgattgccatcggcggcggcggctttattccggcacgtatgctgcgctgttttctggaaattccgatttatgccgtaaccaccgcctattacgacagcgacaacgaaggacaagttaccgaagaagtcaaaaaagtccaatggctagaccccgtccccgaagccttacggggcaaaaacgtccttgttgtcgatgaagtggacgacagccgcgtaaccatggaattttgcctgacagagctgctcaaagaagacttcggcaccatcggcgtcgccgtactgcacgaaaaaatcaaagccaaagcaggtaaaatccccgaaggcattccctatttcagcggcatcaccgtagaagactggtggatcaactatccgtgggacgcactcgacatcgacgaacacaaccgccttgccgaaagcagccgaggctga

SEQ ID NO: 41101 - DNA, 852 bp, Neisseria meningitidis
atgaacactttgaaatttaccaaaatgcacggtttgggcaacgattttatggtgattgacgcggtcagtcaggattttacccccgaggacgcgccgattgcggcatgggcggaccgtttccggggcgtgggcttcgaccagcttttggtggtcgggcgttcggaaaccgaaggcgtggatttccgttaccgtattttcaatgccgacggcagcgaggtcgggcaatgcggcaacggagcgcgttgttttgcccgttttgttgcagacaagggtttgaccgataagaaagaaatttgtgttgaaacggcaaatggcgttatttttccgaaattgtccgataacggtatggttacggtcaatatgggcaaaccgaagtttatgccgtctgaaataccgtttgtccccgaatcgggcgagggggatgatgcctgtatttacggggtgcatctcgaatccggcattcagcctgtcagctgcgtcaatatgggcaactcccatgcggtgattgtggtcgatgacgtagaatgcgcaccggtgcgcgaaaccggttcgcttatcgaaccgcacaggcagtttcccgaacgcgtcaacgtcggctttatgcagattgtcagccgaaccgcgattcgtttgcgcgtgttcgagcgcggcgtgggcgaaacccaagcgtgcggtacgggcgcgtgtgcggctgtggtggcgggtatccgtctggggttgttggatgaagggaaaacggtagaggtgattttgccgggcggaactttatatatcgaatgggcctgcggcggcgatgtgatgatgaccggccctgcggaaacggtgtttgaaggcgagttggcgtattcatga

SEQ ID NO: 41102 - DNA, 2187 bp, Neisseria meningitidis
atgggcgggccggacggcatcgacaaccgtcaggcaaaacaattggccaaccgcaccctttggctcaaaaaacaaaccgaagcccttcagacggcatccgacgacaaagccgccgcaagcaccgccatcaacgcaggcggcggactgacgggcggcggcagccttgcccaaagccgcaccatcgcactgggcgcgcccgggcaaatcaccgcgacaagccaaaacgccgtccaagaaaacagccacacccacgccatcgacaccgccaccacgacgcgcgcgggtatcgttcagctcgacaacaccgtcagcgaagccgaaaacaccgccgccaccccgaaagccgtcaaaaccgcgctcgaccaagccttggcagccgccgcggccgccaacctcaaagtctccctctccggcgaccaaaccgtcaacggccaaaaaacctttaccgcccaaacccaattccaaagcggcatccatttatccgccaaccagacgaactggaacggcggccacaaagcctacatcggcgcggatgccgacaacgcccacatcgtcttcggcgacgacaccctccgcctgcacagcgcaaacaaccgcatttcctacaacaaccacgacatcttccacaaagccaacaaaccgcgttttgccgaagacatcgaaggcaagccgaacacactgtccggatacggcatcggcaatttcaaagtcgaaaccttccggggcgatttgaacaccctcaaaacagacggcatctattccctgccgacagcggtcggcagctccaacctgcccgttgaaaacaccgcctgccatatccaagtcatcgccggcacgcaacccggctggtgcaggcagttgggttatcccgcctacacgtccgacgtgtacgaacgccaccaggtaagcagcgcaaacgacaactggtccgcatggaaaaaactcaattcggacggcatccccgtcggcgcgatcgtatcctttcccaaagccgtccgaaaccccgcaggctatttgcgggcagacggcacgacctttgcacaaaacaccttccccgacctttaccgcgccttgggcaacagcaaccgcctgcccgatttaagccgtaccgacatcggcatcaccgcgtggtttccgtccgaccaaatcccgaccggctggctggcgtttgacgacatccgcacgcgcgtaaccgaaaccgcttatcccgagctgtaccgcctgctgaccggaaaatacggcagcatccaaaacgtcccgcaggcggaagaccgctttatccgcaacgcgggcaacagcttggcagtcggaacgaagcaggaagacgaaatcaaacggcacacccacaaagtattttcacactggacaagccacacagacgtggcagccgtcggttacgaagacggcaacgaaaggcaacgcagcgcgctcgtatcgacgtggacggacgaaaatttaagcgacaacggctttttaaccccgcgcctggacagcaaaatggcgacaggcggcgacgaaaaccgccccaaagcactggttttaaaactgtgcatcaaagccgccgacaccttgggcgaagccgtgttctggataaagtcccacggcgaaaccgtcaacgccggcgcgctggacgcgggcacgctggagcaaggtttgcaagacaaagccgaccgcgaccacacccacaccgccgcccaaatccaagggctggacgaaaaaatcagcaccgccgttgccgcgcaattcacacgccaaaccatcggcggcgtggatattgtcagattccccgacggcacaatgatacagaccggcagctacaggttcacacgaagcggcggccccatagaaaacgaagtcgtcttccccgtcgcctttgccgacggcaacgtcaaatgcttcgtatccgaacgccattcggaacgcgttaccggcgatcgaaggcaacacaactggctgtttatccgcgcaaaaaaccacgccgccgccattattaccaactggtacgaaggcagttgcgactggatggccatcggcaaagccgcctcgggaaacgccgccagctccccgatagtccccgaaatacctgaaaccaacgaagaaccgcaaagagagagtggaagaacatcaaccggaccccgaaaccgccgccgccaccgagacggcttgctcgaggcactgcaagactag

SEQ ID NO: 41103 - DNA, 909 bp, Neisseria meningitidis
atgaacacgccccaatccgccatcattcccgaccacgcccaagccggcatctttatcgaagccgacttcgccgccaaccgcctcaacgatattaaagccgcctgccgcgcttcgctcgacgcgttaactgccttgaaagcccgctttccggacgatattttgggtctgaccatcgccttcggcagcaaagcctgggcaacattcggacatacggacgaaggcagtgaaatcaaacccttctccgaaatgggcaacgggcttgcgccgtccacgcagcacgatatgtccatccacatccaatccttccgccaaaacgccgcctacgcgcttgcccaatccgttttgggcgcgttcggcgacagcatatgcgtcgcgtccgaagaacacggtttgcgcctgtatcaggatcgcgggctggacggtttcgtcgacggcacggaaaacccgcagggcgatgaaaatgtccgcgaagtcgccatcatccccgaaggaaaacccgatgcgggcggcagctatgtcctgctgcaaaaatacctgcacgatttgaaaaaatgggatgccgtccccgtcgccgaacaggaggcctcggtcggacgcggcaaggaaaccgacgacgaattcggccgcgatgtccgcctgcccgattcgcacctcggccgcgtcaacctgaaagaaaacggagtcggcctgaaaatcgtccgccgcagcctgcccttcggcaaaatcagcggcgaacacggtttgatgtttaccgcatactgccgcacgctgcacaatatcgaagcgcaattattgagtatgttcggcgatacggacggcaaaaccgacctgctgctccgacatctctccgccgccgtttcgggcggatactactacgcgccgtctgtcgaacgcctgcaaaacctctaa

SEQ ID NO: 41104 - DNA, 360 bp, Neisseria meningitidis
atgctttccaacatcatccccctttccatcggtgcggcattcggtgcaactgcgcgttggctgctcaacctcgccgttcccgcatcaatacctccggccacaggcaacctgtttgccaactggataggtgcttttcttatcggaatctttgccgaaaccgtcaaccacccacaatggaagctgctgctgattaccggttttctcggcagcctgaccacgctttccggattttcactggaaaccgtaaccctgctccaatcgaatcgtcccgcttcagcacttgccaatattttcctgcacacggcaggttcgctgttgctgacttggctcgggctgaagataggggcggcagtcaaataa

SEQ ID NO: 41105 - DNA, 2658 bp, Neisseria meningitidis
atgacaagacatttgagagacattgaaaaaattatgaaaacctccgaactgcgccaaaaattcctaaaattttttgaaaccaaaggccacaccgtcgtccgctcttccagcctcgtgccgcacgacgacccgaccctgctgtttaccaacgcgggcatgaaccagtttaaagacgtattcttaggtttcgacaaacgcccgtacagccgcgccaccaccgcgcaaaaatgcgtacgcgcaggcggcaagcacaacgacttggaaaacgtcggctacaccgcccgccaccacaccttctttgaaatgatgggcaacttctccttcggcgactacttcaaacgcgacgccatccatttcgcttgggagtttctgacttcccccgaatggctcaacatccctaaagacaaactgttggcgaccgtttacgcagaagacgacgaagcctacaacatctggttgaacgaaatcggtatgccgtctgaacgcatcgtccgcatcggcgacaacaaaggcgcgaaatacgcgtctgataatttttggcaaatgggcgacaccggcccttgcggcccctgctccgaaattttctacgaccacggcgaagaaatttggggcggcattcccggcagccccgaagaagacggcgaccgctggatcgaaatttggaactgcgtatttatgcagttcaaccgcgacgaacaaggcaatatgaatccgctgcccaagccgtccgtcgataccggcatgggtttggagcgcatggcggcagtaatgcaacacgtccacagcaactacgaaatcgacttgttccaagacctgctcaaagccgttgcccgcgaaaccggcgcgccgttcagtatggaagaaccaagcctgaaagtcatcgccgaccacatccgctcctgctcattcctgattgcagacggcgtcttgccttccaacgaaggccgcggctacgtattgcgccgcattatccgccgcgccgtgcgccacggttacaaactgggtcaaagcaaaccgttcttccacaaactggtggccgatttggtcaaagagatgggcgatgcctaccctgaattgaaagaaaaacaagttcaaatcgaagaagcgttgaaaaacgaagaaagccgttttgcccaaacgctggaaaccggtatggctttgttggaaaacgcgttggctaaaggcggcaaaacactcgacggcgaaatcatcttcaaactctacgatacttacggtttcccatacgatttgaccgccgacatctgccgcgaacgcaatatcgaactggacgaagcaggcttcgagcgcgaaatggaagcccaacgcacacgcgcacgcgccgcacaaagcttcaaagccaacgcccaactgccttacgacggtcaagacaccgagtttaaaggttatagcgaacgccaaaccgaatccaaagtcctcgccctctacaaagacggcgagcaagtcaacgaattgaacgaaggcgacgaaggtgccatcgttatcgactttaccccgttctatgcagaatccggcggccaagtcggcgacgtcggctatatctttgcaggcgaaaaccgctttgaagtacgcgatacccaaaaaatcaaagcagccgtattcggccaattcggcgtacaaacttcaggccgtctgaaagtcggcgacagcgttaccgccaaagtggatgacgaaatccgcaatgccaatatgcgcaaccacagcgcaacccacttgatgcacaaagccctgcgcgacgtattgggcggacacgtcgaacaaaaaggctctttagttaccgccgaatccacccgtttcgacatttcccatccccaagcggtcactgccgaagaaatcgccgaagtcgaacgccgcgtcaacgaagccgttttggcgaacgttgccgtcaatgcagccattatgagcatggaagacgcgcaaaaaaccggcgcgatgatgctcttcggcgaaaaatacggcgaagaagtgcgcgtactgcaaatgggcggtttctctaccgaattgtgcggcggcacacacgtttcacgcaccggcgacatcggcctcttcaaaatcatcagcgaaggcggtattgccgcaggcgtgcgccgtatcgaagccatcaccggcctgaacgcactcaaatgggcgcaagagcaagagcgtttggtgaaagacattattgccgaaaccaaagcccaaaccgaaaaagacgtactggcaaaaatccaagcaggcgcggcacacgccaaagcattggaaaaagaattggcacgcgccaaagccgaactcgccgtccacgcaggcgcaaaactcttggacgatgcaaaagacttgggcgcagccaaactcgttgccgcccaaatcgaagccgacgcagccgccctgcgcgaaatcgttaccgatttaaccggtaaatccgacaacgccgtgattcttttagcggcagtaaacgacggcaaagtctccctgtgcgccggcgtatccaaaccgttgaccggcaaagtgaaagcaggcgatctggttaaatttgcagccgaacaagtcggcggcaaaggaggcggcagaccagatttggcacaggcagggggcacggatgcaggcaaattgcccgccgtgttggatagcgtgaaagactgggtcggcgcgaagctggtttga

SEQ ID NO: 41106 - DNA, 723 bp, Neisseria meningitidis
gtgtttcccgacaaatacaagttgagtttgaaagaaaatatttttttggcaaagaaagtattggttgcccaaattcacaacctcagccgttttgagaattgtcagacgaccttattgcagaccgaacaaattatccatggcaaaaatgtagcctccgcgtcactggaagacatccaaaccatcttgaacctgaaacgtgcctatcaatatgtgatttcgcatatttcaaacggcgaaccggtcgatatttcactccttaaaaaaatcaacaacattgttgccaaggacgattctttggcacccggtgatttccgtaccggttcggtcggcgtaacgctattggacggttcccgtcatgccccgaatccagtgaaggaaattgaagtggcccgcgtgttacaaaatatcggactgcaaagcggttcgacgacggaggcagccgtccgttttatgctttattgtatgcggcagcaggttttttgggacggcaacaaacgaacggcaaccttatttgccaacggtctgatgatggcggggggctgcggcatcttggaaatctccgaaatgcagatgccgcaattcaatgaaaaactgtccgcattctatcgctccggcgacgataccgatatttccaagtttgtgtatcaaaattgtatatcgggcatagactatttcggcacggacgaagatatagatttccccgacccaccaaacatgggctaa

SEQ ID NO: 41107 - DNA, 1101 bp, Neisseria meningitidis
atggaaacacagctttacatcggcatcatgtcgggaaccagcatggacggggcggatgccgtactgatacggatggacggcggcaaatggctgggcgcggaagggcacgcctttaccccctatcccgacaggctgcgccgccaattgctggatttgcaggacacaggcgcagacgaactgcaccgcagcagaattttgtcgcaagaactcagccgcctgtacgcgcaaaccgccgccgaactgctgtgcagtcaaaacctcgcaccgtccgacattaccgccctcggctgccacgggcaaaccgtccgacatgcgccggaacacggttacagcatacagcttgccgatttgccgctgctggcggaacggactcagatttttaccgtcggcgacttccgcagccgcgaccttgcggccggcggacaaggtgcgccgctcgtccccgcctttcacgaagccctgttccgcgacaacagggaaacacgcgcggtactgaacatcggcgggattgccaacatcagcgtactcccccccgacgcacccgccttcggcttcgacacagggccgggcaatatgctgatggacgcgtggacgcaggcacactggcagcttccttacgacaaaaacggtgcaaaggcggcacaaggcaacatattgccgcaactgctcgacaggctgctcgcccacccgtatttcgcacaaccccaccctaaaagcacggggcgcgaactgtttgccctaaattggctcgaaacctaccttgacggcggcgaaaaccgatacgacgtattgcggacgctttcccgttttaccgcgcaaaccgtttgcgacgcagtctcacacgctgcggcagatacccatcaaatgtatatttgcggcggcggcatccgcaatcccgtcctgacggcggatttggcagactgtttcggcacgcgcgtttccctacgcagcaccgccgaactgaacctcgatccgcaatgggtggaagcagccgcatttgcgtggttggcggcgtgttggattaatcgcattcccggtagtccgcacaaagcaaccggcgcatccaaaccgtgtattctgggcgcgggatattattattga

SEQ ID NO: 41108 - DNA, 483 bp, Neisseria meningitidis
ttggttaaaacggcagacggctacaaagccattgcccatatccgagtcggcgaccgcgtctttgccaaggacgaggcaagcggagtaacgggatacaaacccgttaccgcccaatacggcaatttgtatcaagaaaccgtttacattaaagtttcagacggcatcggcaacagccaaaccctgatttccaataaaatccacccgttttattcagacggaaaatggattaaagcggaagatttgaaaacgggaaacaggctgttatccgaaagcggcaaaacccaaactgtccgcaacatcattgtcaaaccaacaccgctcaaagcctacaatctgaccgttgccgactggcatacttactttgtcaagggcgataaggcggaaacggaaggggtttgggttcataatgagtgtccgccatataagagaccaaataacgcaacgagaaagtgtacaaggaaaaccctgcgtcgaatgcggtaa

SEQ ID NO: 41109 - DNA, 618 bp, Neisseria meningitidis
ttgagtacggatatttcggtattttgggaagttatagaccttgagatgcccgactgtgaagtcgtattgactgccaagggttataagttggacggtgcaaagggtttgaaggtcgttctacggataaccgataatgcgggaaatacgccgaaaagtgtggattatctgcaacctcttgacaaaattcccttatttgtcgagttttcggacttgcaggcacagcacatcagatgcagcgcaacactggaatccttggacttgggcggtctgcctaagtccgaacgcaagcgtgtttcgtctaaaatcagttcagacatggagattttgaacgagctgcgtggcaaaatcgtcgatacggactttattttcagggaaatttcggataaagccctgttggacgggctgcctgaactgcatggcgggcatatccttgtcgtttggcatccgcgtagcagcttgagcagggttgatacggcaaaacttttggacggattgaggggtaggttgttggcggagttgagccggtataaccttaagtttctaaatgtccccttgcattttctgactgtggaagcgtacgtttgcaggtacggatgtccaacggcttccgacacctga

SEQ ID NO: 41110 - DNA, 852 bp, Neisseria meningitidis
atgattacccatccccaattcgaccccgtcctcatcagcatcggcccgcttgccgtccgctggtatgccctaagctacatcctcggatttattctttttacctttctcggcagaaggcgcatcgcgcaaggcttgtccgtttttaccaaagaatcgctcgacgacttcctgacatggggcattttgggcgtaattttgggcgggcgtttgggttacgtcctgttttacaagttttccgactacctcgcccatccgcttgatattttcaaggtatgggaaggcggaatgtcgttccacggcggctttttgggtgtagttattgccatatggttgttcggccgcaaacacggcatcggcttcctcaaactgatggacacggtcgcaccgctcgttccgctgggtctcgcttcgggacgtatcggcaacttcatcaacggcgaactttggggacgcgttaccgacatcaacgcattttgggcaatgggcttcccgcaggcgcgttacgaagatgccgaagccgccgcgcacaatccgctttgggcagaatggctgcaacaatacggtatgctgccgcgtcatccctcgcagctttatcagtttgcacttgaaggcatctgcctgttcaccgtcatttggctgttctctaaaaaacagcggtcgaccggacaagtcgcctcgctcttcctcggcggctacggcatattccgcttcattgccgaattcgcacgccaacccgacgactatctcgggctgctgaccttggggctgtcgatggggcaatggttgagcgtcccgatgattgttttgggtatcgtcggctttgtccggttcggcatgaaaaaacagcactga

SEQ ID NO: 41111 - DNA, 975 bp, Neisseria meningitidis
atgattgccaaacacatcgaccgtttcccgctattgaagttggaccgggtgattgattggcagccgatcgaacaatacctgaaccgtcaaaaaacccgttaccttagagaccaccgcggccgtcccgcctatcccctgttgtccatgttcaaagccgtcctgctcggacaatggcacagcctctccgatcccgaactcgaacacagcctcattacccgcatcgatttcaacctgttttgccgctttgacgaactgagcatccccgattacagtactttatgccgttaccgcaactggctggcgcaagacgacaccctgtccgaattgctcaaactgattaaccgccaactgaccgaaaaaggcctaaaaatagagaaagcatccgccgctgtcgttgacgccaccattattcagaccgccggcagcaaacagcgtcaggctatagaagttgacgaagaaggacaaatcagcggccaaaccacaccgagtaaggacagcgatgcccgttggatcaagaaaaacggcctctacaaactcggttacaaacaacatacccgtaccgatgcggaaggctatatcgagaaactgcacatcacccccgccaatgcccatgagtgcaaacacctgccgcctttgctggaagggatagccgaaggtacgaccgtctatgccgacaaaggctacgacagtgcggaaaaccggcaacatctggaagaacatcagttgctggacggcattatgcgcaaagcctgccgcaaccgtccgctgtcggaaacgcaaaccaaacgtaaccgatatttgtcgaagacccgttatgtggtcgaacaaagcttcggtacgctgcaccgtaaattccgctacgcccgggcagcctatttcggactgattaaagtgagtgcgcaaagccatctgaaggcgatgtgtttgaacctgttgaaagccgccaacaggttaagtgcgcccgctgccgcctaa

SEQ ID NO: 41112 - DNA, 543 bp, Neisseria meningitidis
gtgcagagttggaaagaaaggcgcgatttcaatattgtaaagcaggatttggatttttcctgcggggcggcttcggtggtgacgcttttgaacaatttttacgggcaaaagctgacggaagaggacgtgttaaaaaaactggataaggagcagatgcccgcgtcgtttgaggatatgcggcgcattatgcctgatttgggttttgaagcgaaaggctatgccctgtctttcgagcagcttgcacagttgcaaatctccgtcatcgtgtatctgaaataccgcaaggatgatcatttctcggtattgcgcggtatagacggcaatacggtttcgcttgccgacccgtcgctgggtcatgtttcaatgagcagggcgcagtttttggatgcttggcaaacccgtgagggaaatttggcaggtaagattttggcggttgtgccgaaagggagggatgccggcggggataaggcgtttttcacacgcagtccgaaacgtcagacggagtttgcggtcggacaggtaaaatggtggcgtgcttattga

SEQ ID NO: 41113 - DNA, 735 bp, Neisseria meningitidis
atggcttcgcataatactacacatcagatgaaaacgctgtgttcttcctgttctttgcgggaactctgcctgcctgtcgggctgctgcccaacgagctcagccaactcgatgccgtcatccgtcaaagccgccgcctgaaaaagggcgaatacctgttctgtgtcggcgaagcctttacctcgctctttgccatccgttcgggcttcttcaaaacaaccgtcgccagtcaggacggccgcgatcaggtaacgggtttctttatgtcgggcgaactcatcggcatggacggcatctgttcccatgtgcacagttgcgacgcggtcgccttggaagacagcgaagtgtgcgaactgccgtttacccacatcgaagaactggggcaaaacatccccagcctgcgtacgcacttcttccgcatgatgagccgtgaaatcgtgcgcgaccaaggtgttatgctgctgttgggcaatatgcgcgccgaagagcggattgccgccttcctgctgaacctttcccaacgcctttattcccgaggttttgctgccaacgacttcatcttaagaatgtcccgcgaagaaatcggcagttatctcgggctgaaacttgaaaccgtcagccgcacattatccaagttccatcaggaaggattgatttccgtcgaacacaaacacatcaagatcctcaatctgcaggtgttgaagaagatggtatccggttgttcgcacgccatttga

SEQ ID NO: 41114 - DNA, 519 bp, Neisseria meningitidis
atgcgccttttcccaattgccgccgccctgacgcttgccgcctgcggtactgtgcaaagcacacaatatttcgtgttgcccgacagccgctacatccgtcctgcaacgcaaggcggcgaaaccgccgtcgaagtccgtcttgccgaaccgctcaaacgcggcggactggtctatcaaaccgacccctaccgcatcaacaccgcacaaaaccacgtttgggcagacaccttggacgatatgctcgaagcggcgttgagcaatgcattcaaccgtttggacagcacacgcatctttgttcctgcctcacgcagcggcagtaccgaaaaatggacggtctatatcgacgcattccaaggcagctacacgggcaaaaccctcatcagcggctacgccgtcctacccgacggtatgaacagacccttccatatcgaaaccgaacagcagggtgacggctacgccgccatgaccgccgcactcgaacagggactgaaacaggcggcgcaacagatggtcgagtaa

SEQ ID NO: 41115 - DNA, 723 bp, Neisseria meningitidis
atgaatccgcgtataaaggccatgtcgggcgtgatgctgcaagccttgtctgccgcgcagcaggatgttttggtcgatttgtggcaagtggacttgcggccgctgggcggtcgggttttctatttctgcaatcaggtcaacgagcggggtacggcggttgtctggcaggggcaggcatatgagccttatccgattaaggctgacggctttgaatcaacttcgcaaggcgcgggcaaccgtccgacgctgacggtatcgaatctcttggggttgattacgggcgcggcggatcagttcggtcagcttgtcggcgtgccggttgtgcgccgtcaaacctatgccaagtttttagatgcggtcaatttccagtccgggcgcaatccgaccgcagacccgatgcaggaagtcgtcggcaaatatttggttgaacggatgacggcattgaatgcagaaacggcaaccttcgaacttgccgcgccgtctgaatcggatggttcggtcattcccgcccgtattatgctggcaaatacctgctgctggcagtatcgcggcgaagggtgcggttatacgaggcgtgcggttgccgaccgtttcgatatgcccacggacgatgcgtccaaagacgtatgcagcagaacactgacaggatgtagggcgcggtttggcgcgacggcagttttgccgttcggcggtttcccatctagtgataaggtaacgacatga

SEQ ID NO: 41116 - DNA, 288 bp, Neisseria meningitidis
atgaacaaagaaatagtcggtattttctttataccgatgggcatcatcagcatgtgtatggccgcattgtggcagatgtatgtgatgatgaccgaaacttatacgctcaaccgtttcaaagataaagaattggtttggcgcgtggcattgttgtttatcagtttcagccttgccgtttatctgctctgtccgaattcgcgtaaaaaaggcatcgtcttttttattctcgggggaggcggtgcagccatgtatctgctggcgcggatgtggttgcctttcagcaagtga

SEQ ID NO: 41117 - DNA, 1497 bp, Neisseria meningitidis
atgttttccaactacctactcagcttggcaatatggatacccatcgccgcaggcgtgctggttttggcaacggggtcggacagccgtgcgctgcttgcccgcgtgctcgcctttatgggtgcgcttgccggtttcttggtaacgctgcccctgtttaccggtttcgaccgtttgagcggcggctatcaatttaccgagttccacgagtggattccgctgctgaaaatcaactatgcattgggcgtggacggtatttcggtgctctttatcatcttgaatgcgtttattacgctgttggtggtattggccggttgggaagttattcagaaacgcccggcgcagtatatggcggcattcctgatgatgtcgggtttgattaacggtgcgtttgccgcgcaggatgcgattctgttttatgtgttcttcgagggtatgctgattccgctgtacctgattatcggtgtatggggcggcccgcgccgcgtctatgcgtcggtcaagctgttcctctatacgctgatgggttcgctcctgatgctggttgctatggtttacctgtactatcaaacaggcagcttctctattgtcgatttccaaaacatcaaacagattccgttgggcgtacaacagcttttatttgcagcgttcttcctgtcatttgccgtaaaagtgccgatgttccctgtgcacacttggttgccggatgcccacgttgaagcgccgaccggcggttcgatggtgttggcggcgattatgctgaagctgggtgcgtatggtttcttgcgctttatcctgccgattatgccggatgcggcacgctattttgcccctgtgatcattgtattgagcctgattgccgtgatttacatcggtatggtggctttggtgcaaaccgatatgaaaaaactggtggcgtattcgtccatcagccatatgggttttgtcactttgggtatgttcctgtttgtgaacggccaattgaatgattgggcattgaaaggcgcaatcattcaaatgatttcccacggttttgtgtctgccgcgatgtttatgtgtatcggcgtgatgtacgaccgcctgcatacccgcaatattgccgattatggcggcgtggtcaatgtgatgcctaagtttgcggcgtttatgatgttgttcggtatggccaatgccggtctgccggcgacttctggcttcgtgggcgagtttatggtgattatgggcgcggttaaagtgaatttctgggtgggcgcgttggcggctatgacgctgatttacggtgcgtcttataccctgtggatgtacaagcgcgtgattttcggcgcgattcacaatccgcacgttgccgaaatgaaagacatcaactgtcgcgagtttacgattctggcggttttggcggttgcggtattgggtatgggcctgtatccgaacgcatttatcgaagtggtgcatcaggcggcaaacgatttgattgcccaagtggcgcaaagcaagatgtga

SEQ ID NO: 41118 - DNA, 942 bp, Neisseria meningitidis
atggcaatccaatggtttcccggccatatgaacaaggcgaaaaaagccatcgccgagcgtgcaaaaagcgttgatatggtgattgaaatgctggacgcgcgtatgcccgcctccagcgaaaaccccctgcttgcccagctttccaaaggcaaacccaaacttaaaatcctaaacaaacaagatcttgccgactccgaacgcacaaaggtctggcttgaccactacaacagccgccccgacacctgcgccattgccctcgattcctccgaaaccggcgcacacggcaaaatcacccaagcctgccgcgcgatgattccccaccggcaaggcatagacaaacccttgcgcgtcttgatttgcggcattcccaacgtcggcaaatccaccctcatcaacggcatgataggcaaaaaatccgccaaaaccggcaacgaacccggcatcaccaaagccgaacaacgcctcttcctcgccgatgacttctggctctacgacacccccggaatgctgtggccgaaaatcatcgtcgaagaaagcggctacaaccttgccgccggcggcgcagtcggacgcaacgcgttggacgaagaagaagtcgccctcgaacttttagactacctccgccgccactacctccctatgttgcaagaacgctaccaagccgacaaagaccccagcagccactgggacgaaaacgtttggctcgaatggatagccaaaaaacgcggcgcagtcctcagcggcggacggatcaactaccaaaaagccgccgaaaacatcctcaccgacttccgtgaaggcaaaatcggcagaatcaccctcgaaacgccgaaccaatgggaaacttggctcaaaaaagcccgtcagaaagaagccgaactcaaagccatacgcgaagccagaaaagcagagcgtaaagggcagaagccttcggaagcataa

SEQ ID NO: 41119 - DNA, 183 bp, Neisseria meningitidis
atgttcggcggtcgtctgaaaaactctccatccattaccgccaaacactttttgaaggaaaatatcatgaaatttattaacacctgccgtaaatacggcgcaaaactggctgttgtaacagctgctcccctggctttggccgcacatgcaaatgcacggcatgtactaccaagtcggaaataa

SEQ ID NO: 41120 - DNA, 369 bp, Neisseria meningitidis
atgatagacgacgaactggtcgcgcttatccatcaaaccgtattggcggatgaagcgggtttgaaagggcgggcggatatggcgcggctcgacggcgcattgtcgcggattgccaactggcggcagtatgaaaaccttgaggacatctacgaaatcgccgccctttatgcacaagccatagccaaagcccacgcctttcccgacggcaacaagcgcaccgcgcttttaacaatgttgacctatctggatttgcagggcatcagcattgccgccgaccaagggcttgacgacttgattgtcagtttggcggcgggggaaaccgacttcaaacagctcgccgaaaccctgcgccgactggataaggaatag

SEQ ID NO: 41121 - DNA, 195 bp, Neisseria meningitidis
ttgaaggcaggcttgaggcttgatgcccgtctgattgaatccgcattggattatattcattattcggaacgttttttggcttttgaaatcctgtgtacttatatcgaagatttcgatgtccggctgacggaacaagaatcccgggaaatttcttttatcaacaaggaatttgagatagaaagcacgtccgattaa

SEQ ID NO: 41122 - DNA, 474 bp, Neisseria meningitidis
atgcaagttaccaaaaatttcagtctgcgcgagttgacacgcagtgaaaccgcgcgtcgcgcaggtgtaccgaacgaaccgtcgcccgccgaaatggacaacatttattacaccgcacagcagcttgaaaaaatccgcgaatacgtcggtcgcccgattatcgtaataagttgcttgcgcagcgagcaggtaaacaaattggtcggtggcagcccgacatcggcgcaccggcacggacttgccgccgattgtgacgcatcgggtatgacctcgccggcatttgccaaactgttaatcaaaatgcgtgatgaaggcgcgctgaaattcgaccagttgatactcgaatttcccgagctcggggacggcgcatgggtacacatcggtttccgacgcaacagcccgcaacgcaaccagatactgaccgcaaccaagaaaaacggcaaaaccgtgtatctgcccgggctgcatccttga

SEQ ID NO: 41123 - DNA, 690 bp, Neisseria meningitidis
atgaagcgcaaaaatatcgcgctgattcccgccgccggcatcggggcgcgtttcggtgcggacaaacccaagcaatatgtcgaaatcggaagcaaaaccgttttagaacatacgattgggatttttgaacggcatgaggccgtcgatttgaccgtcgttgtcgtctcgcccgaagacacgtttgccgataaggttcagacggcatttccacaggttcgggtgtggaaaaacggcggacagacccgcgccgaaaccgtccgcaacggtgtggcaaaactgttggaaaccggtttggcggcggaaaccgacaatattctggtacacgatgccgcgcgttgctgcctgccgtctgaagctttgacgcggttgatagaacaggcgggcaacgctgcggaaggtgggattttggcaattcccgttgccgatacgctcaagcgcgcggacggtgggaacattagtgcaaccgtcgagcggacgagcctttggcaggcgcaaacgccgcagcttttccgcgccgggctgctgcaccgcgcattggctgcggaaaacttggacggcattaccgatgaagcgtccgccgtggaaaaattgggcatccgccctttgctggtgcagggcgacgcgcgcaatttgaaactgacgcagccgcaggacgcatacatcgtcaggctgctgctcgatgccgtctga

SEQ ID NO: 41124 - DNA, 666 bp, Neisseria meningitidis
atgacgtttaccgctgtgctcttcgatctcgacggtgtcatcaccgataccgccgaataccattaccgcgcatggaaaaagctcgccgaagaactgggcatcagcatcgaccgcaagtttaacgagcagctcaaaggcgtgtcgcgcgacgattcgctcaaacgcatcctcgcgcacggcggcaaaaccgtcagcgaagccgagttcgccgaactgacccgccgtaaaaacgacaactacgtcgagatgattcaggcagtcaaacccgaagacgtgtatcccggcattttgcccctgctggaaacattgaaagcaaacggcaaaaaaatcgccctcgcgtccgccagtaaaaacggcccgttcctgctcgaacgcatggggctgacccacttcttcgacgccattgccgaccctgccgccgtcgcgcattccaaacctgcccccgacatcttcctcgccgccgccgagggcgtggacgcagacatccgccaatgcatcggcattgaagacgccgtcgccggcgtcgccgccatcaaagccgccggcgccttgcccatcggcgtgggcaaagccgaagacttgggcagcgacatcgcgctggtgtccggcaccgccgagctgacctacgcctatttgcaaaacgtgtgggcacagtcgggcaggtaa

SEQ ID NO: 41125 - DNA, 273 bp, Neisseria meningitidis
ttgaatgtattcggattttcggcggacgatttttcagaagaggagaccacttttggcgtatggccgtgcaactggcaggcggtgcaactgtttattggagtatcgacgcagtggcgtatcggaatgtcgggtgcgacggggttggattattccgccgttgcggcggtcatggaatgcggcaatatcaagccgaagaaacggaaaacactgttggagaaaatccgcatgatggagcttgaagtgttgtcaatgtgggcaggcgaacatgaataa

SEQ ID NO: 41126 - DNA, 193 bp, Neisseria meningitidis
atgtccgcgctgctgccggctgcctgccaacacgtttcggacaggcatggcaaattccgcttccaaattctgcattgccaaaggcggcagacgggaagtaaaaaaagacgaaagcggcggcggatatgccctgtgccatttgccggacagcaggattgtcgaggagtgggaatatttccgttcacaacattga

SEQ ID NO: 41127 - DNA, 423 bp, Neisseria meningitidis
atgaatttggaacagttgggcaggcgggacgcgctgctttccggacttttgaaacaggcgggacagtggcggcggttggatgccgccgtgaaaaaactgctgcctgccaacctgcacccgcattttcagacggcatgtatcgaagacggcaggcttgtccttttggcggcaaacaatatggcggcatcgcgcttgaaaatgattgcaccgtcggtattgccgcagttggcagggcttgatgcttcgatacgctctgtttcggtcaggctggtcccgaaaccggaaaaaccgccgaaaaccaataccctgcatttgagtaaggctgcgctggagagtttcggttcggcggcggtaaagttggaaaaacggcatcccgaattggcggaggcattggcaaacttggttagaaggcatggcgcataa

SEQ ID NO: 41128 - DNA, 2847 bp, Neisseria meningitidis
atgtgcaaccatcatcccaaacattcacacgacaacgacaccatccgcatccgcggcgcgcgtacacataatttgaaaaacgtcgatttggacattccgcgccacaagctggtggtggtaacaggattgtcgggcagcggcaaatcgtcgctggcatttgatactttatatgccgaaggtcaacgccgttatgtcgagagcctttccgcctatgcgcggcagtttttgcagatgatggacaaacccgatgtcgatttgatcgaaggcctctcgcctgcgatttctatcgagcaaaaatccaccagccacaatccgcgttccaccgtcggcacggtaacagaaattcacgactacctgcgccttttgtacgcacgcgtcggcacgccgtattgccccgaacacaatctgccgttgtcgagccaaaccatatcgcagatggtcgatgccgtgttgaagctgccggaagacacgcgcgtgatgattctggcgccggcggtgcgcgagcgtaagggcgagtttgtcgacttctttgccgacttgcaggcgcaaggctttgcccgtgtgcgcgtggacggcgaagtttatcagcttgacgaagtgccgaagctggaaaaaaacatcaagcacaatatcgacgtggtcatcgaccgtgtaaaagtgaagacggagatcaagcaacggctggcggaaagttttgaaaccgcgttacgccacggcaacgagcgcgcgctggcgatggagatggacagcggcgaagaacattggttttccgcgcgtttcgcctgccccgtatgttcgtacagcctgcccgaattggagccgcgcctcttttcgttcaacaacccgatgggttcctgcccgacttgcgacggcttgggcaacaccaatttcttcgatcccgaaaaagtggtcgcccatcccgaattgtcgctggcttcgggcgcgattgacggctgggacaagcgcaaccagttctatttccaaatgattcaatcgctggcgcggcattacggtttcgacgtgcaggctgcttgggaaaccctacctgcaaaaatcaaaaaagtcgtgttgcacggctcgggcaaggaagtcattgatttcacctacctatccgaacgcggcaccaccttcaaccgcagccacgccttcgaaggcatcattcccaatctcgaacgccgctaccgcgaaaccgacagcgaaaccgtgcgcgaaaaattgcgcgaataccagaaccaccgcgcctgcccgagctgcggcggtgcacgtttgcgcaaagaagcccgctacgtttacgtcagcggcgaaccgctgcacgaagtctccgcctggccgctgaccaaaacccaccaattctttgaaacgctggatttggacggcaacaaaaaacaaatcgccgaaaagatcctcaaagaaattaccgaacgccttggcttcctgattaacgtcgggctggattacctgaacttgagccgctccgccgaaaccctttccggcggcgaagcccagcgcatccgcctcgccagccaaatcggcagcggtctgaccggcgtgatgtacgttttggacgaaccctccatcggcctgcaccagcgcgacaacgaccgcctgctcgccaccctcaaacgcctgcgcgatttgggcaacagcgtgattgtggtcgaacacgacgaagacgccatccgcgaagccgatttcgtcgtcgatatgggccccggcgcaggcgaacacggcggcaacgtactgattgccgacacgcccgaaaacgtcgccagatgcgaaaactccgttaccggacaatacctcagcggcaaaaaatccattgccgtgccgtctgaacgcacgcccgtcaatcccgaacgaatgctcgtcctcaaaggcgcgcgcggcaacaacctcaaaaacgttacccttgaactgccgctcggtttgattacctgcatcaccggcgtatccggcagcggcaaatccaccctgattaacgacaccctcgccaaaatcaccgcccgcgaactcaatcgcgcccaagaagaacccgccccatacgacgacatccgcggcctcgaacacctcgacaaagtcatcaacgtcgaccaatcccccatcggccgcaccccacgctccaatcccgccacctacaccggcctgttcacccccatccgcgaactcttcaccggcgtccccctctcgcgcgaacgcggctacaacgtcggcagattctccttcaacgttaaaggcggccgctgcgaagcctgccaaggagacggcgtgattaaagtcgaaatgcacttcctgcccgacgtgtacgtcccctgcgaagtctgccacggcaaacgctacaaccgcgaaaccctcgaaatccaatacaaaggcaaaaacatcagccaagtcctcgacatgaccgtcgaagaagcccgcgaatttttcgacgccgtccccaccgtatcgcgcaaactgcaaaccctgatggacgtaggcctgggctacatccgcctcggccagtccgccaccaccctctccggcggcgaagcccaacgcgtcaaactcgccttggaactctccaaacgcgacaccggcagaacactttatatcctcgacgaacccaccaccggcctgcacttcgccgacatcgccctgctactggaagtcataggccgtctgaaaggcaaaggcaactcgatagtgattatcgagcataatctggatgtgattaaaaccgccgattggattgtggacttagggccagaaggcggcgacggcggagggaggattattgcttcaggtagcccggaggaagtggcgaaggttaaggggagttatactgggaagtatttgaagaatatactttaa

SEQ ID NO: 41129 - DNA, 762 bp, Neisseria meningitidis
atggatgcgaataaagagccgaattgggaaaaacgtttggaaaacctgcgtcagacgcgccgtatgaaggcagtgccgacttacgcgccgctgtcccgcccctctgaaaccggaacggacgcgcctgtgccgaaactggacgatgagagccgagcccgtgtgttgaaggcgtatctgaaaaaatggcaggaggaacacaatgccgccgttgccgattgcggcgaggaagtcgaaaccgacccgatgattgtccttcaggaaaactggctcaacgcgcaggcttccctgcaaatgtcggtttcggaaaaacacatcgaatcgcggcggagaatcctgttcgatgccaaaaaagacagtgccgaatttgaaaccggacagattgaaggcggggaaaacgccgatgcggcagaatcgggtacggcggcagacggggttgcggaaaacggcgaaggcggtgcggaagaggcgttgatgcccgtccaaatcaatatcctgaatccgaaagccgtcaaccggcgcgaagtgttctgcctgtccgaacaggagctgaccgaacggctgatcaaacgcctgcgcccgcatctgaccgataccgtcaacggcatcatccgtacggcggtgcaaaagcagatggcggtttttacctatcagctccagcagatgctgcacgagcaggcgggtgcggtagtcgaagacgtgttggaacacgatgtccgcaaaatcctcaacgacatcaagtacgagttaaaatacaaacgctga

SEQ ID NO: 41130 - DNA, 672 bp, Neisseria meningitidis
gtgtttcccgacaaatacaagttgagtttggaagaaaatatttttctggcaaagaaagtattggttgcccaaattcacaacctcagccgttttgagaattgtcagacgaccttgttgcagaccgaacaaattatccatggcaaaaatgtagcctccgcgtcactggaagacatccaaaccatcttgaacctgaaacgtgcctatcaatatgtgatttcgcatatttcaaacggcgaaccggtcgatatttcactccttaaaaaaatcaacaacattgttgccaaggacgattctttggcacccggtgatttccgtaccggttcagtcggcgtaacgctattggacggttcccgtcatgccccaaatccggtgaaggaaattgaagtggctcgcgtgttacaaaatatcggactgcaaagcggttcgacgacggaggcagccgtccgttttatgctttattgtatgcggcagcaggttttttgggacggcaacaaacgaacggcaaccttatttgccaacggtctgatgatggcggggggctgcggcatcttggaaatctccgaaatgcagatgccgcaattcaatgaaaaactgtccgcattctatcgctccggcgacgataccgatatttccaagtttgtgtatcaaaattgtatatcgggcatagactga

SEQ ID NO: 41131 - DNA, 1113 bp, Neisseria meningitidis
atgagcaccttctttcaacaaaccgcccaagccatgattgccaaacacatcgaccggttcccactattgaagttggaccgggtaattgattggcagccgatcgaacagtacctgaatcgtcaaagaacccgttacctccgagaccaccgcggccgtcctgcctatcccctgctgtccatgttcaaagccgtcctgctcggacaatggcacagcctctccgatcccgaactcgaacacagcctcatcacccgcatcgatttcaacctgttttgccgttttgacgaactgagcatccctgattacagcaccttatgccgctaccgcaattggctggcgcaagacgacaccctgtccgaattgctcaaactgatcaaccgacaactgaccgaaaaaggcctaaaagtagagaaagcatccgccgccgtcgttgacgccaccattattcagaccgccggcagcaaacagcgtcaggccatagaagtcgatgaagaaggacaaatcaacggccaaaccacaccgagcaaagacaaagatgcccgttggatcaagaaaaacggcctctacaaactcggttacaaacaacatacccgtaccgatgcggaaggctatatcgagaaactgcacatcactcccgccaatgcccatgagtgcaaacacctgccgccgttgttggaaggggtacctagaggtacgaccgtctatgccgacaaaggctatgacagtgcggaaaaccggcaacatctggaagaacatcagttgttagacggcattatgcgcaaagcctgccgcaaccgtccgctgtcggaaacgcaaaccaaacgcaaccggtatttatcgaagacccgttatagtggattaaatttaaatcaggacaaggcgacgaagccgcagacagtacaaatagtacggcaaggcgaggcaacgccgtactggtttaaatttaatccactatatgtggtcgaacagagcttgggtacgctgcaccgtaaattccgctatgcgcgggcggcctatttcggactgattaaagtgagtgcgcaaagccacctgaaggcgatgtgtttgaaccttttgaaagcggccaacaggctaagtgcgcctgttgccgcctaa

SEQ ID NO: 41132 - DNA, 753 bp, Neisseria meningitidis
atgacctcatgtgaacctgtgaatgaaaagacagatcaaaaagcagtaagtgcgcaacaggctaaagaacaaaccagtttcaacaatcccgagccaatgacaggatttgaacatacggttacatttgattttcagggcaccaaaatggttatcccctatggctatcttgcacggtatacgcaagacaatgccacaaaatggctttccgacacgcccgggcaggatgcttactccattaatttgatagagattagcgtctattacaaaaaaaccgaccaaggctgggtgctcgaaccatacaaccagcagaacaaagcgcactttatccaatttctacgcgatggtttggatagcgtggacgatattgttatccgaaaagatgcgtgtagtttaagcacgactatgggagaaagattgcttacttacggggttaaaaaaatgccatctgcctatcctgaatacgaggcttatgaagataaaagacatattcctgaaaatccatattttcatgaattttactatattaaaaaaggagaaaatccggcgattattactcattggaataatcgagtaaaccaggctgaagaagataattatagcactagcgtaggttcctgtattaacggtttcacggtacagtattacccgtttattcgggaaaagcagcagctcacacagcaggagttggtaggttatcaccaacaagtagagcaattggtacagagttttgtaaacaattcaagtaaaaaataa

SEQ ID NO: 41133 - DNA, 810 bp, Neisseria meningitidis
atgaccgccctcccccgttactccgttttcggcaaccccgttgcacacagtaaatcgccgcaaatccatcagcaatttgcccttcaggaaggcgttgacattgaatacgaacgcatttgcgccgacatcggcggttttgcacaggcggtttcgacattttttgaaacaggcggttgcggggcaaacgttaccgtaccgttcaaacaggaagcgtttcatctggcggacgagcattccgaacgcgcattggcggcaggtgcggtcaatacgctgattccgttgaaaaacggcaagctgcgtggcgacaacaccgacggtttgggtttggtcggcgatatagtgaaggtgcaacacacagaaattgaaggcaaaaatatcctattgctcggcgcgggcggcgcggtgcgcggcgtgattccggttttgaaagaacaccgtcctgcccgtatcgtcattgccaaccgtacccgcgccaaagccgaggaattgtcgcggcttttcggcattgaagccgtcccgatggcggatttgaacggcggttttgatatcatcatcaacggcacgtcgggcggtctaaacggtcagattcccgatattccgcccgatatttttcaaaactgcgcgcttgcctacgatatggtgtacggctgcgcggcaaaaccgtttttagattttgcacgacaatcgggtgcgaaaaaaactgccgacggactgggtatgctagtcggtcaagcggcggcttcctacgccctctggcgcggatttacgcccgatatccgccctgttatcgaatacatgaaagccatgtaa

SEQ ID NO: 41134 - DNA, 453 bp, Neisseria meningitidis
atgattattggcggaatcggtggtgcaaggacacaaacaggactcagattcgaagaacgtacagacttacgaacgttgtttgaagaaattcccgggtacgacttaagaaaaacatatgataatgcgggttatgaagtttggttcaatggagaattgaaggcttattgttttaaaaaatatgagttttaccgatttttgaaaagaccgggatacaatattaattggaaagaccatctgtctaaaagattactacccgacaatggcttatttatcatcatccgtgataccttatttattattgagatcaaattccaacaaactcccggttcagtagatgagaaattacaaacttgcgattttaagagaaaacaatatacaaaattggttcactctttaggttggcgggttgaatatgtctatgttttgaatgattggtttacaaagccggaatat

SEQ ID NO: 41135 - DNA, 867 bp, Neisseria meningitidis
atgatgaaaaccttactgccctttttcggcgtggtgcgcgtcagcggcgaagaccgccaaaccttcctgcacggacagctttccaacgacatcaaccaccttcagaccgggcaggcgtgttatgcgacttacaacacgcccaaaggccgcgtcatcgccaatatgattgtcgtcaaccgaggcggcgatttgctgctgattatggcgcaagacctgcttgaagcaacggtcaaacgtttgcggatgtttgtgttacgcgccaaagccgtttttgaaatccttgaagattacgccgtcggcgcggaattagaagcatccgccgaaccgcttgccgcgcaagaacccagcctcgcctttaccgccgaatgcggttcagacggcatctgttccgtcgtcctgccacatcggggcattttgcacatcgcccccaaaaacgccttgccgccttatgatgccgccgccgaaaacgcgtggcggctgcacgaaatccgtagcggttatccgtggatatgcgcggctaccaaagaaactgccgttgcccaaatgctcaaccagcacatcatcggcggcgtacacttcaaaaaaggctgctatcccggtcaggaaatcattgcccgtgcccagtatcgggggcaggtcaaacgcggcttggcggtattgtcgggaaattcggcagccgaagcaggcatcctgctggcggcagacggcgaagaggccggcatcgtactcgacagcgttcaagattcggaaaactttaccgcccttgccgtgattaaattctccgccgcacaaaaaacactgtccgccccaaacggcggcagcttcaaagccgtccgcaccttctttaaaaccgaaggtgcggaataa

SEQ ID NO: 41136 - DNA, 969 bp, Neisseria meningitidis
atgaaactcaccctcgccattccctcgctcaatttggataaagacgaaacccgaatacctctctgcctgcacgccttcaacaaaatcctgcaatacggctcgctgcaccgccaaagctgcacggcttcggcattttacgcgcgttatttgtggtgcggcagactggcggaacgcgcggcgcaaagcctgaatatgccgtctgaaaccgtcgcgctcgccacgcccgtctggcaaaagatggggatgcatcaggcaaatgtgctgacggcggaatatttggatgtcggtacggatgaagcggaacggctctgccgcgacctgtcggcgttttacggcgatattccgtggcgtttcgttcccgtcctgcccgaattatggctggtttcccttccccgcgcgtaccgctggggcgcgaagcccgttttggacttgggcggactgttgggtgcggacgatcaaccggacggggaagacgcgttggaatggctgcgcgtccaaaccgaaatccaaatgtggctggcggcgcaccccgtcaaccataaccgcaagaaacgcgggctgcccgagttgaacggcttatggctttgggacagtctgcacggaagcagtcaaggcggcacgcttttcgccgatacggtttggagccgtttccaccccgaccgccgcgcattgcccgacaacttccgcgcctatgaagaaacggcggcacacctgcccgacacgcaccatatcctgtttatggacgatttgcgcctgaccgccctgacaggggacagggagcggtatgcatcggttttacagcagtgggaagaacactggttcgcaccgatctacgaagccgtccgtaccggcaaaatcaaacggctggacatcaccacggacggacaacacggcggtacgctgaccttcaaacccgccgacaggtggaaattttggcgcggcgcgaaaacctttgacggaatctggtga

SEQ ID NO: 41137 - DNA, 420 bp, Neisseria meningitidis
atgaatctcgtgaaactgctggcgaataactggcaaccgattgccattatcgcgcttgtcggcacgggtttggcggtgtcgcaccatcaaggctacaagtcggcttttgcgaagcagcaggcggtcattgacaagatggaaaaagacaaagcgcaagccctgctgttgtcggctcaaaactacgcccgcgagctggaacaggcgcgtgcggaagctaaaaaatatgaagtcaaggcgcacgccgtcggcatggctttggcgaaaaaacaggcggaagtcagccgtctgaaaacggaaaataaaaaggaaatcgaaaatgtccttactcaagaccgtaaaaatgcaggcggcggttgtattgacggctttggccatcacggcttgcagctctacaagcgcgccctcggctacggaaattaa

SEQ ID NO: 41138 - DNA, 567 bp, Neisseria meningitidis
atgttattgaaaaacatccttccattcgcccattgccttttgcggcaggcacttcccgaaggcggcaatgcgctggacggcaccgccggcaacggacacgacacccttttcctcgcacaaaccgcaggcatccgggggaaagtgtgggcattcgacatccagccgcaagccctgagccgcactcgatgccgtctgaaagaagcgagatacgagaatgtgcaactcatcttagacggacacgaaaacctgaaacaatatgtttcagaaccactaaatgccgccattttcaactttggctggctgcccggcggagataaaagccttaccacccatacggaaaccagcattcccgccctttgcgcaaccctctccctgctgaaagaaggcggtatgcttattgccgtcctctatccgggacacgaaaacggcaaacaggaggcagaagcaatcgaacaatgggcaaaaaacctgcctcaagaacagtttgccgttttgcgttacggctttaccaaccggaaaaacagcccgccctatcttttggcatttgaaaaactgcgtcaaaaataa

SEQ ID NO: 41139 - DNA, 225 bp, Neisseria meningitidis
gtgggatgcagggtgtgcttcagcccgctgcatcaaaaatttttggagaaccggcgggagtcggcggttttggtttcggcggggacggtggaaatgggtaacattgacggaatcgacggaagcggtggactgaagcccacccttgtatattggaatcaccgtatcatagcaacaaaccgcccgaccgccacccgcgcccacccaaggcagacaaccgttgcgtag

SEQ ID NO: 41140 - DNA, 456 bp, Neisseria meningitidis
atggcatactctgcggacttaagaaacaaagctttaaactatagtggattaaatttaaatcaggacaaggcgacgaagccgcagacagtacaaatagtacggcaaggcgaggcaacaccgtactggtttaaatttaatccacgatattacgaacaatgcaaaaacatcagccaaaccgcagcaacgtttaacttgtcaagaaacacgctttacctgtggattcgccttaaaaaacaaacaggcagcctaaaacatcaagttaccggtctaaatgccgtcaaatcggataggcaaaaaccggctcaatatattgggcaacaccaggatgcctatctgcatgaaatcgccaaacattttgattgtacggcagccaccgtttgctatgcactcaaacagatggggataacgcgcaaaaaaagaccaccacttacaaagaacaagacccggccaaagtaa

SEQ ID NO: 41141 - DNA, 126 bp, Neisseria meningitidis
atgcaggttctgtcttcactcaaaaccgccaaacaacgccaccgcgactgtcagattgtcagacgcaaaggcaaagtttacgtcatctgcaaaagcaatccgcgttttaaagcgcgccaacgctga

SEQ ID NO: 41142 - DNA, 1341 bp, Neisseria meningitidis
atgaccgacacagccggtctgcgccgccgcaacctgcggcaatggatagcagaacactacggcggtttgcaaacccgttttgccgaagccgttgccctcaacacaggcgaactctccgcccttttgaaaaacaaatccttcggcgagaaaaaagcccgtaaaatcgaacaggcggcaaaaatgcccgccttctggctcgataccgaacacaccgcccgcccgcccgaacacacaggaaaacacaccatgtcccatatttcccccatccccgaaatcctagccgacatcaaagccggcaaaatggtcatcatcaccgatgccgaagaccgagaaaacgaaggcgacctgctgatggcggcgcaattcgtcacgcccgaagccatcaacttcatgatcaaacacgcgcgcggcttggtctgcctgccgatggacggcgaaatggtcgaaaaactcgggctgccgatgatgacccaaaaaaacggcgcgcaatacggcaccaactttaccgtctccatcgaagccgcacacggcattaccaccggcatttccgccgccgaccgcgccctgactattcaaaccgccgtttccccgaccgccaaacccgaagacatcgtccaacccggtcatatctttccgcttcgcgcccaaaaaggcggcgtactcgtccgcgccggacacaccgaagccggcgtcgacctggcgcaaatgaacgggctgattcctgccgccgttatttgcgaaatcatcaacgacgacggcacgatggcgcgtatgcccgaactgatgaagtttgccgaagaacacaagctcaaaatcggcaccattaccgacctcatcgaataccgcagccgtaccgaaagcctgctcgaagacatgggcaatgcacctgtacaaaccccgtggggcgagttccaacaacacgtttacgtcgacaaactctccggcgaaacccacctcgccctcgtcaaaggcacgcccgccgccgacaccgaaaccctcgtccgcgtccacgaacccttcagcgtgatggacttcatccaagccaatccgcgccattcatggtcgctgcccaaagcccttgagcgcatccaacaagccgaaagcggcgtcgtcatcctcttacaccgcgccgaagacggcgcatccctgctcgaccgcaccctgcctaaaggcgcaaaccaagcctacaaatgggacagcaaaagctacggcatcggcgcacaaatcctcgtcggcctcaacgtcaaaaaactgcgcgtcctcgggcagccctcatctttcaccggcctgaccggcttcggtttggaagtcgtcggctttgaagaagcagaaaacaaataa

SEQ ID NO: 41143 - DNA, 1794 bp, Neisseria meningitidis
atgaaaaatatccgaaatttctccattatcgcccacatcgaccacggcaaatcgacgcttgccgaccgttttatccaatattgcggcggcttggatttgcgcgaaatgagtacgcaggtgctcgattccatggacatcgaaaaagagcgcggcattaccatcaaagcgcaaaccgccgcgctcaactacaaagcacgcgacgggcaggtgtatcaactcaacctgattgacacgccgggacacgtcgacttctcttacgaagtttcccgttcgctgtcggcttgcgaaggcgcgcttttggtcgttgacgcgtcgcagggcgtggaagcgcaaaccgtggcgaactgctataccgcgattgatttgggcgttgaagtcgtgcctgttttgaacaaaatcgacctgcccgccgccgaccccgagcgtgtggaacaggaaatcgaagacatcatcggcatcgatgccgtcggtgcagtacagtgttccgccaaaagcggtatcggcgtggaagatgttttggaagaaattgttgccaaaatccctgcgccgaccggcgacgaaaacgcgccgctgcaagcggttatcgtcgattcgtggtttgacaactatgtcggcgtggttatgctgattcgagtgaaaaacggcaccatcaaactgaaagacaaagtgcgctttatgagcaccaaggcggaaacgcaggtcgagcagctgggcgtattcacaccgaaatcagttcaaaaacaagaactaaaagccggcgaagtgggctttttgattaccggcgtaaaagaattgggacaggcgaaagtcggcgatacggttactttggttgccaaccctgccactgagccgctgcccggtttccaagaggtgcaaagccaggtattcgccggactttatcccgtagaaagccacgactacgaagctttgcgcgatgctttggaaaaattgcagcttaacgatgcttcgttgaaatttgagcctgaggtttcccaagcattgggtttcggcttccgttgcggcttcttgggtctgttgcacttggaaatcgtgcaggaacgcttggagcgcgagttcgatatggatttgattaccaccgcgccgacggtgatttatgaagtcgtgttgaaaagcggcgaaaaaatcgaagtcgaaaatccgtccaaactgcccgacatcggcagcatcgaaaccatactcgagccgattattaccgcaaccatccttgtgccgcaggaatatgtcggcaacgtcatgactttgtgtaaccaaaagcgcggcgttcaggtcaatatgcaatatatgggccgccaagtcatgctgacttacgatttgcccatgaacgaagtcgtcatggacttcttcgacaaactcaaatccacttcgcgcggttatgcttcgttggactaccatttcaaagagttccaaccgtctgatttgattaagctggatattatggtcaacggcgaaaaagtcgatgccttaagcctgattgtgcaccgtcaaagcgcggttcaccgaggccgcgagctggcatcgaaaatgcgcgagctgattccgcgccaaatgttcgacattgccgtccaagccgccatcggcagccagattatcgcccgcgaaaacgtcaaagcactgcgtaaaaacgtcttggcgaaatgttacggcggcgatattacgcgtaagaaaaaactgcttgaaaaacaaaaggcaggtaaacgccgtatgaaacaagtgggcaatgtggaaattccgcaaagcgcgttcttggcgattttgcaggtgagcgacaaataa

SEQ ID NO: 41144 - DNA, 369 bp, Neisseria meningitidis
atgaatccgaaaaccttgagccgtttgtcgctgtgtgcggcggtcttggctctgaccgcctgcggcggcaacgggcaaaaatccctgtattattacggcggctatcccgataccgtctatgaaggtttgaaaaacgacgacacttcgttgggcaagcagaccgaaaagatggaaaaatactttgtggaagccggcaacaaaaaaatgaatgccgccccgggtgcgcacgcccatctgggactgctgctttcccgttcgggagacaaagagggcgcgttccgccagtttgaagaagagaaaaggctgtttcccgaatcgggcgtatttatggacttcctgatgaaaacaggtaaaggaggcaagcgatga

SEQ ID NO: 41145 - DNA, 483 bp, Neisseria meningitidis
atgaaatacttgaatcttgccgcaatcacccttgccgccacatttgccgcacataccgcctcggcagacgaactggccggatggaaagacaacaccccacaaagcctgcaatcactcaaagcccccgtacgcatcgtcaacctttgggcaacctggtgcggcccgtgccgaaaagagatgcctgccatgtccaaatggtacaaagcgcagaaaaaaggcagcgtcgatatggtcggcatcgcgctcgacacatccgacaatatcggcaacttcctcaaacaaactcctgtttcctacccgatttggcgttacaccggggcaaacagccgaaactttatgaaatcctacggaaacaatattggcgtactgccctttaccgtcgtcgaagcaccgaaatgcggatacaggcagaccattaccggggaggcaaacgaaaaaagcctgaccgaagccgtcaaactcgcccattcaaaatgccgttaa

SEQ ID NO: 41146 - DNA, 723 bp, Neisseria meningitidis
atgccgtctgcaccgtcggcgcctgttcagacggcattattgtttcaaccgacaaaggacatccacaccatgcaggataatgctttgaccatcgccttatccaaggggcgcatttttgaggagacgctgccgctgcttgccgctgccggcattgttccgactgaagagcctgaaaaatcgcgcaagctgattatcgggacgaaccatgaaaacatccgccttgtcattgtccgcgcaaccgatgtgccgacttatgtccgctacggcgcggcggacttcggcattgcgggcaaagacgtgctgatcgaacacggcggcacggggctttaccggcctttggatttggagattgccaagtgccgcatgatggttgctgtgcgtaaagggtttgattacgaagcagcttcgcaacccggatgccgtctgaagattgccacaaagtatcctgaaatcgcggcatctcattttgccggcaagggtgtccatgtggacattatcaaactgtacggctcgatggaacttgcgccgctggtcggcttgagcgatgcgattgtggacttggtttcgacgggcaacaccttgaaggcaaacggcttggaagcagtcgaacacatcgtcgacatttccagccgcctggtggtcaacaaggctgctttgaaaacgaaatacgcgctgctggagccgattattcaggcgttcggcggcgcagtgaaggcgaagtaa

SEQ ID NO: 41147 - DNA, 417 bp, Neisseria meningitidis
atggcaaagctgacagaacaagatattttgaattggaacgggccggaagacgattatatgaatgacgagcatttggcttttttccgcgaattgctggtaaaaatgcaagacgaactcatcgaaaatgcttccgctacgacagggcatctccaagaacacgaatcagcccccgatcctgccgaccgtgccacacaggaagaagagtacgcattggaactccgtacccgcgatcgggaacgaaaacttctcagtaaaatacaggcgaccatccgcaatattgatgaaggggattatggattctgtgccgatacgggagagcctatcggtctgaagcggctgctggcacgcccgacagccactttatctgttgagtcccaagaacgccgagagaggatgaaaaaacagtttgccgactga

SEQ ID NO: 41148 - DNA, 1593 bp, Neisseria meningitidis
atggtgatttccaacccccgcgaacttgaaaaactcaaagaccggattcccaatctgatcaacatcgcccgcatcgccatcgtcctccccctgctgattatgcatatcttcgggttggaggtcagcgggcatgaaaacctgtacgcctcatggacgacatgggcattttacttgtggctcgccatttcctgctggatgattttcttttccaccctcaatccgcaatggcaatggcaggctttgaggataccgagtttcagtgccgtggccgacatcacgatgatcggcgtgctgacctacctgttcggcggcatcgattccggcttcggcatcctgatcctgcccttcgtgggcagctcctgcctgctcagttacgggcgttatcccctgctctatgccagctacgccgccatcctactgatattgaatgcccttgcagacagcaatatcaatatgtatccgctgattctgggtgcaaaaaccgtcgcccacacctttatcctcgtagccggttcctatttcgccgccatgattgcctcgctatcggtcagatacatcgaccgtgccggcaaacttgcccatgaaaaccacgccgcctaccgccgcatcaggggcttgaaccaaatcgtgctcaaccgcgttcaggaagcggtcgtcgtcatcaacgtcgagcatcagaccatactgttcaataaaaaggcaaaagatctgctccccatgcttgaaatcggacagcatactgccctattcgaccctgtcgccgtcttatgggacaaggcctcttcgcgtactttcgaacgcaatatcgacacgcccgccctgaccgcccgcatccgcgccgtgccgatgaacaaagagcagaacaagctgctcatcctctacatccgcccgcaaagcgaaattcaggcagaagccctgtccgtcaaacttgccgcactcggacaactgaccgccaacctcgcccacgaaatccgcaaccccatgtccgccattcgccatgcaaacgacctgttgcgcgaaaatgcagaggaagaagaaaccgacccgttcaaggtcaaactttgcgaaatcatcgacggcaacgtccgccgtatcgacaaaatgctcgaagacatctcctcgctcaacaaacgcaacaaaaccgaacgcgaagccatcgacctgataccgttttgggaagaattcaaacaagagttcctgctcggccatcccgatgtcgccggctgcatccgtccggacattcaaggcggcagcccgaccgcctatttcgatcccgcccacctgcggcaaattatgtggaacctcgccaacaacgcgtggcggcacagccgcaaacagcccggctcgatttccgtcaccatccgccccgcgcaaaaaaacaccgtctgcatcctctttgccgacgacggcggcggcgtgccgcccgaagtgcaggaacacctgttcgaacccttttacactacggcggaaaacggcaccggcctcgggctgtatgtcgcccgcgaactggcacacgccaacttcggcgatttgacctacctgcccgaaaccaaatgtttcaaactcacattaccggaaaaaaccaatgactga

SEQ ID NO: 41149 - DNA, 918 bp, Neisseria meningitidis
atggaaaaagcagaacatttgaacagcagccggttcgtcaatctagtcaaaagcggcggcggcagctatgtggagggcagctaccgtttcgatactttgtccaacggcatttccatccacggcggcacagtaacggcacggtgtgatttttgcagcagccgcctcgccgaaccttatgtgtcgttcgtgctgttgctggaaggctctttgaacttcggcatcaaccggagccgattccaaatcgatgcggacggtggcaagatcgtcctgattgctgtcggggaagaagtcttgttcagccgctatctttaccgaggcggcaaaacggtcaaaatgacaattaaaggtatggagcaatggctgctgcgtccggagtatgcgtgttttacacccatactttaccgcgaaccggtcagaatatggaatttgtccccaaacctgcgcggtttggcggcatcctgcctgcaagccgtcccaaaggggcatttgggcgaaacattgcgccgcgaggcggacgttttgcggctgctgtcggatttgtgggacacggtttcagacggcatcgggccggcggcggggcaaacggcggaagcagacgctatgccgtctgaagacttcagccgcaccctaaatgccgcgtttgccgacggcgcacaccaagtcaaccggctggcagacgcgctgaacatcagcgaaaggacgctgcaacgccgtatgcgcgaccatttcggcattaccgcaagcgagtggctgcaccacaaacaaatgcagcacgcgctctacctgttgcaaaacgggggcaaaagcataggcgaaaccgcgtatttgtgcggctaccgccacgtttccagctttactcaggcattcaggcaatatttcggcagcacgcctgcggaaaccaaaaaagaaaaccggtaa

SEQ ID NO: 41150 - DNA, 927 bp, Neisseria meningitidis
atgaacactactaacttaaatccaaatattactcttcctaacgggtataatcgtataaaacattcaaaagcatcagaagaatacattgtcgttgaatttaaatatcaagaaattatatggaaaggttggatacctcttgaatatcggagaacaggagtatctattccatacaataaaactaatcaatcagatgttaacgcttatttaaatcttgtttatgagaatatgaatccagtgaatcatgagacttggttaaatgatcaaaatgggttttgggaagacagtaaagcaaaagtgactaaaccattttttgaatgcttaaaaacaggtggatggaaatgtgtaaaatgcactttaccttctaatccaaattgggcacgtaggatacaagacttaaaagaaatgggttatacactttctacaaacacaaatcagttttgtaataattgcaaagaaaatacgacacatttattgcttgtaccaattaaacgtggaaatttattaggaaacggatatgagacatggagtaaagaactacgtaaacgaatattagctgtattgaataatattgatgtttacgaaaataaatttaatactcatgtgttacctgatcataaattttctgagattcgttgggatgataatacgaagtcacaaaatccagatgatatgactgatgatgaaattaaacagaaatttcaattattaagcaatcaacgtaatcaacaaaaacgtgaagtatgccgtacttgttttcaaacaggaaaaagaggagttatttttggtattccattctggtataaaggaactgcagattgggataaaagtattccaactaaaggtaaaaatgcagaacaaggctgtattggttgtgcttggtacgacattgaagcttggcgtaacgaattagttaaaagattaaaataa

SEQ ID NO: 41151 - DNA, 1299 bp, Neisseria meningitidis
ttgaagatttcggaagtattggtaaaagtgggcgacggtgtccacactctgctgctcgacaggccgattgtgcgcgacggcaggaaattcgacgcgccgcttttgtggatggtggtgctgatgacggcgttcagcctgctgatgatttattcggcttctgtgtatttggcatcaaaagaaggcggcgatcagtttttctatttgaccagacaggcggggttcgtcgttgccggcttgatagcgagcggtttgttatggtttctttgcaggatgaggacatggcggcggcttgtgccgtggatttttgccctatccggcctgttgctggtagtcgtattgattgccgggcgcgaaatcaatggcgcgacccgttggatacctttgggtccgttgaatttccagccgaccgagctgttcaagctggcggtcatcctttatttggcaagcctgttcacgcgccgtgaagaagtgttgcgcagcatggaaagtttgggttggcagtcgatttggcgggggacggccaatctgatcatgtccgccaccaatccgcaggcacgtcgtgaaacattagaaatgtacggccgtttccgggcgatcatcctgccgattatgctggtggcgttcggtttggtgctgataatggtacagccggatttcggttcgtttgtcgtcattaccgtcattgccgttggaatgctgtttttggcaggattgccgtggaaatattttttcgtcctggtaggcagcgtcttgggcgggatggtgctgatgattaccgccgctccctaccgtgtgcagcgggtagtggcatttttggacccgtggaaagaccctcagggtgccggctaccagcttacccactctctgatggcaatcgggcgcggagagtggttcggtatgggtttgggtgcgagtttgagcaaacgcggctttctgccggaagcgcataccgattttatttttgccatcatcgccgaagaattcggtttcttcggtatgtgcgtgctgatattctgttacggctggctggtggtgcgggcgttttccatcggcaagcagtcgcgcgatttgggtttgactttcaacgcctatatcgcttcgggtatcggcatttggatcggtatccaaagtttcttcaatatcggtgtgaacatcggtgctttgccgaccaaaggtctgacgctgccgttgatgtcctatggcggttcgtcagtctttttcatgctgatcagcatgatgctgctgttgcgtatagattatgaaaaccgccggaaaatgcgcggttatcgggtggagtaa

SEQ ID NO: 41152 - DNA, 1431 bp, Neisseria meningitidis
atgacctgggaaaccgtaatcggcttggaaatccacgtccaattgaacaccaaatccaaaatcttcagcggcgcatcggccgcattcggcgcagaacccaacgcgcacgccggcgtagtggaatgtgctttgccgggcgtactgccggtaatgaaccgagaagtcgttgaaaaagccatcaaattgggtttggctttagatgcgaaaatcaaccggaaaaacgtgttcgaccgcaaaaactacttctatcccgacttaccaaaaggctatcaaatcagccagttggacttaccgattgtcgaacacggcaaattggaaatcgtagtcggcgacaatgtgaaaaccatcaacgtaacccgcgcccatatggaagaagacgcgggcaagtccgtgcatgaaggcttgaacggcgcgaccggtatcgacctgaatcgcgccggcacgcctttattggaagtcgtatccgaaccggaattgcgctccgccgccgaagccgttgcctacgccaaagccttgcacagcttggtaacctggctggacatttgcgacggcaatatggcggaaggttcgttccgcatcgatgccaacgtatccgtgcgcccgaaaggtcaagaagagttcggcacgcgccgcgagattaaaaacctcaattccttccgtttcttggagcaggcgattaattacgaagcagaagcgcaaatcgagattttggaagacggcggcaaagtacagcaggcaaccatgctgtttgatcccgaaaaaggcgaaacccgcgtaatgcgcctgaaagaagacgcgcaagactaccgctacttccccgaccctgatttgctgcccgtcatcatttcagacgctcaaatgcaaaaagccaaagcagaaatgcccgagctgccgaaagaaatggcagcgcatttcgtggcggattacggcgtgtccgaatacgacgcgcgcctgctgaccgcaagccgcgcacaggccgcctattttgaagaagccgccaaagagagcggacaaggcaagccgactgccaactggatgaacggcgaactcgccgccgcgctgaacaaagccggcctggaacttgccgacagcccgattaccgccccgcgcctcgccgcgctggtgggcaaaatcgccgacggcacattaagcggcaaactggcgaaaaaagcctttgaggctatgtgggcggaacccgaagccaccattgccgaaatcatcgaaaaacacggcttgcagcagatgaccgataccggcgcagttgaagccattgtggacgaagtgctggcaaacaacgccaaagccgtggaacaattcaaatccggcaacgaaaaagccctgaatgcgattgtggggcaagtgatgaaggccagcaaaggcaaagccaatcccgcgcaggtgcaggagttgattaaagccaaactcgcctga

SEQ ID NO: 41153 - DNA, 477 bp, Neisseria meningitidis
atgccgatagaaatcgaacgccgttttttgattgaaaacgacaactggcggcaatacgccgatgagccgctgctgttgaggcagggttatctgtctgttgaaaaagaacgcaccgtccgtgtccgcattgccggaaaacgggcgtggctgacgctgaaaggctatatttcagaaatcagccgcagtgagtttgaatacgaaatcccgcttgccgatgcggaaaagatgatggaaacgatgtgtccgtttaagatggaaaaacggcgttatctggtcagatggggcggcagcctgtttgaagtcgatgttttccttggcgaaaacgcgcccctggtcgtcgcggaaatcgagttgcccgacgaaaatgccgattttgaccgtccggactggctggggcgcgaaatcactgccgacggtatgtttaccaatgcttatttgagcaaacacccgttctcaagctggaaaaatgccgtctga

SEQ ID NO: 41154 - DNA, 606 bp, Neisseria meningitidis
atgattttgctgcatttggattttttgtctgccttactgtatgcggcggtttttctgtttctgatattccgcgcaggaatgttgcaatggttttgggcgagtattatgctgtggctgggcatatcggttttgggggcaaagctgatgcccggcatatggggaatgacccgcgccgcgcccttgttcatcccccatttttacctgactttgggcagcatattttttttcatcgggcattggaatcggaaaacagatggaaacggatggcaggcagaccccgaacatccgctgctcgggctttttgccgtcagtaatgtatcgatgacgtttgcttttgtcggaatatgtgcgttggtgcattattgcttttcgggaacggttcaagtgtttgtgtttgcggcactgctcaaactttatgcgctgaagccggtttattggttcgtgttgcagtttgtgctgatggcggttgcctatgtccaccgctgcggtatagaccggcagccgccgtcaacgttcggcggctcgcagctgcgactcggcgggttgacggcagcgttgatgcagatctcggtactggtgctgctgctttcagaaattggaagataa

SEQ ID NO: 41155 - DNA, 323 bp, Neisseria meningitidis
atgaatgaacacaacctgttaattttctgtttaaaagacaatgtttcaattagtgaatatactgaaatgattgattgggcttataaaaacattcaatctgaaacagttgtagaaattacggaaagtcaaattattgaatatcaaaatcgtggattatggagacttgtttctgaaattaccgataattggttatttggaccaagtgagggggattggctaatagataaggaaagtattttggctgtaaaagaaaaattacaaaattcagatttttctacagagcccttagtgaaaaatattattcatgtacttgaatatgctat

SEQ ID NO: 41156 - DNA, 654 bp, Neisseria meningitidis
atgaagataacacactgcaaattaaagaaaaaagtacagaaagagctgctccgtttttttgtactcgaagttaccgcccgttctgctgccgatattttgggtatccatcccaattcggcagtcctgttctaccgcaaaatccgtatggtcatcagccattatctggccttggctgccaatgaggttttcgagggctctgtcgagttggacgaaagctatttcggcggacggcgtaaaggcaaacgtggtcgcggtgcggcaggaaaagtggttgtcttcggcattctgaaacgtaacggacgggtctataccgttgtggtggataatgccaagtctgaaacgttactccctgtcatcaagaagaaaatcatgccggacagtattgtttataccgatagtctgagcagctgcgacaagttggacgtgagcggttttatccattaccgcatcaaccattccaaggaatttgcagaccgtcagaaccacattaacggcattgagaacttttggaatcaggcaaaacgcgtcttgcgaaaatacaacggaatcgatcgtaaatttttcccgctgttcttgaaagaatgcgaatttcgatttaacttcggcacaccgtctcaacagcttaaaatcctgcgggattggtgtggaatttag

SEQ ID NO: 41157 - DNA, 1065 bp, Neisseria meningitidis
atggcactcgtatccatgcgccaactgcttgatcatgctgccgaaaacagctacggcctgcccgcgttcaacgtcaacaacctcgaacaaatgcgcgccattatggaagccgccgaccaagtcaacgcgcccgtcatcgtacaggcgagtgcaggtgcgcgcaaatatgcgggcgcgccgtttttgcgccacctgattctggcggcagtcgaagaatttccgcacatccccgtcgtgatgcaccaagaccacggcgcatcgcccgacgtgtgccaacgctccatccaactgggcttttcctccgtgatgatggacggctcgctgatggaagacggcaaaaccccttcttcttatgaatacaacgtcaacgccacccgtaccgtggttaatttctcccacgcttgcggcgtatccgtcgaaggcgaaatcggcgtgttgggcaacctcgaaactggcgaagccggcgaagaagacggtgtaggcgcagtgggcaaactttcccacgaccaaatgctcaccagcgtcgaagatgccgtgcgtttcgttaaagataccggcgttgacgcattggcgattgccgtcggcaccagccacggcgcgtacaaattcacccgtccgcccacaggcgacgtgttgcgtatcgaccgcatcaaagaaatccaccaagccctgcccaatacacacatcgtgatgcacggttccagctccgttccgcaagaatggctgaaagtcatcaacgaatacggcggcaatatcggcgaaacctacggcgtgccggttgaagaaatcgtcgaaggcatcaaacacggcgtgcgcaaagtcaacatcgataccgacttgcgccttgcttccaccggcgcggtacgccgctaccttgccgaaaacccgtccgacttcgatccgcgcaaatatttgagcaaaaccattgaagcgatgaagcaaatctgcctcgaccgttatcttgcgttcggctgcgaaggtcaggcaggcaaaatcaaaccggtttccttggaaaaaatggcaaaccgttatgccaagggcgaattgaaccaaatcgtcaaataa

SEQ ID NO: 41158 - DNA, 945 bp, Neisseria meningitidis
atgtctgcatctaagaaatttccgattcctttgagctatttcagcatcgcgctgggcttgtttgccttggggctgtcgtggcgttacggcgcgtctgtcgggctgctgcccgccttggccgccgaatcgctgcttgcggcggcttcggttgtctggctcttgctggtggcggcatacctaatcaaaatgtttgcgtaccgaaacgattttttgtctgatttgcgggacttggtgcaatgctgcttcatcagcgcgattccgattaccgctatgctggagggactcgcgctgaagccctatcaggcaggcgcggcggcagtcctgatttatgtcggcgttgccggacagttggcgttttcgatgtatcgggcggccggtctgtggcgcggcctgcattccttggaggcgacgacgccgattatttatctgcctacggttgcgacaaactttgtcagcgcgtcatctctggcggcgttggggcatcatgattatgcagctttgtttttcggcgcgggtatgttttcctggctgagcttggaagcctccatcttgggcaggctgcgcacggcggcaccggtcggcacggcggcgcgtggcgtggtcggcatccagcttgcgcccgcctttgtcggctgcggcgcgtattttgccgtcggcggtaaagtcgacggttttgcgttggcattaatcggctacggctgcctgcagcttttgttcttgctacgcctgacccgctggttttgggaaggtggttttacgatgagcttttggggattttcattcggtttcgcggcaatggcaggatgcggtctgcatctggcggcttctggcgtattgtcgggcttggggctgacgcttgccaccgccggatcggcaggcgtggcgctgctgcttgtcggtacgctgcaccggatagcgacggggcgtttcttggtacgcggctga

SEQ ID NO: 41159 - DNA, 2112 bp, Neisseria meningitidis
atgaaaatatcatttcatttagctttattacccacgctgattattgcttcctttcctgttgctgccgccgatacgcaggacaatggtgaacattacaccgccacgctacctaccgtttccgtggtcggacagtccgacaccagcgtactcaaaggctacatcaactacgacgaagccgccgttacccgcaacggacagctcatcaaagaaacgccgcaaaccatcgatacgctcaatatccagaaaaacaaaaattacggtacgaacgatttgagttccatcctcgaaggcaatgccggcatcgacgctgcctacgatatgcgcggcgaaagcattttcctgcgcggttttcaagccgacgcatccgatatttaccgcgacggcgtgcgcgaaagcggacaagtgcgccgcagtactgccaacatcgagcgcgtggaaatcctgaaaggcccgtcttccgtgctttacggccgcaccaacggcggcggcgtcatcaacatggtcagcaaatacgccaacttcaaacaaagccgcaacatcggtgcggtttacggttcgtgggcaaaccgcagcctgaatatggacattaacgaagtgttgaacaaaaacgtcgccatccgtctcaccggcgaagtcgggcgcgccaattcgttccgcagcggcatagacagcaaaaatgtcatggtttcgcccagcattaccgtcaaactcgacaacggcttgaagtggacggggcaatacacctacgacaatgtggagcgcacgcccgaccgcagtccgaccaagtccgtgtacgaccgcttcggactgccttaccgcatggggttcgcccaccggaacgattttgtcaaagacaagctgtaagtttggcgctccgaccttgaatacgccttcaacgacaaatggcgtgcccaatggcagctcgcccaccgcacggcggcgcaggattttgatcatttctatgcaggcagcgaaaatggcaacttaatcaaacgtaactacgcctggcagcagaccgacaacaaaaccctgtcgtccaatttcacgctaaacggcgactacaccatcggccgttttgaaaaccacttgaccgtaggcatggattacagccgcgaacaccgcaacccgaccttaggttacagccgcgcctttactgcttccatcgatccatacgaccgagcaagctggccggcttcgggcagattgcagcctatcctcacccaaaaccgccacaaagccgactcctacggcatctttgtgcaaaacatcttctccgccacgcccgatttgaaattcgtcctcggcggccgttacgacaaatacacctttaattccgaaaacaaactcaccggcagcagccgccagtacagcggccactcgttcagccccaacatcggcgcagtgtggaacatcaaccccgttcacacactttacgcctcgtataacaaaggtttcgcgccttatggcggacgcggcggctatttgagcatcgatacgtcatcttctgccgtgttcaacgctgaccccgagtacacccgccaatacgaaaccggcgttaaaagcagttggctggacgaccgcctcagcaccacattgtccgcctaccaaatcgaacgcttcaatatccgctaccgccccgacgagcaaaatgatccctacacttgggcagtcggcggcaaacaccgttcgcgcggcgtggaattgtccgccatcgggcaaatcatccccaaaaaactctatctgcgcggttcgttgggcgtgatgcaggcgaaagtcgttgaagacaaagaaaatcccgaccgagtgggcatccatttgaataataccagcaacgttaccggcaacctgtttttccgttataccccgaccgaaaacctctacggcgaaatcggcgtaaccggtacgggcaaacgctacggttacaactcaagaaataaagaagtgactacgcttccaggctttgcccgagttgatgccatgcttggctggaaccataaaaatgttaacgttacctttgccgcagccaatctgttcaatcaaaaatattggcgttcggactctatgccgggtaatccgcgcggctatactgcccgggtaaattaccgtttctga

SEQ ID NO: 41160 - DNA, 183 bp, Neisseria meningitidis
atgttttggtatgtaatcggcttttgcgcctttgtcgtcgcgctgctgtcgctgtgggtcaatgccagcgcattcggtatgcaggaagacgatactccgcaatcggattatgaaagacgtttgggcttgggtgcgaagctgaaaaacaagaatacgccgaaatcaggggaaaaacggcaataa

SEQ ID NO: 41161 - DNA, 108 bp, Neisseria meningitidis
ttggataaacccgcctttgccgcctgctgttccagtttggctatcgttgtgtccgccttaacggacgatttaagaaccgctttacacgaaggcggtttttttgtatag

SEQ ID NO: 41162 - DNA, 1161 bp, Neisseria meningitidis
atgagcaccttcttccagcaaaccgcacaagccatgattgccaaacacatcgaccgtttcccgctattgaagttggaccaggtgattgattggcagccgatcgaacagtacctgaatcgtcaaagaacccgttacctccgagaccaccgcggccgtcctgcctatccactgttgtccatgttcaaagccgtcctgctcggacaatggcacagcctctccgactccgaactcgaacacagcctcatcacccgcatcgacttcaacctgttttgccgtttcgacgaactgagcatccctgattacagtatagtggattaacaaaaaccagtacggcgttgcctcgccttagctcaaagagaacgattctctaaggtgctgaagcaccaagtgaatcggttccgtactatttgtactgtctgcggcttcgtcgccttgtcctgatttttgttaatccactatactttatgccgctaccgcaattggctggctcaagacaataccctgtccgaattgctcaaactgattaactgccaactgactgaaaaaggtttaaaaatagagaaagcatccgccgccgtcgttgatgccaccattattcagaccgccggcagcaaacagcgtcaggctatagaagttgacgaagaaggacaaatcagcggccaaaccacaccgagtaaggacagcgatgcccgttggatcaagaaaaacggcctctacaaactcggttacaaacaacatacccgtaccgatgaggaaggctatatcgagaaactgcacatcacccccgccaatgcccatgagtgcaaacacctgccgcctttgctggaagggatagccgaaggtacgaccgtctatgccgacaaaggctatgacagtgcggaaaaccggcaacatctggaagaacatcagttgctggacggcattatgcgcaaagcctgccgcaaccgcccgctgtcggaaacgcaaaccaaacgtaaccgatatttgtcgaagacccgttatgtggtcgaacaaagcttcggtacgctgcaccgtaaattccgctacgcccgggcagcctatttcggactgattaaagtgagtgcgcaaagccatctgaaggcgatgtgtttgaacctgttgaaagcggccaacaggctaagtgcgcccgctgccgcctaa

SEQ ID NO: 41163 - DNA, 603 bp, Neisseria meningitidis
atgaccgacaaaatttctcccgacgcgctgattgaagccgcactgctgacccaaaccgaaccgctgaccgaaaaatctatgcgcgaattgtgtgtgccgccactgtcgcaggacaaactgattgatgtgttggcgcagttgaaaacgcgttggcaggatagggcgttgcaactggtgcatacgcaagagggctggcgttttcagattgttcagacggcattcgagcggctgggcagcctgcaagaacagcgtgcgccgcgctactcccgcgccgtgatggaaacactggcgattatcgcctaccagcagcccgtaacgcgcggcgacatcgaaggcatacgcggcgtggcggtgtcgcagaacgtgatgcagaccttgcaggatcgggggtggattgaagtcatcggacatcgggacacattgggaaaacccgcattgtgggcaacaacggcaacgtttctcagcgatttgcgcttggacggtctggaagaacttccgccgctgaccgaactgggcgaactggttttgcccgatttaatggaaatgccgcctacggatgaagaagagccggaagccgtaccgtccgataccctgcccaactga

SEQ ID NO: 41164 - DNA, 1911 bp, Neisseria meningitidis
atgaatctggaaactctgatcgccctgccgcgcaacatcaagaaaatctgtttcctcatacacgattttctgatgattttcattgccttttggttcacccaaagcctaaaggccgactactcggacgaatggttcgattttgccaactggcagtcttttttgctgactgccttgctgaccatcacattatttatccgaatggggctttaccacgccgttacacgcttcgtcagcttccgcatcctcaccaccgtactggcgggcagcctcgcctccgccgtgttgtttttcctcaatacgctgatatttgaagaaaggctgcgcctcgccctgccgattgtctatttcttactgctgtttgtttccgtgaccggctcgcgtatggttttgcgcggactgttgtccgaacaccccaaaaaacagatgatccctgtcatcatttacggcgcgggacggtcgggcagacaactgcttgaggccgtcaaacaaatgcgcgaatattccgccgccgcctttgtagacgacgaccccaaactgtggcacaccgtcatctacgaccttgccgtttaccagcccgatgccatcgccttcctcatcgaacgctacggcgtggaaaaaatcctgctcgccatccccggcgcgacccaggaacaacgccgccgaatcatcaacaaactggaagcctatccgtgcgaagtgttgaccattcccggaatgaaagacctgatggacggaaaaatcagcatcggcacgctcaaaaaaatctctgtgtccgacctgctcgggcgtgattccgtcgcgcccgacgaccgcctgatgagtgccgacatcgaaggcaaaaccgtcatggtaaccggcgcgggcggctccatcggttcggaactctgccgccagattatccgccgccgccccgaaaagctgctgctgttcgagttatccgaattcgccctgtacgccatcgaaaaagaattgcgcgaaacctgcatccaaaaacgcctcgacaccgaaatcctgccctttctcggttcggtgcaaaaccgcacgctgctcgaacacgtcatgaccgccttttccgttgcgaccgtctatcacgccgctgcctacaaacacgtccccatggtcgagttcaacaccgtcgaaggcatacgcaacaacatcttcggcacactcgagtgcgcgcttgccgccacgacatcgggcataagaactttcgtcctcatctccaccgacaaagccgtccgccccaccaacaccatgggtgccagcaaacgcatggcggaactctgccttcaggcactcgccgccgaacccggacaaaaaacccgcttcagcatggtacgtttcggcaatgttttaggttcgtccggctccgttgtcccgctgtttgaaaaacagattgcccaaggcggcccgcttaccctgacccaccccgaaatcacacgttatttcatgaccatacccgaagccgcccaactcgtcatacaggcaggcgcgatgggtacgggcggcgacgtattcgtcctcgacatgggtgaatccgtcaaaatcatcgaccttgcccgccaaatgattaccctaagcggcctcaaacccaacacacccgaacaacccgacggcgacatcgaaatcctcattaccggactgcgtcccggagaaaaactctacgaagagctgctcatcggcgacaacgtccgcaaaaccagccatccgcgcatcatgaccgccaacgagaccatgctgccgtggcacgagctctccgccctgctcaatcgcatccgtgcggcctgcgaccgttacgaccagcaggcaatccgcaccctgctcatcaacgccccaaccggctttgccccgagcgacggcatctgcgacctgctttgggtacgagaaacacacagaaaaaatgccgtctga

SEQ ID NO: 41165 - DNA, 981 bp, Neisseria meningitidis
atggggattgcgccttactgtcgaaaccttattattcaggagcagaagatgaaaattgcaaacagcatcaccgaactaatcggcaacacgcctttggtcaaactgaaccgtctgaccgaaggtttgaaggcggaggttgccgtgaaactggaatttttcaatccaggcagcagcgtcaaagaccgcattgccgaagcaatgatcgagggtgccgaaaaagcgggcaaaatcaacaaaaacaccgtcattgtcgaagcaaccagcggcaatacgggtgtcggtttggcaatggtatgtgccgcacgcggctacaagctggcgattaccatgccggaaagcatgagtaaggagcgcaaaatgctgttgcgcgcgtttggtgcggagctgattctgacccctgccgccgaaggtatggcgggcgcgattgccaaagcgaaatacttggtggacgcgcatcccgacacttattttatgccgcgccagttcgacaatgaggcaaaccccgaaatccaccgcaaaacaaccgccgaggaaatttggcgggatacggacggcaaagtcgatgtcttcgttgccggcgtcggcacgggcggtacgattaccggcgtgggcgaagtgttgaaaaaatacaaacccgaagttaaagtggttgccgtcgagcctgaagcttcacccgtattgagcggcggcgaaaaaggcccgcacccgattcaaggcatcggcgcaggctttattccgaccgttttgaataccaaaatttacgacagcattaccaaagtgtcgaacgaagcggcttttgaaaccgcccgcgcaatggcggaaaaagaaggcattttggtgggtatttcttctggtgcggcggtttggagcgcgttgcagcttgccaaacagcctgaaaacgaaggcaagctgatagtcgtgctgctgccttcttatggcgaacgctatctctctacgccactttttgcagatttggcataa

SEQ ID NO: 41166 - DNA, 1815 bp, Neisseria meningitidis
atgagtgaacacgatatgcagaacacaaatccgccattaccgcctctgccgcccgaaatcacgcagctcctgtcggggctggacgcggcacaatgggcgtggctgtccggctacgcttgggcaaaagcaggaaacggggcatctgcaggactgcccgcgcttcagacggcattgccgacggcagaacctttttccgtaaccgtcctttccgcctcgcaaaccggcaatgcgaaatccgttgccgacaaagcggcggacagcctggaagccgtcggcatccaagtcagtcgcgccgaactgaaagactataaggcgaaaaacatcgccggcgaacgccgcctgctgctggttacgtccacccaaggcgaaggcgaaccgccggaagaagccgtcgtgctgcacaaactgctgaacggcaaaaaagccccgaaattggacaaactccaatttgccgtactgggtttgggcgacagttcctatccgaatttctgccgggcgggcaaagatttcgacaaacgttttgaagaattgggggcgaaacgcctgctcgaacgcgttgatgcggatttggactttgccgccgccgcaaacgcctggacagacaatatcgccgcactcttaaaagaagaagccgcaaaaaaccgggcaacgcccgcgccgcaggcaacgccccccgccggccttcagacggcatcggagggcaggtactgcaaggcagacccctttcccgccgccctgctggccaatcagaaaatcaccgcccgccaatccgataaagacgtgcgccacatcgaaatcgatttgagcggttcggatttgcactacctcccgggcgacgcgctcggcgtttggtttgacaacgatccggcactggtcagggaaatcctagacctgctcggcatcgatccggcaacggaaatacaggcgggcggaaaaaccctgccggttgcctccgcactgttatcccattttgaactcacgcaaaacacccccgcctttgtcaaaggctatgccccgttcgccgatgatgacgaactcgaccgtattgctgccgacaacgccgttttgcaaggctttgtgcaaagcacgccgattgccgatgtgctgcaccgcttcccggcaaaactgacggcggaacaattcgccggcctgctgcgcccacttgcgccgcgcctgtattcgatttcctcgtcgcaggcggaagtgggggacgaagtgcacctgaccgtcggcgcggtgcgttttgaacacgaagggcgcgccagggcgggcggcgcatcgggtttccttgccgaccggctggaagaggacggcacggtgcgcgtgtttgtggaacgcaacgacggcttcaggctgcccgaagacagccgcaagccgattgtgatgatcggctcgggcaccggcgtcgcaccgttccgcgccttcgtccaacaacgtgccgcagaaaatgcggaaggcaaaaactggctgattttcggcaatccgcattttgcccgtgattttctctatcaaaccgaatggcagcagtttgccaaagacggtttcctgcacaggtacgatttcgcctggtcccgcgatcaggaagaaaaaatctatgtgcaggacaaaatccgcgaacaggcggaaggactttggcaatggctgcaggaaggcgcgcatatctatgtgtgcggcgatgcggcaaaaatggcaaaagacgtggaagccgccttgctggatgtgattatcggggcaggacatttggacgaagagggcgcagaagaatatttggatatgctgcgcgaagaaaaacgctatcagcgtgatgtttattga

SEQ ID NO: 41167 - DNA, 2256 bp, Neisseria meningitidis
atgggacagtacaagaagctgtggtacttgctgtttgccgttctggcggtatgctttaccattcttggctatatgggcagcgaggtttacaaaaaagccccgccttaccctgaacaagtcgtttctgcatccggcaaagtcctgatggccaaagacgatattttggcaggtcaatctgcatggcagactaccggcggtatggaagtcggctctgtattgggtcacggtgcataccaagctccggactggacggccgactggctgcatcgtgagttgtccgcctggttggatttgaccgcgcaacagacttacggcaaaaaattcgatgaagtttcccctgaagaacaagctgtcttgaaaacacgcttggctgacgaataccgtaatcaaagccgtattaaagaagacggcagcgtcgtcatcagcgatacgcgcgtgaaagccatcgaaagcatcctgccttattatcacggtgtttacggcgatgatcccgcgctgcaaaccacccgcgaacactttgcaatgaaaaacaacacattgccaagccaagaagcgcgtgaaaaactgttcgacttcttcttctggacttcttggtctgcttcgaccaaccgtcctgacgagacgttcacttataccaacaactggccgcacgagcctttgatcaacaatgtaccgactactgaaaactacatgtggtcgtttaccagtgtcgtactgctcttgatgggcatcggtttgttgatgtggggttattccttcctgaccaaacatgaagaggttgaagtacctactgaagatcctatctctaaagtacaactgactccttctcagaaagcgttgggcaaatatgtatttctgactgttgcactgtttgtcgtacaggtattgctgggcggtctgaccgcgcactacaccgttgaaggtcagggtttctacggcatcgatgaggcgttgggctttgaaatgtccgactggtttccctatgccctgacccgtacttggcacatccaatccgccatcttctggattgcaaccggctttttgacggcaggtttgttcctcgcgccgattgtcaacggcggcaaagatcccaagttccaacgtgcaggcgtgaacttcctctatatcgccctcttcatcgtggtcggcggttcttacgcgggcaacttctttgcgttgacgcacatccttccccccgaatttaacttttggttcggacaccaaggttacgaatacctcgatttgggccgtttctggcaactcctgctgatggtcggactgctgttgtggctgttcctgatgttgcgctgcacggtttccgccttcaaagaaaaaggcgtagacaaaaacctgctggcaatctttgtcgcttctatggtcggtgtgggcgtattctacgcaccgggtctgttctacggcgaaaaatccccgattgccgtaatggaatactggcgttggtgggtggttcacctgtgggtggaaggcttctttgaagtatttgccactgccgcttttgcctttgtcttctacaatatgggctttgtccgccgcagtaccgccacagcttctactctggccgctgccgccatctttatgttgggcggcgttccgggtacgctgcaccacctgtacttctccggctctacctccgcctctatggcaatcggtgcctgcttctccgctttggaagtcgtgccgctggtgttgctgggccgtgaagcatacgagcattggtcttaccaacacctgtccgaatgggcgaaacgcctgcgttggccgctgatgtgcttcgtggcagtcgccttttggaatatgatcggtgccggcgtattcggcttcctgattaacccgccgatttccctgttctatatccaaggtttgaatacttctgctgttcatgcgcacgccgccttgttcggtgtgtacggtttcttagctctgggcttcgtattgctggttgcacgctacttgaaacctaatgttcaatttgacgacaaactgatgacttggggcttctggctgctcaacggcggcttggtcggtatgattgccatcagcctgttgccggttggcgtgattcaggcatacgcctccatcacgcacggcctgtggtatgcacgcagcgaagagttcctgcaaatggaaatcctcgacaccctgcgctgggttcgtactgccgccgacttgatctttatcggcggtgcaatctgtgtcgccatccaagccactaaaatcgtattcggccgcgacaaataa

SEQ ID NO: 41168 - DNA, 360 bp, Neisseria meningitidis
atgaatatcaaacacctgattaccaccacactcattgcctcagccgcctttgccgcgcaggcagccccgcaaaaacccgtatccgccgcccaaaccgcgcaacatccggccgtttggatcgatgtccgttccgaacaggaatttagcgaaggtcatttgcacaacgcggtcaacatccccgtcgaccaaatcgtccgccgcatacacgaagccgcgcccgacaaagacacgccggtcaacctctactgccgcagcggacggcgtgccaaagccgcccttcaggagctgaaaaaagcaggttatacaaatgttgccaatcacggcggttatgaagacctgctcaaaaaagggatgaaatga

SEQ ID NO: 41169 - DNA, 762 bp, Neisseria meningitidis
atggaaacagcgaaacccatcatgctgattgtccgaccgtcgggcagggcgaaggacgatgtggaaacctgccgtcgtgccggatggcaggcggaagtgttgagcccgattgaaatcgaagcagatgctgccggactggaacttttgtccgaacaatatgcccgtgcggatgccgtgttttgggtcagtccgaccgccgttgaaaccgccgtcccgtaccttaacctttcagacggcataaagatacacattgccgtagggcagggcagccgccgcgcattggaacgctatttgggcagaacggtcattgcgcctcatgacggaaacgacagcgaggcggttttgcgcctgccggtttggaacagtctgcccgaaggtgcacgcgtattgtttgtgcgcggacacggcgggcgggattttctgatgaatgccttgcaggagaaaggttttcggacggagatggcagaagtctatttcagacggcataaacctttgaactttcaaaatttccaaaccgaaaatattgccgccgcctatattacgtcgaccgagctggtgcgcttgctgttcgggcagcttccgccgcaattttcccgattcttcaaatccttgctatactttacccatcatccgcgcattgcggaggcattgaagcgcgaaggcgtgtgttcggtcgaaaccgtccctacgctggaagccgcgctttcccattcttccatttccgtttcagacggcatggtctttcccggaacctcaaattaa

SEQ ID NO: 41170 - DNA, 360 bp, Neisseria meningitidis
atgatacgttatcttttaattgcctgcggcggcatctccctgctgttgggaatcatcggcatttttctgccgctgttgccgaccacgccgttcgtactgctttccgccgcctgctgggcaaaggcatccccgcgctttcaccgctggctgcaccggcaccgctatttcggtccgatggttcataactgggaacaaaacggcgcagtgccgcgcaaagccaaaatattcgccatcagtatgatgaccgcatcctgcctgataatgttttggcagtttccccaacgctggtgggtcggggcggtttcatcggttttttgttcccttgtcgccatatggatgtggcgcaggcccgaatcttga

SEQ ID NO: 41171 - DNA, 372 bp, Neisseria meningitidis
atgaaaccatacaaaatctacacccatcccgccctgccgccccaagccgtcaaacaaggctggtcatggccggggctcttgttcggcacgctgtgggcgtgtttcaaaagaatgtggggtttggggctggggctgacgggcgcgatattcgtgctggctgtgtttgcccaactggtttacggcgacacgcccgccacagactcggcgtttaacgtattgggcttggcggtttccgtctggttcggcgcaaagggcaacagcctttatgcacgccaccttttatcgcgcggctataccgaattgcccgaaacagtccaagctgccaacccccaagccgcattggcgcaatatttcgggcgcgggggccgataa

SEQ ID NO: 41172 - DNA, 1977 bp, Neisseria meningitidis
atgtccaaactcaaaaccatcgctctgaccgcatcaggtctgtccgtttgtccgggtttcctatacgcccaaaacacctcatcacaccaaatcggtttggcgattatgcgcttaaactcttcaatactcgacctgcccccgacaaaacaatatttccaatccggcagcctgtggagcgagctgcgccaaggcttccggatgggcgaagtcaatcccgaactggtacgccgccacgaaagcaaattcatcgcaagccacagctatttcaacagggtcatcaaccggagtagaccctatatgtaccatatcgccaacgaagtcaaaaaacgcaatatgcccgccgaagccgccctgcttcccttcatcgaaagcgcgttcgtcaccaaagccaaatcacacgtcggcgcatcaggattatggcagtttatgcccgctaccggcaggcattacggcctggaaaaaacaccggtttacgacggcaggcacgacgtttacgccgccaccgatgccgcactcaactatctgcaatacctctatggactgttcggcgactggccgcttgcctttgccgcctacaactggggtgaaggcaacgtcggacgcgccatcaaccgcgcccgcgcccaagggctcgaaccgacctacgaaaacctgcgtatgcccaacgaaacgcgcaactatgtccccaagctgctcgccgtgcgcaacatcattgccactccccaatctttcggcatgaatatcagcgacatagacaacaaaccctattttcaggcagtcgaaccggatcgtccgctcgacaacgaagccatcgcccggcttgccggcatcacgcaaagcgagctgctcgccctaaaccccgcattcaacgtccccgcgtttatccccaaaagcaaacgcaaactgctgcttcctgtcgcgtccgtacaaaccttccaaagcaactacctcaacgccgcacccgacagcctgttttcatgggaagtctatacgcctgccgccaaaaccagcctgtccgacatctcgacggcaaccggcatgagcattgccgacatcaaacgcctcaacaacctgaacggcaaccttgtcaacgctggacgcagcatccttgtcgccaagaacggcaagacccttcagacggcatcggaatccgtcgtttccatcgacatcgacaatacgcccgacacctaccgttccaatatgccggcaggcacggtgaacgtcggcattgcccgaatccgacccgccgccgcacagacagcggacattaccgtcgcacctttgccgcagaaaaccgtccgtacggaacccgatccccttgtccgtattgccgaacctgcccttgcgacagccgcagcgcaacctcaaaccgaaaaacagaccgccatgccgtctgaaacccaaaccgcaacactcgcgcagatcgtcccccaaaacgacatgcaggcggcagacgaactcatgcagcttgttgcccgaaacaacctgcgccgacaggctgaagaaaccatctctgccgtcatcggcacgcctgacacagttgccgaacacaaaatttccgcatctccgcaacataccgttgccgccgacggcaaacgccgggcacgtttggaaacgcgcgtagccaaagctgccgacggcgaagccgaaatctccccgctccatgccagcatccaccgcgttgtagaaggcgacaccctgttcaacattgccaaacgctacaacgtcagcgtagccgacctgattgtcgccaacaacatcaaaggcaacaccatccaaaaaggacaggtactccgcctggcgcaggcagcccctgcccaaacccgtattgaaaaagtatcctacaccgcgcgcaaaggcgacaccttcaaaagtatcgccgcgcgcttcaatatccatatcgacgacatccgccgactcaatcccaacctgaacaccatcaatccgggacagagggtcaaactgattggaagctga

SEQ ID NO: 41173 - DNA, 738 bp, Neisseria meningitidis
atgttaagcgcgcgctacctccacctgcacgaagctttgggtttgggtccgatgtggctgaaacaggccgccgccgtcctgccgcccaaaaacacacccgcaccctcggcacaggcacgtccccaaaccgtccgcgccgccccgatccgcccttcccaaccccataacggtcaggcgcggctcgaaacgatgaaagcgttggaaaccgccgccgtacctacgcgcaaacccgcgcctgaaaccgaaacgcctctgcccggcctttcagacggcatcgcccccgttcccgccgcttcgggcatcaccaagcttgccgtcgtcagcctttgcccaccgatcgaggatgcggtttacgggcaactgttccacggcaaagcaggcatcctgctcgacaacatactcaaagccgtaggactggatgccgcctatgtccacaaaacctgttgggtgaaaaccgccgccgtcggcaacccgatgccgtctgaacaggccgtcgcgaatgcgctgggtcaaatcgcccgcgaactcgacggctgccgcgccccggctgtccttttcctcgggcaggcttttgtccagcctgaacggcaaacgatgattgaaactttgtgcggcagccgtcccttcttcatcatcgaccatcccgcccggcttttacgccaacccgaactcaaagcccgcgcctggcaggtgttgaaacagttgaaacgcgccttgcggcaaggcggcggcagttga

SEQ ID NO: 41174 - DNA, 1011 bp, Neisseria meningitidis
atgaacgacaatacacacacccttcccccgcgccgcctttccgtcgccccgatgctcgactggacggacaggcactaccgttaccttgcccgccagattacccgaaatacttggctgtacagcgaaatggtcaatgccggtgcgattgtttacggcgacaaagaccgctttttgatgttcaacgaaggcgagcagcccgtcgccctgcaactgggcggcagcgatccgtccgatttggcgaaagccgccaaagccgccgaggcatacggttacaacgaggtcaacctcaactgcggctgccccagtccgcgcgtgcagaaaggctcgttcggcgcgtgtctgatgaacgaagtcgggctggttgccgactgcctcaacgccatgcaggacgcggtcggtattcccgttaccgtcaaacaccgtatcggtgtggacaggcagaccgaataccaaaccgttgccgatttcgtcggcacgctgcgcgacaaaaccgcctgcaaaaccttcatcgtccacgcccgcaacgcttggctggacggtctttcccccaaagaaaaccgcgacgttcccccgttgaaatacgattacgtttaccgcctcaagcaggagtttcccgggctggaaatcatcatcaacggcggcatcaccaccaacgaagcaatcgccggacacctgcaacacgttgacggcgtaatggtcgggcgcgaggcgtaccacaacccgatggtgatgcgcgaatgggacagattgttttacggcgatactcgcagcccgatcgaatacgccgatttggtgcagtgcctctacacatacagccaagcccagatccaagccggacgcggcacaatcttgcgccacatcgtccgccacagcctcgggctgatgcacggtttgaaaggtgcgcggacttggcggcgtatgctttccgacgcaacgctcttgaaagacaacgacggcagcctgattctcgaagcgtggaaagaggtcgaacgggcaaatacgcgcgaatag

SEQ ID NO: 41175 - DNA, 480 bp, Neisseria meningitidis
atgagtaaacacacttatccgataacacctgccgtgcgcgttttgcgtgaaaacggcatcgaatttgaaccttttacctatgcctatgaggaacacggcggcacggcgcagtttgcccgactattcggcaaagacgaacacttggtcattaaaaccattgttttgcaagatgaaaacgggaatgggctgattgtcttgatgcacggcgacaaacagatttcaacccgcaatctggcgcggcatttgggtgcgaaacacatcgaacccgccacgccagcacaggcaaacaagtggacgggctatctggtcggcggcacaacgccgttcggcatccggacaaaattggatatttatgtcgaacagtcggtgatggatttggacatcatctatatcaacggcggaaaacgcgggttcattatcggcatccgtcccggagatttaaatattttgaacccgaaaacaatacaggcggcggtttga

SEQ ID NO: 41176 - DNA, 795 bp, Neisseria meningitidis
atgaccacgattttggctttcgatattgaaaccgtacccgatgtgcagggtatccgaacattgtacgagctgccgtcctcgctgcccgacgatgaagtggtgctgtttgcccagcaaaaacgccgtgctcagacgggtggggattttatgcagcatcatcttcatcagattgtggcgatttcgtgctgcatgcgttgggggcaggataaagtccatgtcggtacaatcggcgagatggacgatggcgaagaagtcgtgattgccaaatttttcgagttgattgaaaaacatacgccgcaactggtcagttggaacggcggcggtttcgacctgccggttctgcattaccgttcgctgctacacggcatcaacgccgcgcgctattgggatatgggtgacggcgatttcggcgacagccgcgatttcaagtggaacaactacatcagccgctaccaccaacgtcattgcgatttgatggatttgctcgcgctttaccagccgagggcaaacgtgccgctggacgatatggcgaaactgtgcggttttccaggcaagctgggtatggacggcagcaaggtgtgggatgcgttccacgcgggcaggctgaaggaaatccgcaattattgtgaaaccgatgccgtgaatacgtatttgatgtatctgcgtttctgtctggtcagcggcagattcgacgcggacgaatacgaaatggaaatcaagcggatcagaaactatctttccgcccaaacagaagacaaaccgcattgggcagaatttgtccaagcgtggaaataa

SEQ ID NO: 41177 - DNA, 513 bp, Neisseria meningitidis; identical to SEQ ID NO: 37445

SEQ ID NO: 41178 - DNA, 828 bp, Neisseria meningitidis
atgaaactcgatatttatgctttgctggaacgcgccctgctttcgggcgacccagatgaaaaaggacggctgacggatgaggcgtttgccgccgttcaaaatgcggacggggcggaagcaaacgcgccaccggcagatttcccccgcgcgggacggccggacaagcctgttttggtcgcgccgtcgcaactgaccccgcgcaaaatgaacacaaccgaaggttatgcggcgatgctgcacgcgattgcgcatatcgaattcaacgccgtcaatctagctttggacgcggcataccgtttccgcacgctgccgtttcagtttgtccgcgactgggtgaaagtggcgaaggaagaggtgtaccatttccgcctgatgcgcgacagattgcgcgctttcggcttcgattacggcagtttcgaggcgcacaaccatttgtgggatatggcgtacaaaaccgcctacgacccgctgttgcgcatggcgttggtgcctcgcgtattggaggcgcgcgggctggacgttacgccggggatacgcgcgaaggtggaacagcgcggcgattcggaaacctgcggcgtgttggacatcatttaccgcgacgaagtaggccatgtcgctatcggcaaccattggtatcaacacctctgccgcgaacgcggtttggaacctgtcgccctgttccgcagtctgattgcccgttacgatatgtttatcttccgtggctatgtgaacatcgaagcgcgcgaaaaagcgggcttcagtcgcttcgaattggatatgctggaagatttcgagcagggtttgaaacaaggcaaaaaggtcgtctga

SEQ ID NO: 41179 - DNA, 669 bp, Neisseria meningitidis
gtgaaccagcttattttcgactttgccgcacacgactatccgagtttcgacaaattcctcggcacggaaaacgcggaactggtctatgtcctccgacacaaacacggacagtttatctatgtctggggtgaagaaggcgcgggcaaaagccatcttttgcaggcgtgggtcgcacaggcgctcgaagccggcaaaaacgccgcctatatcgatgccgcctccatgccgctgaccgatgccgcgttcgaggcggaatacctcgccgtcgatcaagtcgaaaaactgggcaacgaagaacaagccctgcttttttccatcttcaaccgcttccgcaacagcggcaaaggctttttgctgctcggttcggaatacacgccccagcagcttgtcatccgcgaagatttgcggacgcgtatggcgtactgcctcgtttacgaagtcaaacccttaaccgaccaagaaaaaatcgacgcgctcgccagtatggcggcggcacgccaagtaaccgtcgattccgaaattttcgaatacctgctcaaacactggcggcgcgatatggacagcctgatgatgatgctcgacacgctggacaactacgccgtcacgatgggcaaacgcatcaccctgccgcttttgcgccagcttttgaaacaacaggaaacccaatga

SEQ ID NO: 41180 - DNA, 228 bp, Neisseria meningitidis; identical to SEQ ID NO: 36999

SEQ ID NO: 41181 - DNA, 507 bp, Neisseria meningitidis
atgcccctactagacagtttcaaagtcgatcacacccgtatgcatgcccccgccgtacgcgtggcgaaaaccatgactacgcccaaaggcgacaccattaccgtgttcgacctgcgcttttgcattcccaacaaagaaatcctgcctgaaaaaggcatacacacgctggagcatttgttcgcaggttttatgcgcgaccacttgaacggcaacggcgtggaaatcatcgacatttccccgatgggctgccgcaccggtttctacatgagccttatcggcacgccttccgaacagcaggtcgccgatgcatggctcgcctcgatgcaggatgtgggcaatgtcaaagaccaaagcaaaatccccgagttgaacgaataccaatgcggcacttatcaaatgcactcgctcgccgaagcgcagcaaatcgcgcaaaacgtgttggcgcgcaaagtggcggtgaacaaaaacgaagagctgacgctggatgaagggctgctgaacgcctaa

SEQ ID NO: 41182 - DNA, 1161 bp, Neisseria meningitidis; identical to SEQ ID NO: 40172

SEQ ID NO: 41183 - DNA, 1182 bp, Neisseria meningitidis
atgattattgatgtaaaagtacctatgctgtctgaaagcgtatctgaaggcacgctcttggaatggaagaaaaaagttggcgaagcagttgcccgtgacgaaatcctgatcgatatcgaaacggacaaagtggttttggaagtaccttctccacaagccggcgtattggttgaaatcgtagcgcaagacggtgaaaccgttgttgccgaccaagttttggcacgtatcgataccgctgctactgccgctgctgaagcacctgccgccgctcctgccgaagcagccccggccgccgctcctgctgccgcgcaaaacaacgccgctatgcctgccgccgccaaactggctgccgaaaccggtgttgacgtgaacgcattgcaaggttccggccgtgacggtcgcgtattgaaagaagacgtacaaaatgccgctgccaaacctgccgcagccgctgctcctgccgttgcacttcctgccggcgcgcgtcctgaagaacgcgtaccgatgagccgcctgcgtgcccgtgttgcagaacgcctcctggcttcccaacaagaaaacgccattctgactacattcaacgaagtcaacatgaaaccaatcatggacttgcgtgcgaagtacaaagaaaaattcgagaaagaacacggcgtaaaattgggctttatgtccttcttcgttaaagccgctgtcgccgccctgaaaaaatacccggttgtgaatgcttctgttgacggcaaagacatcgtgtaccacggctacttcgacatcggtatcgcgattggcagcccacgcggtttggttgtgccaatcctgcgcgatgccgaccaaatgagcattgccgacatcgaacaagcaattgttgattacgcgaaaaaagccaaagacggcaaaatcgctatcgaagatctgaccggcggtacattcagtattaccaacggcggtacttttggttctatgatgtctaccccgatcatcaacccgcctcaatctgcgattttgggtatgcatgccactaaagagcgcgctgtggttgaaaacggtcaagttgttgtccgtccaatgatgtatctggctctgtcttacgaccaccgtatcatcgacggtcgcgaagctgtattgaccttggtagccattaaagacgcgttggaagacccggcccgcctgttgttggatctgtaa

SEQ ID NO: 41184 - DNA, 570 bp, Neisseria meningitidis
atggcggcaggcaaacataccaaacacagcaaccgggtacgcattatcggcgggcaatgccggggcaggaaattgagtttcacatccgccgacggactgcgtccgacacccgacagcgtgcgtgaaaagctgtttaactggctgggacaggatttgacgggtaaaacggttttggatctcttcggaggcagcggcgcactcggtatagaagccgcttcgcgcaacgccaaacgcgtgctgatttcggataacaaccgccaaaccgtgcagaccttgcagaaaaacagtcgcgaactgggtttggggcaggtgcaaatcgtcttttcagacggcatcgcatatttgaagaccgtatccgaacagtttgatgttgtctttctcgacccgccgtttgcatggcaggactggcaaatcctgtttgatgccttgaagccgtgcctgaacccccggtcattcgtctatctcgaggcgggtacgctgccggatattcccgattggctgacggaatatagagaggggaaatcggggcagagtacatttgaattaagggttttccaagtggctgaataa

SEQ ID NO: 41185 - DNA, 1371 bp, Neisseria meningitidis
atgccgcaaaacactttaaacatcgtcatcctcgccgccggcaaaggcacgcgcatgtattccaaaatgcccaaggttttgcacgaaatcggcggcgaaacaatgctcgggcgcgttatcgacaccgccgccgcgctgaatccgcaaaacatctgcgtcgtcgtcggccacggcaaagagcaagttttggacaccgtcaaacgcgatgtcgtctgggttgaacaaaccgaacagctcggcaccggccacgccgtcaaaaccgccctgccccaccttgccgccgaaggccgcacgctggtgttgtacggcgacgttcctttaattgacgttgaaaccctcgaaaccctgctcgaagccgcaggcaacgaagtcgggctgttgaccgacgtgcccgccgacccgtcaggtttggggcgcatcatccgcgacggcagcggcagcgtaaccgccattgtcgaagaaaaagacgcaagtgccgcccaaaaagccgtgaaagaaaccaacacaggcattctcgtcctgcccaacgccaaactggaaaactggctgaacagcctttccagcaacaatgcccaaggcgaatattatttaaccgacctcatcgccaaagccgttgccgacggtattaaagttcatcccgtccgagtgcgcgcctcccacctcgccgccggcgtgaacaacaaacgccagctcgccgaactcgaacgcatcttccaaaccgaacaggcacaagaattgctcaaagcaggcgtaaccctgcgcgatccggcacgtttcgatttacgaggccgtctgaaacacggacaggatgtcgtaattgatgtgaactgtatctttgaaggcgaagtcgaaatcggcgacaacgtcgaaatcggcgcaaactgcgtcatcaaaaacgccaaaatcggcgcaaacagcaaaatcgcccccttctcccacctcgaagactgcgaagtcggcgaaaacaaccaaatcggcccatacgcccgtttgcgtccgcaagccaaactagctaacgacgtacacgtcggcaacttcgtcgaaatcaaaaacgccgccatcggcaaaggcaccaaagccaaccacctcacctacatcggcgatgccgaagtcggcagcaaaaccaacttcggcgcaggtacgattattgccaactacgacggcgtgcacaaacacaaaaccgtcatcggcgacgaagtgcgcatcggttcaaactgcgtcttggtctcccccgtcaaaatcggcaacaaagtaaccaccggcgcgggcagcacgattacccgcaatgtcgaagacggcaaactcgccctcgcccgctcccgccaaaccatcatcgacggctgggtgaggcctgaaaaaaacaaacaataa

SEQ ID NO: 41186 - DNA, 375 bp, Neisseria meningitidis
atgattattcaaaatgaatttaatttatatcctagtaatatgcttcctgaaaggttttgttatcctgaaaagtatgttcgtatctctaacgatacatctttaataccttatattcagccacataattttcactggtagtttgagaattatggaacagaaggggcagaagtagcttatatatttagaaattctatcctgcctgatttaaatcttatcccattcgctagtaatggagaatgggaagcttattttgatggtaatgatgtaacaggaaattctagggttattgtcattaatttagataatatagaaaaccatgaattttttaatagttttgaagattggcttgaattagcaattaaggatacttggtaa

SEQ ID NO: 41187 - DNA, 270 bp, Neisseria meningitidis; identical to SEQ ID NO: 37545

SEQ ID NO: 41188 - DNA, 2418 bp, Neisseria meningitidis
atggtaaattattattcagctatgattaaaaagattttaacgacttgttttggtttggtttttgggttttgtgtatttggagtgggtttggttgccattgctattttggtaacgtatccgaaactgccgtctttggattctttgcagcattaccagcctaaaatgccgttgactatttattcggcggatggggaagtcatcggtatgtatggggagcagcggcgcgaatttacaaaaatcggcgatttcccagaggtgttgcggaatgcggttatcgccgccgaggacaaacgcttttaccggcattggggggtggatgtttggggtgttgcccgcgctgccgtcggcaatgtcgtgtccggcagcgtgcagtcgggtgcgagtacgattacgcagcaggttgcgaaaaatttttatttgagcagtgaaaaaacgttcacacgcaaattcaatgaggtgttgcttgcctataaaatcgagcagtctttaagcaaagacaaaatcctcgagttgtatttcaatcagatttacctcggtcagcgcgcctatggttttgcatctgccgcgcaaatctatttcaataagaatgtccgagatttgactttggcggaagccgccatgcttgcgggactgcccaaggctccgtctgcctataatccgattgttaatccagaacgtgccaagttgcgccagaagtatattttgaacaatatgctcgaggagaagatgattaccgtgcaacagcgcgatcaggcgttgaatgaggaactgcattacgagcggtttgttcggaaaatcgatcagagtgctttatatgtggcggaaatggtgcgtcaggaactgtatgagaaatacggtgaagatgcctatacgcagggttttaaggtttataccacggtccgcgccgatcatcagaaggtggcaaccgaggcattgcgcaaggctctacggaatttcgatcgcggcagcagctaccgcggtgcggaaaactatatcgatttgagtaagagtgaagatgtcgaggagactgtcagccagtatctgtcgggactctataccgtcgataaaatggttcccgccgttgtgttggatgtgactaaaaagaaaaatgtcgtcatacagctgcccggcggcaggcgggttacgcttgataggcgcgccttgggctttgcggcccgcgcggtcaataatgaaaaaatgggggaggaccgtatccgcaggggcgcggtcatccgtgtcaaaaacaacggcgggcgttgggcggtggttcaagagccgttgctgcagggggctttggtttcgctggatgcaaaaaccggagctgtgcgcgcgctggtcggcggttatgattttcacagcaaaacattcaatcgtgccgttcaggcaatgcggcagccgggttcgacctttaagccgtttgtctattcggcggcattatctaaggggatgaccgcgtccacagtggttaacgatgcgccgatttccctgccggggaaagggccgaacggttcggtttggacacctaaaaattcagacggcagatattccggctacattactttgagacaggctctgacggcttccaagaatatggtttccatccgtattttgatgtctatcggtgtcggttacgcgcaacagtatatccggcgtttcggcttcaggtcgtccgagctgccggcaagcctgtctatggctttaggtacgggcgagacaacgccgttgaaagtggcggaggcatatagcgtatttgcgaacggcggatatagggtttcttcgcacgtaatcgataagatttatgacagagacggcaggttgcgcgcccaaatgcaacctttggtggccgggcaaaatgcgcctcaggcaatcgatccgcgcaatgcctatattatgtataagattatgcaggatgtggtccgtgtcggtacggcaaggggggcagctgcgttgggaagaacggatattgccggtaaaacgggtacgaccaatgacaataaggatgcgtggtttgtcggttttaaccctgatgtggttactgccgtatatatcggcttcgacaaacctaagagtatggggcgtgtcggctacggcggtacgattgcggtgccggtttgggtggactatatgcgttttgcgttgaaaggaaagcagggcaaggggatgaaaatgcctgaaggtgtggtcagcagcaatggcgaatactatatgaaggaacgtatggtaaccgatccgggcttgacgctggacaacagcggtattgcgccgcaaccttcccgacgggcaaaagaagatgacgggggcgcggcagaaggcggacggcaggcggcggatgacgaagtccgccaagatatgcaggaaacgccggtgcttccgagtaatactggttccaaacagcagcagttggattctctgttttaa

SEQ ID NO: 41189 - DNA, 351 bp, Neisseria meningitidis
atgactatgctgccgaataaagttttgggtaaatatgattggaatgtggacggaaaaacaggaataggcgcagcatgggttgtcgctgcgtttatcctgcccatattggtgtgggcgatatttatgttgtcgcggatgcaaggctggcttgcgccgaccaaggcaaacccgacatgggcgttggtgtggctgctgatctgcatgccctgcctgctgattgcgtccaaatgtttgggttggaaaggctggcggcgggtggtgaatatttttgcctgcctgaccgtctgcgccatattgagcgtacccgcttcgctgctcatcgcctttaccctccgggacctgctgaaatag

SEQ ID NO: 41190 - DNA, 693 bp, Neisseria meningitidis
atgaccgcctttgtccacaccctttcagacggcatggaactgcccgtcgaaatcaagcgccgtgccaagaaaaacctgattatccgccccgccggcacacataccgtccgcatcagcgtcccaccctgcttctccgtctccgctctaaaccgctggctgtatgaaaacgaagccgtcctgcggcaaacactggcgaaaacaccgccgccgcaaactgccgaaaaccggctgcccgaacatatctggttccacggcagacagcttgccctcaccgcccatcaagacacgcaaatcctgctgatgccgtctgaaatcctcgtccccgaaggcgcacccgaaaaacagcttgcgctgctgcgggactttttggaacggcaggcgcacagttacctgattccccgcctcgaacgccacgcccgcaccacacaactgttccccgccccctcctcgctgacctctgccaaaaccttctggggcgtgtgccgcaaaaccacaggcatacgcttcaactggcggctggtcggcgcaccggaatacgttgccgactatgtctgcatacacgaactctgccacctcgcccacgccgaccacagccgcgcgttctgggcactgacccgccgcttcgcaccctacacgcccgaagcgaaacagtggctcaaaatccacggcagggaacttttcgccttaggctga

SEQ ID NO: 41191 - DNA, 1149 bp, Neisseria meningitidis
atgaatactcctccttttgtctgttggattttttgcaaggtcatcgacaatttcggcgacatcggcgtttcgtggcggctcgcccgtgttttgcaccgcgaactcggttggcgggtgcatttgtggacggacgatgtgtccgccttgcgtgcgctttgccctgatttgcccgatgttccctgcgttcatcaggatattcatgtccgcacttggcattccgatgcggcagatattgataccgcgcctgttcccgatgtcgtcatcgaaacttttgcctgcgacctgcccgaaaatgtgctgcacattatccgccgacacaagccgctttggctgaattgggaatatttgagcgcggaggaaagcaatgaaaggctgcatctgatgccttcgccgcaggagggtgttcaaaaatatttttggtttatgggtttcagcgaaaaaagcggcgggttgatacgcgaacgtgattactgcgaagccgtccgtttcgatagcggagccttgcgcaagaggctgatgcttcccgaaaaaaacgcccccgaatggctgcttttcggctactggagcgatgtttgggcgaagtggctggacatgtggcaacaggcaggcagtccgttgaccctgttgctggcggggacgcaaattatcgacagcctcaaacaaagcggcatcattccgcaaaacgccctgcaaaacgacggtgatgtctttcagacggcatccgtctgccttgtcaaaatccctttcgtgtcacaacaggacttcgacaaattgctgcacctcgccgactgcgccgtgatacgcggcgaagacagtttcgtccgcgcccagcttgcgggcaaacccttcttttggcacatctatccgcaagacgagaatgtccatctcgacaaactccacgccttttgggataaggcacacggtttctacacgcccgaaaccgcccgggcgcaccgccgcctttcagacgacctcaacggcggagaggctttatccgccacgcaacgcctcgaatgttggcaaatcctgcaacaacatcaaaacggctggcggcaaggcgcagaggagtggagccgttatctttttgggcagccttccgcatccgaaaaactcgccgcctttgtttcaaagcatcaaaaaatacgctag

SEQ ID NO: 41192 - DNA, 1287 bp, Neisseria meningitidis
atgacggcacaacaccaaaccccgctccgcttcattaccgccggcagcgtcgatgacggcaaaagcaccctaatcggacgactgctctacgacagcaaagccctgctgtccgaccaaatcaaaaccttggaatccggcaaaagcaaaggtttgaaagaaaccatagacttctccatcctgaccgacggactggaagccgaacgcgaacagggcattacgatcgatgtggcataccgctatttttccacggcgaaacggaaattcatcatcgccgacacgccggggcacgaacaatacacgcgcaatatggttacgggcgcaagcaccgcttcggcggcagtcgtgctggttgacgcatcccaactggatttcggcgcgcagcccttgcagcttctgccgcagaccaaacgccattccgccatcctccgccaactcgactgcccgcatattgtggtggcggtcaacaaaatggacctgctggattacagcgaagacaaattcaacgccattgtggaggcataccgccggctcgccggacggctcggtttgaaagacgtgcatttcgtaccggtgtccgcactcttgggcgacaacctcgtttaccccggcggcaatatgccgtggtatcggggcgaaccgctgctggccatcttggaaaacctgccgggggcggacgaagtcagccgcaccgccgacgatttttatttccccgtgcaactggtcgtccgccaagatgccgacaaggccgatgatttccgaggctatcaggggcgcatcgaacgcggttcggtcgccgtcgggcaaaccgtccgcatcgaaccgaacgggctgaccgccgaagtgtccgaaatcatcacgccgaaaggggaagtggcgcaggcttttgccggcgaggcggcaaccctccggctggaccgcgacatcgatgtttcgcgcggcgacctttttgtcgataaaaattccccgctcgccccgcaaaaacatctggaagccacgctttgctggtttgacgaacgtccgctcaacaccgcgcgcaaatacctgctcaagcacggcacgcaaaccgtgccggcaaaagtcggggaaattgaaagcgttttggatgtccgcacgctggaacaagaggccggcgcggaatccttgaagatgaacgacatcgccaaagtccgcatcaaccttcaaaaacccgttacggcaacgccttatgcggaaaacaccgccgccggttcgtttatcctgatagacgaagcgacatacggcactgttgcggcaggtatgattttatga

SEQ ID NO: 41193 - DNA, 324 bp, Neisseria meningitidis
atgataattgacgaaaaatctacttcagatgtactgaaacaatatcaagaactagggtttgatttgacaaaacctatgataatagggttttttataggaggttctcaaaaaaatctgcaatcaatagaaagccaactcatttcttatcggcaagattttcaaatcagtattgagcaaaatgaattcggagaaatgtggacttgctattgttccgtcaatatcgtcccttcccttgaaaacattttagctattgaaactacgttatttggtattgcacaaaaaaatgattgtaattatgaaggttttggttcgtatgggaactaa

SEQ ID NO: 41194 - DNA, 405 bp, Neisseria meningitidis
atgagaaaaagtcgtctaagccggtataaacaaaataaactcatggagctatttgtcgcaggtgtaactgcaagaacagcagcagagttagtaggcgttaataaaagtaccgcagcctattattttcatcgtttacgattacttatttatcaaaacagtccacatttggaaatgtttgatggcgaagtagaagcagatgaaagttattttgctgaacgacaaaaccatattaatggaattgagaacttttggaaccgggcaaaacgtcatttacgcaagtttaacggcattcccaaagcgcattttgagctgtatttaaaggggtacgaacggcgttttaacaacagtgagataaaagttcaaatttccattttaaaacaattagtaaaatcgagtttatcctag

SEQ ID NO: 41195 - DNA, 1251 bp, Neisseria meningitidis
atgccgtctgaaagcccttcagacggcatcgcccggctgcgcggcacaaaggcggaaaaaccgtttgccccgtattttcaaacgcgttacacttgccgccgctgttttcagccatttgattacccgcaaccgccgtcattgcgccggcggtttgcctgtcagcgtcattgcgccgctgtaaatacgaaagaacacattatgaccgtatcccccgtcgccttgcgccgtaagaccgagtgcaagcctcatcccaccgcgcgctattggaaaaaatgcgatgtcgaagccctgttcggacttcccttcctcgacctcatttaccaagccgccgaaatccaccgccaaaatttcaacccgcgcgaaatccagctttccacgctgttgtccatcaaaaccggcggttgtcccgaagattgcgcctactgtccgcaatcggcgcaccacaacaccaatctgggcaaagagcagatgatggatgtggatgaaatcgtcgaaaaagccaaaatcgccaaatcgcgcggcgcaagccggttttgtatgggcgcggcatggcgcggccccaaacccaaagacgtggagacggtttccgcaatcatcaaagccgtcaagggcttgggtatggaaacctgtggcacgttcggtatgctcgaagaaggtatggcggaagacttgaaagaggcgggcttggattattacaaccacaacctcgacaccgaccccgaccgctacaacgacatcatccacacccgccaacacgaagaccgaatggatactttgggcaaagtccgcaacgccggtttgaaagtctgctgcggcggcatcgtcgggatgaacgaaacccgcgccgaacgtgccgggctgattgccagcctcgccaatctcgacccgcagcccgaaagcgtaccgattaatcagttggttaaagtggaaggcacgccgcttgccgatgccgaagatttggactggacggagtttgtccgcaccatcgccgtggcgcggattacgatgccgcaaagctacgtccggctgtcggcagggcgcagcaatatgccggaagcgatgcaggcgatgtgctttatggcgggcgcgaattcgattttttacggcgacaagctgttgaccacaggcaatccggacgaagacggcgacagaatcctgatggaaaagctcaacctgtatcccttacagtttgagctggaaggcgaggtcgccgaagtggaaaaagcctcggggattaaagtggattattga

SEQ ID NO: 41196 - DNA, 627 bp, Neisseria meningitidis
atgaacgttaatgttatcaaccatccgctcgtccgccacaaattaaccctgatgagggaggcggattgcagcacctacaaattccggacgcttgccatcgagctggcgcgcctgatggcatacgaggcaagccgtgattttgaaatcgaaaaataccttatcgacggatggtgcggtcagattgaaggcgaccgcatcaagggcaaaacattgaccgtcgttcccatcctgcgtgcaggtttgggtatgcttgacggcgtactcgacctgattccgactgccaaaatcagcgtagtcggactgcagcgcgacgaggaaacgctgaaacccgtttcctacttcgagaaattcgtggacagcatggacgaacgtcctgccctgattatcgacccgatgctggcgacaggcggttcgatggttgccaccatcgacctgttgaaagccaagggctgcaaaaacatcaaggcactggtgctggttgccgcgcccgagggtgtgaaggcggtcaacgacgcgcatcccgacgttacgatttacaccgccgcgctcgacagccacttgaacgagaacggctacatcatccccggcttgggcgatgcgggcgacaagattttcggcacgcgctaa

SEQ ID NO: 41197 - DNA, 843 bp, Neisseria meningitidis
atgtgtcaactgctgggcatgaactgcaatacgccgaccgatattatgttttcctttgaaggcttccgccgcaggggcggcattaccgaccaccatgccgacggtttcggcatcggctttttcgaaggcaaaggcgtgcgcctgttccatgacgacaaacccagtgccaattcgcccgtcgccgacctcgtgcgcgcctaccagattaaatcggaaaacgtcgtcgcccatatccgcaaagcatcacaaggacaaacctcgctggcgaacacccatccctttatgcgcgaaatgtggggcggctactggctgtttgcccacaacggacatttgattgattttttccccgaacagggcgaatttttccaccccgtcggcacaaccgattccgaacgcgcgttctgccacatcctcaaccgcctgcgcacccgctttgccgcccgtcccgacgacgacacgctgtttgacgcgattgcggggctgacgcacgaaatccgcaagttcgggctgtttaactttatgctttcagacggcattgccctgtttgcccacgccagcacactgctgcactacatcgtccgccaagccccgttcggcaaggcgcgcctgctcgacgacgacgtgatggtcgattttgccgaagtaaccacgccctccgaccgcgtcgccgttatcgccaccctgccgctgacccgcgacgaatcatggtcccaacttgccgtggacgaactggtcatgttccgcgaaggcaacatcgtccgacacgaccgtcccgaaaaccccgtctatatgagtgccgaagaaggtctggaaatcgcccgcgccgccggcgtatcggtttga

SEQ ID NO: 41198 - DNA, 2016 bp, Neisseria meningitidis
atgatgaaactcaatccccaacagctcgaagccgtccgctacctcggcggcccactgctcgtccttgccggtgcaggcagcggcaaaaccggcgtgattactcaaaaaattaagcatttgattgtcaatgtcggctacctgccgcataccgttgccgcaattacctttaccaacaaagccgctgcggaaatgcaggagcgcgttgccaaaatgctgcccaaaccgcaaacgcgcgggctgacgatttgcacgttccactctttgggcatgaagattctgcgcgaagaggcgaaccatatcggttacaaaaaaaacttctccattctcgattctaccgacagcgcgaaaatcatcggcgaactcttaggcggtacgggcaaagaagccgtattcaaggcgcagcaccagatttccttgtggaaaaacgatttaaaaacgcctgaagatgtcgttcagacggcatcgaacatttgggaacaacaaaccgcacgcgtgtatgcgagctatcaggaaaccttacaaagctatcaggcagtggacttcgacgacttgatccgcctgcctgccgtgctgttgcagcaaaacagcgaagtgcgcaacaaatggcagcggcggctgcgttatctgctggttgacgaatgccaagatacgaatacctgccaatttacgttgatgaaacttctgaccggcgcggaaggtatgtttaccgccgtcggcgacgacgaccagtccatctacgcatggcgcggcgcgaacatggaaaacctgcgcaaaatgcaggaaaactatccgcagatgaaggtcatcaaactggagcaaaactaccgctccaccgcgcggattctcaaaatcgccaacaaagtcatcgagaacaaccccaagctgttcaccaaaaaactttggtcgaaattgggcgaaggcgagcccgtcaaagtcgttgcctgccaaaacgagcagcacgaagccgactgggtcgtcagccaaatcgtcaaacaaaaactcatcggcggcgacaaaacccaatatgccgatttcgccgtgttgtaccggggaaagcatcaggcgaggattttcgaggaagcattgcgcggcgcgcgcatcccctaccgtctctccggcggacaaagctttttcgacaaagccgaaatcaaagacgtgttgtcttatgtgcggctgcttgccaaccccaacgacgatcccgcctttctgcgtgccgttaccacgcccaaacgcggcatcggcgatgtaacgctgggcaagctcaacacttacgcgcacgaacacgaatgcagcctgtatgaagccgcgcaaaacgaagaagccctcgccacgctgaacaataccaaccgccaacacctgcaagcctttatggatatgttcggcagttaccgtgccaaagccgaaaccggcgaagcgggcgagttcatcaacagcctgctcgaagaaatcgactatgaaaaccacctgcttgccagtgaagaaggcaaagctggcgaaatcaaatggcgcaacgtcggcgatttggtatcatggtttgcgcgaaaaggcggggaagacggcaaaaacatcatcgaactcgcccaaaccgtcgccttgatgacgcttttggaaggaaaagacgaagaagaaaccgatgccgtctcgctatccacgctacacgccgccaaaggtttggagtatccctatgttttccttgtcggttgcgaagaaggtgttttgccgcacaacgacagcatcgaagaaggcaacgtcgaagaagaacgccgcctgatgtacgtcggcatcacccgcgccaaacgccaactcacactgacccactgcgtcaaacgcaaaaaacaaggcacatggcagttccccgaacccagccgattcatagacgaaatgccgcaggaagatttgaaaatcctgggtcgcaaaggcggcgagccgattgtcagcaaagaagaaggcagacgcaaccttgccgatataatcggaaggctcgacaacctaaaaaaaagcggcgcggcggattaa

SEQ ID NO: 41199 - DNA, 915 bp, Neisseria meningitidis
atggatgccgtacaattaaaatcatttgtcgccgtcgcacacgagggcaaccttacccaagccgccaaacgacttttcctttcccagcctgccgtttctgcccaaattaaagcccttgaagaatatgtcggcacgccgctgttcaggcgcacggggaaaggcatggtattgacgcgggcgggcgaaatactgttgcccgaagcggaatccctgctgcaatacaaacacaagctggagcattttgccaaaacgctggcaggcgattattcggaagagaccagtttgggcattatccaccccatcgattcggcaaagctcgtcgcgctgacggacaatatcggtcaaacagcccccaaaacgcgcctgcacatccaatacggaatgagcggcgaaatcctctcgcgcatccaacacaaaaccctgcacggcggctttatactcggcaacgccgcccaacgcggcatccgcagcgtattcctgcaaaacctgacctacgcgctgatttgcccgcgaagccaatatccccatctgacccgctcccttccgcagagcctgcaagaatgcgtatggatagaaatgtcgggcgtgtccggaagtaggaagcacctgcaccagttttggcgcagcaaccggctctcacccaaaaaacagatcttgtgcgactacccccaaaccattatcgatttggttgcaggcggtataggtgtggcaatggtgccgggaaacaaagccgaagcggcggcaaaagaaggcgcgggcgtggctattatcgaatcgtgccgccacagtatgccgctcaatttcatttatgcggaagaatacgaggataatccccacgtctcactcctgctcgagtgcattgaaaaagtatggggagtgcaggcggtgcagccgcccgttgtctcggacaactga

SEQ ID NO: 41200 - DNA, 1524 bp, Neisseria meningitidis
atgaccgtcatcaagcaagaagactttatccaaagtatctgcgatgccttccaattcatcagctactaccatccgaaagactacatcgacgcgctttataaggcgtggcagaaggaagaaaatcccgccgccaaagacgcgatgacgcagattttggtcaacagccgtatgtgtgcggaaaacaaccgccccatctgccaagataccggtatcgcaaccgtgtttttgaaagtcggtatggatgtgcagtgggatgcggatatgagcgtggaagaaatggttaacgaaggcgtgcgccgcgcctacacttgggaaggcaatacgctgcgcgcttccgttctcgccgaccccgccggcaaacgccaaaataccaaagacaacacgcccgccgtcatccatatgagcatcgtgccgggcgacaaagtcgaagtaacctgcgcggcaaaaggcggcggctctgaaaacaaatccaaactcgccatgctcaatccttccgacaacatcgtcgattgggtattgaaaaccatcccgaccatgggcgcgggctggtgtcctcccggcatcttgggcatcggcatcggcggcacgcccgaaaaagccgtgttgatggcaaaagaatccttgatgagccacatcgacattcaagagttgcaggaaaaagcagcgtcaggtgcagaattgtccaccaccgaagccctgcgcctcgaactctttgaaaaagtcaacgcgctaggcatcggcgcgcaaggcttgggcggtctgaccaccgtgttggacgtgaaaatcctcgattacccgacccacgccgcctccaaaccgattgccatgattccgaactgcgccgccacccgccacgtcgaatttgaattggacggctcaggccctgtcgaactcacgccgccgcgcgtcgaagactggcccgatttgacttacagccccgacaacggcaaacgcgtcgatgtcgacaagctgaccaaagaagaagtggcaagctggaaaaccggcgacgtattgctgttgaacggcaaaatcctcaccggccgcgatgccgcacacaaacgcctcgtcgatatgctcaacaaaggcgaagaattgcccgtcgatttcaccaaccgcctgatttactacgtcggccccgtcaatccggtcggcgatgaagtcgtcggtccggcaggtccgaccacagccacccgcatggacaaattcacccgccaaatgctcgaacaaaccgacctcttgggcatgatcggcaaatccgagcgcggcgtggccacctgcgaagccatcgccgacaacaaagccgtgtacctcatggcagtcggcggcgcggcgtatctcgtggcaaaagccatcaaatcttccaaagtcttggcgttccccgaattgggcatggaagccatttacgaatttgaagtcaaagacatgcccgtaaccgtcgccgtagacagcaaaggcgaatccatccacgccaccgccccgccccaatggcaggcgaaaatcggcatcatccccgtcaaatcttga

SEQ ID NO: 41201 - DNA, 1773 bp, Neisseria meningitidis
atgaacaaaatataccgcatcatttggaatagtgccctcaatgcctgggtcgtcgtatccgagctcacacgcaaccacaccaaacgcgcctccgcaaccgtggagaccgccgtattggcgacgctgttgtttgcaacggttcaggcgaatgctaccgatgaagaagacgaagaagatttagaatccgtacaacgcactgttgccgtgttgatagtcaattccgataaagaaggcacgggagaaaaagaagaagtaggagcaagttcaaattgggcagtatatttcgacgagaaaagagtactaaaagccggagcaatcaccctcaaagccggcgacaacctgaaaatcaaacaaagcggcaaagacttcacctactcgctgaaaaaagagctgaaagacctgaccagtgttgaaactgaaaaattatcgtttggcgcaaacggtaataaaatcaacatcacaagcgacaccaaaggcttgaattttgcgaaagaaacggctgggacgaacggcgaccccacggttcatctgaacggtatcggttcgactttgaccgatatgctgctgaataccggagcgaccacaaacgtaaccaacgacaacgttaccgatgacgagaaaaaacgtgcggcaagcgttaaagacgtattaaacgcaggctggaacattaaaggcgttaaacccggtacaacagcttccgataacgttgatttcgtccgcacttacgacacagtcgagttcttgagcgcagatacgaaaacaacgactgttaatgtggaaagcaaagacaacggcaagaaaaccgaagttaaaatcggtgcgaagacttctgttattaaagaaaaagacggtaagttggttactggtaaaggcaaaggcgagaatggttcttctacagacgaaggcgaaggcttagtgactgcaaaagaagtgattgatgcagtaaacaaggctggttggagaatgaaaacaacaaccgctaatggtcaaacaggtcaagctgacaagtttgaaaccgttacatcaggcacaaatgtaacctttgctagtggtaaaggtacaactgcgactgtaagtaaagatgatcaaggcaacatcactgttatgtatgatgtaaatgtcggcgatgccctaaacgtcaatcagctgcaaaacagcggttggaatttggattccaaagcggttgcaggttcttcgggcaaagtcatcagcggcaatgtttcgccgagcaagggaaagatggatgaaaccgtcaacattaatgccggcaacaacatcgagattacccgcaacggtaaaaatatcgacatcgccacttcgatgaccccgcagttttccagcgtttcgctcggcgcgggggcggatgcgcccactttgagcgtggatgacaagggcgcgttgaatgtcggcagcaaggatgccaacaaacccgtccgcattaccaatgtcgccccgggcgttaaagagggggatgttacaaacgtcgcacaacttaaaggcgtggcgcaaaacttgaacaaccgcatcgacaatgtggacggcaacgcgcgtgcgggcatcgcccaagcgattgcaaccgcaggtctggttcaggcgtatctgcccggcaagagtatgatggcgatcggcggcggcacttatcgcggcgaagccggttacgccatcggctactccagtatttccgacggcggaaattggattatcaaaggcacggcttccggcaattcgcgcggtcatttcggtgcttccgcatctgtcggttatcagtggtaa

SEQ ID NO: 41202 - DNA, 324 bp, Neisseria meningitidis
atgatgaccgaaagcgagtttatccgcgcgagcgaagcattatttgaacacatcgaagaccaaatcgacgaaaacggctgggatttcgactgccggtttgccggaaacgtcctgaccatcgaagccgaaaacggcacgcaaatcatcgtcaaccgccacactcccaatcaggaattgtggattgccgccaaaagcggcggctaccatttcgccgaacaaaacggcaaatggctggcaacgcgcgacggacgcgatttttatgatgttttaaacgaagtcctgagcgcggcttcgggcgaagcggtaaagattgccgaattgtaa

SEQ ID NO: 41203 - DNA, 633 bp, Neisseria meningitidis; identical to SEQ ID NO: 38220

SEQ ID NO: 41204 - DNA, 906 bp, Neisseria meningitidis
atgcttaccttccaacaaatcatcttcaaactgcaaacattctgggcagacaaaggctgcaccgtcatccaacccttcgacatggaagtcggtgcaggtacttcccaccccgccacctgcctgcgcgcactcggccccgagccttggtttgccgcctacgtccaacccagccgccgccccaaagacggccgctacggcgacaaccccaaccgcctgcaacactattaccaattccaagtcgccctcaaacccgcccccgccaatatccaagacctttatctcgactccctgcgcgaattgggcatcgaccccaaagtgcacgacatccgctttgtcgaagacgactgggaaaaccccaccctcggcgcgtggggtttgggctgggaagtctggctcaacggcatggaagtaacccagtttacctatttccaacaagtcggcggcatcgactgcacgcccgtactcggcgaaatcacctacggcatcgaacgcttggcgatgtacctgcaaggcgtggaaaacgtctatgacctcgtttgggcaaaaacgctggacggtaatacagtaacttacggcgacgtgtaccaccaaaacgaagtcgaacaatccacctacaacttcgaatacagcgatgccgattggctgctgcgccagttcaacgactacgaagcgcaagccaaacgcctgcttgccgaagaaaacgccagccttgccttgcctgcctacgagctggtcctcaaagcggggcatacgttcaacctcttggacgcgcgcggcgcgatttccgtaaccgagcgggcaacttatattggacgtattcgtgcattgagccgcgccgtggcgcaaaaatatgttgaaagccgcgaaaaactgggcttccctttaatgaaggcaaatgctgcctaa

SEQ ID NO: 41205 - DNA, 2280 bp, Neisseria meningitidis
atgaatacaccgactgatttgaaagtaaccaaacgagacggaagattagaagccattgatttggataagattcaccgtgtcgtcacttgggcggcggaaggattggaaaatgtttccgtgtcgcaggtcgagttgaaatcgcacatccagttctacaacggcatccgcaccgacgacatccacgaaaccatcatcaaagccgctgccgatttaatttcggaagatactccggactaccaataccttgccgcgcgtttggcgattttccatctgcgtaaaatagcctacggcgaatacgagccgccgcacctttacgaccacgttaaaaagctcaccgatgccggaaaatacgacaggcatatccttgaggattacagccgcgaagaatttgacgaactgaacgcctatatcgaccacgaacgcgatatgtccttctcctatgccgccgtcaagcaactcgaaggcaaatatctggtacagaaccgcgttacccgccagatttacgaaacgccgcagtttttatatgttttggtggcgatgtgccttttcagcaaatatcccaaagaaacacgcctcgattacgtcaaacggttttacgatgccgtttccacatttaaagtatcgctgccgaccccgattatgagcggcgtgcgtacgcctacgcgccagttctcaagctgtgtgctgattgaatgcgacgatagtttggattccatcaatgccactaccagcgcgattgtgaaatacgtttcccagcgtgcgggcatcggcatcaatgccggacgtatccgcggactggacagcgaaatccggggcggcgaagcacggcataccggctgcattccgtttttcaaaatgtttcaggcggcggtcaaatcctgttcgcaaggcggcgtgcgcggcggagcggcaactttgttctaccccttgtggcatatcgaagccgaaagcctgctggtgttgaaaaacaaccgcggtgtggaagacaaccgtatccgtcagcttgattacggcgtgcaaatcaaccgcctgctatacacccgcctgattaagggcggcaacattacgctgttttcgcccaacgaggttccgggattgtacgaagcgttttttgccgaccaagacgaatttgagcggctctatacgaaatacgagcaagaccctgatatccgcaagcgcatcattccggctgccgacctgttttccacgctgatgcaggagcgtgccggaaccgggcgcatctacattcaaaacgtcgatcactgcaatacgcacagcccgttcgatccgcgcgtcgcgcctgttcatcagtccaacttgtgtatggaaatcgccctgccgaccaaaccgctggacaatatcaacgatccgaacggcgaaatcgccctgtgtaccctgtccgccttcaacttgggcgcattaaacagcctggacgaattggaagggcttgccgatttgactgtgcgcgcactcgatgcacttttagattatcagggatatccggtagaagccgcgcgtacctccactatgggccgccgttcgctcggtatcggcgtgattaactatgcttattatctggcgaaaaacggtgtccgctacagcgacggctccgcgctcggtctgacccaccgtacctttgaagccatacagtattacctgctcaaagcatcggcaaaccttgccaaagaatacggtgcgtgtacgctctttaaccaaaccgtttattcgcaaggcaaactgcccatcgacacctacaaaaaagatttggatgccgtctgcggcgagcctttgcattacgactgggaaagcctgcgtgccgaaatcgtcaaatacggcctgcgcaactctactctgaccgcgctcatgccgtctgaaaccagctctcaaatcgccaacgccaccaacggcatcgagccgccgcgcggattggtaacggtcaaagcatcgaaagacggcattttgaaacaagtcgtgccggagtttgaaaccctgaaaaatgcctatgaaaccctgtggcagcttcccggcaacgaaggctacctgaaacttgtcggcgtgatgcaaaaattcgtcgatcaatcgatttccgccaataccgcctacgacccgggcaaattcgaaggcggcaaagtttctatgaaacaaatgctcaaagacctgctgaccgcctacaaatacggcgtcaaaaccctgtactaccacaacacccgcgacggcgcggacgatacgcagaccgatattcaggatgacggctgcgcgggcggggcttgtaagatttaa

SEQ ID NO: 41206 - DNA, 2814 bp, Neisseria meningitidis
atgtccaacagacctacactcctcctcgttgacggctcttcctatctctaccgcgcgtatcacgcgatggggcaaaacctgaccgcacccgacggtgcaccgacgggcgcgctgtatggcgtattgaatatgttgcgccgtttgcggtcggaatatccgcacgattattgcgcggtggtttttgatgcgaaaggcaaaaatttccgccatcaaatgtttgaagaatacaaggcgacgcgcccgccgatgcccgacgatttgcgcccgcaggcggaagcactgccggatttagtgcgcctgacgggctggccggtattggtgattgggcaagtggaggcggacgatgtgatcggcacgctggcgaaacagggggcggaacatggtttgcgagtcattgtttcgaccggcgataaggacatggcgcagttggtggatgagcgcgttacgctggtgaacacgatgagcggagaaacgctggatattgaaggcgtgaaggcaaaattcggcgtgcgtcccgaccaaatccgcgattatctcgcgctgatgggcgacaaggtggacaacgtgccgggcgtggaaaaatgcggcccgaaaacggcggtgaagtggctggaagcctacggctcgttgcaaggcgtgatagaacacgcttcggaaatcaagggcaaagtgggcgagaatctgcgtgccgccctgccgcgcctgccgctgtcgtatgacttagtaacgattaaaaccgatgtggacttgcacgccgagctttcagacggcatcgaaagcctgcgctgtactacgccgaaatgggcgcagctggttgtcgatttcaaacgctggggcttccgcacctggctgaaagaagcggaatcaaacatgaataccggctcgaccgatgatttgttcggcagcgacagcatcggcgagcaggcggctttgaatgcggaaatgccgtttgaaaaacaagccgaaaaagccaccgcccccgaaaggctggattatcaagccgttaccaccgaagcgcagtttgccgctttgttggacaaactgtcgcgggcggacacaatcggcatcgatacggaaaccacgtcattagacgcgatgaacgcctcgctggtcggcatcagcatcgctttccaagcaggcgaagcggtttacatccccgtaggacacagcctgaccgccgcgcctgaacagcttgatttacaagacgtattaggccgtctgaaaccgcatttgggaaaccccgccctaaaaaaaatcgggcaaaacctcaaatacgaccaacacgttttcgccaactacggcatcgccctgaacggcattgccggcgacgccatgctcgcttcctacatcatcgagagccatctcggacacggcttggacgaattgtccgaacgttggctgggcttggaaaccattacctacgaatcattgtgcggtaaaggcgcgaagcaaatcagttttgccgatgtcgccatcgggcaggcgaccgaatacgccgcccaagacgccgatttcgccttgcgcctcgaagcgcacctgcgcgcgcaaatggacgccaaacagcttgaaatgtatgaaaaaatggagctgcccgtcgcgcaagtattgtttgaaatggaacgcaacggtgtgcaaatcgaccgcgccgaactcgcccgccaaagcgcggaactcggcgccgagctgatgaagctcgaacaagaagcctacgccgccgcagggcagccgttcaacctcaactcgcccaaacagctgcaagaaatcctgttcgacaaaatgggcatcccgacaaaagggctgaaaaaaaccgccaagggcggcatttccaccaacgaggccgtgctcgaacagctcgcgcccgactaccccctgcccaaaatcatcctgcaaaaccgcagcctggcgaaactcaaatccacctacaccgacaaactgcccgaaatgatttcgccccgggataaccgcgtgcataccacctacgcccaagccgtcgccattaccggccgccttgccagcaacaaccctaatctgcaaaacatccccatccgcaccgccgaaggccgccgtgtgcgccgcgcctttaccgcaccgcaaggcagcgtcatcgtttccgccgactattcccaaatcgagctgcgcattatggcgcacctctctggcgacaaaaccctgattgccgcgttccaaaacggcgaagacgtacaccgccgcaccgccgccgaagtgttcggcacggcgcccgaaaacgtctcgcccgagcaacgccgctacgccaaaaccatcaacttcggcttaatctacggtatggggcaatacggtttggcaaaatcattgggcatcgacaacctttccgccaaaaactttatcgaccgctacttcgcccgctaccccggcgtcgccgaatacatgcagcgcaccaaagaacaagccgccgcccaaggcttcgtcgaaaccctgttcggccgccgcctctacctgcccgacatccgtaacaaaaacgccaacgcccgcgccggagccgaacgcgccgccatcaacgcccccatgcaaggcaccgcctccgacctcatcaaacgcgccatgatagacgtgtcccgatggctttcagagtgcgaagcctccctgtgggactgcctgaagagcaaactgattatgcaggtgcatgacgaactggtgctggaagtaccagaagccgaactggattttgtgaaagaaaaactgccgcagattatggcgaaagtggacggcggattattggatgtaccgctggtggctgaggttggcgtaggggagaattgggaagaggcacattga

SEQ ID NO: 41207 - DNA, 556 bp, Neisseria meningitidis
atgaccaaggctttttggtttgacatatcgaatcctagttttggtaacgcgggaggtttgcgaaccgcgaagttggacagtaaagacgcggattatacaggcaaacgcgttcagacggcatctgaacgccatgccgtctgaacacgcggcttatgccgacttgacggcgagttccgccaagcgtttgctttgtgcgaaggcgatattgttttcttcggcggtcaggacgggagccgctgtcgggaatatcttttttgacggcttcgcagacggcggagactttggggacggtgcgcaatacggcttcgcaaccttcaacgctgtcgatgccgcgagcgattcggagtgcgggattgcgggtgctgccgttttggaaatagtagaggacgaggattttgagggggatttgggttcatgggcggattccgttaaaatggttcggtcttcagacggcataacagttgttccgatgccgtctgaaacagccgcagttcaggcatttgttcctgacggcaaaattggctataacatcgggcatcaatgcccaacttactga

SEQ ID NO: 41208 - DNA, 963 bp, Neisseria meningitidis
atgcccgccaagtttcaacaagaaaccctcaaatcccgtttcgcacaagccaaagtcctggttgttggcgacgtgatgctcgaccgctattggtttggcgacgtgtcccgtatttcacccgaagcccccgtgccggtggccaaaatcggacgtatcgaccaacgcgcgggcggtgcggcgaacgttgcgcgcaacatcgcttcgttgggcggcagggcagggctgttgtccgtaaccggcgacgacgaagccgccgacgcgcttgacgcgctgatggtgcaggacggcgtcgcctcctatctgatgcgcgacaaacaaattgccaccaccgtcaaactgcgcgtcgtcgcccgcaaccagcagcttatccgccttgattttgaagaacatcccaaccgcgaagtgttggaacaaatcaagcggaaataccgcgaaatcttgcccgaatacgacgcaatcattttttcagactacggcaaaggcggcctgtcgcacatctccgatatgatcgattgggcgaaacacgaaggcaaaaccgtattaatcgaccccaaaggcgacgattacgaaaaatacgccggcgccacgctgattacgcccaaccgcgccgaattgaaagaagtggtcggcagttggaaaaacgaaggcgagctgaccgaaaaagcgcaaaacctgcaccgccacctcgatttgaccgcgattttgctgacccgaagcgaagaaggcatgaccttgttcagcgaaggcgaaccgatttaccagcccacccgcgcccaagaagtttacgacgtgtccggcgcaggcgacaccgtcattgccggaatgggcttgggtttggcggcaggctgcaccatgcccgaagccatgcaccttgccaatactgcggctggggttgtcgtggcgaaactcggtacggcggtttgctcgtttgcagagttggttgaagcactggacgggcaataa

SEQ ID NO: 41209 - DNA, 2691 bp, Neisseria meningitidis
atgtccgacaaccgcctcgacaccgcccggcaccattccctgttccttgcccgccagctcgacaacggcaaactcaagcccgaaattttcctgcccatgttggacaaggtgttgaccgaagctgatttccaagcttttgctgattgggacaaaatccgcgcggaagaaaacgaggaagaattggcgcggcagttgcgcgagttgcgccgttatgtcgtgtcgcagattatcgtgcgcgatataaatcgcatcagcgatttgaacgaagtaacccgcacgattacgctgtttgccgattttgccgtcaataccgcgctggattttgcctacgcctattatcgggacatgtacggcacgccgatcgggcgtgataccaaatcgccgcagcatttgagcgtggtggcgatgggcaaggcgggcggctatgagttgaacgtgtcttccgacatcgatttgattttcgtctatcccgaatcgggcgacaccgacggcaggcgcgaacggggcaatcaggaatttttcaccaaagtcgggcagaaactgattgcgttgttgaacgacattaccgccgacgggcaggtgttccgcgtcgatatgcggctgcggccggacggtgattcgggcgcgctggtattgagcgaaaccgcgctggagcaatatttgattacgcaggggcgcgaatgggaacgctatgcgtggtgcaaaggccgcgtggttacgccgtatccgaacgacatcaaatcgctggtgcgccctttcgtattccgcaaatatttagattacagcgcgtatgaggcgatgcgtaacctgcaccgccaaatccgcagcgaagtcagcaaaaaaggcatggcggacaacatcaaactcggcgcgggcggcatccgcgaagtcgaatttatcgcccagatttttcagatgatacgcggcggccaaatgcgtgcgctgcaattgaaaggcacgcaggaaacgctgaagaaacttgccgagctgggcatcatgccgtctgaaaacgttgaaaccctgctcgccgcctaccgcttcctgcgcgatgtcgaacaccgcctgcaatactgggacgaccagcaaacccaaactctgcctacctcgcccgaacagcagcaactgcttgccgaaagtatgggtttcgacagctacaccgccttttcagacgacctcaacgttcatcggaacaaggtcaatcggttgttcaacgaaattctgagcgaacccgaagaacaaacgcaaagcaacagcgaatggcaatgggtttggcaggacaagcccgacgaagaagaacggcaaggccgtctgaaagaacacgggtttgatgccgaaaccattgccacgcggctcgaccaaatccgccacagccataaataccgccacctctccgcacacgcccagccgcgtttcgatgcggttgtgccgctgttcgtacaggcggcggcagcgcaaagcaacccgaccgatacattgatgcggctgttggattttctcgaaaacatcagccgccgatccgcctatctcgccttcctcaacgaacatccgcaaaccttggcgcaactggcgcagattatgggccaaagttcttgggtggcggcgtatctgaacaaatatccgattttgttggacgaactcatcagcgcgcagcttttggataccgcgtttgattggcaggcgctcgccgccgccctttcagacgacctcaaagcctgcggcggcgatactgaagcgcaaatggacaccctgcgccatttccaacacgcccaagtcttccgcctcgccgttcaagacctcgccggactgtggacggtagaatccctctccgaccagctctccgcccttgccgacaccatcctcgccgccgccctgctgtgcgcgtgggcggacatgcccaaaaaacaccgcgacaccccgcaatttgccgtcgtcggctacggcaagctcggcggcaaagaactcggctacgcctccgacctcgacttggtctatctttacgacgatccccatcccgaagcaggcgacgtgtacagccgcctcgcccgccgcctgaccaactggctttccaccgccaccggcgcaggcagcctctacgaaaccgacctgcgcctgcgccccaacggcgacgcaggtttcctcgcgcacagcatcgccgcctttgaaaaataccagcgcgaaaacgcgtggacgtgggaacaccagtcccttacccgcgcccgcttcatctgcggcacacccgaaattcagacggcattcgaccgcatccgcaccgaaatccttaccgccgaacgcgaccaaaccgccttggcagacgaaatcatcgaaatgcgcgaaaaaatgttccccactcatcccccagccgacagcaacgtcaaatacgcacgcggcggcgtggttgatgtcgaatttatcgtccaatatctgatacttgcccacgcccgaaaatatccgcaactcttggacaactacggcaacatcgccctcttgaacatcgccaccgactgtggcctcatcgacaaaacccttgcagaacaaagccgcaccgcctaccgcttctaccgccggcagcaacacaataccaaactgcgcgacgcagaaaaaaccgaagtaagcggcgaattgctggcacattacggcaatgtcaggaaattgtggcgggaagtgttcggcgaagaagcggcaaccgcctga

SEQ ID NO: 41210 - DNA, 732 bp, Neisseria meningitidis
atgataaaacttactgcacaacaaatatttgataagttgctggatgaagaaaaaatcttatcggccaatggtcaaattagatttttcttaggcgatgtggatattatcgtcaaacaaaaagatgttgtcggcaacatcattcaggaatggctcggcggatgattgagaaaaagggaaattgaatttgatgtttcaaccaatacccaaatgcctcccgatttctttttaaataaaaaagaccgcagcagagaattgttggaagtaaaggcgttcaaccgaaatgccggcccgggttttgatattgcagattttaaaatgtattctgatgaaatcattcataagccctatatgctggatgtagactatttaatattcggttacgatatggacgacaacggcaatgtaaccatcaaggatttatggcttaaaaaagtatggcaaattacgagaagcatggatgggtgggcaattaatcttcaagtcaaaaaaggcgtggtgcataaaatccgcccgggtgtttggtacagcataaataaaaagaatatgcctatgtttgaatgcttggaagattttgtttccgcaattgaagaaaccgtttatcaaaacccggcaacacggcataacgcatccttatggaaaaagaaatttgaggaagcctataaaaaacactacaaccgatcgatttccatacctcgttggcacgaaattgcacacaaatacaaaaagaaataa

SEQ ID NO: 41211 - DNA, 489 bp, Neisseria meningitidis
atgatgagtaataaaatggaacaaaaagggtttacattgattgagatgatgatagtcgtcgcgatactcggcattatcagcgtcattgccataccttcttatcaaagttatattgaaaaaggctatcagtcccagctttatacggagatggtcggtatcaacaatatttccaaacagtttattttgaaaaatcccctggacgataatcagaccatcaagagcaaactggaaatatttgtctcaggctataagatgaatccgaaaattgccgaaaaatataatgtttcggtgcattttgtcaataaggaaaaaccaagggcatacagcttggtcggcgttccaaagacggggacgggttatactttgtcggtatggatgaacagcgtgggcgacggatacaaatgccgtgataaggcttctgccgaagcctattcggagaccttgtccgcagatgccggctgtgaagccttctctaatcgtaaaaaataa

SEQ ID NO: 41212 - DNA, 372 bp, Neisseria meningitidis
atgaaactcctcttcatcctcctagtcctcttcgtcgccgtcgaacatttctacatcgcctggcttgaaatgacacagattcccagcgaaaaagcggcggaaacgttcaagctgccttatgaatttatggaacaaaagcgcgtgcagaccctgttcagtaaccaagggctgtacaacggctttctcggcatcgggctggtgtggtcgcggtttgccgcgccggacaacgccgtttacggcgcgacgattctgtttctcggttttgtattgattgccgccgcgtggggcgcgttctcttccggcaacaaaggcatactcgtcaaacaaggtttgcccgcatttttggcagcggcggcggtgttggcggtatga

SEQ ID NO: 41213 - DNA, 927 bp, Neisseria meningitidis
atgtcttttgccttcttttttcccggacaaggttcccaaagcctcggtatgatgaacggctttgccgaacacgccatcgtcaaaaacacctttgccgaagcctccgccatattggggcaggacttgtgggcgatgattaacggcagcgatgccgaaatcatcggacaaaccgtcaacacccagcccatcatgctggctgccggcattgccacctatcgcgcctacttggaagccggcggtaaagccccttccgtcgttgcaggccacagcctcggcgaatacaccgccctcgtcgctgccggctcattggattttgcagacgcggtcaaactggtccgcctgcgcgccgaactcatgcaatctgccgtaccgcaaggcgtaggcgcaatggccgctattttgggtttggaagatgaacaagtaaaagccatctgtgccgaagctgcacaaggcgaagtcgttgaagccgtcaacttcaactccccaggccaagtcgtgattgccggcaataccgccgccgtcgagcgcgctatgcttgccgccaaagaagccggtgccaaacgcgccctgccgctgcccgtgtccgtaccttcccattgcagcctgatgaaacccgccgccgacaaacttgccgaagccctgaaaaccgttgaaatcaagcagccgcaaatccgcgttatccacaacgccgacgttgccgcctacgatgatgccgacaaaatcaaagacgcgctcgtccgccagctttacagccccgtacgctggacggaaaccgtcaacgcccttgtttcagacggcattgccgaatccgccgaatgcggcccgggcaaagtgttggcgggcttggcaaaacgcatcaacaaggccgccgcgtgcagcgcgctgaccgatgccggacaggttgccgcctttatcgaagcgcactga

SEQ ID NO: 41214 - DNA, 693 bp, Neisseria meningitidis
atgagtaacaatttaacccttgctgatgttcctgatttttctgattggcgtttagccccgttgtggacgctggaacaagccgctttattgtgggcgggaattaacccggcgttttccacttttgaggatatatggaaggaacacccgcgcaaacaggcgtgggcaaaaattgcattacaggcttttttgggcggtattgttttaaaaacactgccggtgtatgagttgtatttgcttgatgcaggcggttgggcttattgcgacaaccaaaaaactgctatttttagaatgaatgacatcgcaccaaaggacacgaccattatgcaagatgtgctaattggctggacatcggaagaacgtgtgtttagcttgaggcaaaccattcaggcagaagaacaggcaaggcgggaagcggctaaagcagaggcagaaaaacaggaagtgagggcattgccttattgcgttattcccgaatttgaaacccctgaatttgaaaccgcctgtttagtggtgagggatttttggaacaggcaggcggtaggggttgcaccccctaaggcaattattattcaagagtttattaagaacacctttaagaatataacaggggtagaacccaaggaggcggcaatcaggcgcattgacagtttgacgcgcccgccgttattcaaaaaccaatctaaaaaacaataa

SEQ ID NO: 41215 - DNA, 442 bp, Neisseria meningitidis
tacatctctgcgcagcaaactttacaagatattaatgaattaggaaattcaagcccagaagcacaacttgctgccgcgagcctattacaggacagtgcttttgcggtaaaagacggcattaattccgccaaacaatgggctgatgcccatccgaatataacagcaacagcccaaactgcccttgccgtagcagaggtcgcaggtacggtttggagaggtaaaaaagtagaacttaacccgactaaatgggattgggttaaaaataccggctataaaaaacctgctgcccgccctatgcagactttagatggggagatagcaggtaggaataagccagcgaagcaagctactcctaatggcaaagctggtgtttctacacaacaatctttgcaaaatagtctcgttccacaaaaaaattatacgcatactacctataatggtg

SEQ ID NO: 41216 - DNA, 195 bp, Neisseria meningitidis
gtgaagcataagctcgcgtcttggtggaaaaccatcaagctgacggcaaacttgatggcaggcgtgcctgattatgaaaactacgttgcacagcagcgcaaacataatcccaacgcccccgtgatgaccaagctgcaatttcaagactattgccgcaaacgccgctgcggcgcaaacggcggacgctgctgttaa

SEQ ID NO: 41217 - DNA, 1185 bp, Neisseria meningitidis
atggctaaggaaaaattcgaacgtagcaaaccgcacgtaaacgttggcaccatcggtcacgttgaccatggtaaaaccaccctgactgccgctttgactactattttggctaaaaaattcggcggtgctgcaaaagcttacgaccaaatcgacaacgcacccgaagaaaaagcacgcggtattaccattaacacctcgcacgtggaatacgaaaccgaaacccgccactacgcacacgtagactgcccggggcacgccgactacgttaaaaacatgattaccggcgccgcacaaatggacggtgcaatcctggtatgttccgcagccgacggtcctatgccgcaaacccgcgaacacatcctgctggcccgtcaagtaggcgtaccttacatcatcgtgttcatgaacaaatgcgacatggtcgacgatgccgagctgttggaactggttgaaatggaaatccgcgacctgctgtccagctacgacttccccggcgacgactgcccgatcgtacaaggttccgcactgaaagccttggaaggcgatgccgcttacgaagaaaaaatcttcgaactggctgccgcattggacagctacatcccgactcccgagcgtgccgtggacaaaccgttcctgctgcctatcgaagacgtgttctccatttccggccgaggtacagtagtaaccggccgtgtagagcgcggtatcatccacgttggtgacgagatcgaaatcgtcggtctgaaagaaacccaaaaaaccacctgtaccggcgttgaaatgttccgcaaactgctggacgaaggtcaggcgggcgacaacgtaggcgtattgctgcgcggtaccaaacgtgaagacgtagagcgtggtcaggtattggccaaaccgggtactatcactcctcacaccaagttcaaagcagaagtgtacgtactgagcaaagaagagggcggccgccataccccgttcttcgccaactaccgtccccaattctacttccgtaccaccgacgtaaccggcgcggttactttggaagaaggtgtggaaatggtaatgccgggtgagaacgtaaccattaccgtagaactgattgcgcctatcgctatggaagaaggcctgcgctttgcgattcgcgaaggcggtcgtaccgtgggtgccggcgtggtttcttctgttatcgcttaa

SEQ ID NO: 41218 - DNA, 648 bp, Neisseria meningitidis; identical to SEQ ID NO: 37687

SEQ ID NO: 41219 - DNA, 1380 bp, Neisseria meningitidis
atgctgctcgacctcaaccgcttttccttttccgtcttcctgaaagaagtccgcctgctgaccgctcttgccctgcccatgctgttggcgcaggtcgcgcaggtgggcatcggttttgtcgataccgtgatggcgggtggtgcaggcaaggaagacttggcggcggtggctttgggcagcagcgcgtttgccacggtttatattacctttatgggcattatggcggcgctgaacccgatgattgcccagctttacggcgcgggtaaaaccgacgaagtgggcgaaacgggacggcaggggatttggttcgggctgtttttgggcgtgttcggcatggtcttgatgtgggcggcgattacgccgttccgcaactggctgaccttgagcgattatgtggaaggcacaatggcgcagtatatgctgttcaccagcttggcgatgccggcggcaatggtacaccgcgcactgcacgcctacgcctccagcctgaaccgcccgcgcctgattatgttggtcagctttgcggcgtttgtgttgaacgtgccgctgaactatattttcgtttacggcaaattcggtatgcccgctttgggcggcgcaggctgcggactggcgacgatggcggtgttttggttcagcgcgctggcattgtggatttatatcgccaaggaaaatttcttccgcccattcggactgacggcgaaattcggcaaaccggattgggcggtgttcaaacagatttggaaaatcggcgcacccatcgggctgtcttattttttggaagccagcgcgttttcgtttatcgtgtttttgattgcgcctttcggcgaggattatgtggcggcgcagcaggtcggcatcagtttgtcggggattctctatatgattccgcaaagcgtcggctcggcggggacggtgcgcatcagcttttcgcttgggcggcgcgaattttcgcgggcgcgttatatttcgggcgtgtcactggtgttaggatggatgctcgccgtgattaccgtgctttccttggtattattccgttcgccgctggtaagtatgtacaacaatgatccggcggttttaagcatcgccgccaccgtcttactgttcgccggcttgttccaaccggcagacttcacccaatgtatcgcctcctacgccttgcgcggctacaaagttacaaaggtgccgatgttcatccacgccgccgccttttggggctgcggtctgctgccgggctacctgctcgcctaccgtttcgatatgggcatttacggcttctggacggcattgattgcctcgctcaccatcgccgccatcgccttggtgtggtgcttggaattgtgcagtagggagatggtcagatcgcataaggtcgtctga

SEQ ID NO: 41220 - DNA, 933 bp, Neisseria meningitidis
atgcagcggtcgagtgccgaggaaagtgcttgtgcaaatgcgttcattgcgggaatacgttgggggaaaacttgcggattttaccacgattcttgcgttgtcggcagacggcggcggtttggtggtacaatgtgcgccgtttgcagccttaaggtgtttctgtatttttggagtatggaaacgcattcgggctgttttttgcggaagacggtaatgaaagacgatgttttgaaacagcaggcacacgcggcgatacagaagagactgggctacgcgttccgcgatatttcgcttttgcggcaggctttgacgcacaggagccatcatgcgaagcacaacgagcggttcgagtttgtcggtgattcgattttgaattatacggtggcgcggatgctgtttgacacgtttccgaagttgaccgagggcgagttgtcgcggttgcgggcaagtctggtcaatgagggcgtgctggcggaaatggcggcggaaatgaatgtcggcgacggcctgtacttgggggcgggcgagttgaagagcggcggcttcagacggccttcgatactggcggacgcgatggaggcgatgtttgcggcggtcagcttcgatgcggatttcaacacggcggaaaaggtggtgcgccatttgtttgcagaacgcgtccggcgagtcgatttccaaaatcaggcaaaagacggcaaaactgctttgcaggaggcgttgcaggcgcgccgtttcgccttgccgaaataccgtatcgaagagcaaatcggccatgccaacgacagtatgtttgtggtttcctgcgatttgggcgaactgggtttcgtgtgccgtgccaaagggacgagccgcaaggcggcggagcaggaagcggcgaaagaggctttgaaatggctggaagagaagctgccgctgaagaagaaaaagaaatga

SEQ ID NO: 41221 - DNA, 957 bp, Neisseria meningitidis
atgaacaccgccgccatctaccgccagtaccaaacctatgtccgctccgataaatccggctgggcgttggacggctgttccgacagcgcgctcattgcgcaggcaaaacagcccggtttgcatctggaaatgtgcatcaaccgcttcgactcgggcatcaccttgtcgcggatgcgcggcggcggaacgggcgcgtttcccaccgaaatccacaatttcagccacaactgcgccttgttcgtcatggtgtcggggcagaaccggttacaaatgggcggcagggaataccgcccgtctgccggcgaaatctggctggtacgcggcgagttggcggacgtatccgaaaccctgctgcccgacaacagcggcatgtgcgcgctgcatttggatttttcgctggaaaaactgcgccgctggcacgacgaaggcttgctggacgaacgcctgttttcgccgcaaacgataggccgattcgccctgcaacggctggcgcaaaacgcagcggcactgacggcggcggcctgcccactgctgcaacgcccgttcgaatcggacggcttcggcctgcttgccgacgaagccgccgcgctggaactctccgcccgattattgcgcttcaccttccgccgccacgacaacggttaccgccgccggcgcatagacgaagccgccgacatcctgcaacacgaattcgcccgtccgctgaccatcgccgaaatcgcccgccgcgtcggactgaacgaatgctacctgaaacgctatttcaaagcgcaaaccggcgaaaccgtcgccggatgcctgcgccgcctgcggctggaacacgcgctcgccctcatcgaatccggcagcaccgtccaagccgccatgcacttttgcggctaccgccacgcgggacggttcaacgaagcgttcagacggcattacggatttttgccttcggatgtgaagaagtgctga

SEQ ID NO: 41222 - DNA, 324 bp, Neisseria meningitidis; identical to SEQ ID NO: 38492

SEQ ID NO: 41223 - DNA, 540 bp, Neisseria meningitidis
atggctcggttgagagagttttataaagagacagttgttcctgaattggttaaacaatttggttacaaatcagtaatggaagtcccgcgtattgaaaaaattaccttgaatatgggtgtgggtgaggctgttgctgacaaaaaagttatggaacatgctgtttccgatttagagaaaattgccggtcaaaaaccggttgttactgttgcccgtaaatctatcgcaggttttaaaatccgtgataactatccggttggttgcaaagtaacattgcgtcgtgatcaaatgtttgaattcttggatcgtttgattactattgcattacctcgcgtacgtgacttccgtggtgtgagcggtaaatcatttgatggccgtggcaattacaatatgggtgttcgtgagcaaattatttttccggaaattgaatacgataaaattgatgctttgcgtggtttgaatattactattactactacagcaaaaaccgatgaggaagcgaaagctttattgtcattgtttaaatttccgttcaaaggataa

SEQ ID NO: 41224 - DNA, 1434 bp, Neisseria meningitidis
atgcctgcacgaaacagatggatgctgctgctgcctttattggcaagcgcggcatatgccgaagaaacaccgcgcgaaccggatttgagaagccgtcccgagttcaggcttcatgaagcggaggtcaaaccaatcgacagggagaaggtaccggggcaggtgcgggaaaaaggaaaagttttgcagattgacggcgaaaccctgctgaaaaatcccgaattgctgtcccgcgcgatgtattccgcagtggtctcaaacaatattgccggtatccgcgttattttgccgatttacctacaacaggcgcagcaggataagatgttggcactttatgcacaagggattttggcgcagacagacggtagggtgaaagaagcgatttcccattaccgggaattgattgccgcccaacccgacgcgcccgccgtccgtatgcgtttggcggcggcattgtttgacaacaggcagaacgaggcggcggcagaccagttcgaccgcctgaaggcggaaaacctgccgccgcagctgatggagcaggtcgagctgtaccgcaaggcattgcgcgaacgcgatgcgtggaaggtaaatggcggcttcagcgtcacccgcgaacacaatatcaaccaagccccgaaacggcagcagtacggcaaatggactttcccgaaacaggtggacggcacggcggtcaattaccggctcggcgcggagaaaaaatggtcgctgaaaaacggctggtacacgacggcgggcggcgacgtgtccggcagggtttatccggggaataagaaattcaacgatatgacggcaggcgtttccggcggcatcggttttgccgaccggcgcaaagatgccgggctggcagtgttccacgaacgccgcacctacggcaacgacgcttattcttacaccaacggcgcacgcctttatttcaaccgttggcaaaccccgaaatggcaaacgttgtcttcggcggagtgggggcgtttgaagaatacgcgccgggcgcgttccgacaatacccatttgcaaatttccaattcgctggtgttttaccggaatgcgcgccaatattggatgggcggtttggatttttaccgcgagcgcaaccccgccgaccggggcgacaatttcaaccgttacggcctgcgctttgcctgggggcaggaatggggcggcagcggcctgtcttcgctgttgcgcctcggcgcggcgaaacggcattatgaaaaacccggctttttcagcggttttaaaggggaaaggcgcagggataaagaattgaacacatccttgagcctttggcaccgggcattgcatttcaaaggcatcacgccgcgcctgacgttgtcgcaccgcgaaacgcggagtaacgatgtgttcaacgaatacgagaaaaatcgggcgtttgtcgagtttaataaaacgttctga

SEQ ID NO: 41225 - DNA, 558 bp, Neisseria meningitidis
atgaacatcatcgacaccgccctccccgacgtaaaaattttaaaaccgcaagtcttcacagacgggcgcggtttttttatggaaaccttccgcgacgggtggttcaaagaaaatattgccgaccgaaccttcgtgcaggaaaaccactccaaatccggcaaaggcgtattgcgcggcctgcactaccaaaccgaaaacacacaaggcaaactcgtacgcgtagttgtcggcgaagtgttcgacgtggccgtcgatatgcgcgaaggttcgccgactttcggcaaatgggcgggcgcaaccctgtccgcgcaaaaccaatgccagctttggatacccgaaggcttcgcgcacgggttttgcgttttgggcgacgcagcggaagtcgtgtacaaatgcacggactattacaagcctgaagccgaacaggttttaatatggaacgacccgacagtcggcataggctggccgcttcaaaccgcgccgctgctgtcgcccaaagatcttgccggtaaagcgtgggcgcaagctgaaaagctccgccttacgctttcccgataa

SEQ ID NO: 41226 - DNA, 1785 bp, Neisseria meningitidis
atggaactgatgactgttttgctgcctttggcggcgttggtgtcgggcgtgttgtttacatggttgctgatgaagggcaggtttcagggcgagtttgccggtttgaacgcgcacctggcggaaaaggcggcaagatgtgattttgtcgaacaggcacacggcaaaaccgtgtcggaattggcggtgttggacgggaaataccggcatttgcaggacgaaaattatgctttgggcaaccgtttttccgcagccgaaaagcagattgcttatttgcaggaaaaagaggcggagtcggcgcatctgaagcagtcgtatatcgatttgcaggaaaaggcgcagggtttggcggttgaaaacgaacgtttggcaacccagctcggacaggagcggaaggcgtttgccgatcaatatgcgctggaacgccaaatccgccaaagagtcgaaaccgatttggaagaaagccgccaaactgtccgcgacgtgcaaaacgaccttgccgatgtgggcaaccgttttgccgcagccgaaaaacagattgcccatttgcaggaaaaagaggcggaagcggagcggttgaggcagtcgcataccgagttgcaggaaaaggcacagggtttggcggttgaaaacgaacgtttggcaacgcaaatcgaacaggaacgccttgcttctgaagagaagctgtccttactgggcgaggcgcgcaaaagtttgagcgatcagtttcaaaatcttgccaacacgattttggaagaaaaaagccgccgttttaccgagcagaaccgcgagcagctccatcaggttttgaacccgctaaacgaacgcatccacggtttcggcgagttggtcaagcaaacctatgataaagaatcgcgcgagcggctgacgttggaaaacgaattgaaacggcttcaggggttgaacgcgcagctgcacagcgaggcaaaggccctgaccaacgcgctgaccggtacgcagaataaggttcagggtaattggggcgagatgattctggaaacggttttggaaaattccggccttcagaaagggcgggaatatgtggttcaggcggcatccgtccgaaaagaggaagacggcggcacgcgccgcctccagcccgacgttttggtcaacctgcccgacaacaagcagattgtgattgattccaaggtctcgctgacagcttatgtgcgctacacgcaggcggcggatgcggatacggcggcacgcgaactggcggcacacgttgccagcatccgtgcacacatgaaaggcttgtcgctgaaggattacaccgatttggaaggtgtgaacacattggatttcgtctttatgtttatccctgtcgaaccggcctacctgttggcgttgcagaatgacgctggcttgttccaagagtgtttcgacaaacggattatgctggtcggccccagtacgctgctggcgactttgcggacggtggcgaatatttggcgcaacgagcagcaaaaccaaaacgcgctggcgattgcggacgaaggcggcaagctgtacgacaaatttgtcggctttgtacagacgctcgaaagcgtcggcaaaggcatcgatcaggcgcaaaacagctttcagacggcatttaagcaacttgccgaggggcgcgggaatctggtcggccgcgccgagaaactgcgtctgttgggtgtgaaggcaaacaagcagcttgcacgcgatttgaccgaacgtgccaatgaaacaacggcgttgtcggaatctttggaatatgtggcagaagatgaagcagtctga

SEQ ID NO: 41227 - DNA, 678 bp, Neisseria meningitidis; identical to SEQ ID NO: 37180

SEQ ID NO: 41228 - DNA, 1155 bp, Neisseria meningitidis
atgaaattcatcgacgaagcaaaaatcgaagtcgccgcaggcaaaggcggtaatggcgcaaccagtttccgccgcgaaaaattcgtaccgcgcggcggcccggacggcggcgacggcggcaaaggcggtagcgtctgggcggaagccgacgaaaacaccaacaccctcgtcgaataccgcttcgttaaacgctaccaagccaaaaacggcgaaaaaggccacggttccgaccgttacggcgcaggtgcggacgacatcgtcctcaaaatgcccgtcggtaccctcatccgcgacctcgacaccgacgaaatcgttgccgacctcacttaccacggacagcgcgtctgcctagccaaaggcggcaaaggcggcttgggcaacatccacttcaaatcctccgtcaaccgcgcgcccaaacaatccacgcccggcgaagaaggcgaaacccgctccctgcaactcgaactcaaagtcctcgccgatgtcggcttattgggtatgcccaacgtcggcaaatccaccctgattaccgccgtatccgccgcacgccccaaaatcgccaactaccccttcaccaccctgcatccgaacttgggcgtggtacgcatcgacgaaaaccacagcttcgtgatggccgacatccccggcctgattgaaggcgcggcagaaggcgcgggtttggggcatcgtttcctcaaacacttatcgcgcaccggattattgctgcacgtcgtcgatttggcgcccttcgacgaaaccgtcaaccctgccgaagaagcacttgctatcatcaacgaattgcgcaaatacgatgaagaactttacggcaaaccgcgctggctggtgctgaataaactcgacatgcttgacgaagaagaagcccaaacgcgcactgccgccttcctcgaagccgtcggctgggactaccccaaacccgacgaccgtttccaatttgacatggaaaccccgcgcctcttccaaatcagcgcgctgacccaccaaggcacgcaggaattggtacaccaaatcaaccaatacctgaccgagaaaaaacgtatcgaagctgaaaaagccgaagcggagaaagcagcggcaaatgttgagattgccgagcaacagcctaaaacggatacaggcgtgtttaagccggagtga

SEQ ID NO: 41229 - DNA, 252 bp, Neisseria meningitidis
atgggcagcatcgaacagcgtttggaatatctagaagaggcgaacgacgtgctgcgtatgcagaaccacgtcctgtccaccgccttcaaagccctaatccgcgcccttcccgccgaaaccgccgaagtcgcggtcgagtcgattcagcttgcttttgaagacgcactggcggaattgagctatgaggacagcccgcatacggatttgttccacgacgttacttatgcgtttttccgtgaaaaagaacgttaa

SEQ ID NO: 41230 - DNA, 462 bp, Neisseria meningitidis
atgtctgattttccccccgtttcccgattccttgccgacgaagccgccacactcgatttgggcgcggcgtggtcttcccgtttaaacgcaccgctggtcatttatctcgaaggggatttgggtgcgggcaaaaccacgctgacacgcggcatcctgcgcggattgggtcatcagggcgcagtcaaaagcccgacctacgccatcgtcgaatcttatccgctggaacgcttcaccttgcaccatttcgacctctaccgcttctcgttccccgaagaatgggaagatgcggggcttgacgaactgtttgccgcaaacagcgtctgcctgatcgaatggccgcaacagggcggggaatttacgccgcccgccgacatcaccgcaacattgacacacgacggcggcggcagaaaatgcctgctgaccgcccataccgaacgaggacgcgaaagcctgccgctatga

SEQ ID NO: 41231 - DNA, 750 bp, Neisseria meningitidis
atgcttatccaggcagttaccattttccccgaaatgttcgacagcattacccgctacggcgtaacgggacgcgcgaacagacagggaatctggcagtttgaagcagtcaatccccgaaagtttgccgacaacagattgggctacatcgacgaccgcccgttcggcggcggcccgggaatgattatgatggctccgccgcttcatgcagcaatagaacacgccaaagcacaatcttcccaagctgcaaaagtcatttacctcagcccccaaggaaaaccgctgacacacccaaaagcggcagaactggcagaacttccgcatctgattctgctgtgcggacgctatgagggaatagacgaaagactgctgcaaaccagcgtcgatgaagaaatcagcatcggagacttcgttgtttccggcggagagcttcccgccatgatgctgatggatgcggtattgaggctcgtacccggcgtattgggcgatatgcagtctgccgaacaagattcgttctcaagcggcattttggactgcccccactacaccaaacccttagaatttcaaggcatggctgttccggaagtattacgttccggcaatcatggcttgatagcggaatggcggttggaacaatcgctgcgccgcaccttggagcgcagacccgatcttttggaaaagcgcgttttaatcccaaaggaatcccgcctcttagaaaccatccggcaagagcaacgggaaatccaatcataa

SEQ ID NO: 41232 - DNA, 501 bp, Neisseria meningitidis
atgtcccaatatttcaccctcttccggattgaacccgctttcgatatcgacaccgaaaacttggaacaaacctaccgcgccttggccgcccgtttccatcccgataaattcgcttcagcttccgcctttgagcaaaagcaggcagtgatgatgtcttccaccatcaacgatgcctaccgcaccttgaaaaaccccatcgaccgcgccgcctacctgctgaaaacatcgggcatcgatgccgacgcgccggagcataccgctttcgcccccgaattccttatgcagcaaatggaatggcgcgaaacgctgatggaggcacgggcaggcaacgaccttgaatccttgaaaaatctcgacaacgaaatccgcgacgagcaagaaaaactgttctgcggtctgaaacagtcgtttgcccgacaagattacgacacagccgcacaacaagtccgccaaggcaggtttctcgacaaactccgcaacgaaatttcctcggcattataa

SEQ ID NO: 41233 - DNA, 1689 bp, Neisseria meningitidis
atgaccaaacaaaaactagaactcacttggataggcaaacataaacgtccgaaattagaagcacggatattacttgaagaccctgaaaaatcctatcatgccaaagtgcggtcggaatcggtggcgtttgataatcgattgattttcggtgacaacctgttggcactcaaagcgttggagcaggaatttacgagcaaagtgaaatgcgtgtttatcgacccgccgtataacacgggcagtgcttttgcccattatgatgatgggctggagcattccatttggctaggacttatgcgcgaccgtttggagattattaaacgcttgctttcagacgacggctcactgtggattaccattgatgacaatgaagcacattatttgaaagtgttatgtgatgaagtgtttggtcgggggaattttatagcaaatattgtgtggaatcataggaaaagtgtgcaaagtgatattgttatcagtctatcccacaaccatctattggtttttgcaaaatcaaaagataaagttacgctaaaccgattgcaactagttgatgctgaaaaatacagtaatccagataatgacccgcgtggattgtggtatgcaactccttttgatgcacctaatattcgaccaaatctgacgtatccaattacaaaccctaacacaggcgaggaatatttaccgcccaaagggcgttgttggcgtacaacccaagaggaatatttgaaagctttagctgataatagaattgtttttggtaaaaccggtaagtcgaagccacaaatgaaacgttttttgagtgaagctcaatcaaaaggtagcagtgtaaaaacttggtgggatgatgcaggcacagccacagaaggcacaaaagaattgcaaaaaatgaattttgactttgatacaccaaagccagaacgactattagaaaaagtattacaaatcgcaaccaaccccggtgatctcgtcctagattctttcgcaggctcgggcactaccggcgcagttgcccataaaatgggacggcgttggattatggtggagctgggcgaacattgccatacgcatattatcccgcgtttgcaaaaagttattgacggcaaagaccaaggcggaatttccaaagcggtgaactggcagggtggcggcggtttccgctatttccgtttggcgccgacactgattgtgaacgacaaatggggcaatcaaatcatcaatcccgactacaaccctgaaatgctggcggaagctttggcgaagctggagggatttacttatatgccgtctgaaaacctttggtggcaacatggctattccagcgaaaacgattttatctacgttaccacccaaagcctatctgctgaacagttgcaagtgctttcagacgaggttggcgcaggtcgcagcctgctaatctgctgctccgcttggcgtgggattacggcagatcaggcggcagaacgtttcccgaatctttccctaaaaaaaatccccaaaatgattttgaaacgctgcgaatggggacacgatgattacagcttgaacgtcgccaatcttccgatggcagaagaagagcctgaaccaaggccgtctgaaaaccaacccgccgccaaaaccaaatccgtgaaacgcaaaagtgcggtcgaaaatcagggcggattgtttgatggagaggatagtgatgggtaa

SEQ ID NO: 41234 - DNA, 177 bp, Neisseria meningitidis
atggttgatgaaaagttggctgagtatcgaaaacgcgctgaagcaaagcgcacgacaaaaaaagtctcatttaacctggaaacagaaaaagatattttggatgttgcaaataatattgatttttctcaatgggttaaagagaaacttcgagaaaagctgaaaaaagaacttgattga

SEQ ID NO: 41235 - DNA, 1143 bp, Neisseria meningitidis
atgaaggtttttaaacaacagcttgaacaactcggcgcgcaaaaccaatatcgttcgattccggatttgattcatcaagggcggtatattacgcgggaaaactgcaaaatgctgaatatgtcgtctaatgattatttgggtttggcatcagatgaaaacttgcgccggtcttttttgcagcaatacggcggtaattttccctcttttaccagttcttcatcgcgtttattaacgggcaactttcctatttataccgatttggaagagcttgtcgcacaacgtttccaacgggaaagcgcgttattgttcaacagcggctatcacgccaatctcggtattttgcctgctttgacgacgacgaaaagtttgattttggcagataaatttgttcacgccagtatgattgacggcatccgtttgagccggtgtgcgttttcccgttatcgtcataatgattatgaacatttgaaaaatctgcttgaaaaaaacgtcggaaaatttgaccgcacttttatcgttaccgaatctgttttcagtatggacggcgatgtggcggatttgaaacagcttgtccaattaaaaaaacagtttcccaatacttatctttatgtggatgaagcccacgcaatcggtgtttatgggcaaaacggattggggattgccgaacgggataatttgattgccgagattgatttattggtcggcactttcggtaaagccttagcctcggtgggggcgtatgccgtctgcaaccaagtattgaaagaatgtttgattaatcaaatgcgcccattgattttttcaaccgcattgccgccgtttaatgtggcttggacttattttatttttgaacgattgccgcaattctcaaaagaaagaagccatcttgagcagttaagcgcatttttacggcgggaagtggcgcatcggacgcaaataatgccgagccaaacctgtatcgtcccctatattttaggcgggaatgaagccacccttgccaaagcggaatacctgcaaaggcagggttattattgcctgcccatcagaccaccgacagtaccaaaaggtacatccagaatacgattgtctttgacggcagatatgacaatggatgaagtgcggcagtttgcggcgtgcctgtaa

SEQ ID NO: 41236 - DNA, 639 bp, Neisseria meningitidis
atgaaaaaaatcaatgttgcccccgaaaatccccaataccgcatcgtcgaaatctttgaaagcctgcaaggcgaaggctggaacacgggcatgcccgccgttttcgtccgcttgggcaaatgcaacctcgcctgcggctggtgtgataccgattatttgacattcggcatgatgagcctgtccgacatcttaggctgtctgaaaacctatgccgcccgcaacatcatcatcaccggcggcgaaccgaccatccagccgcatctcgatatgctgctggacatgctcaaggcggaaggttatttcctctgtatcgaaaccaacggactcaatcccgcgccgccgcaaatcgactatgtcgccaccagccccaaagcctgctatgccgccaaatacgaaaaaagctgtatcgaaacagccgacgaagtgcggattgttgccgacggcgatgtcgttgcgttctgtgaaaatatggaacgcaaaatccgtgcgcatcattactacctttcgccctgcgaacaaaacggtgcaatgaacatctacgacaccatccgccaaatcggtattctgaacagccgccccgacgcgccggtgcattggcagttgagcgtgcagacgcacaaatgggcgggaatagagtag

SEQ ID NO: 41237 - DNA, 600 bp, Neisseria meningitidis
atggcgttaaaaacatcaaacttggaacacgcaatgctggttcatcccgaagctatgagtgtcggcgcgcttgccgacaaaatccgcaaaatcgaaaactggccgcaaaaaggcatcttattccacgacatcacgcccgtcctgcaaagcgcggaatacttccgacttttggttgatttattggtttaccgctatatggatcagaaaatcgacatcgttgccggtttggacgcgcgcggcttcattatcggcgcggcactcgcctaccatctcaacgtcggttttgtccccatccgcaaaaaaggcaagctgccttttgaaaccgtatcgcaaagctacgcgctcgaatacggggaagctgcggtggaaatccacaccgatgccgtcaaacccggttcgcgcgtgctgctggtcgatgatttggttgccacgggcggcacaatgcttgccgggctggaactgatccgcaaactcggcggagaaattgtcgaagccgccgccattttggaatttaccgaccttcaaggcggcaagaatatccgtgcaagcggcgcgcccttatttaccctgcttcaaaacgaaggctgtatgaagggatga

SEQ ID NO: 41238 - DNA, 942 bp, Neisseria meningitidis
atggatacgaaagcaaatatggatattgaaaccttccttgcaggggaacgcgccgccgacggataccgttgcggcttcgtagcgattgtcggccgtccgaatgtcggcaaatcaacgctgatgaatcatctcatcggtcagaaaatcagtattaccagcaaaaaggcgcagacgacgcgcaaccgcgtaacggggatttataccgacgataccgcgcagtttgtgtttgtcgatacgcccggttttcaaaccgaccaccgcaacgcgctcaacgaccgtttgaaccaaaacgttaccgaggcactcggcggtgtggatgccgtagttttcgtcgtggaggcgatgcgctttaccgatgccgaccgcgtcgtgttgaaacaactgcccaagcacacgccggtcattttagtggtcaacaaaatcgacaaggacaaggcgaaagaccgttatgcgttggaggcgtttgttgcccaagtgcgcgccgaatttgaatttgcggcggcggaggcggtcagcgcgaaacacggattgcggattgccaacctgttggagctgattaagccgtatctgcccgaaagcgtgccgatgtatcccgaagatatggttacggacaaatcggcgcgttttttggcgatggaaatcgtgcgtgaaaaattgttccgctatttgggcgaggaattgccttatgcgatgaacgtcgaagtggagcagtttgaagaggaagacggtttgaaccgcatctatatcgccgttttggtcgataaggaaagccaaaaggcgattttaatcggcaaaggcggggagcgtttgaagaaaatctccaccgaagcgcggttggatatggaaaaactgtttgataccaaagtatttttgaaagtgtgggttaaagtcaaatccggttgggcggacgacatccgcttcctgcgcgagctgggtttgtaa

SEQ ID NO: 41239 - DNA, 171 bp, Neisseria meningitidis; identical to SEQ ID NO: 38357

SEQ ID NO: 41240 - DNA, 498 bp, Neisseria meningitidis
atgactgcgcttacccttccggaagacatccgccaacaagagccatccgccctgctctataccctcgtttccgcctacctcgaacacaccgcccaaaccggcgacgaatccctctcctgcctgtccgacgaccagcacacgctgaccgcattctgctacctcgacagccaagtcgaagaaggcggcttcgtgcaactcatcgcctccggttacggcgaatatattttccgcaacccgcttgccgacagcctgcgccgctggaaaatcaaagccgtgccgaaagtcttggacaaagccaaagccctctacgaacaacacggcgaaaccatcgaaacgctcgccgacggaggcgcagacatcgaatccctgcgcaaacagttccccgactttgaagaatgggacggcgcatactacgaagccgccgaacaagacctgcccctgcttgcagaacacatacagtcaaactgggaaaccttcgcccatatcgggcaggcgtga

SEQ ID NO: 41241 - DNA, 1311 bp, Neisseria meningitidis
atgagcgtaactgttgaaactttagaaaatctggaacgcaaagtagtgttgtccctgccttggtccgaaatcaacgcagaaaccgataaaaaactgaaacaaacccagcgccgtgcaaaaatcgacggtttccgcccgggtaaagcacctttaaaaatgattgcccaaatgtacggtgcgagcgcgcaaaacgacgtgatcaacgagctggtgcaacgccgcttccacgatgttgccgttgcccaagagttgaaagtggcaggcttcccccgttttgaaggcgttgaagaacaagacgataaagaatctttcaaagttgccgccatttttgaagtgttccccgaagtcgttatcggcgatttgtctgcacaagaagttgaaaaagtaaccgcttccgtcggtgatgccgaagtggaccaaaccgtagaaatcctgcgcaaacaacgcacccgcttcaaccatgtcgaacgcgaagcccgaaacggcgaccgcgtcatcattgactttgaaggcaaaatcgacggcgaaccttttgcaggcggcgcatccaaaaactacgccttcgtattgggcgcaggtcaaatgctgcctgaatttgaagccggcgtagtcggcatgaaggctggcgaaagtaaagacgttaccgtcaacttccctgaagaataccacggcaaagacgttgccggtaaaactgccgtgttcaccattacgctgaacaacgtttccgaagcgactctgcctgaagtcgatgcagattttgcaaaagccttgggtattgcggatggcgacgttgccaaaatgcgcgaagaagtgcagaaaaacgtaagccgcgaagtggaacgccgcgtaaacgaacaaaccaaagaatccgtaatgaacgcgctgctcaaagccgtagagctgaaagcacctgttgctttggtcaatgaagaagccgcacgcttggcaaacgaaatgaaacaaaattttgttaaccaaggtatggctgatgctgccaacttggatctgcctttggatatattcaaagaacaagccgaacgccgcgtgtctttgggtctgattttggccaaactggttgatgaaaacaaactggaaccgactgaggagcaagtcaaagccgttgtcgccaacttcgcagaaagctacgaagatcctcaagaagtaatcgactggtactacgcagagccttcccgcctgcaagccccgacttctttggcgatagaaagcaacgtcgttgatttcgttttgggtaaagccaaagtaaacgaaaaagctttgtcttttgacgaagtgatgggtgcgcaagcctga

SEQ ID NO: 41242 - DNA, 942 bp, Neisseria meningitidis
atgaaaaccctgctcctcctcatccccctcgtcctaactgcctgcggcacactgaccggcatacccgcccacggcggcggcaaacgctttgccatcgaacaagaactcgtcgccgcatcgtcccgcgccgccgtcaaagaaatggatttgtccgccctgaaaggacgcaaagccgccctttacgtctccgttatgggcgaccaaggttcgggcaacataagcggcggacgctactctatcgacgcactgatacgcggcggctaccacaacaaccccgaaagtgccacccaatacagctaccccgcctacgacactaccgccaccaccaaatccgacgcgctctccagcgtaaccacttccacatcgcttttgaacgcccccgccgccgccctgacgaaaaacagcggacgcaaaggcgaacgctccgccggactgtccgtcaacggcacgggcgactaccgcaacgaaaccctgctcgccaacccccgcgacgtttccttcctgaccaacctcatccaaaccgtcttctacctgcgcggcatcgaagtcgtaccgcccgaatacgccgacaccgacgtattcgtaaccgtcgacgtattcggcaccgtccgcagccgtaccgaactgcacctctacaacgccgaaacccttaaagcccaaaccaagctcgaatatttcgccgttgaccgcgacagccggaaactgctgattgcccctaaaaccgccgcctacgaatcccaataccaagaacaatacgccctctggatgggaccttacagcgtcggcaaaaccgtcaaagcctcagaccgcctgatggtcgatttctccgacatcaccccctacggcgacacaaccgcccaaaaccgtcccgacttcaaacaaaacaacggtaaaaaccccgatgtcggcaacgaagtcatccgccgccgcaaaggaggataa

SEQ ID NO: 41243 - DNA, 1002 bp, Neisseria meningitidis
atgctcgccgaagaagttttcggtttcggtatctacaaagaatccaaaggctcgggcgggcgtttttatgagcgctgttggttgatgggttcggaagacgtcctatacggtcgcgtccattttggcgggcaaaacaataccatctttttcgaactgaccggcaccggttgcggcgtcgcaaaagaaggctgggaatcacgacttttcgcattcctgactaatgcaatccgcccaaaaatcacacgcgttgacatcgcaaaagactttttcaactgcgaatacagcccgaaccaagcccgtgaagaccgaaataaaggtatgtttacctgtcatcacgtcaaaccaaaaggcgaatgtttggggtcagattgggaagaagacgatgaagccaaaatgaccaaaggcaagacctatggtatcggctcccgtgaatcgtccaaatatgtccgcgtctatgaaaaaggcaagcagttgggcgataaaacaagcacatggacgcgctttgaaattgaattcaaagcaaaagacatcgttatccctttcgaagttttgcagaatccgggcgaatatttcggcggcgcatatccgatttgcgaacgattcgtccaaaaggcaacgcgcatacacgcggttaaggaagataaggtcatttcagccgaccgctaccttgaatgggtaaaaaaacagttcggacgtgcggcaaacggtctgaaattcatttttcccgaattggacaaagccaaactgtttgaactgattgagccgagtcatcacaagctgcccaagtctttggctcccgaagcctacgactgcgcctttttgaaagctcaagccattcatgaacagcccgcattcaaaccgtacaaagacccttactatatgtacgaatattacgagaatcttgaaaaacagcttgaacagcaaaaacacgtcaacaatgaagaaagctataacaacttcatttacgacaaattcgcaagactaccgatttcatgggcttaa

SEQ ID NO: 41244 - DNA, 957 bp, Neisseria meningitidis
atgaaagaatttgacttcatcaaacggtatttgcaaacaggcacggataatgatgtcgtattgggcataggcgacgatgcggcgattgtccgcccgcgtgaaggcttcgatttgtgtttcagtgcggatatgcttttgaaggacaggcatttttttgcaaatgtcaaacctgaagacttggcttggaaggttttggccgtcaatgtttcggatatggcggcgatgggtgcgataccgcgttgggtgttgctgagcgcggcgttgcccgaattggatgaggtatggctgaaacggttttgcggcagctttttcggtttggcaaaaaagtttggcgtaacgttaatcggcggcgatacgaccaagggcgatatggcgttcaatgtaaccattatcggcgaattgccgaagggtagggcgttgcggcgtgatgcggcggttgcgggcgacgatatttgggtgtcggggcgtgtcggtatggcggcggcggctttgaactgccgtctgaaacggtgtgtgttgccggatgatgtgtttgccgaatgcgaacaaaagctgctccgccccgagccaagggttgggctggggcttgcgctgttgccgtttgcccgggcggcgcaggatgtttcagacggcctcgcgcaagatttggggcatatcctgaccgcttccggcgtgggggcggaaatttgggccgattcgctgccgtctttatccgtattgaaagatattttgccccgagcgcaatggctgtcttatactttggcgggcggcgacgattacgagctggtgtttaccgcgccggaaagttgccgcagccgcgtgcttgatgcggcagaacggtgcggcgtgccggtaacgcgcatcggcaaaatcaacggaggatgccgtctgaaagttttagatgccggcggcagggaattggaactacattctttaggattcgatcattttggctga

SEQ ID NO: 41245 - DNA, 849 bp, Neisseria meningitidis
atgtcagcggcaaaccgcctgccacgattgaatgggaataaccagcaaacagggctgcaccgtccggcgcagtctttcgattattggaaaaaaggaaaaaatatgagcacacaagatttaagcggcaaaatcgctttggtaaccggcgcatcgcgcggtatcggtgcagcaattgccgacacactggcggcagccggtgccaaagtcatcggtacggcgaccagtgagagcggtgcggcggcgattagcgagcggttggcgcaatggggcggcgaaggccgcgtattaaattccgccgaacccgaaaccgtcgaaaacctgattgccgacatcgaaaaaacgttcggcaaactcgatattctggtcaacaacgccggcatcacccgcgacaacctcctgatgcgcatgaaagaagaagagtgggacgacatcatgcaggtcaacctcaaatccgtgttccgcgcttctaaagccgtcttgcgcggcatgatgaagcagcgcgccggccgtatcatcaacatcacatccgtcgtcggcgtgatgggcaatgccggtcaaaccaactatgccgcggcaaaagcaggcttaatcggtttctccaaatccatggcgcgcgaagtcggcagccggggcattaccgtcaactgcgtcgcccccggctttatcgataccgacatgacccgcgccctgccggaagaaacccgccaaacctttaccgcccaaaccgccttgggcagattcggcgacgcgcaagacattgccgatgcagtcttgttcttggcttccgatcaggcaaaatacattaccggtcaaacgctgcacgtcaacggcggcatgctgatgccctga

SEQ ID NO: 41246 - DNA, 606 bp, Neisseria meningitidis; identical to SEQ ID NO: 39821

SEQ ID NO: 41247 - DNA, 1116 bp, Neisseria meningitidis
atgaaagtaggtttcgtcggctggcgcggtatggtcggttcggttttgatgcagcgtatgaaagaagaaaacgacttcgcccacattcctgaagcgtttttctttaccacttccaacgtcggcggcgcagcccctgatttcggtcaggcagccaaaacattgttggatgccaacgatgttgccgaattggcaaaaatggacatcatcgttacctgtcagggcggcgattacaccaaatccgtgttccaagccctgcgcgacagcggctggaacggctactgggttgacgcggcatcttctctgcgcatgaaagacgacgcgattatcgtcctcgaccctgtcaaccgcaacgttatcgacaacggcctcaaaaacggcgtgaaaaactacatcggcggcaactgcaccgtctccctgatgctgatggctttgggcggcctgttccaaaacgatttggtcgaatgggcaaccagcatgacctaccaagccgcttccggcgcaggtgcgaaaaacatgcgcgaactcatcagcggtatgggcgcggttcacgcccaagtggcggacgagcttgccgatcctgccggctcgattctcgacatcgaccgcaaagtatccgatttcctgcgcagcgaagactatccgaaagccaacttcggcgtaccgctcgccggcagcctgattccgtggattgacgtggatttgggcaacggccagtccaaagaagaatggaaaggcggcgtggaaaccaacaaaatcctcggccgcagcgacaatccaaccgtgattgacggcctgtgcgtccgcgtcggcgcgatgcgctgccacagccaagccatcactctgaagttgaaaaaagacctgcctgtttccgaaatcgaaacgattttggcaggcgcgaatgactgggtgaaagtcatccccaatgaaaaagaagccagcatccacgagctgactcctgccaaagttaccggcacgctgtccgtccctgtcggacgcatccgcaaactgggcatgggcggcgaatacatcagcgcgttcaccgtcggcgaccagctcttgtggggcgcggccgaaccgctgcgccgcgtattgcgtatcgtgttgggcagcctgtga

SEQ ID NO: 41248 - DNA, 1458 bp, Neisseria meningitidis
atgcacaaaatcctgcccatcgcccacgtcctctcccgactgggtatgctgttttcctttatcctgctgatacccgccgccctctcctacgccttttcggacggcgcgtacaccgccttcgccaccaccgcgaccgttaccctttccggctcgtgcatcgtccggctcgccaccctccggttcaggcgcgaactgcgcccgcgcgacggcttcaccctcgtcctgatgttgtggctggcgtttgccgctatggcggcgatgccgatgtacctgtatttcccgaatatgggctttaccgacgcattttttgaatcgatgtcgggactgaccaccaccggcgcgaccgtcatcccccacgtcgacggactcgccccctccgtcaacttttggcggcatatgctcaactggctgggcgggatgggcatcatcgtccttgccgtcgccatcctgcctatgctcggcgtaggcggcacgcagttattcaaagccgaaatccccggcattgacaaagaaagcaaaatgtcgccgcgcatttcccaagtggcgaaaaaactttggttcggctacaccctgatcaccatcctcgcggcagcctgcctgcattttgccgggatgggctggttcgatgccgtctgtcacgcgatggcgaccctctcgctgggcgggttttccacccacgatgccagcatagcttattacaactcccccctcatcgaagcggtcatcatcgttttcaccattgtcggcggcatcaattttgccaaccatttcgccgccctcaacagccgcagcctcaaaacctattggaaagacgaagaatgccggacgatgctgctgctgctctccggcagcatccttgccgccgccctgtacctgtggcacaccggctattacgccggttttaccgaatccctgcgctacaccgccttcaacttcgtctccatcggattggcaaacgggctggccaacaccgacttcgcacaatggccgctcctgatttccctgtggatgtttttcctcgccaacatcctcgccaactccggctcgaccggcggcggcatcaaaaccatacgcgccctcgtcctgttcaaattcagcctgcgcgaaatgatggtgctgctgcaccccaaagccgtccgcaccgtcaaaatcagcggcaaggccatacccgaccgcctcgcgctgaccgttatgtccttcatcttcatctactttatgaccgtcgtcctcttcagcttcctgctgatggcgagcggtatggaatttaccaccgccttcaccgccgtcatcgcctgcatcaccaacgccggccccggcctgggcgaagtcgggcccgccggcaattacgccggtttggacgtgatgcagaaatggatctgcgttaccgccatgctcttgggcaggctggaaatcttcaccgtcttcatcctcttcacccccgcctactggaagaaataa

SEQ ID NO: 41249 - DNA, 759 bp, Neisseria meningitidis
atgaatccaaaaactccccccgaccatacagaagatgccgtgcgcctgtccaaacgcatggcgcaactggggctttgttcgcgccgcgaagccgacggctatatcgaacagggttgggtaacggtcaacggcaaaaccgccgtactcggtcagaaagtttcgccggcagaccgtatcgaactaaacaagaaagcccacgaacagcaggcggcacgcattaccatcctgctgaacaaacccgtcggctatgtcagcgcacaagcggaaaaaggctataaatccgccgccgaactgattacctctgaaaaccgctgggaaagtgacaccagccgcatccgtttcgatccgaaacacaaaatcggtcttgcccccgccggcaggctcgatatcgattcagtcggattactggtgttgacgcaggacggccgtatcgccaagcagcttatcggcgaaaacagcggcagtgaaaaagaatatttggtgcgcgtgcgcggaaaattggacgaaaaaggacttgccttactgaatcacggattgagtttggacggtgagaaactgcgtcccgcccaagtagaatggcaaaacgaagaccaactgcgcttcgtgttgaaacagggcaaaaagcggcaaatccgccgtatgtgcgaactggtcggactgcgcgtcgtcgggctgaaacgcatccgcatgggtaaggtcaagctcggcaggctgccgctaggcaaatggcgttatcttgctcccggcgaatcgttttaa

SEQ ID NO: 41250 - DNA, 2385 bp, Neisseria meningitidis
atggccgacaactacgtaatttggtttgaaaacctgcgtatgacagatgttgaacgcgtgggcggtaaaaacgcctcgctgggcgaaatgatcagtcagctgaccgaaaaaggcgttcgcgtccccggcggctttgccaccacagccgatgcctaccgcgcattcctcgcacacaacggtctgagcgaacgcatttccgccgcactggcaaaattagatgtcgaagacgttgccgaactggcacgcgtcggcaaagaaatccgccaatggattttggacacgcccttccccgaacagctcgatgccgaaatcgaagcggcatggaacaaaatggttgccgatgccggcggtgcggacatttccgttgccgtacgctcttccgcaaccgccgaagacctgcccgacgcatcatttgccggccaacaggaaaccttcttgaacatcaacggattggaaaacgttaaagaagcgatgcaccatgtattcgcctccctgtacaacgaccgcgccatttcctaccgcgtccacaaaggcttcgaacacgacatcgtcgccctttccgccggcgttcaacgcatggtgcgttccgacagcggcgcatcaggtgtgatgttcaccctcgacaccgaatccggctacgatcaagtcgtctttgttacctcctcttacggtctgggcgaaaacgtcgtacaaggcgcggtcaacccggacgaattttatgtgttcaaacccacgctcaaagcgggcaagcccgccatcctgcgtaaaaccatgggttcaaaacacatcaaaatgatttttaccgacaaagcagaagccggtaaatccgtaaccaacgtcgatgtccccgaggaagaccgcaaccgcttctccattaccgacgaagaaattactgagttggcgcattacgcactgaccatcgaaaaacactacggccgcccgatggatatcgaatggggacgcgacggcttggacggcaaactctacatcctgcaagcccgtcccgaaaccgtcaaatcccaggaagaaggcagccgcaacctgcgccgcttcgccatcaacggcgacaaaaccgtattatgcgaaggccgcgccatcggtcaaaaagttggacagggtaaagtacgtctgattaaagatgcttccgagatggattccgtcgaagccggcgacgtactcgttaccgacatgaccgacccggattgggaaccggtgatgaaacgtgcttccgccatcgttaccaaccgcggcggccgcacctgccacgccgccatcatcgcgcgcgaactgggcattcctgccgttgtcggctgcggcaatgcaaccgaattgctgaaaaacggtcaagaagttaccgtatcctgtgccgaaggcgataccggctttatctatgccggtctgttggacgtacagattaccgatgtcgccttagacaatatgcccaaagcaccggttaaagtcatgatgaacgtcggcaatcccgaactcgcattcagcttcgccaacctgcccagcgaaggcatcggcttggcgcgtatggaatttatcatcaaccgccaaatcggtatccacccgaaagccttgttggaatttgacaaacaagacgacgaattaaaagcggaaattacccgccgtatcgccggttacgcgtcccctgtcgacttctacgtcgataaaatcgccgaaggcgtggcgacattggccgcatcggtttatccgcgtaaaaccatcgtccgtatgtccgacttcaaatccaacgaatacgccaacctagtcggcggcaacgtatacgaaccgcatgaagaaaacccgatgttgggcttccggggcgcggcgcgttatgtcgccgacaacttcaaagactgtttcgccttggaatgcaaagccttgaaacgcgttcgcgatgaaatggggttgaccaacgttgaaatcatgattccgttcgtccgcactttgggcgaagccgaagccgttgtcaaagccctgaaagaaaacggcttggaacgcggcaaaaacggcctgcgcctgattatgatgtgcgagctgccgagcaacgcggtattggcggaacaattcctgcaatacttcgacggcttctccatcggctcgaacgacatgacccaactgaccctcggtctcgaccgcgacagcggcttggtatccgaatcgtttgacgaacgcaaccctgccgtcaaagtgatgctgcaccttgccatctccgcctgccgcaagcagaacaaatatgtcggcatctgcggtcaaggcccgtccgaccatccggacttcgccaaatggctggttgaggaaggcattgaaagcgtttccctgaacccggataccgtcatcgaaacttggctatatttggcgaatgaattgaacaaataa

SEQ ID NO: 41251 - DNA, 1314 bp, Neisseria meningitidis
atgctgacgtttatcggactgctgattatcggggtcatcgtatggttgctgctgacggaaaaagtgtcgcccatcatcgcattaatcttggtgccgctgtttggggcgttgctggcggggtttgatgtatcccaattaaaagaattttattcgggcggcaccaaatcggtgatgcagattgtgattatgtttatgttttccattttgttttttggaatcatgaacgatgtggggctgttccgtccgatgataggcggtttgattaagctgactcggggtaatatcgtggcagtgagtgtggggacggtcttggtgtcggtggtggcgcagttggacggggcgggtgcgacgacgtttttattggtcgtccccgcccttttgccgctttacaagcgtctgcatatgaatccttacctgctgtttttgctgctgacttccagtgcgggattgattaaccttctgccgtggggcgggccgactgggcgggttgcaagcgtgttgggcgcagatgtgggcgaattgtataaacctttgttgacggtgcaaattatcggtgtagtgtttatccttgcgctgtccctgcttttgggtgtgcgtgaaaaaaggcggattgtccgggagttgggcgcgttgcccgccgtggcggatttgataaagccggtgcctttgtcggaagaagaacaaaaattggcgcgtccgaaactgttttggtggaatgtcctgctgtttttggcggcgatgagcctgcttttttcgggcatcttcccgccgggttatgtatttatgctggctgcaacggcggcgttgcttttgaattaccgcagcccgcaggaacagatggagcggatttatgcccacgccggcggcgcggtgatgatggcgtccattattttggcggcaggtacgtttttggggattttgaagggtgcggggatgttggacgcgatttccaaagaccttgtgcatatcctgccggacgcgctgctgccttatctgcatattgccatcggtgtgttgggcattccgcttgagttggttttgagtacggacgcttattatttcggactgtttccgattgtggagcagattacctcgcaggcgggcgtggcgcctgaagcagcaggttatgcgatgttgatcggcagtatcgtcggcacttttgttacgccgctttcgccggctttgtggatgggcttgggtttggcgaaattgtcgatgggcaaacacatccgttattcgtttttctgggcgtggggtttgtcgctggcgatattggccagttcgatagcggcaggaatcgtgcctctgccgtaa

SEQ ID NO: 41252 - DNA, 1764 bp, Neisseria meningitidis
atgggttttcctgttcgcaagtttgatgccgtgattgtcggcggtggtggtgcaggtttacgcgcagccctccaattatccaaatccggtctgaattgtgctgttttgtctaaagtattcccaacccgttctcatactgtagcggctcaaggcggtatttctgcttcattgggtaatgtgcaggaagaccgttgggattggcacatgtacgataccgtgaaaggttccgactggttgggcgaccaagatgcgattgagtttatgtgtcgcgccgcgcctgaagccgtaattgagttggaacacatgggtatgccttttgaccgtgtggaaagtggcaaaatctatcaacgtcctttcggcggacatactgccgaacacggtaaacgcgcggtagaacgtgcctgtgcggttgccgaccgtacaggtcatgcgatgctgcatactttgtaccaacaaaacgtccgtgccaatacgcaattctttgtggaatggacggcacaagatttgattcgtgatgaaaacggcgatgtcgtcggcgtaaccgccatggaaatggaaaccggtgaagtttatattttccacgctaaagctgtgatgtttgctaccggcggcggcggccgtatttatgcgtcttctaccaatgcctatatgaataccggcgatggtttgggtatttgtgcgcgtgcaggtatcccgttggaagacatggaattctggcaattccacccgaccggcgtggcaggtgcgggcgtgttgattaccgaaggcgtacgcggcgagggcggtattctgttgaatgccgacggcgaacgctttatggaacgctatgcgccgaccgtaaaagacttggcttctcgcgacgttgtttcccgcgcgatggcgatggaaatctacgaaggtcgcggctgcggtaaaaacaaagaccatgtcttactgaaaatcgaccatatcggcgcagaaaaaattatggaaaaactgccgggcatccgcgagatttccattcagttcgccggtatcgatccgattaaagacccgattcccgttgtgccgactacccactatatgatgggcggcattccgaccaattaccacggcgaagtcgttgtgccgcaaggagacgaatacgaagtgcctgtaaaaggcctgtatgccgcaggtgagtgcgcttgtgcttccgtacacggtgcgaaccgcttgggtacgaactccctgttggacttggtggtattcggtaaagctgccggcgacagcatgattaaattcatcaaagagcaaagcgactggaaacctctgcctgcaaatgccggcgaactgacccgccaacgtatcgagcgtttggacaatcaaactgatggcgaaaacgttgatgcattgcgtcgcgaattgcaacgctccgtacaactgcacgccggcgtgttccgtactgatgagattctgagcaaaggcgttcgagaagtcatggcgattgccgagcgtgtgaaacgtaccgaaatcaaagacaagagtaaagtgtggaataccgcgcgtatcgaggctttggaattggataacctaattgaagtggcgaaagcgactttggtgtctgctgaagcacgtaaagaatcacgcggtgcgcacgcttcagacgaccatcctgagcgcgatgatgaaaactggatgaaacatacgctgtaccattcagataccaataccttgtcctacaaaccggtgcacaccaagcctttgagcgtggaatacatcaaaccggccaagcgcgtttattga

SEQ ID NO: 41253 - DNA, 1107 bp, Neisseria meningitidis
atgtctctttatccgatttacaatttttccgccggccctgccgtattgcccgaagccgtgttggaaacggcgcggcaggaaatgttggactacaacggtacgggttttcctgtgatggcgatgagccaccgttcggaaatgtttttgagcatcctgcatcatgcggaacaggatttgaggcagcttttgaaagtgcctgacaactataagatattgtttctgcagggtggagcaacaacccaatttaatatggcagccatgaatctggcacacggtttccgcactgccgacgcggtggtaacgggcaactggagccgtatcgcttatgaacagatgagccgtttgaccgatacggaaatccgtttggcggcgcatggcggcgagcagttcgactatctcgacctgccgcctgtggaaacgtgggatgttgcacccgattcggcgtttgtccattttgccgtcaatgaaacggtcaacgggctgcaataccgtgaagtgccgcgcctttcagaaggcatgccgccgctggtgtgcgatatgtccagcgagattttgtcgcgcgagtttgatgttgccgactacggactgatttacgcaggcgcacagaaaaacatcgggccggcaggggttacggtggtgattgtgcgtgaggatttgctcgagcgttgtccgaacgatattcccgatgtgttcaactaccgttcgcatttgaaccgcgaaggtatgtacaacacgccgtcaacttacgcgatttatatgtcggggctggtgttccgctggctgcaggcgcagggcggtgtgaaaaaaattgaagcggtcaatcggctgaaggcgcaaaccttgtatgagacgatagacggcagcggcggtttctatatcaaccgtatccgtccgaatgcgcgttctaaaatgaatgtcgtgttccaaacgggggatgaggagcttgaccgccgttttgtgctggaagccgaattgcagggcttgtgcctgcttaagggctataaaaccgtcggcggtatgcgtgccagcatttataatgcgatgccgcttgaaggcgtgcgggctttggcggattttatgcgcgatttccaacggcgttacggttga

SEQ ID NO: 41254 - DNA, 723 bp, Neisseria meningitidis
atgcccgaaacaggttttcgggcatttttacggcaaatgccgtctgaaaccaccaaacagcggttcagacggcatccctttcaaaagcgtaccattatgaaaaacatcgtcatcctgatttccggacgcggcagcaatatgcaggcaatcgtcaatgccgccattcccaacgtccgcattgccgccgtgttgagcaacagcgaaacggctgccggtttgcaatgggcggccgaacgcggcatcccgaccggcagcctgaaccataaaaactttacatcccggcttgccttcgataccgctatgatggagaaaatcgacgcatatcaacccgatttggtggttttggcaggttttatgcggattctgacccccgagttttgcgcccattacgaaggcaggctgatgaacatccatccgtccatccttccctcgtttaccggacttcatacgcacgaacgcgctttggaggcaggttgccgcgttgccggctgtaccatccatttcgttactgccgaactggattgcggcccgattgtatcgcaagggattgtgccgatactcgacggcgatacggcagacgatgttgccgcccgggttttggctgtcgagcataaactttatccgaaagccgttgccgattttgccgccggccgcctgattatcgagggaaaccgcgtcagaaattcggaaaacgccgatgccgcccgtttcctgacggcgtaa

SEQ ID NO: 41255 - DNA, 1257 bp, Neisseria meningitidis
atgaaagtgcttgttttaggtgcgggtgttgccggcgtatcttccgcgtggtatctggcagaggcaggacatgaagtaacggtcatcgaccgcgccgagggcgtggcgatggaaaccagttttgccaatgcaggtcagctttcttacggctataccacgccttgggctgcacccggtattccgaccaaagcactgaaatggctgtttaaaagccatccgcctttgctgtttcgccccgacggcagcctgtatcaaatcgaatggctgtggcggatgctgcaaaactgcacggcagcgcactatcaaaccaataaagagcgcatggtcaggatttccgaatacagccgtgaaatgttccgccgttttgaagcgcaaaccggcatgaattttgaagggcgcaaaaaagggacgttgcagattttccgtcaggctaaagaagttgaagcggcagaacaagacattgccgttttggaacgctacggcgtgccgtaccgccgtctgaagcccgaagaatgcgcagaattcgagcctgcgctggcacgcgttaccgccaaaattgccggcggcctgcacctgcctgcggatgcaaccggcgactgccgcctcttcactgaaaacctatacaaattgtgtcaggaaaagggcgtacggtttcatttcaaccaaaccatcagccgcatcgaccacaacgggctgcgcatcaaaaccgttgaaaccgaaacagggcggtttgaagcagatgccgttgtctgcgcgctcggctgcttcagcaggacggttttggcgcagttggatctcaatctgcccatttatcccgtcaaaggctattccttgaccctgccggtcaccaattcagacggcgctccggtttccaccgttttggatgagagctacaaagtcgccatcacacgattcgacaacagaatccgcgtcggcggtatggcggaattgtcgggctacgaaatcaaactgcccgaaaaacgccgcgaaaccttggctttggtcgtcaacgacttgttcccggaaggcggcgatttgagccaagcatcgttctggagcggcctcaggccgatgacgcccgacagcacgccgttaatcggtcgcacccgctttgacaacctgtttctgaataccggccacggtactttaggctggaccatgtcgctgggttcggcaaaattaaccgccgatatcgtgagcggcaaagacaccgaaatccgcagcgacgatttgagcctgtcgcgttatcaggcttaa

SEQ ID NO: 41256 - DNA, 1068 bp, Neisseria meningitidis
atgggcggtaaaacctttatgctgatggcgggcggaacgggcggacacattttccccgcgctggcggtggcggattcattgcgcgcgcgcggccatcatgtgatttggctgggcagcaaggattcgatggaagagcgtatcgtgccgcaatacggcatacgcttggaaacgctggcgattaaaggcgtgcgcggcaacggcatcaaacgcaaactgatgctgccggttactttgtatcaaaccgtccgcgaagcgcagcggattatccgcaaacaccgtgtcgagtgcgtcatcggcttcggcggcttcgttaccttccccggcggtttggcggcgaaactcttgggcgtgccgattgtgattcacgagcaaaacgccgtggcaggtttgtccaaccgccacctgtcgcgctgggcgaagcgggtgttgtacgcttttccgaaagcgttcagccacgaaggcggcttggtcggcaaccccgtccgtgccgatattagcaacctgcccgtacctgccgaacgctttgaagggcgtgaaggccgtctgaaaattttggtggtcggcggcagtttgggcgcggacgttttgaacaaaaccgtaccgcaggcattggctttgctgcccgacaatgcgcgtccgcagatgtaccaccaatcgggacggggcaagctgggcagcttgcaggcggattacgacgcgctgggcgtgcaagcggaatgcgtggaatttattaccgatatggtgtccgcctaccgcgatgccgatttggtgatttgccgtgccggcgcgctgacgattgccgagttgacggcggcgggattgggtgcgttgttagtgccgtatcctcacgccgttgatgaccatcaaaccgccaacgcgcgttttatggtgcaggcggaggcgggattgctgttgccgcaaacccagttgacggcggaaaaactcgccgaaatcctcggcagcctgaaccgcgaaaaatgtctcaaatgggcggaaaacgcccgtactttggcattgccgcacagcgcggacgacgttgccgaagccgcgattgcgtgtgcggcgtaa

SEQ ID NO: 41257 - DNA, 2229 bp, Neisseria meningitidis
atgcgttctgctgttttatttatatatttctttctacttaatatattccttttccagccagccgttatccacatccaatctaactatattttatttatgtctatcgtatccgcaccgctccccgccctttccgccctcatcatcctcgcccattaccacggcattgccgccaatcctgtcgatatacagcatgaattttgtacttccgcacagagcgatttaaatgaaacgcaatggctgttagccgccaaatctttgggattgaaggcaaaggtagtccgccagcctattaaacgtttggctatggcgactttacccgcattggtatggtgtgatgacggcaaccatttcattttggccaaaacagacggtgagggtgagcatgcccaatttttgatacaggatttggttacgaataagtctgcggtattgtcttttgccgaattttctaacagatattcgggcaaactgatattggttgcttcccgcgcttcggtattgggcagtttggcaaagtttgactttacctggtttattccggcggtaatcaaataccgccggttgttttttgaagtattggtggtgtcggtggtgttgcagctgtttgcgctgattacgcctctgtttttccaagtggtgatggacaaggtgctggtacatcggggattctctactttggatgtggtgtcggtggctttgttggtggtgtcgctgtttgagattgtgttgggcggtttgcggacgtatctgtttgcacatacgacttcacgtattgatgtggaattgggcgcgcgtttgttccggcatctgctttccctgcctttatcctatttcgagcacagacgagtgggtgatacggtggctcgggtgcgggaattggagcagattcgcaatttcttgaccggtcaggcgctgacttcggtgttggatttggcgttttcgtttatctttctggcggtgatgtggtattacagctccactctgacttgggtggtattggcttcgttgcctgcctatgcgttttggtcggcatttatcagtccgatactgcggacgcgtctgaacgataagttcgcgcgcaatgcagacaaccagtcgtttttagtagaaagcatcactgcggtgggtacggtaaaggcgatggcggtggagccgcagatgacgcagcgttgggacaatcagttggcggcttatgtggcttcgggatttcgggtaacgaagttggcggtggtcggccagcagggggtgcagctgattcagaagctggtgacggtggcgacgttgtggattggcgcacggctggtaattgagggcaagctgacggtggggcagctgattgcgtttaatatgctctcgggacaggtggcggcgcctgttatccgtttggcgcagttgtggcaggatttccagcaggtggggatttcggtggcgcgtttgggggatattctgaatgcgccgaccgagaatgcgtcttcgcatttggctttgcccgatatccggggggagattacgttcgaacatgtcgatttccgctataaggcggacggcaggctgattttgcaggatttgaacctgcggattcgggcgggggaagtgctggggattgtgggacgttcggggtcgggcaaatccacactcaccaaattggtgcagcgtctgtatgtaccggagcagggacgggtgttggtggacggcaacgatttggctttggccgctcctgcctggctgcggcggcaggtcggcgtggtcttgcaggagaatgtgctgctcaaccgcagcatacgcgacaatatcgcgctgacggatacgggtatgccgctggaacgcattatcgaagcagccaaactggcgggcgcacacgagtttattatggagctgccggaaggctacggcaccgtggtgggcgaacaaggggccggcttgtcgggcggacagcggcagcgtattgcgattgcccgcgcgttaatcaccaatccgcgcattctgatttttgatgaagccaccagcgcgctggattatgaaagtgaacgagcgattatgcagaacatgcaggccatttgcgccaaccggacggtgctgattatcgcccaccgtctgtccactgttaaaacggcacaccggatcattgccatggataaaggcaggattgtggaagcgggaacacagcaggaattgctggcgaagccgaacggatattaccgctatctgtatgatttacagaacgggtag

SEQ ID NO: 41258 - DNA, 1284 bp, Neisseria meningitidis
atgtccaaatcaatcaaactcaacgtaccgggtcaggcaggtttggagctgccggtattggaagccagcatcgggcacgatgtggttgacattcgggggctgacaaaaaatacaggtttgttttccttcgaccccggatttgtttcaaccgcaagctgtgagtctaaaattacttacatcgacggcgatcaaggcttgctttattatcgcggataccccatcgagcagctggccgaaaagtccgattatttggaagtctgctacctgttgatttacggcgaactgccgactcccgagcaaaaggcagaatttgacaataccgtccgccgccacacgatggtgcatgaacagctgacttggttcttccgggggttccgccgcgacgcgcatccgatggcgatgatggtcggcgtggtcggcgcactgtctgcgttctaccaagacagcttggacattagcaatcccgaacaccgcaaaatcgcgatttaccgcctgatttctaaaatcccgaccattgcggcaatgtgctaccgctattcaaacggtctgccgttcaattatccgaagaataatctttcttattccgaaaacttccttcatatgatgttcgccacgccgtgtgaagactacaaacccaatcccgttttggcacgcgcgctcgaccgcatctttattttgcatgccgaccacgagcaaaacgcctcaacttcaaccgtccgtctggcagggtcttcgggtgcgaacccgtttgcctgtattgctgccggtatcgcctgcctgtggggtgcttcgcacggcggtgcgaacgaagccgtgttgaaaatgttggacgaaatcggcgatgtgtctaatgttgccgcatacatggaaggtgtgaaacaacgcaaataccgtctgatgggcttcggtcaccgcgtgtaccgcaatatggatccgcgtgccagcattatgcgcgaaacctgctatgaagttttgaaggaattgggcttggaagacagcccgaaattcaaactggcgatggaattggaacagattgcgctgaaagacccgttctttatcgaacgcaaactgtatccaaacgtcgatttctattccggcatcgtcctgtccgcgctgggcatcccgaccgaaatgtttaccgtcatcttcgccctgtcgcgcagtgtaggttggatttcgcactggcacgagatgattagcgatccttcgctgaaaatcggccgcccgcgccagctttataccggttcggaacgccgcgattatgtgccgccaggcgagaggtaa

SEQ ID NO: 41259 - DNA, 1356 bp, Neisseria meningitidis
atgagtatccaatccggcgaaattttagaaaccgtcaaaatggttgccgaccagaattttgatgtccgcaccattaccataggcatcgatttgcacgactgcatcagcagcgacatcaatgtgttgaaccaaaatatttacaacaaaatcaccacagtcggcaaagacttggtggcaacggcgaaacacctttccgccaaatacggcgtgccgattgtgaatcagcgcatttccgttacgccgattgcccaaatcgcggcggcaactaaagccgattcctatgtcagcgtggcgcagactttggacaaggcagccaaagccatcggcgtgtcctttatcggcggcttttccgcgttggtgcaaaaaggcatgtcgccttcggatgaggtgttaatccgctccattcccgaagcgatgaagaccaccgatattgtgtgcagctccatcaatgtcggcagtacgcgcgccggtatcaatatggatgcggtcaagctggcaggcgaaaccatcaaacgcacggctgaaattacgcccgaaggtttcggctgcgcgaaaatcgtcgtgttctgcaatgcggtggaagacaatccgtttatggcgggtgcgtttcacggatcgggcgaagcggatgctgtgattaatgtcggcgtatccggcccgggtgtcgtaaaagccgcgttggaaaattcggatgcaacgacattgaccgaagttgcagaagttgtgaagaaaaccgccttcaaaattacccgcgtgggcgaactcatcggccgcgaagcctcaaaaatgctgaatatcccgtttggtattctcgacttgtcgctggcaccgacccctgccgtcggcgactcggtggcgcgcattcttgaagaaatgggtttgagcgtctgcggtacgcacggcacaacagcagctttggcattgctgaacgatgccgtgaaaaagggcggcatgatggcttcgagcgcggttggcggtttgagtggcgcgtttatccccgtttccgaagacgaaggtatgattgccgccgccgaagcaggcgtgctgacgttggataaactcgaagcgatgaccgccgtttgttcggtcggcttggatatgattgccgttcccggcgacacacccgcgcacaccatttccggcattatcgccgacgaagccgccatcggtatgattaacagtaaaaccactgccgtgcgcattattccggtaaccggtaaaaccgtcggcgacagcgtcgagtttggcggcctgttgggctacgcacctgtgatgccggtaaaagaaggttcgtgcgaagtgttcgtcaaacggggcggcagaatcccggctccggttcaatcgatgaaaaactga

SEQ ID NO: 41260 - DNA, 3435 bp, Neisseria meningitidis
atgaccgagccgacctacatccccctgcgcctgcataccgagttctcaattaccgacggtatggtgcggattaaaaaactgattgccaaagcgcaggaatacggtttgcctgctttgggcatcagcgatttgatgaacgaattcggtttggtgaaattctataaagcctgccgcggcgcagggattaagcccatcggcgcggcggacgtgtggataggcaatccgaatgcgcccgacaagccgttccgcgctatgctgattatccgcaacgatgcgggctatctgcgtttgagcgagcttttgacagaggcctatgtcggcaaagaccgcaatgtccatcacgcggaactcaaccccgaatggctggaaaacggcgacaacagcggcttgatttgtttgagcggcgcgcattacggcgaagtgggcatgaatctgttgaacggcaatgaagacgcggcgcgcgcggcggcgttgaaatatgcggcatggtttcccgatgcgttttatttagagctgcaacgcctgcccgaacgccccgaatgggaggcttgcgtttccggcagcgtgaagctggcggaggaactgggtttgccggtggtggcgacgcatccgacgcagtttatgagccgcgacgatttcaacgcgcacgaggcgcgggtgtgtatcgcaggcggctgggtattgacggacaagaaacgtccgcgcgatttcacaccgagccagtttttcattccgccggaaacgatggccgaacgtttcgccgatttacccgaagccctcgaaaacacggtggaaattgccaaacgctgcaatctgcacatcacattgggcaaaaacttcctgccccttttccccacgcccgacggtttatcactcgatgactatctcatcaaactctccaatgagggcttgcaggaacgcatggttcagctttatcccgacgaggcggaacgtgcggaaaaaatgccggaatatcaggaacgtttggattttgagctgaacatcatcatccagatgaaattccccggctatttccttatcgtacaagactttatcaactgggcgaaaacacacggctgcccggtcgggccgggacgcggttcgggcgcgggttcgctggtggcgtattcgctgaagattaccgacctcgatccgctgaaatacgcgctgctgttcgagcgtttcctaaaccccgaacgcgtttctatgcccgacttcgacgtggacttctgtcaggcaaaccgcggccgcgtgattgaatatgtacgcgaaaaatacggtgcggaagcagtcagccagattgttaccttcggcacgatgtcgtccaaagcagtgattcgcgacgtggggcgcgtactggaactgccgtttatgctgtgcgacaaactgtccaagctgattccgttggaagccaacaaacctttgggtttggacgacgcgatgaaggcggagccgcagattcaggaattaatcgaagcggaagaagcggacgaactgattacgctggcgaaaaagctggaagatttgacgcgcggtttgggtatgcacgcgggcggcgtgttgattgcgccgggcaagatttccgattacagccccgtgtatcaggcggacgaatccgcctcgcccgtatccatgtacgacaagggcgacgtggaagacgtgggtttggtgaaattcgactttttaggtctgcgcaacctgaccatcatcgaaatggcgcagaacaacatcaaaaacaccaccggcgacatcatcgatgtcggcaaaattccgcttgacgaccaggttgcctaccaaatcttccgcgatgcgaacaccaccgccgtgttccagttcgagtcgacaggcatgaagaaaatgctgaaaacggcgcatacgaccaagtttgaagaactgattgccttcgtatcgctctaccgacccggcccgatggacaatattcccgacttcgtcgcgcgtatgaaaggtcaggaattccaatacatccacccgctactcgaaggcatcctcgcaccaacctacgggattatggtgtatcaggaacaagtgatgcaggcggcgcagattatcggcggctactcgctcggcggcgcggacctgctgcgccgcgccatgggtaagaaaaagcccgaagaaatggtgaaacaccgcgaaatcttcgccgaaggcgcggcaaaacaaggcatttcgcgcgaaaaatccgacgaaatcttcaactacatggaaaaattcgccggctacggtttcaacaaatcccacgctgccgcctacgccctgatttcctaccagaccgcatggctcaaagcccactaccccgccgaatttatggcggcgaccatgtcgtctgaattggacaacaccgaccagctcaagcatttctacgacgactgccgtgccaacggcatcgagttcctgccgcccgacatcaacgaatcagactaccgcttcacgccgtatccgaacatgaaaatccgctacgcgctcggcgcgattaaaggcacgggcgaagccgccgtcgaatccatcaccgccgcgcggcaaagcggcggcaagtttaccggcctcttggacttctgtgagcgcgtcggcaaagaacacatgaaccgccgcaccctcgaagctctgatacgcggcggcgcattcgacagcatcgaacccaaccgcgccatgctcttggcgaacatcgacctcgctatggacaacgccgaccaaaaagccgccaacgccaatcagggcgggcttttcgacatgatggaagacgccatcgaaccggtgcggctcatcgacgcgccgatgtggagcgaatcggaaaaactcgccgaagaaaaaaccgtcatcggcttttacctgtccggccacccgttcggcccgtatgcccaagaagtccgccaaatcgccccgcagaaactgtcgaaactcaaaccgcaagacagcgtgcgcctcgccggattcgttaccgccgtacgcaccatgatgggcaagcgcggcaaaatcgccttcgtcagccttgaagatttgagcggacaggttgaaatcatggtcggcggtcagacgttggaaaactgcgccgactgcctcaaagccgaccaagtgctgattatcgaatccaaagtcagccgcgacgactacggcggcggcgacggactgcgtattctggcaaaccaagtcatgaccctgcaaacggcacgcgaacgctacgcccgcagcctcagcctcgccctcgccccgcatcacgacatcggcggactggtacaactgctcgccgcccaccaactgcccgacacgccgcgcatcccgctgcaactgtcgtatgccaacgaaaaagcgtcgggcaggcttcaagtgccgccgaaatggacggttacaccgagctccgcattgttcggcgaactggaaacattgctcggcagccggtcggtgcgcgtcaactggtaa

SEQ ID NO: 41261 - DNA, 1218 bp, Neisseria meningitidis
atgcaacgtcgtattataaccctgctctgcgcggcaggtatggcattctcaacacaaactttggcggcaaatttggaggtgcgcccgaacgcgccggaacgctacacggtcaaacagggcgacaccctgtggggcatttcgggcaaatacctgtacagcccgtggcaatggggccgcctgtgggacgcgaaccgggatcaaatccacaatcccgacctgatttatccggaccaggtattggtgttgcgccacgttgacggcgaaccgcgcctcggcttggaacagacagacggcatccccgtcgtcaaaatgagtccggataaggaagtgtccggatacggtattcccgccatcgatgtcaacttctaccgcatctttatgcggcacccgcaaatcgtttcccgcaaagaaaccgctgccgcgccgcgcctgctctcgggcccggaaggcaggctgctgtacaccaaaggcaccagggtttacaccaaaggcctgaaagagccgggccgctacctgacctaccgaatcaataaaaacatcaccgatccggatacgggtaaattcctcgggcaggaagtcgcattcagcggcatcgtgcgctccctcgactataccgactctgtcctcgaacaacgctcgaaacaggctggagaacggccgaaagacaacgaataccatacccgcacccatcctttgattaccccgctgcgcaccccttcgatacagccgctggtggtcgaaaccgccatttccgaaatacagcagggcgactacctgatgaaaatgccggaagacaccgaccgcttcaacatgatgccgcacgaaccgtcccgcccggttcaggctaaaatcgtttccgtgtttgaaggcacaaggattgccggccagtttcaaaccatcaccatcgacaaaggcgaggcggacggtttggacaaaggcacggttttgagcctctacaaacgcaagaaaacgatgcaggtcgacctctccaacaatttcaaaagcagggataccgtcgaactgatttccactcctgccgaagaagtgggcttggcaatggtttaccgcacctccgaacacctgtcgtccgccatcattttggaaaacatctccgatatttccgtaggcgacaccgccgccaatccgggacgcgatttggacaatataccggatcagggccgcagccgcgtgaagtttggcttcaaccgctccgaataa

SEQ ID NO: 41262 - DNA, 1293 bp, Neisseria meningitidis
atggctgtcttcccactttcggcaaaacatcggaaatacgcgctgcgcgcgcttgccgtttcgattattttggtgtcagcggcatacattgcttcgacagagaggacggagcgcgtcagaccgcagcgcgtggaacaaaatctgccgccgctgtcttggggcggcagcggtgttcagacggcatattgggtgcaggaggcggtgcagccgggcgactcgctggcggacgtgctggcgcgttcgggtatggcgcgggacgagattgcccgaatcacggaaaaatatggcggcgaagccgatttgcggcatttgcgtgctgaccagtcggttcatgttttggtcggcggcgacggcggcgcgcgcgaagtgcagttttttaccgacgaagacggcgagcgcaatctggtcgctttggaaaagaaaggcggcatatggcggcggtcggcttctgaggcggatatgaaggttttgccgacgctgcgttcggtcgtggtcaaaacgtcggcgcgcggttcgctggcgcgggcggaagtgcccgtcgaaatccgcgaatccttaagcgggattttcgccggccgcttcagccttgacggtttgaaggaaggcgatgccgtgcgcctgatgtacgacagcctgtatttccacgggcagcaggtggcggcgggcgatattttggcggctgaagtcgttaagggcggcacaaggcatcaggcgttctattaccgttcggacaaggaaggcggagggggcggcaattattatgatgaagacggcagggtgttgcaggaaaaaggcggcttcaacatcgagccgctggtctatacgcgcatttcttcgccgttcggctaccgtatgcaccccatcctgcacacttggcggctgcacacgggcatcgattatgccgcaccgcagggaacgccggtcagggcttccgccgacggcgtgattacctttaaaggccggaagggcggatacggcaacgcggtgatgatacgccacgccaacggtgtggaaacgctgtacgcgcacttgagcgcgttttcgcaggcacaaggcaatgtgcgcggcggcgaggtcatcggttttgtcggttcgacagggcgttcgaccgggccgcacctgcattacgaggcacgcatcaacgggcagcccgtcaatcctgtttcggtcgcattgccgacacccgaattgacgcaggcggacaaggcggcgtttgccgcgcagaaacagaaggcggacgcgctgcttgcgcgcttgcgcggcataccggttaccgtgtcgcaatcggattga

SEQ ID NO: 41263 - DNA, 480 bp, Neisseria meningitidis
atgaaaaaattaaatatctggagagatgaaggaaaagtttctgctttaatcattgaaaaatttgcagaaaatttaggtgtaacattccctagatcgtatatatatttgataagtgaacatgattatttatatcccgaagaagattgttttatttttattgataataataagaatacagatgacagaaatattttatttttaggatataaaaaagatgcctcctgtcatgaaaatatctatacctattcatgcattgatgatgaatatggctatggaaaccaagttgttgcatttggaataagtgcaaatggcgattatatttgttttgattatcgtaaaaattcaagtaatccatccatcgtacttatgtatcatgatgaattttacgaagatgaactaggtaataccaagatgattacagttcccatcgcacctgattttgatagttttatagataaactttatcaagatgtagattaa

SEQ ID NO: 41264 - DNA, 558 bp, Neisseria meningitidis
atgttttggctggttctgccttatgcggttacgattaaccgaccgatgacgtctgaaagggtttccgcttcagacggcatcgcgccggaacagggaggggatatgaaaaaaccgaaaatcctttttgtctgcctcggcaacatctgccgttcgccgatggcggaatacattttgcgccgccgcgccgccgaagcgggcattccccttgaagcggacagcgcggggacatcgggctggcacgacggcgaagatatgcaccgcgagacggcaaagatattgaaaaaacacggtatcgatgcttcaggctttaccagccgcaaaatccgccaaagcgatgcggcggcgtttgactgcatcatcgcgatggacggcaagaatttgtccgaattggaaagaaccttcggcaggcggccggaaaaaatattcaagctgaccgacctgatacccgaaagcggttacgaccatgtccccgatccgtggtatacgggcgattttgaagaaaccttcaggcttgcggatgcgggctgtcgggcattgttggaaaagatttccaaataa

SEQ ID NO: 41265 - DNA, 531 bp, Neisseria meningitidis
atgaacgcaatccgaactttccaaaaccgcacgcccgaaatccacgaaagctgtatgatagacgaagcgtgcgtcgtcatcggcgaagtgtcgcttgccgaagacgtttccgtgtggccgtgcgccgtgttgcgcggcgatgtgaacagcatcaccgtcggcgcgcgcagcaatatacaggacggcagcgtcctgcacgtttcccacaaaaccgccgccaaacccgaagggtcgccgctggttatcggcgaagacgttaccgtggggcacaaagtgatgctgcacggctgccgtatcggcaaccgcgtcctggtcggcatggggacgacggttctggacgatgccgtgattgaggacgaagtgatgatcggcgcgggcagcctcgtgcctccgcgcaaacgtttggagggcggctatctttatgtcggttcgccggtcagacaagtgcgcgtgttgaccgatgaggaaaaagcctttttgaagtattccgccgcgcattatgtgaagctgtcgaaacagtacgggatgtga

SEQ ID NO: 41266 - DNA, 360 bp, Neisseria meningitidis
atgtattttgttgaccgcaccgccgtcgtcctcaagccgaccgtccgctttttggaatggctcaaaagcaccgacgaaaatatgcccgacctgaccatagaacagcttcgtgccaactgttccgtcttcctcgttccgcagttcaacgaaccggaagccgtcgtttcctatttcgacgaacgctaccgccagattttcgaggcggagctggcaggttgggacatcgataaggataaatggccgcaagatatggggctgaaggcgttttgggaatttttcgacatcgaaatccacgatatggtgttggacatggaagaagcggaattgaacattacccccgtgttcgacaacatgatgtaa

SEQ ID NO: 41267 - DNA, 807 bp, Neisseria meningitidis
atgccgacagttttcatctttttgacggcggtttacgcaggattgggtgcatttgcatggcactgccaacagcaggggcgcggtcgggattacccgtggaagacggaattgccggttttgggcgcggcattgaccgtccacggcgcggcactgctgatgccggtcattcaagacaaaatcatcattatgggcttcgggtattccggcagcctgattgtttggatgatgctgtttatttattttgccggcagcttcttttatccgctgcgcggagtgcagttgctgctgtatccttgcgccgcactgatgctgctgtcaggtttggtttttcctggaaaattctcgggatatgaaattaccgaccttccctttatgctgcatatcggaacttcgctgcttgcatacgggctgttcggcatcgcaacattattgtccgttttgaccctgctgctgaatcgcagcctgcaccgcaggagcttctccaagctcgcaggattcctgccgtcgctgctcagtttggaaaaactcatgttccaggtcatgtgggcaggtttcatcctgctgacctattccgtcgtcagcggcacattcttcgccgaagccgtattcggcaaacccatgacctttacccataaaaccgtattcggcatattgtcatggctgatttacggcggactgttgctcaagcacagcatgaccgcatggcgcggcaaaaaagccgccgtgtggaccatcatcggatttgtcagccttatgattgcctatatgggcagcaagttcgtattggaaatcattctgaaaagataa

SEQ ID NO: 41268 - DNA, 1008 bp, Neisseria meningitidis
atgagcaccttcttccggcaaaccgcccaagccatgattgccaaacacatcgaccgtttcccgctattgaagttggaccaggtgattgattggcagccgatcgaacaatacctgaaccgtcaaaaaacccgttaccttagagaccaccgcggccgtcccgcctatcccctgttgtccatgttcaaagccgtcctgctcggacaatggcacagcctctccgatcccgaactcgaacacagcctcattacccgcatcgatttcaacctgttttgccgctttgacgaactgagcatccccgattacagtactttatgccgttaccgcaactggctggcgcaagacgacaccctgtccgaattgctcaaactgattaaccgccaactgaccgaaaaaggcctaaaaatagagaaagcatccgccgctgtcgttgacgccaccattattcagaccgccggcagcaaacagcgtcaggctatagaagttgacgaagaaggacaaatcagcggccaaaccacaccgagtaaggacagcgatgcccgttggatcaagaaaaacggcctctacaaactcggttacaaacaacatacccgtaccgatgcggaaggctatatcgagaaactgcacatcacccccgccaatgcccatgagtgcaaacacctgccgcctttgctggaagggatagccgaaggtacgaccgtctatgccgacaaaggctacgacagtgcggaaaaccggcaacatctggaagaacatcagttgctggacggcattatgcgcaaagcctgccgcaaccgtccgctgtcggaaacgcaaaccaaacgtaaccgatatttgtcgaagacccgttatgtggtcgaacaaagcttcggtacgctgcaccgtaaattccgctacgcccgggcagcctatttcggactgattaaagtgagtgcgcaaagccatctgaaggcgatgtgtttgaacctgttgaaagccgccaacaggttaagtgcgcccgctgccgcctaa

SEQ ID NO: 41269 - DNA, 1233 bp, Neisseria meningitidis
atggctaaaaacggaggattttctttgttcgcaaagaaagaaaaacgctttatctttgaaggcaggcattccgcctccgacaaactggtcaacggcgaagtatccgcgtttaccgaagaagaggcgcgcaaaaaactggcaaaacgcggcatccgcccgttgcagattacccgtgtgaaaacaagctccaagcgcaaaatcacacaagaagacatcaccgttttcacccgccagctgtccacgatgattaaagcgggcctgccgctgatgcaggcatttgaaatcgtggcgcgcggacacggcaacccgtctatgacggaaatgctgatggaaatccgaggcgaagtggaacagggcagctcgttgagccgcgcattctcaaaccacccaaaatatttcgaccgcttctactgcaacctggttgcggcgggcgaaacgggcggcgtattggaaagcctgctggacaaattggcaatttacaaagaaaaaacccaggccatccgcaaaaaggtaaaaaccgcactgacctatccggtatccgtcatcgccgtcgccatcggtttggtattcgtgatgatgattttcgtactgcccgcctttaaagaagtttacgccaatatgggcgcggagcttcccgcactgacccaaacagtgatggatatgtccgactttttcgtctcatacggctggatggtgctgatcgcactgggctttgccatatacggcttccttaaattgaaggcgcgttcgattaaaatccaacggcgtatggatgccatactgctgcgtatgccgattttcggagacattgtccgcaaagggacgattgcccgctggggcaggacgacggcgacgctgattgcggcaggcgtgcctttggtcgatgtattggactccactgccggcgcggcgggcaatttaatctatgaagaagccacccgggaaatccgtacgcgcgtcatccaaggtttgtctatgacttcggggatgcgtgcgacggaactgttccccaatatgatgttgcagatgtcttccatcggcgaggaatcgggttctttggacgatatgctcaacaaagccgccgaattttacgaagacgaggtggacaatgcggtcggcaggctgtccgctatgatggagccgatcattatcgtgattttaggcttggtcatcggcacgcttctggtcgccatgtatctgccgctgtttaatttgggcaacgtggtcgcctga

SEQ ID NO: 41270 - DNA, 711 bp, Neisseria meningitidis
atgcctaaaatttctagtatagtttccgccaaccttcgttatcaaaagatttttcctgataaagaacttattgtttatactcggtcggcagcaccaaccaccattagatgtcctatacacggagaagttcctagtgggacattggactctttactgagaacaaagcacggctgccctgagtgtaacaagttgactcgttcagaatacttaaggggtaatcctgcaaatgctaaggttgttagggtttttgactccttgtcaggtaaaacactggaatttgtttctgcttcagcagcggcgagagggctggaaaccaacttaggaaatataaggtctaggctctcaggtcgtgtgtcggtagacaacctgatacaagacaggtataaggttcttctcgattcgacagactgcgttacacaaacacctcagaaggttctaccagaagggtttaaattagttgaagggtttgaaaactacgcccttaatagactcggtcaggtgtataacgtcaagtacggtcgactattgaccccctctttctccaattcagccaacgctgtcatcatatctctgtactccaatggagaggctgtctccatcttcctggctaaattgatgctccaaactttccgccccgacgaacccttgccgaaacggataacgtacaaagacggagacaggcgcaactgctcgctggacaatttggcttaa

SEQ ID NO: 41271 - DNA, 909 bp, Neisseria meningitidis
atgaatcaaaccgccatcaaccgcgccgatgtgcgtacccgctttatcttcgacgatatgcccgtgcgcgggctgcacgtccgtctggaaaacgtgtggcagcacattgtaaaacagaaaaactatcccgccgccatccgccgcgccttgggcgagctgttggctgccggtgttctgctgtcgggcaacctcaaaaacgaaggcacgctgattgtgcaggttcaggggcaggggcggctgaaaatgctggttgcggaagcgacttccgaccgtaccgtccgtgcgaccgcgcggtgggacgaggcggcagaaatcggtgaagatgaaagtttggtcgatcttttgggcgagggcggcgtattcgtgctgacgctgcagcccaaagacggcgaaccctggcagggcgtagtgcctttggaaggcgacggtatcgcgcaaatgttgatgaactatatgaaacgttccgaacagcttgatacgcacatcgtcctgtctgcaagcgatgaagcggcgggcggtctgctggtgcagcgtctgcctgaagaggtgttggatgaagaggcatgggaacacgtcagtacgctggcgcgcacgctgacggcggaggagctggcagaattggacgcgcaacacgttttataccgcctgttccacgaaacgccgccgcgcgtgttcgagccggaaacgtttgaattttcatgcacctgttcgcgcggcaaagtcagcgatatgctgttgatgctgggcggggaagaagtcggcggcgtggtggtggaacaaggcagcatcgaagtcgattgcgatttctgccacagcaaatatgtgtttgacgaaaccgatgtcaacgcgctgttcggagaggatgtggtcggcgttgccaaagggttgccccggcataccgtccaataa

SEQ ID NO: 41272 - DNA, 1035 bp, Neisseria meningitidis
atgagcctgccagcaatggatgccggtatttatctcgaagaaaccgccccgcgcgccctgattgaacacaacaatattttggataattcggtcggcgtatatctgcatggttctgccgatgcgatggtgcgcgagaataaaatcgtcggcgacgcgactttgcgcgtgaacgagcgcggcaacggcgttaccgtttggaacgcacccggtgcgcaggtcgtcggcaacgacatttccaaagggcgggacggcattttttccaataccagcacgcacaacacctacaaaaacaaccgcttcagcgatttgcgtttcgccgtccactatatgtacaccaacgacagcgaaatcagcggcaatatttccgtgggcaacaatatgggctatgtgctgatgttttccgagcggctcaaagtattcgacaatatcgccgtcggcagccgcgaccagggcattatgctcaactatgtcaactattccgatattcacgacaacattatcaacaaagcgggcaagtgcgtttttgcctacaatgccaactacgataaactgtccgccaatcattttgaaaactgccaaatcggcatacactttaccgccgccatcgaaggcacgtccctgcacgacaattcctttatcaacaacgaaagccaggccaaatacgtcagcacgcgctttctcgactggagcgagggcggacacggcaactattggagcgacaacagcgcgttcgatttgaacggcgacggcttcggcgacagcgcgtaccggcccaacggcatcatcgaccaaatcatctggcgcgcgcccgtatcgcgcctcttgatgaacagtcccgccatcagcatcgtcaaatgggcgcaggcgcagtttcccgccgttttgcccggcggcgtggtggacagcaaaccgctgatgaagccttatgcccccaaaattcaaacctgttatcaggcgatgaaggacgagctgctcaaagaagccgaaacgcggcagtcggaatggggcagggcggaaaacggttctttgaactag

SEQ ID NO: 41273 - DNA, 966 bp, Neisseria meningitidis; identical to SEQ ID NO: 40672

SEQ ID NO: 41274 - DNA, 3219 bp, Neisseria meningitidis
atgaataacgaaaccaagatttatattaccgccgaaactggcggtgtcgtcagcggcgtagaaaaggcaaaacaatccatcaagtctttgggggatgtggcatcttaccaggggcggcgtatttctgacggattggtacatagtggcgacggcgcagagaaatcatcgacggtagtgtcggcggcatcgaagcggacggaacggtctttggcttctctggagaatgccatccgccgcgatatagccgttaagattgcaggcggtaaggcaaaccgagagtattacgaagagcttgcgcgccagcgcggtatcgatattgcacggcttaatccgctactgtcccaattggacaggcataatacgcagaccaatcgcgctacgcagtctgtcaagcagttcaataacgcattgcggcaaaccccggcacaaattaccgacatcgttacccagcttgcaggcgggcaaagcccgtttctgatcatgattcaacagggtgggcagttgcgtgatatgtatggcggcttcggtggtatgcttaagggactggccacggtcatttcccctatgcgccttgctgtcgcggggttgggcggcggcattgcggcattgggttatgcgatgtatcagggtgcagaggaatcgcgcgaataccgtaaagccttgatacttgccggagatgcagcagggattactgcagacaggatgcaggaaatcgctgtttcggtctgggcagcgacgggcggctatgctgatgcgcgtgctgcaattacggccttggtctcaagcggcaaggttgcagcggataattacgaacagttcgcccggagtattaccctccagtcgcaggcaacggggcaaagtattgacgatttggttgagaaatatactgaaatcgccaaagacccgctgaaagctgtggtatccctatcagccacctaccggacaatgactgccgatgtttaccagcaggtcaaggctttgcaggcacaaggtcgggaacaggacgcggttgcattggtgcagcggaaattctccgaagagtcggaggatatggcaaaacgcgtactgggtaatcttgggttgattgagcgggcgtggaaggatattaaagaaagtgcgtcggaggcatgggatgctgttaaatccataggtagggacaagaccaagctggatgaaattgccgcgctagattcgtttatttcccaaatcgaaaccagcaagaaacatccggttacacaattgttttggggtgaagagggagagcgtaagctgcaggaagcctatgcgcggcgtgcccggttgcgtgccgaaatcgacaaggaggcagccgctgctgaaactttgcggcagaaacagaagcagaaccaaaatcgaactgaaggtatagccgaattggaggctgtttcggaacgttatgccactcgagagcagcaacggcagcgcgaactgcttaaaaacgacaaagcacggaaaaaggcgttggacggcatcactgacgcgaaaaagcggcaagaaatcattaataagcacgcggcaaatgccaagctgattaatgaaagttttgccgagaaaaaacacgaacgacagaaagaaaaaacggataaaacaagctaccccactgtttcgaacggcttgaggattaaaccgggagccgaagcgggcggcaaagcgctaggcggaacatatgccttcgcgcatgccatgcagcagatgctgggagaccgtctgttccgtttcggcgccttccgagatcgataccacattgggaaaaacagcctgcataacagtggattggcatttgatgctactccttctcctggtatggggatgaagcagaaacagaccgttgtcgcccaaatgacccgttatcttgagtcgttggggtttaaaaacgggcaggattttaaccttaaactggaacttgccggacaacgcaataaaaacggtacggtagcaaccggcgaccactggcatttcaactggcgttctcgagaggcggctgcgcgatttgccgtcggtgttgatggtcaggcgaaaaatatggcgcacctcgggttgtttaaggaggtggagaaagaacctctttccggctacgaaaaatggagggaggattttaaccgccgtcatgccgaggctgaggcgaagaaggctttgcaaatcttgaatgccaaccgtgccgtaggggagcagttgaagctgcttgccgacccaactttcggcgattggacgaaggagcagcaggcggctgcgcgggtgcttgccgaacaggtcgatgcgcaggatagtttgacggccgcctccaaaaaatattccgacatagtgaagcaaatgaccgacgattcgaaagaaaagttggatgacaggctgtttgaaatttcgcttatcggcaaaacccgtgaagaaatcgagaaactgacgctggcgagactgtgggacagacagatagcgaaagcccgtgaagaaggtgcgccgttggaaagtatcgatttattggagcgcggcaaggcggaagggatgagcaatctttctcaaatgcagaaggcgcgtgcagacagcgacaatgattggcgcggcggtatcgagtccggcttgaaaagctacatcgattcattcggaacgatgaggcaggcgatggaaaatgccaccgtacaaaccttcgacaaaatgggggatgcgctggcagactttgttgccacaggcaaacttgattttcgaagcctgactgtttccattttgcaggatttgtcaaaaatgctgattaaaatggcgattgtcaatgcaatgaagtcggcgttgggttatgccgacggcggtattgtcggtggaggaagtacgcagttcgacgcgttgttttccggcggcggctataccggctacggcgggaagtatgagcctgccggcattgttcacaagggcgaagtcgtattttcccagcgggacgtacgtaatcacggcggcgttgcggctgtcgagcggctgcggttgaatggttatgccggtggcggcgcagtaggactgccgtccgttttgaccggagtccgttcggccggggctggaagcatgcaggtcaacatcactataaatcgggacggtagcaccgaatcggacagcagtgccgatacggagatggcgaagcatcttgccgctgccataccgggcatggtggaacagtggtatgtcaagaatgtgtaccgtgaaaacggtacttaccataaatag

SEQ ID NO: 41275 - DNA, 798 bp, Neisseria meningitidis
atgctgaaacaacgggtaataaccgccatgtggctgctgccgctgatgctgggcatgctgttttacgcgccgcaatggttgtgggctgcattttgcggactgattgccctgattgccttgtgggaatatgcccgtatgagcggcttgtgcaaaatcaaaaccaaccattacctcgccgcaaccttggttttcggcgtggttgcctatgcgggcggctggatgctgcctaatttggtttggtatgttgttttggcattttggcttgccatcatgcctttatggttgagattcaaatggaggctcaacggcggttggcaggtttatgccgtcggctggcttttggttatgccgttttggttcgcgctcgtatccctgcgcccgcatcccgatgatgccctgccgctgctcgccgtgatgggtctggtctgggttgccgacgtttgcgcgtatttcagcggcaaggcgttcggcaaacacaaaatcgcgccggcaatcagccccggaaaaagctgggaaggcgcaatcggcggcgcggtttgcgtggccgtgtacatgaccgccgtacgaagtgccggctggctggcattcgatacaggctggttcgataccgtgttaatcggtttggtgttgaccgttgtcagcgtatgcggcgaccttttggaaagctggctcaagcgcgcggcaggcatcaaagacagcagcaacctgctgcccggacacggcggcgtgttcgaccgtaccgacagcctgattgccgttatcagcgtctatgcggcgatgatgtcggttttaaattga

SEQ ID NO: 41276 - DNA, 453 bp, Neisseria meningitidis
atgcaaattattctgttagaaaaaatcggcggtctgggcaacttgggcgacatcgtaaccgttaaaaacggctacgcccgcaactttctaattcccgcaggtaaggcaaaacgtgcgaccgaagcgaatatgaaagagtttgaagcacgccgtgccgaattggaagccaaacaggctgaaattttggcagatgcccgagtccgtcaggaaaaattggacggtcaaaccgttaccgttgctcaaaaagccggtgtggacggccgcctgttcggttccgttaccaatgccgacattgctgctgcaatcgttgctgccggcatcgaagccgtgaaagcaaatgtacgtctgccgaacggtcctctgaaagccgttggcgagtacgaagtggaagtggctttgcacactgatgccgttgctaaaattaccgttgccgtcgttgccgcaaccgagtaa

SEQ ID NO: 41277 - DNA, 1083 bp, Neisseria meningitidis
atgtttttatggctcgcacatttcagcaactggttaaccggtctgaatatttttcaatacaccacattccgcgccgtcatggcggcgttgaccgccttggcgttttccctgatgttcggcccgtggacgatacgcaggctgaccgcgctcaaatgcgggcaggcagtgcgtaccgacggtccgcaaacccacctcgtcaaaaacggcacgccgacgatgggcggttcgctgattctgaccgccattaccgtgtccaccctgttgtggggcaactgggcgaacccgtatatctggattctcttgggcgtactgcttgccaccggtgcgctcggtttttacgacgactggcgcaaagtcgtctataaagaccccaacggcgtgtccgccaaattcaaaatggtgtggcagtcaagcgttgccattatcgccggtttggcattgttttaccttgccgccaattccgccaacaatattttgattgtcccgttcttcaaacaaatcgccctgccgctgggcgtggtcggctttttggtgttgtcttacctgaccatcgtcggcacatccaatgccgtcaacctcaccgacggcttggacggccttgcgaccttccccgtcgtcctcgttgccgccggcctcgccatcttcgcctatgccagcggccactcacaatttgcccaatacctgcaattaccttacgttgccggcgcaaacgaagtggtgattttctgtaccgccatgtgcggcgcgtgcctcggtttcttgtggtttaacgcctatcccgcgcaagtctttatgggcgatgtcggtgcattggcattgggtgccgcgctcggtaccgtcgccgtcatcgtccgccaagagtttgtcctcgtcattatgggcggattatttgtcgtagaagccgtatccgttatgcttcaggtcggctggtataagaaaaccaaaaaacgcatcttcctgatggcgcccatccatcaccactacgaacaaaaaggctggaaagaaacccaagtcgtcgtccgcttttggattattaccatcgtcttggtgttgatcggtttgagtaccctcaaaatccgctga

SEQ ID NO: 41278 - DNA, 729 bp, Neisseria meningitidis
atgcctgattacatccgcacctcacgcgccgccgacagcctgcgcgatatcaaaatcacccctcatttcctgccgcatacggacggttcgtgccttattgaatgcggtaataccaaagttatctgtaccgcttccgtggatgaaaatgtcccaccgtttttgcgcggtaaaaaccaaggctgggtaacggcggaatacgggatgctgcctgcgtccaccgcttcgcgtatgcgccgagaagcctcggcgggcaaacagtccgggcgcacacaagaaatccaacgccttatcgggcgttcgctgcgcgcggtcgtggatatggaaaaactcggcgaacgccaaatcttgattgactgcgatgtgattcaggcagatggcggtacgcgcacggcttcgattaccggtgcgtttgtcgcgctgcaaatcgccgtcggcaaactggtttcagacggcattttgagtgaaaaccccatccgcgaagccgttgccgctgtgtcagtaggcgtagtgaacggcgtgccgcttttggatttggattatcccgaagactccggttgcgacagtgatgtgaatatcgtcatgaccgcatcgggaaaaatcatcgaaatccaaggtacggcggaagacgcgccgttcagtttggacgaattgggcaaactggttgcactggcgcaaaaaggcataggcgaactgctgcaacaccagcaaaatgcgctgtctgccgcctga

SEQ ID NO: 41279 - DNA, 237 bp, Neisseria meningitidis; identical to SEQ ID NO: 39540

SEQ ID NO: 41280 - DNA, 1410 bp, Neisseria meningitidis
atggatacacaaatcaagactgaagccgacaatcagagcaaccggcgttatctgaccgtttggcggtggcatttttatgccggtctgctggttatgccttttcttaccctgcttgccgttacgggtttgggtatgctgctgtttgccaatattaccggtaaggagggcgagcggattcatgttgtgccgcaggcaacggtacaacctctgtctgttcaggcggaagcggcacgcagtgccgttaatccggaaacttcgtccgtcgttcagtatattgcgccgcgcgccgaggacatggttgccgtgttccgtgtcaacaatgagggtaaggcaacgatggttgcggtcgatccttatacggcaaaagtggtcaacaccatgccgcgcaatcagggttggtatcacacgatggatgaaatccacagcgatatgatgctcggttcgacaggcgattatcttttggaaacggctgcatcgctgacgattatcatgataatcagcggtttgtacctttggtgggtgaaacggcgcggcatcaaggcgatgctgctgccgccaaaaggcagggcgcgttcttggtggcggaatctgcacggcgcgtttggaacttgggtgtcgttgattttactgttgttctgcctgtcgggtattgcttgggcaggtatttggggcggcaagttcgtgcaggcttggagtcagttcccggcaggcaaatggggtgtcgaaccgaaccctgtttcagtcgtgccgacccatggcgaggtattgaacgacggcaaggttaaggaagtgccgtggattttggagcttacgcctatgcctgtttcagggacgactgtgggcaaagacggcattaaccctgacgagccgatgacattggaaaccgtcgaccgttttgcgcgggaaatcggtttcaaagggcgttatcagctgaatttgcccaaaggcgaggacggcgtatggactttgtcgcaggattctatgagttacgacatgatcagcccgtttgctgaccgcacggtgcatatcgaccagtacagcggcaagattcttgccgacatccgttttgacgattacaacccgttcggcaaatttatggcggcaagcattgcgctgcatatggggactttgggctggtggagcgtgttggcgaacgtcttgttctgccttgccgtgatttttatcggcatcagcggctgcgtgatgtggtggaaacgccgtccgtccggcgcggtgggcatggttccgccggcgcaaaaaatcaagctgcccgtctggtgggcaatggcggtgccgctgctgctgattgcattgcttttcccgaccgcgctgcttgccattgccgtgatttggctgttggatacgctgctgttgtcgcggattcctgttttgaggagatggtttaaatga

SEQ ID NO: 41281 - DNA, 1428 bp, Neisseria meningitidis
atgaatatgaccaccatctacaacacccttacccgccaaaaagaaccctttgcccccatcgaccctgaaaacgtgcgtatgtacgtttgcggcatgactgtttacgactattgccacttaggccatgcccgtgtgatggtggtgttcgacatgattgcccgttggttgcgcgagtgcggctatccgctcacttatgtacgcaacatcaccgacatcgacgataaaatcattgcccgcgcggctgaaaacggcgagaccatcggcaaactgactgcgcgtttcatccaagccatgcacgaagatgccgatgctttgggtgtgttgcgtcccgatatcgagccgaaggcgacggaaaacattccgcaaatgattgccatgattgaaaccctgattcaaaacggcaaggcatatcctgccgcaaatggcgacgtttactacgccgtgcgtgagtttgccgcttacggacaactgtcgggcaaatcgttggacgacctgcgcgcgggcgaacgcgtggaagtggacggtttcaaacgcgatccgcttgattttgtattgtggaaagcggcgaaagcaggcgaaccggcgtgggaaagcccgtggggcaacggccgtccgggttggcacattgaatgctctgccatgagtgaaaacctgttcggcgataccttcgacatccacggcggcggcgcggatttgcaattcccgcatcatgaaaacgaaatcgcccaaagcgtcggtgccagcggtcatacctgcggccacgaccacgcacaaacccaccacggtcaaagcattgccagccacgtcaaatactggctgcacaacggctttatccgtgtggacggcgaaaaaatgtccaaatcgttgggcaacttcttcactatccgcgaagtgttgaaacaatacgaccccgaagtcgtgcgtttcttcatcctgcgcgcccactaccgcagcccgttgaattactccgacgcacatttggacgacgcaaaaggtgcgctgacccgcctgtacactacgttgaaaaacacaccagcggctgagtttggcttatctgaaaacgccaacgattacacccgccgtttctacgccgccatgaacgacgatttcggtacggtcgaagcggttgccgtgttgtttgaactggcaggcgaagtgaacaaaaccaatgatgcacaccttgccggctgcctgaaagctttgggcggcatcatcggcctgttgcaacgcgatccgattgaatttctgcaaggcggtgctgtttcagacggcctctccaacgaggaaatcgacgatttgatcgcccgccgcaaacaggcacgcgcggataaaaactgggcggaatccgaccgcatccgcgaccttctgaacgaacacaaaatcattttggaagacaacgccggcggcacgacttggcggcgcggttaa

SEQ ID NO: 41282 - DNA, 771 bp, Neisseria meningitidis
gtgtccgaaacacaaaacgaacaacccgtccaaccgcttgtcgagcatctcatcgagctgcgccgccgcctgatgtggacggttgtcggcatcttagtctgctttttcggcctaatgccgtttgcccaacaactctatacttttatcgccgacccgctgatggcaaacctgcccaaagacaccagcatgattgccaccgatgtcatcgcaccatttttcgtgccggtcaaagttaccctgatggcggcatttttaatttcgctgccgcatacgctctaccaaatctgggcatttgtcgcgcccgcactctaccaaaacgaaaaacgcctgattaccccgcttgtcctctcaagcgtcagcctgtttttcatcggcatggcgtttgcctattttctggttttccccgtcattttcaaattccttgccggcgttacccctgtcggcgtcaatatggcgacagacatcgacaaatacctgtcctttatcttaggcatgttcgttgcgttcggcacaacctttgaagttcccatcgtcgttattctgttaaccaaaatcggcgtggtaacaaccggacagctcaaatatgcccgcccctatgtgattgtcggcgcgtttgtcattgccgccatcatcacgccgcccgatgtgatttcacaaaccctgcttgccattccgctgattctcttatacgaagcaggtatttggttcggacgctttttcacgccacgttcagaacaggatggcgacatacagccgcctgcaacaacctga

SEQ ID NO: 41283 - DNA, 1077 bp, Neisseria meningitidis
atgatttgccgaaaacctatcggacacacaccatattttgatatgaataaaacaatctgccgcactgccgcactattgataagcggtttttcatacgcaaacaccgtcattcccgatgtctcccccgtcgcacaaggtcaacatgtcttcattaacatccctcagcaacgcctgttcctctacaccgacggcaaactgaccaaggtttatcccgttgcagtaggtcgggcgatgacgcaaaccaatctaggcgaacataaaatcggtgcgaaagcctataaccctgtttggtacatccccaaatccatacagaaagaacgcggcgacggcgtaaaaaccatagccgccggcccggacaaccctttggggccggtttttgtccgcttaggcgaccccaaactcggtttgggcatacacgggaccaatgcgccggccagcgtccccggggttcggagtcacggctgcgtccgcatgaaatcgcccgacgcgctcgagtttgccaaaaccatcgccagcggctcgcccgcctccgtcatctatcaaatggcggggctcaatgaagatgcggatcgcaacctgtggcttgccgccttccgcgacccttacggtaagaacaaccttgacatcgcctctctgaaaaaaagtattgcgcaatgggcaaaaacacagggtaaaaccatcgcgcccgagaaagtcgatgctgtactcaaagaccgcaccggatcggccgtctgcctgacctgcggcaaaaacggcaagatgaagatgccgctcaaatcgctggcgtggatacagggttcttcctcatacagccaagctgaagtcattgaacaaactgaggaaaccaactctgccgaaatatccgagacacgcacgcccgaagtgcctgatgtacacacgcccgaggcacaaccgcatttaaatacccaatccgacggcacgccgactgcctataccgaaccggctgccgattcatcgccgcaagtagaaacacctgatcaggctgcttccgagccggttgatgtattattttcaatagatgtgatacggcagggaaatttgcgtttaggtaattga

SEQ ID NO: 41284 - DNA, 726 bp, Neisseria meningitidis
atgcgtattccgctgcttgcccctgacaattatgcctttcccgatcctgcctatgctttggcccggtgcgacgggctggtcggcgtgagcggcgatttggatgcggggcggctgcttgaggcgtatcggaacggcgtgtttccgtggttttcccgggacgggtggtttttttggtatgcggtcgggccccgtgcggtggtgtttcccgacaggctgcatattccgcgctcgctggcgaaaacgctgcgcaacggcagctatcgggttgcggtcaacggctgttttgcggaagtggtcgcgcattgtgcggcagcggcgcgcccgaatcaggacggaacttggattgcgcccgagtttcagacggcatatttgaagctgcacgaaatggggtacgcgcattctttcgagtgccattatcccgatgaaagcggtgaaacgaggttggcgggcggcttttacggcgttcagatcggcagggtgttttatggcgaatcgatgttcgcattacaaccggatgcgtcgaaaatcgcgtttgcctgcgccgtgccgtttttggcggatttgggcgtggaactgatagactgccagcaggatacggaacatatgcgccgtttcggttcggagctgctgccgtttgcggattttgccgaacgtctgcggatgttgaacgccgtgccgttgaaagaggaaatcgggcggcgcgaagtggcgtgcagggggctttga

SEQ ID NO: 41285 - DNA, 549 bp, Neisseria meningitidis
ttgaatttaacggagggcgacaccgtgttggacagggaaggctatcgccccaatgtcggtattatcctgattaacgaacgtaacgaagtcttttggggcaagcgcgtgcgcgaacattcttggcagtttccgcaaggcggcatcaagccgggcgaaagccccgaaaccgcgatgtaccgcgagctttacgaagaagtcggacttctgccgcaacacgtcaaaatcgtcgggcggacgcgcgactggctgcgttacgacgtgccgaacaactgggtacgccgcgaatggcgcggctcttatcgcggacagaagcagatttggtatctcctgcgcctgaccggccgggattgcgatgtcaacctgcgcgccacccgccaccccgaatttgacggctggcgttggcaccaatattgggcgcccgttgacgaagtgattgatttcaaacgcgacgtttatttgggggcattgaaagaactttcttcccgcttcctgcgcggtatggaaagttatgaagactttgccgcccgccaactttccggcaaccggtaa

SEQ ID NO: 41286 - DNA, 738 bp, Neisseria meningitidis
atggctttgcaagatcgtaccggtcaaaaagtaccttccgtagtattccgcacccgcgtcggcgacacttggaaagatgtgtctaccgatgatttgttcaaaggcaaaaaagtagtcgtattctccctgcccggtgcatttaccccgacttgttcttcttcacacctgccgcgttacaacgaattgttcggcgcgttcaaagaaaacggcgttgacgcaatctactgcgtatctgtaaacgatacgttcgtaatgaacgcttgggctgccgaagaagaatccgacaacatctacatgattcctgacggcaacggcgaatttaccgaaggtatgggtatgctggtcggtaaagaagacttgggcttcggtaaacgctcttggcgttactccatgctggttaacgacggcgtggttgaaaaaatgttcatcgaacctgaagaactgggcgatccgttcaaagtatccgatgcagatactatgctgcaattcgttgctcccgattggaaggctcaagagtctgtggcaattttcactaaaccaggttgccaattctgcgctaaagccaaacaagctttgcaagacaaaggtttgtcttacgaagaaatcgtattgggcaaagatgcaaccgttacttccgttcgcgccattaccggcaagatgactgcccctcaagtcttcatcggcggcaaatacatcggcggcagcgaagatttggaagcttacttggctaaaaactga

SEQ ID NO: 41287 - DNA, 282 bp, Neisseria meningitidis
atgaaaaccctcgtcctcctcctgctttctttctccacgaccaccgctttcgccgcatacggtttgggtttggggcaggcaccgaaatatcctgccggctttcgcgcctacggttatgtttattccggacggcagggctgggttttaaaaacagaggcggatgccattaaattagacacgcttttcaaacgctttgtgtaccgtccttccgccgccaatcaaaaccccgtcggacagcgttcggacggcatacccgccaaccacacaaaggaaaaaccatga

SEQ ID NO: 41288 - DNA, 321 bp, Neisseria meningitidis
atgattacccttaccgagaatgccgcaaaacacatcaatgactatctcgccaaacgcggcaaaggcttgggcgtacgcttgggtgtgaaaaccagcggctgctcgggtatggcgtacaaccttgaatttgtcgatgaagccgacggcgacgacctgattttcgaaggacacggtgcgcgcatttatatcgatccgaaaagcttggtttatctggacggcacgcaagtcgattacaccaaagaaggtttgcaggaaggtttcaaatttgaaaaccccaatgtcaaagactcctgcggctgcggcgaaagcttccacgtttaa

SEQ ID NO: 41289 - DNA, 720 bp, Neisseria meningitidis
atgacacagcaaatcaaatacaaacgcgtattactgaaactctccggcgaatccctgatgggttccgatccgttcggcatcaatcacgataccatcgttcaaactgtcggcgaaattgccgaagtcgttaaaatgggcgtgcaagtcggtatcgttgtcggcggcggtaacattttccgcggcgtatctgcacaagcaggcagcatggaccgcgccactgccgactacatgggcatgatggcaaccgtgatgaacgcgttggcactcaaagacgcatttgaaactttaggcatcaaagcgcgcgtacaatccgcactgtctatgcagcaaatcgctgaaacttacgcccgtcctaaagccatccaatatttggaagaaggcaaagtcgtgatttttgccgccggtaccggtaacccgttcttcacgaccgacactgccgccgcattgcgcggtgcggaaatgaactgcgacgtgatgcttaaagccaccaacgtcgacggtgtatacaccgcagacccgaaaaaagacccgtccgccacacgctacgaaaccattacttttgacgaagccttgttgaaaaacctcaaagtcatggacgcgaccgctttcgccctctgccgcgaacgcaagctcaatatcgtcgtcttcggcatcgccaaagaaggctcgctcaaacgcgtcattaccggcgaagacgagggaacgctggttcactgctga

SEQ ID NO: 41290 - DNA, 246 bp, Neisseria meningitidis
ttgcatgaaaaaccatacaagatgatgaaaaacaaatatattttaataaaagcagcaatcggcataaccgccatatccatattttatcttctaactcaagaaagcagcggcaaaactgaagaaccatcatatttcttgatgtttatgtttctcaacttgctttggtttgaagaaaataaaacagttatggctgccgctacggcaatgattgccgcccactttatatttgtcgcactatccgattaa

SEQ ID NO: 41291 - DNA, 285 bp, Neisseria meningitidis
atgttcggcggtcgtctgaaaaactctccatccattaccgccaaacactttttgaaggaaaatatcatgaaatttattaacacctgccgtaaatacggcgcaaaactggctgtcgtaacagctgctcccctggctttggccgcacatgcaaatgcaacgttgcccgatacggcaaaaaacgctttggaagccgcaaaagcggacggtatggaagccggttggattgtagtgggcgttttcgccgcgctttttgtgttttccatcgttaagagagtgatgaagtaa

SEQ ID NO: 41292 - DNA, 705 bp, Neisseria meningitidis
atgttgcgttctattttggcggcttccctgctggcggtatcttttccgacggcggctgaagcattgaattacaatattgtcgaattttctgaatcggcgggtgtcgaggcggttcaggatacaatgtccgcacgtttccaagtgacggcggaaggacgggacaaaaatgccgtcaatgccgagtttgttaaaaaattcaacaatttcaccagaaaatcaaaaaatggtagctttaaaaccgaattggtatcgcgcagtgcgatgccgcgctatcaatataccaacggcagacgcattcaaacaggttgggaggagcgtgcggaatttaaggtcgagggtagggattttgatgcgttgaaccgttttattgccgatgttcaggcagatgccgcgttggaatatacggatttccatgtgtcgcgcgaacgccgcaacgaggtcatcgatcaggtcagcaaggatgccgttttgcgtttcaaggcgcgtgccgaaaagttggcgggcgttttgggtgcgtccggttataaaatcgtcaaattaaatttgggacacatcggcagccatatcgcgggtgggggagctgctcaggcaaaaatgcttcgtgccatgccgatggcggcaagttacggcgtggagggtacggattccgtcgcgccgggtgtggaggaaatcagcatcagcgtcaatgggacggttcagttctga

SEQ ID NO: 41293 - DNA, 306 bp, Neisseria meningitidis
atgtcccgtaaggcagaaacacctttaatattcaaaccaaggagtttaaccatgaacaaacttttcattaccgccctgtccgccctcgccttgtccgcctgcgccggcacttgggagggcgcgaaacaagacaccgcccgcaaccttgacaaaacacaggccgccgccgaacgcgccgccgaacaaacaggcaacgccgtcgaaaaaggctgggacaaaaccaaagaagccgtcaaaaaaggcggcaatgccgtcggacgcagcatttcccatctcggcggaaaaatcgaaaacgccaccgaataa

SEQ ID NO: 41294 - DNA, 858 bp, Neisseria meningitidis
atgaactacgccctcgatgccctgtggtggaaactgaccgaccctaccgtgcgggatttagcctcgctgctgactgcgccgcctttgtggcaaagcggttgcgaattgggcgtgcgcgaactactgggggaacgcggtttccgttaccttttggcattggatgccgatcccgcgccgctgacggaacacctcgcccgacacgccccattcggacaccgcctcggcatttacgccgaagaactgtcggcattttggtttgccaacgcgccgcacgccgaactgctcgcgcacaacctcacggtttccggttcggacggcaatacgcaaggcgcggcggattttgtggcaaggcttaacggcaaaccctaccatatcgagctgacctgcaaatattacggtggcggcacgggcaggctcgaagacatgcgcggactcgaccccaaagacacgctgttgggaaaagccgccaaactgaccgcccaactcggtctgccgcacacttcagacggcatccgaaccttgcggcaacacagtttgccgcttgacgtaaaacccgtttccatcgtgcgcggcatcggattttttccgcaaggtttccatgcttttgagccgccgcttaacccatacggctggcgcggcatctatattcaagactgggcggaatacgggtttgaacgccaagaagtccgctaccacctgctcgaccgcatggcctatcttgcacctgcgcgtgtcgccgaaaccgaaacattgaacgaaaccgaaatccgccgtatcgaccaaggcttgattgccgttttggaattacggccggacggcttttggcacgaaatcgaacgcatcatgaaggccgtctga

SEQ ID NO: 41295 - DNA, 729 bp, Neisseria meningitidis
atggcaggccatagcaagtgggcgaatatccagcataaaaaagcccgtcaggatgccaaacgcggcaaaatcttcacccgtttaatcaaagaaatcaccgttgcggcgcgtatgggcggcggcgatcccggtgcaaatccgcgcctgcgcctggctttggaaaaagcagccgaaaacaatatgcccaaagacaatgtgcaacgcgccatcgacaaaggcacgggcaacttggaaggcgtggaatacatcgagttgcgctacgaaggctacggcatcggcggcgcggctttgatggtggactgcctgaccgacaacaaaacccgcaccgttgcggacgtgcgccacgcgttcaccaaaaacggtggcaacttgggtaccgacggctgcgtggcgttcaacttcgtgcatcagggctatttggtattcgaacccggcgttgacgaagacgcgctgatggaagcggctttggaagccggtgcggaagacgtggttaccaacgacgacggttccatcgaagtcattaccgcgccaaacgattgggcgggcgtaaaatccgctttggaggcggcaggttacaaatccgttgacggcgacgttacgatgcgcgcccaaaacgaaaccgaactctccggcgacgatgccgtcaaaatgcaaaaactgattgacgcgctggaagacttggacgacgtgcaagacgtttacacttccgccgtattgaatctggactga

SEQ ID NO: 41296 - DNA, 897 bp, Neisseria meningitidis
ttgaatccgacgaatgatttgaaagcgtggcaacagagggcgcaggcacagacagagctgctgctggaacgctttttgccgtctgaaaacgaaatcccgcacacgctgcacgaagcgatgcgctatgcggctttggacggcggcaagcgtctgcgtccgatgctggtgctggcggcttcggaattgggcggggtcgtggcggatgcggtcggacaggcaatggcggcaatcgaaatgatccacgtctattctttggttcacgacgatatgccggcgatggacaacgacagcctgcggcgcggcaaaccgacttgccatgtgcaatacgacgaagccaccgcgctactggtcggcgacgctttgcaaacccaagccttcgacgtgttaagccgtccgacagaactgcccgcagcacgccagttggcaatgttgtcggtgttggcgaaagcgggcggcagcgcgggcatggcgggcggtcaggcaatcgatttggcgaatgtcggcaaacaaatggttcaagccgatttggaacagatgcacagcctgaaaacgggtgcgctaatccgtgcggcggttttattgggggcgatgtcctgcccgaatctgtctgaagacagtctggcggtattggacgattatgcggcaaaactggggctggcgttccaagtcattgacgatgtgttggattgtgaagcggacacggcgactttaggcaaaacggcgggcaaagacgcagacaacgacaagccgacttatgtgaaactgatgggcttggaagcggcgcgctcatacgcacacaaactggttgccgaagcggtcgcgctgctcgaacccttcggcgacaaagccctgcgcctgcggcagttggcagaatttgcagtcgcccgcaaatattaa

SEQ ID NO: 41297 - DNA, 498 bp, Neisseria meningitidis
atgccgtctgaatctttccgtgccgaaaccgccgccatgaaaccgcaaaaatccctacgcgcccgcgcgatggacatcctctcgcgccaagaagtcagccgcatcggtctgaaacgcaaacttgcaccgtacgccgaaagcgaagaggagttggaaaacgtgttaaacgaatttgccgaacgcaactggcagtcggatttgcgctatgccgaagcctatatccgcagcaaaagccgcaaacacggttcattgaggctgaaacaggctttggcgcaacagggcatagatgaagaaaccagccgcaacctgcttcccgaccgctcaagcgaaaaacaggccgccatagccgtgttgcgtaaaaaattcaaacaccccgccgccgacctcaaagaaaaacaaaaacaggcgcgtttcctcgcctatcgcggattcgatgccgataccgttcagacggcattgaaacacgcttgggacgaaaattgggaagacggctgctga

SEQ ID NO: 41298 - DNA, 1098 bp, Neisseria meningitidis
atggaagttcaactgccgaaaattaaaacagtacgcgtaatgttggcggggatgacggcgcagcaggaatccgttttcaaaatggcattcaaaatgcacaataccacccgttatgaaacagtatccccttcagacggcagtgccgtgcccgatttggttttggcggataccgatgccgagggcggttttgaactttggaaagagcttgccgagcgttataaggatatacccgtcgccgtctgttcggagaaagttcccgattctgaagttccctacctgcccaaaccgattcggtttgaaacattgtttcctatgctccgcaaattgttgcagggcgagaatgtttatgggaaatcgtttattgcacccgcagaccggtcggcgaaaaataacgggaatgtgcagcgtacggttacgatacgccagtttaacccgaataaaggattattgggggcgttgcggtttgcggaaaagaacaggcaggacatcgctatcttgcatggaaataagccggtccttattgttttcccctcgatacaacgggttttgctgacagaaagtgtgcaaaaactcgaagaattgtgcaaagacgaaaatttgcaggtcagctgcaagactgttcccgataacccgcaatggcgcgaaaaggctaaagtaggcattatgtcctgtatgtggcagttttccatttggacggcgcagggcaggttgatttatccgatttctcccgatactccgtttacgttgaaatcttggccaaacctgacccggttggcaaatgtgccggggtcgatacgcttgtcggcatttctgaccaaggcatccgtcaaccttaacgtgttgtataaagtgatgcctttaaacctcaatgatattctgaattatcttacggcaacctatacaaccgggtttttgtcggtagatttaaaaacggtttcacaacaggcatactccgatatggcggataaaataaatatcggagccgattctgcctctgatagtgaaatgatgaaaaaagcggaaaaaatcacaacaccatcccaatcccagtcgcgcggccttctgcaaaggctgatgaaaaaactgttgggcagctaa

SEQ ID NO: 41299 - DNA, 855 bp, Neisseria meningitidis
atgccgcccatccctgccccatccgcaccatccgagcacactgtcgcatgggtattcggccaacccgttaccgatttgccgcaggatttgtttatcccgcccgacgcgctgaaagtcgtattgggcagttttcaaggccctttggatctactgctgtatctgatccgcaagcagaacatcgatgttctcgatattccgatggtgaagattaccgagcagtatctgcactacatcgcccaaatagaaacctatcagtttgatttggcggcggaatatcttttgatggcagcaatgctgattgaaatcaaatcgcgcctgctgctgccgcgtaccgaaaccgtcgaagacgaagaagccgacccgcgtgccgagttggtgcgccgcctgctggcttacgaacagatgaagctggcggcgcagggtttggacgcgctgccccgagccggacgggatttcgcgtgggcttacctgccgctggaaattgccgtcgaagccaagctgcccgaagtctatattaccgacttgacgcaagcgtggctgggtattttgtctcgggcaaaacacacgcgcagccacgaagtaatcaaagaaaccatctccgtgcgcgcgcaaatgacggcaatcctgcgccgtttgaacggacacgggatatgcaggtttcacgacctgttcaatcccgaacagggcgcggcttacgtggtcgtcaacttcatcgcactgttggagcttgccaaagaaggtttggtcggaatcgtacaggaagtcggtttcggagaaatccgaatcagcctcaatcatgagggggcgcattcagacggcatttccggcacacggggcgggcgcgatgtgttctaa

SEQ ID NO: 41300 - DNA, 1272 bp, Neisseria meningitidis
atgaaactgctggttatcggtaatggcggtcgcgaacacgcgctggcttggaaattggcacagtcgcccaaagtggaaacagtatttgttgcgcccggtaatgctggtacggcgattgaacccaagctgcaaaacatcgccttgaccgcacatcaggatttgattgaattctgccgtaaagaaaatattgcttttaccgtcgtcggtcctgaagcgcctttggcggcaggtattgtggatgaattccgtgccgcaggactgaaaatattcggtccgacacaatatgcggcgcagttggaaagttctaaagattttgccaaagcatttatggcgaaatacaatattccgaccgcgcaatatcaaacctttgaaaacgccgatgccgcacatgattacgtcaatcagaaaggtgcgcctatcgttatcaaagccgatggtttggcggcaggtaaaggcgtgattgtggcaatgactttggatgaagcgcatgctgcgattgacgatatgttgttgggcaataaaatgggcaatgcaggcgcacgcgttgtgattgaagattttctgcaaggcgaagaagcgagctttatcgttatggttgatggcaatcatgtattgcctatggcgaccagccaagaccacaagcgtcttttagacggcgacaaaggcccgaatacaggcggtatgggtgcgtacagtcccgcgcctgtggtaacgcctgttgtgtacgaacgcgcgatgaacgagattattttgccgaccgtagcggggatgaaagcggaaggatatgagttcaccggtttcctgtacgcaggtttgatgatcgatcaaagcggagcaccctatacgattgagtttaactgccgtttcggcgatcccgaaacgcagccgattatgagtcgcctgaacagcgacttggcggatttggtcgaagcggcaatagacggcaaactcgatagtgtaaccgcagaatggaacccgcaaactgccgtaggcgtggtgctggcggcacaaaattatcctgaaacgcctaaaaaaggcgatgttatttctggtctggatgccgccaaccaaatcggcaaagttttccatgcaggtacaacggcaaacgagaaaggtgacgtattgaccaacggcggacgcgtattgtgtgttgtgggattgggcgacaatgtggtgcaagcgaaagctaaggcatatggcgcgttggaaaaaatcagtttcgacgggatgcaataccgtaaagacattgccgataaagcgattaaccgttaa

SEQ ID NO: 41301 - DNA, 801 bp, Neisseria meningitidis
atgagcccatccccctttatcgaaatgaaagacgtcgccttcgcgtatggcgaccgcccgattctgaagaacatcaatttcagcattccgcaaggcaattttgctgccgtaatgggcggttcgggcagcggcaaaaccacgctgatgcgactgattacaggacagattcgtccgcagtccgggcaggttttgattgaaggacgggatttggcgggcttttcggctgacgagttgtatgaacaccgccgccgtatgggcgtattattccaacacggcgcgctgtttaccgatttgtcggtattcgacaatatcgcttttccgatgcgcgaactgacacgcctgccggaagcggtgattcgagatttggttttgttgaaactgaacgcggtcggtttgcgcggcgtggaaaacctgatgccgtccgagttgtccggcgggatgtcgcgccgcgtcgcgcttgcccgcacgattgcgctcgaccctgaaattatgttgtacgacgaaccgtttaccggcctcgatccgatttccttgggcgtgattgcccacttgatcagccgcgtcaataaggctttgcgttcgaccagcgttatggtaacgcacgacattgaaaaatctttggaaatcgtcgatcaggtgatttttttggcgcacggcgaaattatgttctccggctcgccgcaggaaatgcgcgaactggattcgccttgggtgcgccagtttgtcggcgggctggcagacggccccgtagcataccgctatccggcgcaaacgtcgttgcagcaggatttgctcgggtaa

SEQ ID NO: 41302 - DNA, 579 bp, Neisseria meningitidis
atgtcaaacacaatcaaaatggttgtcggcttgggcaacccgggcaaagaatacgaacagacacgccacaatgcgggtttttggttcctcgacgaactggcgtggaaatggaaggcttcatttaaagaagaaaaaaaattcttcggcgaagtcgcccgtgccgccctgcccgacggcgacgtttggctgctcaaacctgccacgttcatgaaccgttccggacaggcagttgccgcccttgcgcagttttataaaatcaaacccgaagaaatcctcgtcgtccacgacgaactcgacattccctgcggacggatcaaattcaaactcggcggcggcaacggcggacacaacggcttgaaagacattcaggcaaaactcggcacggcagactattaccgtctgcgcctcggcatcggccacccgggcgaccgcaacctcgtcgtcggctatgtcctgaacaaacccagtacggaacaccgccgacagattgacgatgccgtcgccaaatccctgcaagccatacccgacatccttgccggcaaatgggaagaagcaacccgcttcctgcacagcaaatga

SEQ ID NO: 41303 - DNA, 645 bp, Neisseria meningitidis
gtgcttgcctccgccatcgacttcatcctccatatcgaccaacacctgctcgcgctgtcggcgcaatacggtgtgtggatttatgcgattctgtttttgattgttttttgcgaaaccggcctgattgttacgcccttactgcccggcgattcgctgctgtttgccgccggcgggattgccgcgctgggcggtatggatattcatttaatggttgcattattaagccttgccgccatactcggcgacgcgctcaattttaccgtcggcaaatatttcggcggcaggctgttcgccaaccccgattctaaaatcttccgacgtgaatatctcgataaaacccaccgtttttacgaaaaacacggcggcaaaaccatcatcattgcccgttttatgcccatcgtccgcaccttcgcccccttcgtcgccggtatggggaaaatgcactatgccaaatttatccgctacaacatcatcggtggcttgttgtgggttatcctgttttcttacgcgggctatttctttgccaacttccccgtcgtaaaaaacaatctgggcttggtgatgggcagcatcattattgtttccgtcctgccgggtgcggttgaaattgcccgcgccaaacttgcggtaaaatccaaacggtaa

SEQ ID NO: 41304 - DNA, 993 bp, Neisseria meningitidis
atgaaaacgcacgaaataagcaaagattcggtcagcttgataggggttgccgaacatgaggcgggtcaacgccttgataactatctgataaaaatcctcaagggtgttcccaagagccatatccaccgcattatccgcgccggcgaggtgcggttgaacaagaaacgctgcaaacccgacagccgtattgcggagggggatacggtgcggattccgcctgtgcgcgtggcggagaaggaaatgccgtctgaaaggcgtgccgccgtaccggcgcgtgcgtttgaggcggtgtatgaggacgacgcgctgctggtgatcgacaagccttccggcgtggcggtgcatggcggcagcggcgtgagttttggcgttatcgaacagttgcgccgcgcccgtccggaggcgcgttatctcgaactcgtccaccgtttggacaaggatacgagcggtttgttgatggtggcgaagaaacgcagcgcgctcgtcaaacttcacgaagccatccgtaacgaccaccccaaaaaaatctaccttgcgctgggggtgggcaaactgccggacgacaatttccatgtcaaactgcccctgttcaaatataccggcgcacaaggcgaaaagatggtgcgcgtcagtgcggacgggcagtcggcgcatacggtgttccgtgtgttaagccgtttttcagacggcattttgcacggtgtcgggctgtcgcacctgactttggtgcgggcgacgttgaaaacggggcgcacgcaccaaatccgcgtccacctgcaatctcaaggctgtccgattgcgggcgacgaacgctacggcgattatcaggcgaaccgtcgtttgcagaagttgggtttgaagcggatgtttttgcacgcgtccgagctgcacttgaaccatccgctcacgggcgagccgctggtgttgaaggcggagctgccgccggacttggcgcagtttgcggtgatgttggaaaacgggacgaaaatgtga

SEQ ID NO: 41305 - DNA, 1260 bp, Neisseria meningitidis
atgagtatggcacttgcccaaaaacttgccgccgacagcattgcggcggttgccgaaggacgcaaccttcaggacgtgttggcgcaaatccgcaccgcgcatcccgaccttacggcgcaggaaaacggcgcgttgcaggacatcgcctacggctgccagcgttatttgggcagtttgaaacatatgctcgcgcagatgctgaaaaagccgattgacaacccgcagctcgaaagcctgcttttggcggcgttgtaccaactgcattacacgcgcaacgcgccgcacgccgtggtcaatgaggcggtggaaagcatcgcgaaaatcgggcgcgggcagtaccgttcgtttgccaacgcggttttgcgccgttttttgcgtgaacgtgaaaaattggcgtcttcctgcaaaaaagacgatgtggcaaaacacaacctgccgctgtggtgggtggcttacttgaaaaaccattatccgaaacactggcacaacatcaccgccgcgctgcaatcgcatccgccgatgacgttgcgcgtcaaccgccggcacggcaatgccgaaagctatttggaaaaactggctgcggaaggtatcgccgcaaaggcgttggacgaatatgcggttacgttggaagaagccgtgccggtgaaccgcctgcccggtttttcagacggcattgtttcggtacaggacttcggcgcgcagcaggcggcgtatctccttaacccgaaagacggcgaacggattttggacgcgtgcgccgcgccgggcggcaagacggggcatattttggaattggcggattgccgcgttaccgccttggacatcgatgcaggccgtctgaagcgtgtggaggacaatatcgcccgtttgggctttcagacggcatcggcggcgtgtgccgatgcgcgggatttggcggcgtggtatgatggaaagcctttcgacgcaatccttgccgacgtgccatgcaccgcttccggcgtggcgcggcgcaatcccgacgtgaaatggctgcgccgtccgaccgacgcgctaaaaaccgcccgccagcaggaagccctgctggacgcactttggcagacgctgaaacagggcggcagaatgctgcttgccacctgttccgtgttcgtcgaagaaaacgacgggcaattgcaaaaattcctcaaccgccatgccgatgccgaaccgatcgaatcgcgggtgcttttaccgaacaaacaccaagatggcttttattacgcgcttattcaaaagcattaa

SEQ ID NO: 41306 - DNA, 317 bp, Neisseria meningitidis
atgaatatattaccaagctggctgcgagtcggtatgaatatagcaatgctgggcatgatacactcagatatcaggttaattaccgtagattacgaggaaggaagaaggtttttaaaaatcaaaaattatttatcaagagaagccatcacagaagaccatgaagatatggaatatttgattacagagttatggtctatgtgtggagaatattttgatgaagctgactttgaatgtatttattctaatcattcttctatggagttaaaccaaataaatggtgcagtattcaggagaaaggaattaatttcgcaagcgta

SEQ ID NO: 41307 - DNA, 837 bp, Neisseria meningitidis
atgcaaatcatacataccattcgagaactgcgcgcgtggcgtaaaaatgcgggaaaggtggcatttgtgccgaccatgggcaatctgcatgaagggcatcttgcgcttgtgcgtgaggcgaaaaaacgcgcggacagtgtcgtggtcagcattttcgtcaaccgcctgcaattcggtcagggcgaggatttcgacaaatatccgcgtactttgcaacaggatgcggacaagctggaagccgagggtgttgccgttgttttcgcgcccgatgagaaagaactctatccgaacgtggaacagcgttacaacgtcgaaccgccccatctgcaaaacgaattgtgcggcaagttccgccccggccattttcgcggggtggcaacggtagtgtccaagctgttcaatattgtcgcgccggatgttgcctgtttcggcaaaaaagactatcagcagcttgccgtgattaaaggtttgaccgaggatttgaattttgatgttgaaatagtgcctgtcgatacggggcgcgcggaagacggtttggcactctccagccgcaaccagtatttgagtgcggcggaacgcgacgaagcaccgcgcctgtaccgcgaattaaaggctgttgccgaatccttggcgcagggcagtttggattatgcaggtttggagcggcaggctgccgaccatttgaccgctgcgggctgggtggtcgattatgtcgaaatccgccgcgccgatacgctcgaagtggcgcgggcgggagataagaaactggtggtcttggccgccgcccgtctagggacgacgcgcctgattgacaatttggaaataaaactcccttaa

SEQ ID NO: 41308 - DNA, 1893 bp, Neisseria meningitidis
atgcctatccttaccatccgtgaagtgtgcaacattaatcattggggcataggttattatgatgttgacgattccggcgaaatcatcgtccgccccaatccggcgcaacacaatcaaactgcttcactgcaaaaactgactgaagccgtgcaacaaaaacatcaggcgcgcctgcctgttttgttttgttttccgcaaatcctcgaacaccgcctccgcgacattaaccgcgcctttcagacggcacgggaagagtgcggctataagggcggttattgtttggtttaccctatcaaggtcaaccaacaccgccgcgtcatcgaatcgcttatgtcaagcggacaaccgcatggtttggaagctggttctaaagccgaactgatggcggttttggcacacgccggcacccggcaaacattaatcgtctgcaacggctataaagaccgtgaatatatccgtttcgccttgatgggcgaaaaactggggcatcaggtttatttggtgattgagaagctgtccgaaatacaaatggtattggaagaggcggaaaaactcggcatcaagccccgtttgggtgtgcgcgccagactggcttcccaaggttcgggaaaatggcagtcttcgggtggggaaaaatcaaaattcggcttgtcggcttcccaagttttgcaactggtcgatattttgaaacaaaaaaacaggctggattgcctgcagcttttgcatttccatttgggctcgcagcttgggaacatccgtgatgttgccacaggtgtacacgaatcggctcggttttatgttgagttgcacaaactgggggtaaatatccgctgttttgatgtaggcggcgggcttggcgtggattacgaaggaaaccgcacacaatcggattgttccgttaattacagcctcaacgaatatgccgccacagtcgtatggggcatcagtcaggcttgtctcgaacacgggctgccgcatccgacaatcatcaccgagagcgggcgcggcattaccgcacatcacgccgttttggttgctaatgttataggcgttgagcgttacaaaccgcgccggctggatgcgccatcgcccgaagcgccgcgtgtgttgcacagtatgtgggaaacttggacggatatttccgcctcgcgggaaaaacgttccttacgcagctggatacacgaagggcagtttgatcttgccgatgtgcataatcagtataatgtcgggctgttgagtttggcgcaacgtgcgtgggcggagcaactgtatttaaatatctgtcatgaagtcggcgaattgtttaatgaaaaacaccggtctcaccgaaccattattgacgaattgcaagaacgttttgccgataagctgtatgtcaatttctcactcttccaatctttgcccgatgcttggggcatagatcaacttttccctgtttgtcccattaccggtttgaatgaaccgattgcgcgccgcgccgtgttgttggacattacctgcgattcagacggtacgattgaccactacatcgacggagacggcatcgccggtacgatgcctatgcctgattatcccgaagaagagccgccgcttttaggcttttttatggtgggagcatatcaggaaatactcggcaatatgcacaatcttttcggcgacactgccactgccgatgttgttgtaggggaagacggacaatttaccgtcatcgattacgatgaaggaaacaccgttgccgatatgctcgaatacgtttatcaagatccgaaagagctgatgaaacgctatcgcgaacaaatcgaacattcagaccttcctgcctcgcaggctatgtctttcttaaaagaactcgaagcggggcttaatggttatacctatttggaagacgaatag

SEQ ID NO: 41309 - DNA, 903 bp, Neisseria meningitidis
atggataccgcaaaaaaagacattttaggatcgggctggatgctggtggcggcggcctgcttcaccattatgaacgtattgattaaagaggcatcggcaaaatttgccctcggcagcggcgaattggtcttttggcgtatgctgttttcaaccgttgcgctcggtgctgccgccgtattgcgtcgggacaccttccgcacgccccattggaaaaaccacttaaaccgtagtatggtcgggacgggggcgatgctgctgctgttttacgcggtaacgcatctgcctttggccaccggcgttaccctgagttacacctcgtcgatttttttggcggtattttccttcctgattttgaaagaacggatttccgtttacacgcaggcggtgctgctccttggttttgccggcgtggtattgctgcttaatccctcgttccgcagcggtcaggaaacggcggcactcgctggtcttgccggtggcgcgatgtccggctgggcgtatttgaaagtgcgcgaactgtctttggcgggcgaacccggctggcgcgtcgtgttttacctttccgcgacaggtgtggcgatgtcgtcggtttgggcgacgctgaccggctggcacaccctgtccctctcatcggcggtttatctgtcgggcatcggcgtatccgcgctgattgcccaactgtcgatgacgcgcgcctacaaagtcggcgacaaattcacggttgcctcgctttcctatatgaccgtcgttttttccgccctgtctgccgcattttttctgggcgaagagcttttctggcaggaaatactcggtatgtgcatcatcatcctcagcggtattttgagcagcatccgccccactgccttcaaacagcggctgcaatccctgttccgccaaagataa

SEQ ID NO: 41310 - DNA, 1185 bp, Neisseria meningitidis
atgagtttacacagcgacatcctcgtcgtcggcgcaggcccggcgggtttaagttttgcagccgaacttgccggcagcggtttgaaagttaccctgatcgaacgcagcccactgactgttctgcaaaatcctccatatgacggacgcgaaatcgccctgacccatttttcccgcgaaatcatgcagcgtttgggtatgtgggacaaaattcccgaaaacgaaatctaccctttgcgcgatgccaaagtgctgaacggacgttccgactaccagctccactttccccaaccgaccgaggcgcgcggcgagcctgccgactgtttgggctatctgatttccaaccacaatatccgccgcgctgcctacgaagtcgtatcccaactcgacaacattaccattctgaccgatacggccgttaaagaagtcaaaacatctgacaacgaagcacaagtcattttagaaaacggcaaaatcctgaccgcccgcctgcttttggcggcagacagccgtttttcgcaaacccgccgacaactcggcatttcttcagatatgcacgactacagccgaaccatgttcgtctgccgcatgaaacatactctttccaaccaacataccgcttacgaatgcttccattacgggcgcaccatcgcactgctgccgctggaagaacacctgaccaataccgtcattaccgtcgataccgataaaatcaacagcgttcaaaacctttcgcccgaagaattggcggcaagcgtaaaagaacagctcaagggcaggctcggcgatatggaattggtcagcagcatccaccattacccccttgtcggtatgattgccaaacgtttctacggcaaacgcagcgcgctgattggcgatgcggcggtcggtatgcaccctgtaacggcacacggcttcaacttgggtctttccagcgcagatattctggcaaaactgatactcgaagccgaacaacgcggtcaggacatcggcgcatcttccttgttggaaaaatacagcaacaaacatatgctgcacgcccatccgctttatcacggaaccaatatgatgctgaaactgtttaccaacgaaaccgcgccggcaaaactgctgcgcggcttggtattgcgtgccggcaacaatttcccgccgctgaaaaagctgattaccaaacaactgaccggttga

SEQ ID NO: 41311 - DNA, 1386 bp, Neisseria meningitidis
atgattgttgcttcccgctggcccttgctggaaaaggtatttttacggtttggaatgcctgttgccgtggtcgatttggaatcgacgggcggcaatctgtatgaagacagggtaaccgaagtggctttggtcaagtttgagcagggaagggtggtgaggcatgagtggttggttaatcctcaaaaaccgattccgcagtttgtggcggggctgacggggatttcagacggcatggttgccgatgcgcctgtttttgcagagattgccggcgagttgttttcggtattgaagggttgtgtgctggttgcacataacagccgtttcgactatacgtttttaaagcatgagtttcatcgtgtgggtatcggattttcatcgcctgctttgtgcagtgtgcagctgtcccggtgtctgtatccgcaattttacaagcacagcctggacagtatcatcgaaaggttggggattgttgtggaagacaggcatcgtgcgatggcggatgtatcggcattgtgcgattatttggaatacagtctgtcggaacacggggtcgaggcatggatcaggcagtgtttccgtttgatgaatccgaaaccgttgcctgccgcgctgcccgaacggttgagggaacagttgtacggtttgcctgacggtatgggggtgctggcctgtttcgacggcggaggaaaagtaaattacatcggtacgtttgaacgggtatatagcgaggtttcggctttattggattccggaaaagccccgtttgattggtgcaatacggaggaagtccgtttttttcctgcattgggcagcctgcatgcatataagattaaagcggaattggtcgggcgttatcattcgggttgttatgtatctgccaaaaatctgcttaaaacatttacgaccgtcaggtttgaaaaaggttcagacggcatgttgaatgcgaaaacagcggctttgaaaaacggtgtgacggataatccgcctaccggattatttgccaataaaaaggcagcgagacgggctttgtcgttgtgggcggaaacatacggattgtgtcctgccgcagccggtatccttccggacggttatgcagaggatgagccttgtcccgtatatgtttcaggccgatgcgataaggcgtgtggcggttctgacgaacaggttttggcgtttgcacacaagttgcctgttttggattggggaaaaatgcatgaggtggaaattaccgaaaccgatcctttaacgggggaaaaagttgttctgcatggaatgtgcggcgcattggaaatggatgacgggttttggtatttcgataaagatttaccggatgcgtttaaggcgaagtttaaaacggacaggaaaaatattaaggaaatcggttaa

SEQ ID NO: 41312 - DNA, 1575 bp, Neisseria meningitidis
atgttcagacggtatcttccgaacagacagatgaatatggtttccaaactggacaaatactggcagcaccccgccctctactggcctttgctcatcctttttgccgccgccaccccctttaccttcgcaccctactaccacttttggctgatgcccttgattttcggtgccttcgtccacctcatcgaactgcgtccgcgttttgccgcctcttccgcctacctgttcggtctgaccgcatacacggcgcaattctactggatacacactgccctgcacgacgtttccggcctgcccgacctctatgccgtaccgctgaccttcctgctgcccgcctaccttgccctttatccggcactgtgtttctggctgtggaaaaaatttaccctgcctcggggcataaaaatcggtttggtactgcccatcctgtggacactgaccgagtttgcccgcgaacgtttcctgaccggattcggctggggcgcaatcggctactcccaaatcaccccggacagcccgctcgccggctttgccccattgggcggcatccacatggttacactggcaaccgcctttctcggtgtctggctggttttggcgagtgataacaccgcacgttcgggcaaacgcctgcttccaattatcctgattgccgccctgcttgccgcaggctacaccgcccgacaaaccgacttcacccgccccgacggcagccgcagcaccgtcgccctgcttcaaggcaacatcgaccaaaccctcaaatggcgtgaagaccaagtcatcccgaccatacagaaatattacgaacaggtcggcaaaaccactgccgacatcgtcatcctgcccgaaaccgccatccccgtcatgcgccaaaacctgccggaaaacatactggcaaaatttgccgaacaggcgcaaaacaacggcagcgcgctcgccgtaggcatcagccaatacacttcggacggcaacggttacgaaaacgccgtcatcaacctgaccggttatcaggaaaacaatcaggacggcatcccctactacgccaaaaaccacctcgtccccttcggcgaatacaaaccgctgcccttcctgaccacgccgctttacaaaatgatgaatatgcccctttccgacttccgcaaaggcggcggtaagcaatccgccctgctgatgaaaaaccaaaaaatcgccttcaacatctgttacgaagacggattcggcgacgaactgattgccgccgccaaagatgccacactgcttgccaatgccagcaatatggcgtggtacggaaaatccaacgccatgtaccagcacctccaacaatcgcaggcgcgggctatggaactcggacgctatatggtccgtgccaccaacaccggcgcaaccgccatcatctcccccaaaggcaacatcatcgcccaagcccaacccgatacggaaaccgtattggaaggacacatcaaaggctatgtcggcgaaacgccctatatgaaaaccggcagttcatggtggttgatgggcatattgaccctagccgcactgattcttttcatcttccgaaacaaagaacactga

SEQ ID NO: 41313 - DNA, 714 bp, Neisseria meningitidis
atgatggtttatataatgaatgctttcgatataaagtcgacaaagatggacgtattgtctatatctttgcatacgtcagacttgtttgatttggaagatgtgctggtcaaattgggcaagaagtttcaagagtctggtgttgttccatttgtgctggatgttcaagagtttgattatcccgagtctttggatcttgctgcattggtttcgttgttttcaaggcatggtatgcaaattttgggtctgaagcattctaatgaacgttgggctgctgcggctatgaagtatcatttgctgttttgtctgtctcattcggaaaatgttaaagaactgggtcaggttgaggtgcagaacacggaggatggtcagaaagcaaggaaaacagtattgattacatcccctgtccgtaccggtcagcaggtttatgccgaagatggcgatttgattgttacgggggcggtcagccagggggcggaattgattgcagatggcaatatgcatatttatgcgccgatgagagggcgtgctttggccggtgccaaaggcgatacttctgcccgcatatttatccactccatgcaggcagaactggtttctgtggcgggtatttaccgtaattttgaacaggatttgccggaccatctgcacaagcagccggtacagatattgttgcaggataaccgattggttatcagtgcaattggctcagaataa

SEQ ID NO: 41314 - DNA, 5709 bp, Neisseria meningitidis
atgaatgagggtgaagttgttttaacaccagaacaaatccaaaccttgcgtggttatgcttcccgtggcgatacctatggcggttggcgttatttggctaatttgggtgaccgttatgcggatgatgctgctgcaattgtcggtaaggatgcaaacttaaatggtttgaatttatggatgaaaaaaggtgtggaaaacctatgggatgatacggtcggtaaaaagacccgtttagagaaatttgatcgggttgcactgcaacatttcaggcaatatgcgcgtctaattaatgaaaataatggtagattacccaatactagtgaaattgagagaagttactataaagccgttaccgataatggcgtttcttccagtgcagctattgatttagttattaatcgttcacttccggatatggcggatggttattgggcattaggtttggggatagaagccgaacgtatccacaatgagcaagcagtaaataatccgaacggtagcgaatgggataatagaaagcagttaatatctgctttagataaaggatttgatggatcttttaaagagaagccttttacttttttacaatctgtgataatggatgtaacaaagttaagtgttgaatatacaatagatggttggcaaaaaattggaggttggggtaatgggataatcaatgatttatataaaagtgttgcaaaaagagagtggactggaatatttgagatcgttaataataacatcaagcaatttagagatctgttcccaaatccggaaggctggatcgatgatggtcaccaatgtttcgctccttgggttaaagaaactaaaaaacgcaatggcaaatatcatgtctacgaccccctcgccctagatttggacggagacggtatagaaaccgttgccaccaaaggctttgcaggcagcttatttgatcacaccaacaacggcatccgcaccgccaccggttgggtttctgccgatgatggtttgcttgtgcgcgatttgaacggcaacggcatcatcgacaacggtgcggaactcttcggcgacaataccaaactggcagacggttcttttgccaaacacggctacgcggctttggccgaattggattcaaacggcgacaacatcatcaacgcggcagacgccgcattccaaaccctgcgtgtatggcaggatctcaatcaggacggcatttcccaagctaatgaattgcgtacccttgaagaattgggtattcaatctttggatctcgcctataaagatgtaaataaaaatctcggtaacggtaacactttggctcagcaaggcagctataccaaaacagacggtacaaccgcaaaaatgggggatttacttttagcagccgacaatctgcacagccgcttcaaagacaaagtggaactcactgccgaacaggcaaaagccgccaatcttgcgggcattggtcgtctgcgcgatttgcgcgaagctgccgcattgtccggcgatttggccaatatgctgaaagcttattctgccgccgaaactaaagaagcacagttggcattgttagataatttgattcacaaatgggcggaaaccgattcgaactggggcaaaaaatcgccaatgcgactttcaaccgattggacgcaaacggctaatgaaggtattgcactgacaccatcccaagtagcacaactaaaaaagaacgctttagtttccctttctgataaagctaaagcagctattgacaccgcccgcgaccgcattgccgtgcttgatgcctacacggggcaggattccagcacactctattacatgagcgaagaagacgcgcttaatatcgtcaaagtaaccaacgatacatacgaccatctcgccaaaaacatctaccaaaacctgttattccaaacccgtttgcagccatatttgaatcaaatcagtttcaaaatggaaaatgatacgttcactttggattttagtggtcttgttcaagcatttaaccatgtcaaagaaactaatccgcaaaaagcttttgtggatttggccgagatgcttgcatatggcgaacttcgttcttggtatgaaggccgaagactaatggccgattatgtggaggaggcaaaaaaagcaggtaaatttgaagattaccagaaagtgttgggtcaggagaccgttgcattattagctaaaacatcgggtacgcaagcagatgatatcctgcaaaatgtaggctttggtcataataaaaatgtttctttatatggtaatgacggcaacgacactctgatcggcggtgcaggcaatgattacttggagggcggcagcggttcggatacttatgtcttcggcaaaggcttcggtcaggatacggtctataattacgactacgctaccggacgcaaagacatcatccgctttaccgacggtattacagccgatatgctgacttttacccgagagggcaaccatcttcttatcaaggcaaaagacggcagtggacaagtgactgttcagtcctatttccagaacgatggctcaggtgcttaccgtatcgacgagattcatttcgataacggcaaagtactggatgttgccactgtcaaagaactggtacagcaatccaccgacggctcggacagattgtatgcctaccaatccggaaataccttaaatggcggattgggcgatgactatctgtacggtgccgacggggatgacctgctgaatggtgatgcaggcaacgacagtatctacagtggcaatggcaatgatacgctcgatggaggagaaggcaacgacgccctgtacggctataatggtaacgatgtactgaatggtggcgaaggcaatgatcatttgaacggcgaagacggtaacgacactctgatcggcggtgcaggcaatgattacttggagggcggcagcggttcggatacttatgtcttcggcgaaggcttcggtcaggatacggtctataattacgactacgctaccggacgcaaagacatcatccgctttaccgacggtattacagccgatatgctgacttttacccgagagggcaaccatcttcttatcaaggcaaaagacgacagtggacaagtgactgttcagtcctatttccagaacgatggctcaggtgcttaccgtatcgacgagattcatttcgataacggcaaagtactggatgttgccactgtcaaaaaactggtacagcaatccaccgacggctcggacagattgtatgcctaccaatccggaaataccttaaatggcggattgggcgatgactatctgtacggtgccgacggggatgacctgctgaatggtgatgcaggcaacgacagtatctacagtggcaatggcaatgatacgctcgatggaggagaaggcaacgacgccctgtacggctataatggtaacgatgtactgaatggtggcgaaggcaatgatcatttgaacggcgaagacggtaacgacactctgatcggcggtgcaggcaatgattacttggagggcggcagcggttcggatacttatgtcttcggcgaaggcttcggtcaggatacggtctataattacgactacgctaccggacgcaaagacatcatccgctttaccgacggtattacagccgatatgctgacttttacccgagagggcaaccatcttcttatcaaggcaaaagacgacagtggacaagtgactgttcagtcctatttccagaacgatggctcaggtgcttaccgtatcgacgagattcatttcgataacggcaaagtactggatgttgccactgtcaaaaaactggtacagcaatccaccgacggctcggacagattgtatgcctaccaatccggaaataccttaaatggcggattgggcgatgactatctgtacggtgccgacggggatgacctgctgaatggtgatgcaggcaacgacagtatctacagtggcaatggcaatgatacgctcaatggaggagaaggcaacgacgccctgtacggctataatggtaacgatgtactgaatggtggcgaaggcaatgatcatttgaacggcgaagacggtaacgacactctaatcggcggtgcaggcaatgattacttggagggcggcagcggttcggatacttatgtcttcggcaaaggcttcggtcaggatacggtctataattacgactacgctaccggacgcaaagacatcatccgctttaccgacggtattacagccgatatgctgacttttacccgagagggcaaccatcttcttatcaaggcaaaagacgacagtggacaagtgactgttcagtcctatttccagaacgatggctcaggtgcttaccgtatcgatgagattcatttcgataacggcaaagtactggatgttgccactgtcaaagaactggtacagcaatccaccgacggttcggacagattgtatgcctaccaatccggaaataccttaaatggcggattgggcgatgactatctgtacggtgccgacggggatgacctgctgaatggtgatgcaggcaacgacagtatctacagtggtaatggcaatgatacgctcaatggaggagaaggcaacgacgccctgtacggctataatggtaacgatgtactgaatggtggcgaaggcaatgatcatttgaacggcgaagacggtaacgacactctaatcggcggtgcaggcaatgattacttggagggcggcagcggttcggatacttatgtcttcggcaaaggcttcggtcaggatacggtctataattacgactacgctaccggacgcaaagacatcatccgctttaccgacggtattacagccgatatgctgacttttacccgagagggcaaccatcttcttatcaaggcaaaagacggcagtggacaagtgactgttcagtcctatttccagaacgatggctcaggtgcttaccgtatcgatgagattcatttcgataacggcaaagtactggatgttgccactgtcaaagaactggtacagcaatccaccgacggttcggacagattgtatgcctaccaatccggaaataccttaaatggcggattgggcgatgactatctgtacggtgccgacgggaatgacctgctgaatggtgatgcaggcaacgacagtatctacagtggcaatggcaatgatacgctcaatggaggagaaggcaacgacgccctgtacggctataatggtaacgatgcactgaatggtggcgaaggcaatgatcatttgaacggcgaagacggtaacgacactctaatcggcggtgccggtaatgattacttggagggcggcagcggttcggatacttatgtcttcggcaaaggcttcggtcaggatacggtctataattaccatgtggataaaaactctgacactatgcactttaaaggatttaaagcagcagatgttcattttatccgttccggaagtgatttggtgcttagcgcttctgaacaagacaacgtacgtatttccggattcttctatggtgaaaaccatcgtgtagatacatttgtctttgatgatgcagctatcagtaatccagattttgccaagtatattaatgctggcaataatttggtacagtctatgtctgtgttcggttctaatactgctgcgacaggaggaaatgtggatgccaatatacaatccgtacagcagccgttattggtaacgccatctgcataa

SEQ ID NO: 41315 - DNA, 288 bp, Neisseria meningitidis
atggatgatttgattgcagcttttttgggctatttatcaggtaaatatagcgaaggaaaaataagcaggttagaaatatccctaacggcaggaagcattttctttgcagtattctttattcatgaactgataatttttattgttgatggaaataaggaaaatctttggaattttattaccgagatgataaaagatttatttttattttcatgttctgtttgtttgttattctacttcttattatttattgcggaaaccattggaaaaacaatcaataagattaaataa

SEQ ID NO: 41316 - DNA, 645 bp, Neisseria meningitidis
atgaagctcaaacatctgttgccgctgctgctgtcggcagtgttgtccgcgcaggcatatgccctgacggaaggggaagactatcttgtgttggataaacccattcctcaaaaacagtcgggcaaaattgaggttttggaatttttcggctatttctgcgtacattgccatcatttcgatcctttgttattgaaattgggcaaggcattgccgtctgatgcctatttaaggacggagcacgtggtctggcagcctgaaatgctcggtctggcaagaatggctgctgcggtcaagctgtcaggtttgaaatatcaggcaaaccctgccgtgtttaaagcagtttacgaacaaaaaatccgcttggaaaacaggtcggttgccgaaaaatgggctttgtctcaaaaaggctttgacggcaaaaaactgatgcgcgcctacgactctcctgcggcagcggctgctgcatcaaaaatgcagcaattgacggaacagtaccgcatcgacagtacgccgaccgttgtcgtcggcggaaaataccgcgttatcttcaataatggctttgacggcggtgttcatacgattaaagaattggttgccaaagtcagggaagaacgcaagcgtcagacccctgctgtacagaaatag

SEQ ID NO: 41317 - DNA, 753 bp, Neisseria meningitidis
atgacctcatgtgaacctgtgaatgaaaagacagatcaaaaagcagtaagtgcgcaacaggctaaagaacaaaccagtttcaacaatcccgagccaatgacaggatttgaacatacggttacatttgattttcagggcaccaaaatggttatcccctatggctatcttgcacggtatacgcaagacaatgccacaaaatggctttccgacacgcccgggcaggatgcttactccattaatttgatagagattagcgtctattacaaaaaaaccgaccaaggctgggttcttgagccatacaaccagcaaaacaaagcgcactttatccaatttctacgcgatggtttggatagcgtggacgatattgttatccgaaaagatgcgtgtagtttaagtacgactatgggagaaagattgcttacttacggggttaaaaaaatgccatctgcctatcctgaatatgaagcttatgaagataaaagacatattcctgaaaatccatattttcataaactttactatattaaaaaaggagaaaatccggcgattattactcatcggaataatcgaataaaccaaactgaagaagataattacagcactggcgtaggttcctgtattaacggtttcccggtacggtattacccgtttattcgggaaaagcagcagctcacacagcaggagttggtaggttatcaccaacaagtagagcaattggtacagagttttgtaaacaatccaagtaaaaaataa

SEQ ID NO: 41318 - DNA, 354 bp, Neisseria meningitidis
gtgaacagacaaaccgcttacctccttacctctttcagcctgatcgcactgataatcctgtccctttcctgggaactgtggattgcaccgttgcgcccgggcggctcgtggctcgcgctcaaagccctccccctctgtctgccgctttcaggtatcttgaaaaagaaaatctatacctaccaatacagctccatgctggttctgatttactttgccgaagccgtcatgcgcctgttcgacgcctatcccgcagaacagatttgcgccgcgctttccgcagtattcagcatcatcttcttcatatcctgcctgtcgttcgtcaaacaatacaaggaaacaaacaatgcccgctga

SEQ ID NO: 41319 - DNA, 363 bp, Neisseria meningitidis
atgaccgaccgtccgaacctgctgtggataaagcccggacaggctgaaattatggaatattgcgaacctgaagaagcatccgacccgtacgcaacatacaggcgtgccaacctgatggtggggctgccgctgtttgtcgtgattttggttctgctcaatattgtttttccgcttccggcgcatcccttagcttggctggtgcctgcaggtttcatggttttggtcggcggctttcccttatcgctgccgcttgtggcgctgcttgtcctgacctgctgcattctgctggcgcgttgtccgccattatcccgtcttttgtgctacccttgcccgaatcatccgatgtctaaaaattctgcctga

SEQ ID NO: 41320 - DNA, 1815 bp, Neisseria meningitidis
atgcccgctgaaacgaccgtatccggcgcgcgccccgccgccaaactgccgatttacatcctgccctgcttcctttggataggcatcgtcccctttaccttcgcgctcaaactgaaaccgtcgcccgacttttaccacgatgccgccgccgcagccggactgattgtcctgttgttcctcacggcaggaaaaaaactgtttgatgtcaaaatccccgccatcagcttccttctgtttgcaatggcggcgttttggtatcttcaggcacgcctgatgaacctgatttaccccggtatgaacgacatcgtctcttggattttcatcttgctcgccgtcagcgcgtgggcctgcaagagtttggtcgcacacttcggacaagaacgcatcgtgaccctgtttgcctggtcgctgcttatcggctccctgcttcaatcctgcatcgtcgtcatccagtttgccggctgggaagacacccccctgcttcaaaacatcatcgtttacagcgggcaaggcgtaatcggacacatcgggcagcgcaacaacctcggacactacctcatgtggggcatactcgccgccgcctacctcaacggacaacgaaaaatccccgccgccctcggcgcaatctgcctgattatgcagaccgccgttttaggtttggtcaattcgcgcaccatcttgacctacatagccgccatcgccctcatccttcccttctggtatttccgttcggacaaatccaacaggcggacgatgctcggcatagccgcagccgtattccttaccgcgctgttccaattttccatgaacaccattctggaaacctttactggcatccgctacgaaactgccgtcgaacgcgtcgccaacggcggtttcacagacttgccgcgccaaatcgaatggaataaagcccttgccgccttccagtccgccccgatattcgggcacggctggaacagttttgcccaacaaaccttcctcatcaatgccgaacagcacaacatatacgacaacctcctcagcaacttgttcacccattcccacaacatcgtcctccaactccttgcagagatgggaatcagcggcacgcttctggttgccgcaaccctgctgacgggcattgccgggctgctgaaacgccccctgacccctgcatcgcttttcctgatctgcacgcttgccgtcagtatgtgccacagtatgctcgaatatcctttatggtatgtctatttcctcatccctttcggactgatgctcttcctgtcccccgcagaggcttcagacggcatcgccttcaaaaaagccgccaatctcggcatactgaccgcctccaccgccatattcgcaggattgttgcacttggactggacatacacccggctggttaacgccttttcccccgccactgacgacagtgccaaaaccctcaaccggaaaatcaacgagttgcgctatatttccgcaaacagtccgatgctgtccttttatgccgacttctccctcgtaaacttcgccctgccggaataccccgaaacccagacttgggcggaagaagcaaccctcaaatcactaaaataccgcccccactccgccacctaccgcatcgccctctacctgatgcggcaaggcaaagttgcagaagcaaaacaatggatgcgggcgacacagtcctattacccctacctgatgccccgatacgccgacgaaatccgcaaactgcccgtatgggcaccgctgctacccgaactgctcaaagactgcaaagccttcgccgccgcgcccggtcatccggaagcaaaaccctgcaaatga

SEQ ID NO: 41321 - DNA, 210 bp, Neisseria meningitidis
atgccttatgtcaatattaaagtaaccggcggcaaggaagcaccgactgccgcgcaaaaagcggaactgatcggcggcgtaaccgaattgctggcacgcgtgctgggcaaaaatcccgaaacaacggttgtcgtgattgatgaagtggataccgataactggggaataggcggcaaaagcgtcagcgaacggcgcaaagagggcaggtaa

SEQ ID NO: 41322 - DNA, 150 bp, Neisseria meningitidis
atgagcgcggctttatggcataaaaaactgtcgtggaaaggatttacaccccaaataaatttccgttacaacaagatcaacagcaatatgcccgccttttattcgcgcagcggcaaggaacggtttgtcagtatagaaaaaacgtattga

SEQ ID NO: 41323 - DNA, 1056 bp, Neisseria meningitidis
atgaaaacctacgcaccggcactctataccgcagccctgctcaccgcctgcagccccgcagccgattcaaaccatccgtccggacaaaatgccccggccaataccgaatccgacggaaaaaacattaccctgctcaacgcctcatacgatgtggcacgggatttttacaaagaatacaaccccttatttatcaaaacataccaatccgaacaccccggcacatccgtcagcatccaacagtcccacggcggctccagcaaacaggcattatccgtagccaacggccttcaagccgatgtcgtaaccatgaaccaatcctccgacatcgacctgctcgaaaaaaaaggactggtagaaaaaggctggcaacaagccctccccgaccacgccgcgccctacaccagcactatggttttccttgtccgaaaaaacaaccccaaacagatccgcgattggaacgaccttgccaaagacggcgttaacatcgtcatcgccaatcccaaaacctcgggcaacggacgctacgccttcctcggcgcatacggttacggtctgaaaaccaccaacggcaacgaacaggaagcccaaaaactcgtcgcatccatcctcaaaaacacccccgtttttgaaaacggcggacgcgccgccaccaccaccttcacacaacgcaacatcggcgacgtactcattacttttgaaaacgaagccaactacgtcagcaaaaaactgacccaaggacagtttgaaatcgtctatccgagctacaccatttccgccgaaagccccgtcgccgtcgtcaacagcgtcgtcgcgaaaaaaggcacgcaaaaaaccgcccgcgcctatctcgaatacctttggagcgaaccggcgcaagaactcgccgcctcactctacctgcgcccccgcaaccccgaagtattggcaagacacaaagccgacttcccagacttagactcattctctcccgaagaaaaattcggcggatgggacaacatcatgaaaacctacttcgccgacggcggcatattcgaccgcctgaccgcacaaaaatga

SEQ ID NO: 41324 - DNA, 1248 bp, Neisseria meningitidis
atgagtcagagaagagtagtcattacaggcttaggtcaggtttcccctgtcggcaacactgtcgcagaggcttgggacaccctgctcgccggcaaaagcggcatcggcgcgattacccgctttgacgcatccgacatcaacagccgtgtcgccggcgaagtgcgcggtttcgacatcggacaatacatcagcgcgaaagaagcgcgccggatggacgtattcatccactacggcattgccgccgcattgcaggcaatcgccgattcgggcttggacgatgtggaaaacctcgacaaagaccgcatcggcgtgaacatcggttccggcatcggcggactgcccagcatcgaggtcaccggcaaagccgtaatcgaaggcggcgcgcgcaaaatcaaccctttctttatccccggttcgctgatcaacctgatttccggacacgttaccatcctcaaaggctaccgcggcccgagctacgggatggtttccgcctgtaccaccggcgcgcacgccatcggcaattccgcccgactgatcaaatacggcgacgcggacataatggttgccggcggcgcggaaggcgcaatcagcactttgggcgtgggcggttttgccgcgatgaaagccctctccacccgcaacgacgaccccgccaccgcttcccgtccgtgggacaaaggccgcgacggcttcgttatcggcgaaggcgcgggcatattggtgttggaagaattggaacacgccaaaaaacgcggcgcgaaaatctacgccgaaatcgtcggcttcggcatgagttccgatgcttaccatatcaccgcgccgaacgaagaaggccccgcccttgccgttacccgcgcgctgaaagatgccggcatcaatcccgaagacgtggattacgtcaacgcgcacggcacgtccacccccttgggcgatgccaacgaaaccaaagccctcaaacgcgcgttcggcgaacacgcctacaaaaccgtcgtcagctcgaccaaatccatgaccggccacctgctcggcgcggcgggcggcgtggaggccgtgtacagcattttggcgatacacgacggcaaaatcccgccgaccatcaacatttttgaacaagacgttgaagccggctgcgatttggactactgcgccaacgaagcgcgcgacgcggaaatcgacgttgccatttccaactccttcggcttcggcggcaccaacggcacgctggtcttcaaacgcttcaaaggctga

SEQ ID NO: 41325 - DNA, 528 bp, Neisseria meningitidis
atggtactcttttaccggctgttgaaaaatatgtcttcatctgtttcaagtaaaacgcgctattgggtattggcacttgccgccatcgtgctggaccagtggtcgaagtgggcggtgctgtcgtcgtttcagtatcgggaacgcgtcaacgtcattccttcctttttcgatttgaccttggtgtacaacccgggcgcggcgttcagcttccttgccgatcagggcggctggcaaaaatacttttttttggtgctggcggtggcggtgagcgcgtatttggtacgcgccatcttgcgcgatgagtttgcaaccctcggcaaaacgggtgcggcgatgattatcggcggtgcgttaggcaatgtcatcgaccgcctgatacacggtcatgtcgtcgatttcttattgttttattggcaaaattggttttatcccgcctttaatattgccgacagctttatctgcgtcggtgcggtgttggcagtgttggacaacatcgtccaccgtaaaacccaagaagaaaaatattga

SEQ ID NO: 41326 - DNA, 3606 bp, Neisseria meningitidis
atgtttcattttgcatttccggcacaaactgccctgcgccaagcgataaccgatgcctaccgccgtaatgaaatcgaagccgtacaggatatgttgcaacgtgcacagatgagcgacgaagagcgcaacgccgcctccgagcttgcccgccgtttggttacccaagtccgcgccggccgcaccaaagccggcggcgtagatgcgctgatgcacgagttttcactctccagcgaagaaggcatcgcgctgatgtgtctggcagaagccctgctgcgtatccccgacaacgccacgcgcgaccgcctgattgccgacaagatttcagacggcaactggaaaagccatttgaacaacagcccttccctcttcgtcaacgccgccgcctggggcctgctgattaccggcaaactgaccgccacaaacgacaaacaaatgagttccgcactcagccgcctgatcagcaaaggcggcgcaccgctcatccgccaaggcgtaaattacgccatgcggcttctgggcaaacagttcgtaaccggacagaccattgaagaagccctgcaaaacggcaaagaacgcgaaaaaatgggctaccgcttctccttcgatatgttgggcgaagccgcctacacccaagccgatgccgaccgctactaccgcgactatgtcgaagccatccacgccatcggcaaagatgcggcaggacaaggcgtttacgaaggcaacggcatttccgtcaaactttccgccatccatccgcgctactcgcgcgcccaacacggccgtgtgatgggcgaactgttgccgcgcctgaaagagctgttccttttgggtaaaaaatacgatatcggtatcaacatcgatgccgaagaagccaaccgtctggagctgtctttggatttgatggaggcactcgtttccgatcccgatttggcaggctacaaaggcatcggtttcgttgttcaagcctaccaaaaacgttgtccgttcgttatcgactacctgatcgaccttgcccgccgcaacaaccaaaaactaatgatccgcctcgtcaaaggcgcgtattgggacagcgaaatcaaatgggcgcaagtggacggcttgaacggctatccgacctacacccgcaaagtccacaccgacatctcctacctcgcctgcgcgcgcaaactgctttccgcgcaagacgcggtattcccgcaatttgccacccacaacgcctacactttgggcgcaatctaccaaatgggtaaaggcaaagattttgaacaccaatgcctgcacggtatgggcgaaaccctgtacgaccaagtcgtcggcccgcaaaacttaggccgccgcgtgcgcgtgtacgccccggtcggcacacacgaaaccctgctcgcctacttggtgcgccgcctgttggaaaacggcgcgaactcgtctttcgtcaaccaaatcgtcgatgaaaacatcagcatcgacacgctcatccgcagcccgttcgacaccatcgccgaacaaggcatccacctgcacaacgccctgccgctgccgcgcgatttgtacggcaaatgccgtctgaactcgcaaggcgtggacttgagcaacgaaaacgtattgcagcagcttcaagaacagatgaacaaagccgccgcgcaagacttccacgccgcatccatcgtcaacggcaaagcccgcgatgtcggcgaagcgcaaccgattaaaaaccctgccgaccacgacgacatcgtcggcacagtcagctttgccgatgccgcgcttgcccaagaagcggttggcgcagccgttgccgcgttccccgaatggagtgcgacacctgccgccgaacgcgccgcctgcctgcgccgtttcgccgacctgctcgaacagcacacccccgcgctgatgatgcttgccgtgcgcgaagcaggcaaaacgctgaacaacgccattgccgaagtgcgcgaagccgtcgatttctgccgctactacgcaaacgaagccgaacataccctgcctcaagacgcaaaagccgtcggcgcgattgtcgccatcagcccgtggaacttcccgctcgccatctttaccggcgaagtcgtttccgcattggcggcaggcaacaccgtcatcgccaaacccgccgaacaaaccagcctgattgccggttatgccgtttccctcatgcacgaagccggcatcccgacttccgccctgcaactcgtcctcggcgcaggcgacgtgggtgcggcattgaccaacgatgcccgcatcggcggcgtgatttttaccggctcgaccgaagtggcgcgcctgatcaacaaagcccttgccaaacgcggcgacaatcccgtcctgattgccgaaaccggcggacaaaacgccatgattgtcgattccaccgcacttgccgagcaagtctgcgccgacgtattgaactccgccttcgacagcgcgggacaacgctgctccgccctgcgcattttgtgcgtccaagaagacgttgccgaccgtatgctcgacatgatcaaaggcgcgatggacgaactcgtcgtcggcaaaccgattcagctcactaccgatgtcggccccgtcatcgatgccgaagcacagcaaaacctgttgaaccacatcaacaaaatgaaaggtgttgccaagtcctaccacgaagtcaaaaccgccgccgatgtcgattccaaaaaatccacgttcgttcgccccatcctgtttgaattgaacaacctcaacgaactgcaacgcgaagtcttcggtcccgtcctgcacgtcgtccgctaccgcgccgacgaactcgacaacgtcatcgaccaaatcaacagcaaaggctacgccctgacccacggcgtacacagccgcatcgaaggcacggtacgccacattcgcagccgcatcgaagccggcaacgtttacgtcaaccgcaacatcgtcggcgcagtcgtcggcgtacagcccttcggcggacacggtctgtccggcacaggccccaaagcaggcggttcattctacctgcaaaaactgacccgcgccggcgaatgggttgccccgaccctgagccaaatcggacaggcggacgaagccgcactcaaacgcctcgaagcactggttcacaaactgccgttcaacgccgaagagaaaaaagccgcagcggccgctttgggacacgcccgcatccgcaccctgcgccgtgccgaaaccgtccttaccggaccgaccggcgagcgcaacagcatctcatggcacgcgccaaaacgcgtttggatacacggcggcagcacggttcaagcctttgccgcactgaccgaacttgccgcctccggcgtacaggcagtggtcgaacccgacagcccgctggcttcctacaccgccgacctggaaggtctgctgctggtcaacgacaaacccgaaaccgccggcatcagccacgttgccgccctgtcgcctttggacagcgcgcgcaaacaggaacttgccgcccacgacggcgcactcatccgcatcctcccttcggaaaacggactcgacatcctgcaagtgtttgaagaaatctcttgcagcgtcaacaccacagccgccggcggcaacgccagcctgatggcggttgccgactga

SEQ ID NO: 41327 - DNA, 501 bp, Neisseria meningitidis
ttgagtctcaatattgaaaccaagaaagtggcggtcgaggaaattagcgcggcaattgctaacgctcaaaccctcgtagtcgctgaatatcgcggtatcagtgtttccagtatgactgagcttcgtgcgaatgcacgtaaagaaggcgtttatttgcgtgttctgaaaaatactttggctcgtcgtgcagtgcaaggtacttcatttgcagaattggccgatcaaatggttggtccgttggtttacgctgcttctgaagatgctgttgctgctgctaaagtgttgcaccaattcgcgaaaaaagatgacaaaattgtcgttaaagccggttcttacaatggcgaagtaatgaatgctgctcaggttgctgagttggcttctattccgagccgcgaagagctgttgtccaaactgttgttcgttatgcaagctcctgtatcgggctttgcgcgcggtttggctgctttggcagagaaaaaagccggcgaagaagccgcttaa

SEQ ID NO: 41328 - DNA, 1278 bp, Neisseria meningitidis
atgcgtagcagcgatattttaattgtagacgacgaaatcggcatccgcgacctgctgtcggaaatcctgcaggacgaaggttattcggtcgcattggcggaaaacgccgaagaggcgcgcaagctgcgccatcaggcgcgccccgcgatggtgctgctggatatttggatgcctgattgcgacggcatcacccttttgaaagagtgggcgaaaaacgggcagctcaatatgccggtggtgatgatgagcgggcatgccagcatcgacacagcagtggaagccactaaaatcggtgcgctcgactttttggaaaaaccgatttccctgcaaaagctgctgtccacggttgaaaacgcgttgaagtacggtgcggcgcaaaccgaaacggggcctgtattcgacaagctgggcaacagtgcggcgattcaggaaatgaaccgtgaggtaggggctgcggtgaaacgtgcctctcccgtacttttgacgggcgaggcgggttcgccgtttgaaacggtggcacgctatttccataaaaacggtacgccgtgggtcagcccggcaagggtcgaatatctgatcgatatgccgatggaactgttgcagaaggcggagggcggcgttttgtatgtcggcgacatcgcccagtacagccgcaacatccaagccggtattgcctttattgtcggaaaggcggaacaccgccgcgtcagggtggtcgcatcgggcagcagggcggcaggttcagacggcattgcctgcgaggaaaagctggcggaactgctgtcggaatcggtcgtccgcattccgccgctgcgtatgcagcatgaagatattcccttcctgatacaggggattgcctgcaatgtggcggaaagccaaaagattgcgcccgccgcattcagtgaagaggcacttgccgcattgacccgttacgactggccgggaaatttcgaccaactgcaaagcgtcgttgcaacgctgttgttggaggcggacggacaggaaatcggcgcaggggcggtttcttcccttttggggcagaatgtgcctgccgagggagcggaagatatggtgggcgggtttaatttcaacctgcccctgcgcgaattgagggaggaggtggagcggcgttatttcgagtaccacatcgcccaagaaggtcagaatatgagcaaagtggcgcagaaagtcggtttggaacgcacgcacctttaccgcaaactcaaacagctcggcatcggcgtttcgcgccgggcgggggaaaaaaccgaagaatag

SEQ ID NO: 41329 - DNA, 1053 bp, Neisseria meningitidis
atgtggaaagaaattttactgaattacggtattttcctgctcgaactgcttaccgtgttcggcgcaattgcgctgattgtgttggctatcgtacagagtaagaaacagtcggaaagcggcagtgtcgtactgacggatttttcggaaaattataaaaaacagcggcaatcgtttgaagcattctttttaagcggggaagaggcaaaacatcaggaaaaagaggaaaagaaaaaggaaaaggcggaagccaaagcagaaaaaaagcgtttgaaggagggtggggagaaatctgccgaaacgcaaaaatcccgcctttttgtgttggattttgacggcgatttgtatgcacacgccgtagaatccttgcgtcatgagattacggcggtgcttttgattgccaagcctgaagatgaggttctgcttagattggaaagtccgggcggcgtggttcacggttacggtttggcggcttcacagcttaggcgtttgcgcgaacgcaatattccgctgaccgtcgccgtcgataaggtggcagcgagcggtggttatatgatggcgtgtgtggcggataaaattgtttccgctccgtttgcgattgtcggttcggtgggtgtggtggcggaagtaccgaatatccaccgcctgttgaaaaaacatgatattgatgtggatgtgatgacggcgggcgaatttaagcgcacggttacttttatgggtgaaaatacggaaaagggcaaacagaaattccgacaggaactggaggaaacgcatcagttgttcaagcagtttgtcagcgagaaccgccctcaattggatattgaggaagtggcaacgggcgagcattggttcggtcggcaggcgttggcgttgaacttgattgacgagatttcgaccagtgatgatttgttgttgaaagcgtttgaaaacaaacaggttatcgaagtgaaatatcaggagaagcaaagcctgatccagcgcattggtttgcaggcggaagcttctgttgaaaagttgtttgccaaacttgtcaaccggcgggcggatgtgatgtag

SEQ ID NO: 41330 - DNA, 243 bp, Neisseria meningitidis; identical to SEQ ID NO: 37438

SEQ ID NO: 41331 - DNA, 1392 bp, Neisseria meningitidis
atgagcggtcatatgggaaaaggggcggatgcgcctgatttggtgtacggtttggaggataggccgccgttcggtaatgcgctcttgagtgccgttacccatcttttggcgattttcgtgccgatgattacgcccgcgctgattgtgggcggcgcgctggaactgccggtggagatgacggcgtatctcgtgtcgatggcgatggttgcgtcgggtgtcggcacttatttgcaggtcaaccgcttcgggccggtcggttcggggatgctgtccatccagtcggtgaatttctcgttcgttaccgtcatgattgcgctgggcgcggggatgaaagagggcggtttgactaaggatgcgatgatttcgacgctcttgggcgtatcgtttgtcggcgcgtttttggtgtgtttctcggcgtggctgctgccgtatttgaaaaaagtgattacgccgacggtcagtggcgtggtcgtgatgctgattggcttgagtttggtacacgtcggtattaccgatttcggcggcggcttcggcgcgaaggcggacggcacgttcggctcgatggaaaacttggggctggcatcgctggtgctgctgattgtgctggtgttcaactgcatgaaaaacccgctgttgcgcatgagcggcattgcggtcgggctgattgccggctatatcgtcgcgctgtttttgggcaaggtggatttttccgcgctgcaaaacctgccgctggttacgctgcccgtaccgtttaaatatggttttgcttttgactggcacgcgtttattgtggcgggcgcgattttcttgttgagcgtgtttgaggcggtcggcgatttaaccgcgacggcaatggtgtccgaccagccgattgaaggcgaggaatacaccaaacgtttgcgcggcggcgtgttggctgacggcttggtgtcggtgattgcgacggctttgggttcgctgccgctgacgacgtttgcgcaaaacaacggcgtgattcagatgaccggcgtggcttcgcgtcatgtgggcaaatatattgccatgattttggtgctgttgggtctgttccccgttgtcggtcgcgcgtttacgacgattccgagtccggtgttgggcggcgcgatggttttgatgttcggcttgattgcgattgcgggcgtgcggattttggtcagccacggcatccgcaggcgcgaagcggtaattgcggcaacgtcggtcggtttgggcttgggtgtcgcgtttgagccggaagtgtttaaaaacctgcccgtcttgttccaaaactctatttctgcaggcggcattacggcagtcttgctgaatttggtcttgcccgaagataaaaccgaggcggcggtcaagtttgataccgaccacttggaacactga

SEQ ID NO: 41332 - DNA, 1701 bp, Neisseria meningitidis
atgtcagtcaaaatccaaacccgatccatcaataccgacgtttttaatcatttgctcaccgccggtgccgatcctttaatcgcccggctttgtgcttcgcgcggtgtgcaaagtcctgccgaattggacgacaagcttgctgcgcttttgccgtatcaaacgctgacaaactgcgaagccgccgccggacgtttggcggatgcggttgggcgcaaggaaaaaatcctgattgtcgccgactacgatgccgacggcgcgacggcgtgtgccgtcggtttggacggtttggcggcgatgggggcaaaagtggatttccttgtgcccaaccgctttgaacacggctacggcttaacgcccgaacttgccgaaatcgctgccgcgcagggcgtggatttgctgattacggtggataacggtatcgccagcatcgcaggcgtggcgagggcgcaggctctgggtttggatgtgattgtaaccgaccaccatctgcctgccgataccgtgcccgactgcatcatcgtcaatccgaaccaaaaaggctgcggtttccaaagcaaaagcttggcgggcgtgggcgtgattttttatgtgttgacggcgttgcgtgccgaactgcgccgccgcaattatttttcagacggcctgaaagagccgaatctgggcgatcttttggatttggtcgcactcggcacggttgccgatgtcgtccctctcgaccacaacaaccgcatcctcgtgtcgcaaggtttgaaacggatgcgctccggcaaaatgcgccccggtatccgcgccttgtttgaagtggcgcggcgcgactggcgcaaggcgcagccgtttgatatgggttttgcgttgggcccgcgcatcaacgccgccggacggctggacgatatgtcggtcggcatcgcctgcctgttggcgcgagatgattccgaagctcaggaactggcggctcagttaaacaacctcaatatcgagcgtcgcgaaatcgagcagtctatgctgcaagacgcgctgaacgcctttcctgaaaccctgccttcaggtcagacgactttggtggcgtatcgcgacgacttccatcaaggcgtggtcggtatcgtcgccagccgcctcaaagaccgtttttatcgtccgaccatcgtgtttgcgcctgccgacaacggcgaagtgcgcggttcggggcgttccattcccaacctgcacctgcgcgatgctttggacttggtgtccaaacgccatcccgatttgattttaaaattcggcggacacgcgatggcggcaggtttgagcatacttgaacacaatattcccgcgtttcagacggtctttgaagaagccgtgcgcgagatggtgtgcgaagacgatttgtcgcaaaccttcatcaccgacggcagcctgaaagcctgcgacatcacgctggaacaggcgcaaaaccttgcccgacacgtttgggggcagggcttcgcgccgccaagctttaccgacgaatttcacgtcgtccgccagcagcctttgggcgcggagggtaaacacaaaaaagcgtggctgcaaaaagacggctgcgaatttgaagccatgttttggcgttgcagcgaagacatccccgaatacatccgcacggtttaccgccccgttgccaacgaatggcgcaacaatctcgaattgcagctgtatatcgattactgggaagcggtgtag

SEQ ID NO: 41333 - DNA, 891 bp, Neisseria meningitidis; identical to SEQ ID NO: 36574

SEQ ID NO: 41334 - DNA, 270 bp, Neisseria meningitidis
atgactttattcgtgaagtatgaagatttagatgagcgtattgccgaggtacggtatcaccgtgtcgaaggaacgacttcaaccgtatgtacggtgatcttgcattccgggtttgtcgtcgtcggccattctgccgctctcaattccgaggcgtttgtggcggagacggggcacgagctggcctatcaggacgcgttgcaaaatctgttggccttggaagcctaccgtatcaaagaaaatgcgcatgacgcgcagcaaaaggagtcttaa

SEQ ID NO: 41335 - DNA, 780 bp, Neisseria meningitidis
atgaaactggtaagacctcagaaaatcagcgatcaggtattgtcggtattggaaggccgcatcgtggaaggggtttacgcggaagggggcaagattccgcccgaacgcgttttggcggaagagttcggcgtgtcccgcccgtcggtcaggtcggcattgaatgttttggttgcccgtcaggttttggaagcgaggcagggagacggttattatgtttcggtcaagccgcagcaggattttttgcaaagttggcaggagcttttgggcaagcattccaattgggaacaggatgtttttgatttcagctgccacatcgagggctgtatggcggcattggcggcagaacgccggacggatgccgatttgaagcggattgggttttggcttgaaaagtttgaggaggcgtgcgaaagcggcaatctggaacatcagagcgaagccgatgtcagcttccatcagacgattgcggatgcggcgcacaatttgttgttcagccatttgtcgggcggtttgttgaaaatgctgtaccggcagacgcgcagcagccttatttatctgaatcaggaagaagatccgcgtccgaaactgatggcgcagcaccgcgtgctgtatgaggcgatatcgaaccgtcggccgggcgaggcttcggaggcggcaaaggcgcatttgaattatgtggcgagcagtatattgaaagacagggaatatcagagccgtaaccgccacgcggatactttggcgcaaaacgatttgaagcgcgtgcaggattgggaggtatga

SEQ ID NO: 41336 - DNA, 294 bp, Neisseria meningitidis; identical to SEQ ID NO: 37088

SEQ ID NO: 41337 - DNA, 564 bp, Neisseria meningitidis
atgaaaaaaatcatcttcgccgcactcgcagcggcagccgttggcactgcctccgccgccacctacaaagtggacgaatatcacgccaacgcccgtttcgccatcgaccatttcaacaccagcaccaacgtcggcggtttttacggtctgaccggttccgtcgagttcgaccaagcaaaacgcgacggtaaaatcgacatcaccatccccgttgccaacctgcaaagcggttcgcaacactttaccgaccacctgaaatcagccgacatcttcgatgccgcccaatatccggacatccgctttgtttccaccaaattcaacttcaacggcaaaaaactggtttccgttgacggcaacctgaccatgcacggcaaaaccgcccccgtcaaactcaaagccgaaaaattcaactgctaccaaagcccgatggagaaaaccgaagtttgcggcggcgacttcagcaccaccatcgaccgcaccaaatggggcgtggactacctcgttaacgttggtatgaccaaaagcgtccgcatcgacatccaaatcgaggcagccaaacaataa

SEQ ID NO: 41338 - DNA, 1008 bp, Neisseria meningitidis
atgagcaccttcttccagcaaaccgcccaagccatgattgccaaacacatcgaccgtttcccgctattgaagttggaccaggtgattgattggcagccgatcgaacaatacctgaaccgtcaaaaaaaccgttaccttagagaccaccgcggccgtcccgcctatcccctgctgtccatgttcaaagccgtcctgctcggacaatggcacagcctctccgatcccgaactcgaacacagcctcatcacccgcatcgatttcaacctgttttgccgtttcgacgaactgatcatccccgattacagtaccttatgccgctaccgcaactggctggcgcaagacgacaccctgtccgaattactcaaactgattaactgccaactgaccgaaaaaggcctaaaaatagagaaagcatccgccgccgtcgttgatgccaccattatccagaccgccggcagcaaacagcgtcaggccatagaagttgacgaagaaggacaaatcagcggtcaaaccacaccgagtaaggacagcgatgcccgttggataaagaaaaacggcctctacaaactcggttacaaacaacatacccgtaccgatgcggaaggctatatcgagaaactgcacatcacccccgccaatgcccatgagtgcaaacacctgtcgcctttgttggaagggttacccgaaggtacgaccgtctatgccgacaaaggctatgacagtgcggaaaaccggcaacatctggaagaacatcagttgctggacggcattatgcgcaaagcctgccgcaaccgtccgctgtcggaaacgcaaaccaaacgtaaccgatatttgtcgaagacccgttatgtggtcgaacaaagcttcggtacgctgcaccgtaaattccgctacgcccgggcagcctatttcggactgattaaagtgagtgcgcaaagccatctgaaggcgatgtgtttgaacctgttgaaagccgccaacaggttaagtgcgcccgctgccgcctaa

SEQ ID NO: 41339 - DNA, 546 bp, Neisseria meningitidis
atgattatagttgaacatttagagcattatttgggcgaaatcgaaaacggtataaaatgcttggatcgacgttatcatctcagcgtttccgtattcccatcacaaccatataaaggggtaactactttttctactttaggtttgaatcgatatgacttgaactataagagtaggtttgaattaatttttacctgttctgaagaatggaataaagaaaatattgcagcttttctatcaggagtagctgaatatttgattgacaatagaaaacctattttgagaggtgaaattattcgattacctagggtaattatcgaaggtagcaaaatggacgctctgtatgtttccgccccattttatttcgatgatgattttcaggtctgttatggcggacactacaatactgtttttcctttgcttgtcccgttgtataaacaggaagcagaattggtggaaaaaaagggttggaatgcttttgagcagttcttgctggataatgaagttgacaacctttcggatatgaataggaaaccgtttgtttggtaa

SEQ ID NO: 41340 - DNA, 312 bp, Neisseria meningitidis
atggcaaaactcactttgaagcctgatgcaactttccgacataccgtgaaaatccctgttcccggtgcagaacctgcggacgtcgaatttgaatttaaggcgcgcggccgcaaggcgatgaaagaatttaccgaaaagcataaagacggctggacggcagataccgtcttagattgtgttcaaggctgggatttggaagaagcattcgaccggcagaatgtcgaaatcctgctggatagctatccgatggcggtgtttgccatcgtcaacggctatgttgaggaagtcttcaatgcccgcgagggaaactga

SEQ ID NO: 41341 - DNA, 615 bp, Neisseria meningitidis
atgaggataaccgttataatcacaactttacagtctgcacagagaaaaccgatgccttggaatctccccatcttcctcacatggttgagggtcttgctcattcctgtcatgacagcccttttttacctgccttttccgtggttcgcggaggaaacgattaatctcgccgccgccgttatttttgccgttgccgccttaaccgactggtttgacggatttttggcaagactgtggaaacagacttccgatttcggcgccttcctcgatcctgtcgccgacaagctgatggttgccgtatcgctacttttactggtcaaactcgaccggacctatgttttgtttgccatgatcatcatcggcagggaaattaccatttccgcattgcgcgaatggatggcgcaaatgggcaaaaggaacagcgttgccgtcgccaccgtcggtaagtttaaaaccgccgcgcaaatgctggcaattttcctgctgctgctgaatattcccgatttttacggatttaatcttgttgttatcggcaacatattgatgtttatcgcatctttgctgacggtttggtcgatgctgtattatctgaaaatggcgtggaaagaaatcgcctga

SEQ ID NO: 41342 - DNA, 1071 bp, Neisseria meningitidis
atgaccaaacatatcgccatcctccgaggtgacggcatcggccctgaaatcgttgcagaaaccgtccgcgtactcgacaaacttatcgcacaaggcttagatgccggctacgaatacgccccattgggcggcgaagcctatgacgaatacggccatccttatccggaattcacgcaaaacctttgccgtaaagccgatgccgtcctgctcggcgcagtcggttctccgcaatacgacaatctcgaccgtccgctgcgtcctgagcgcggcttgttggctatccgtaaggacttgaatctgtttgccaacctgcgccctgccatcctttatcccgagctggccaacgcctccacactcaaacccgaaatcgttgccggtttggatattttgattgtgcgcgaactcaccggcgatatttatttcggcgaaccgcgcggtatccgcgttttggaaaacggcgaacgcgaaggctacaacaccatgaaatacagcgaaagcgaaatccgccgcatcgcccacgttgccttccaatccgcccaaaaacgcagcaaaaaagtctgctccgtcggtaaagccaacgttttggaaaccaccgaactgtggcgcgaaatctttgaagaaatcggcaaacaataccccgatgtcgaactctcccacatgtatgtagacaacgccgccatgcagctcgttcgcgcgcccaaacaattcgacgtcatcgccaccggcaacatattcggcgacattctgtctgacgaagcctccatgctgaccggctccatcggtatgctgccttccgcttctttggacgaaaacggcaaaggcctgtacgaaccgtcccacggctccgctcccgacatcgccggacaaaacaaagccaacccgctggccaccatcctctcgctcgcaatgttgctgcgttacagcctgaacgacgaagcgcgcgcgcaacaagttgaaaacgccgtccaaaaagtgctgcaacaaggcttgcgtaccagcgacatttacgaagaaggcacaaaactcgtttcctgctccgaaatgggcgatgcggtactcgccgccttgtaa

SEQ ID NO: 41343 - DNA, 1179 bp, Neisseria meningitidis
atgacaggcaaaacaggccgcaacggcagtacccaagcgcaacccgaacgcgtcatgctggtgggcgtaatgttggacaaagatggtacgggcagcagtgccgcccgtctgaacggttttcagacggcattggcggaagctgtcgagctggtcaaagcggcgggcggcgattccgtgcgcgtggagactgccaaacgcgaccgtccgcacaccgcgctgtttgtcggcacgggcaaggcggcggagctgtcagaagcagttgccgcagacggcatcgatttggtcgtattcaaccacgaactcacgcccacgcaggaacgcaaccttgaaaaagagctgaaatgccgcgtattggacagggtagggctgattctggcgattttcgctcgccgcgcccgcacgcaggaaggcaggctgcaagtcgagttggcgcaattgagccatttggcgggacgcttgatacgcggttacggccatctgcagagccagcgcggcggtatcggcatgaaaggccccggcgaaaccaaactggaaaccgaccgccgattgatcgcccatcggatcaatgccttgaaaaaacagcttgtcaacctcaaaaaacagcgcgccctgcgccgcaagccccgcgaatcgggcacaatcaaaacgtttgcgctggtcggctataccaatgtcggcaaatccagcctgttcaaccggctgaccaagtcgggcatatatgcgaaagaccagcttttcgccacactcgacaccacggcgcggcggctgtacatcagtcccgaatgcagcattatcctgaccgataccgtcggattcgtcagtgatttgccgcacaaactgatttcggcattttccgccacgctggaagaaaccgcgcaagccgatgtgctgctgcacgtcgtcgatgccgccgccccgaacagcggacagcagattgaagacgtggaaaacgtactgcgggaaatccatgccggcgatattccgtgcatcaaggtgtacaacaaaaccgacctgctgccgtctgaagaacaaaacacgggcatatggcgcgacgctgcgggaaaaattgccgccgtccgcatttccgttgctgaaaataccggtatagacgcactgcgcgaagccattgccgagtcttgtgccgccgcaccaaacacagacgaaaccgaaatgccatga

SEQ ID NO: 41344 - DNA, 1128 bp, Neisseria meningitidis
atgttagaatgcacgataaattactgttcaggcgaaattatgtcccaaactatcgacgaactcctccttccccaccgcaacgccatcgacaccatcgatgccgaaatcctgcgcctgctcaacgaacgtgcgcaacacgcccacgccatcggcgagctgaaaggcacgggcgcagtgtaccgccccgaacgcgaagtcgccgtgttgcgccgcattcaggatttgaacaaaggcccgctgcccgacgaatcggtagcacgcctgtttcgggaagtgatgagcgagtgtctcgccgtcgaacgcccgctgaccatcgcctatctggggccgcagggcacgtttacccagcaggcggcgattaagcatttcggacacgccgcgcacaccatggcgtgtccgaccatagacaactgcttcaagcaggttgaaacccgtcaggcggattatctggtcgcgcccgtggaaaactcgaccgaaggctcggtcgggcgcacgttggatttgcttgccgttaccgcgttgcaggcgtgcggcgaagtcgttttgcgcatccaccacaaccttttgcgtaaaaacaacggcagcaccgaaggcattgccaaagtcttttcccacgcgcaggcgttggcgcagtgcaacgactggttgggcagacacctgcccaacgccgaacggattgccgtgtccagcaatgccgaagccgcaaggctggttgccgaatcggacgacggtacggttgccgccatcgccggacgcacggcggcggaaatctacggactcgatatggttgccgagtgcatcgaagacgaaccgaacaacaccacgcgcttcttggtgatgggacatcacgaaaccggtgcaagcggcagcgacaagacttcgctggccgtttccgcgcccaaccgggcaggcgcggttgcctcgctgctgcaaccgctgactgagtcgggtatttccatgaccaagtttgagagccgtccgagtaaatccgttttgtgggaatacctgttcttcatcgacatcgaaggacaccgccgggacgcgcagattcagacggcattggaacgcttgggcgaacgcgcttcgttcgtcaaagtcatcggttcgtacccgaccgccgttttgtag

SEQ ID NO: 41345 - DNA, 1422 bp, Neisseria meningitidis
atgaaaatcattcagatacagaacaatcacaatgtaaacgatgaccgccccgagtttgaccgtgcgctgattgccagcctgcccgccagcggtccgcgctacacttcctaccctaccgccgaccgtttccatgacggtttccgcgaaggcgaatatatcaaagctttacatttgcgcggtatgggcgcgttaaacaaaccgctttccctttacattcacattccgttctgcaacaccatctgctactactgcggctgcaacaaaatcatcaccaaagacaaaagccgcgccgatgcctacatcgaatatcttgaaaaagaaatggaactgctcgctccacatctgaacggacggcaccagcttgcccaactgcacttcggcggcggcacgccgacctttttgagcgacgaacagatcgaacgtgtcttccgcatgatacgcaaacatttcgagttaatccccaccggcgaatactccatcgaaatcgacccgcgcaaagtcagccgcgacaccgtcctcatgctcggcagactcggcttcaaccgcatgagcatcggcattcaggatttcgaccccaaagtgcaggcggcggtcaaccgcatccaaagttacgaagaaaccaaagaagtcatcgatgccgcccgtgaggcagggttcaaatccgtcagcgtcgatttgatttacggcctgccgcaccagacttcggaaagcatcaaaaccaccatcgataccgttttgtcgctcgatcccgaccgcctcgccctttatcactacgcccacctgccgcacgtgttcaaaccgcaacgccgcatcgataccgccgccgttcccgacagcgaagagaagctcgatatgctgcaatactgcgtccaaaccctaaccgaacgcggctacgtcttcatcggcatggatcatttcgccaaacctgacgacgaactctccatcgccctcaaagaaggcttcctccagcgcaacttccaaggctattcgacctacgcggattgcgatttggtcgccatcggcgtgtcgtccatcggcaaaatcggcagcacctattcccaaaacgaacgcgacatcgatgcctactatgccgccatcgacgaaggcagactgcccatcatgcgcggctaccagctcaatcaggacgacatcctgcgccgcaacatcattcaggatttgatgtgccgcttcgcgctcgactaccggatttacgaaagtatgttcggcatcccgttcgaccgctacttcaaagacgaactggcggatttggaaaaactcgccggtttgggattggtgcgcctgaacagccacgggctgaccgttaccccgaaaggacgcttcctcatccgcaacatcgccatggtgttcgactaccacctgcgccacaaggaaaccaaagcgaaatattcacaaacagtgtga

SEQ ID NO: 41346 - DNA, 798 bp, Neisseria meningitidis
atggataccgcacaaaaacaacgttgggcaataaccctatcctatgacggcagccgcttttacggctggcagaaacaggctgacggcgtaccgaccgttcaggcggcattggaaaccgcgctcgcccaaatcgcaggagaatctgtcgccaccaccgttgccggcagaaccgataccggcgttcatgcgactgcccaagtcgttcattttgatactgccgccgcccgtccccaacaggcatggatacgcggcgtaaatgcccacctgcccgaaggcattgccgttttgcacgcccgacaggtcgcccccgaatttcatgcacgatttgacgcatacggacggcactaccgctacctgctcgaatccgcccccgtccgttcccccctgctcaaaaacagggcaggctggacacacctcaaactcgacatcgaaccgatgcggcaggctgccgcctatttgatcggcgaacaagacttctccagcttccgcgccgccgaatgccaggcaaaatcccccgtcaaaaccatctaccgcgccgaccttacccaaagcgcaggactcgtccgcctcgatttgcacggcaacgcctttttgcaccatatggtacgcaacatcatgggcgcgctcgtttatgtcggcagcggcagactcagcgtcgaaggcttcgccgcactgattcaagaacgcagccgcctcaaagccccgccgaccttcatgcccgacgggctttacctgaccggcgtcgactatcccgaggcatacggcatcatccgcccccaaatccccgaatggctttaa

SEQ ID NO: 41347 - DNA, 738 bp, Neisseria meningitidis
atgaaaaaattatctcggattgtattttcaactgtcctgttgggtttttcggccgctttgccggcgcagacctattctgtttattttaatcagaacgggaaactgacggcgacgatgtcttctgccgcttatatcaggcaatatagtgtggcggcgggtatcgcacacgcgcaggatttttattatccgtcgatgaagaaatattccgaaccttatatcgttgcttcaacgcaaatcaaatcttttgtgcctaccctgcaaaacggtatgttgattttgtggcattttaatggtcagaaaaaaatggcggggggcttcagcaagggtaagccggacggggagtgggtcaactggtatccgaacggtaaaaaatctgccgttatgccttataaaaatggtttgagtgaaggtacggggtaccgctattaccgtaacggcggcaaggaaagcgaaatccagtttaaacagaataaggcaaacggcgtatggaagcaatggtatgccgacggcaatatcaaaacggaaatggttatggtcaatgatgagcctgccaagattctgacatgggatgaaagcggtcgattactctcggaactgtctatccatcatcataaacgtaatggagtagtcttagagtggtatgaagatggttctaaaaagagtgaagctgtttatcaggatgataagttggttaggaaaacccagtgggataaggatggttatttaatcgaaccctaa

SEQ ID NO: 41348 - DNA, 192 bp, Neisseria meningitidis; identical to SEQ ID NO: 37158

SEQ ID NO: 41349 - DNA, 630 bp, Neisseria meningitidis
atgaacagacaaatccgccaagaaatcttcgagcgtttccgcgctgccaacccccatcctaccacagaactcaacttcaactcccctttcgagcttttaatcgccgttttactgtcggcacaggcaaccgacgtcggcgtaaacaaagcgacggcgaagctgtttccggttgccgatacgccgcaggcgatgctggatttgggtttggacggcgtgatggaatatacgaaaaccatcgggttgtataaaaccaagtccaaacacatcatgcagacctgccgcatcctgttggaaaaatacaagggcgaagtgccggaagaccgcgaggctttggaatcgttgcctggcgtggggcgcaaaacggcaaacgtggtattgaacacggcgttcggacaccccgttatggcggtcgatacgcatattttccgcgtgtccaaccgaaccaaaatcgcccccgggaaagatgtgcgcgaagtcgaagacaaactgatgcgcttcattcctaaagaatttctgatggacgcgcaccactggctgattttgcacggacgctacacctgcaaggctttaaagccgcaatgccaaacctgcatcatcaacgatttgtgcgaatatcccgccaaagcctga

SEQ ID NO: 41350 - DNA, 1860 bp, Neisseria meningitidis
atgccggactaccgctccaaaacctccacccacggccgcaatatggcgggtgcacgcgcattgtggcgcgccaccggcgtgatggaaaccgattttggcaaacctattatcgccgttgccaactcctttacccaattcgtgcccggccatgtccacctgcacaatatgggccagctggttgcccgcgagattgaaaaagccggtgcaatcgccaaagaattcaacaccatagccatcgacgacggtatcgctatgggacacagcggtatgctctactccctgcccagccgcgatttgattgccgactccatcgaatatatggtcaacgcccactgcgccgacgcgctggtgtgcatttccaactgcgacaaaatcacccccggaatgctgattgccgccatgcgcctgaatatcccgaccatcttcgtttccggcggcccgatggaggcgggcaaggtcatcggcgtggcaaacatccaacccgaacgccgtttggacttgattgacgcgatgatcgaatcggcggacgacaatgtcagtaaccggcaagtcgaagaagtcgagcaaaacgcctgcccgacctgcggctcctgctccggtatgtttacggcaaactcgatgaactgcctgaccgaagcactcggtctgtccctacccggcaacggttcgtatttggcgacccacgcaggccgtaaagaattgttcctcgaagcaggacgtatgattgtcgaaatcaccaaacgctattacgagcaagacgacgaaaccgtgctgccgcgcagcatcgccaccaaaaaagcgtttgaaaacgctatgacgatggacattgcgatgggcggctctaccaacaccattttgcatttgctcgccgtcgccaacgaagcgggcgtggatttcaaaatggcagacatcgaccgcttaagccgcgtcgtgccctgcatctgcaaaaccgcacccaacaaccacgactactatatggaagacgtgcaccgagccggcggcatcttcgccatcctgaaagaattggacaaagcgggcaaactgcacaccgacgtgcacactatccacgcaccgacgctgaaagacgcgattgaaaaatgggacgtaaccaaccctgaaaacacccgcgccatcgaacgcttcaaagccgcgcccggcggcgtacgcaccacccaagcgttctcgcaaaaccgtatgtggaaaaccctcgacctcgaccgcgaaaaaggctgtatccgcgacgtggcacacgcctactcgcaagacggcggtttggcggtcttgttcggcaacatcgccgaacgcggctgcgtggtaaaaaccgcaggcgtggatgagagcatcctcaaattcaccggccgcgcccgcgtgtttgaaagccaagaagacgcagtagaaggcattttgggcaaccaaatcgtcgtcggcgacatcgtcatcatccgctacgaaggcccgaaaggcggcccgggtatgcaggaaatgctgtacccaacctcctacctgaaatccaaaggtttgggcaaagcctgtgccctcctgaccgacggacgcttttccggcggcacatcaggtttgtccatcggacacgcctcgcccgaagcggcggaaggtggcgcgatcggtttggtacacgaaggcgataccgtcgaaatcgacatccccaaccgcagcatccaccttgtcatttccgatgaagagcttgccgcgcgccgtgccgaaatggaagcacgcggcagcaaagcgtggaaaccggaaaaccgcgaccgctacgtctccgtcgcattaagagcttacggcgcgatggcgacttccgccgacaaaggcgcggtgcgcgacgtagcgcaaatcgaaagataa

SEQ ID NO: 41351 - DNA, 270 bp, Neisseria meningitidis
atgagtgtaaaagaattattcaaagttatcttagataaaaataaagattttcctattagaacgattcatcgcactccaatgggggtacttcccaagcctgttgctttaagtattgttcaatatgaagatgaccaaggattttatttattttatttggatgagaccggtcgggaacaaacggatacttatcatgacacattagattcggcatttaaacaggctgaatttgaatttggaattagaaaagaagaatggatacaaagttcttag

SEQ ID NO: 41352 - DNA, 2037 bp, Neisseria meningitidis
atgactgacaacgcactgctccatttgggcgaagaaccccgttttgatcaaatcaaaaccgaagacatcaaacccgccctgcaaaccgccattgccaaagcgcgcgaacaaatcgccgccatcaaagcacaaacacacaccgactgggcgaacaccgtcgagcgtctgaccggcatcaccgagcgcgtcggcaggatttggggcgtggtgtcgcacctcaactccgtcgccgacacgcccgaactgcgcgccgtctataacgaactgatgcccgaaatcaccgtcttcttcaccgaaatcggacaagacatcgagctgtacaaccgcttcaaaaccatcaaaaattcccccgaattcgacaccctctcccccgcacaaaaaaccaaactcaaccacgatctgcgcgatttcgtcctcagcggcgcggaactgccgcccgaacagcaggcagaactggcaaaactgcaaaccgaaggcgcgcaactttccgccaaattctcccaaaacgtcctagacgcgaccgacgcgttcggcatttactttgacgatgccgcaccgcttgccggcattcccgaagacgcgctcgccatgtttgccgctgccgcgcaaagcgaaggcaaaacaggctacaaaatcggtttgcagattccgcactacctcgccgtcatccaatacgccgacaaccgcgaactgcgcgaacaaatctaccgcgcctacgttacccgcgccagcgaactgtcagacggcggcaaattcgacaacaccgccaacatcgaccgcacgctcgcaaacgccctgcaaaccgccaaactgctcggcttcaaaaactacgccgaattgtcgctggcaaccaaaatggcggacacccccgaacaagttttaaacttcctgcacgaccttgcccgccgcgccaaaccctacgccgaaaaagacctcgccgaagttaaagccttcgcccgcgaaagcctcggtctcgccgatttgcaaccgtgggacttgggctacgccggcgaaaaactgcgcgaagccaaatacgcattcagcgaaaccgaagtcaaaaaatacttccccgtcggcaaagtattaaacggactgttcgcccaaatcaaaaaactctacggcatcggatttaccgaaaaaaccgtccccgtctggcacaaagacgtgcgctattttgaattgcaacaaaacggcgaaaccataggcggcgtttatatggatttgtacgcacgcgaaggcaaacgcggcggcgcgtggatgaacgactacaaaggtcgccgccgtttttcagacggcacgctgcaactgcccaccgcctacctcgtctgcaacttcgccccgcccgtcggcggcagagaagcgcgtttgagccacgacgaaatcctcatcctcttccacgaaaccggacacgggctgcaccacctgcttacccaagtggacgaactgggcgtatccggcatcaacggcgtagaatgggacgcagtcgaactgcccagccagtttatggaaaatttcgtctgggaatacgacgtcttggcacaaatgtccgcccacgaagaaaccggcgttcccctgccgaaagaactcttcgacaaaatgctcgccgccaaaaacttccaacgcggcatgttcctcgtccggcaaatggagttcgccctctttgatatgatgatttacagcgaagacgacgaaggccgtctgaaaaactggcaacaggttttagacagcgtgcgcaaagaagtcgccgtcatccaaccgcccgaatacaaccgcttcgccttgagcttcggccacatcttcgcaggcggctattccgcaggctattacagctacgcgtgggcggaagtattgagcgcggacgcatacgccgcctttgaagaaagcgacgatgtcgccgccacaggcaaacgcttttggcaggaaatcctcgccgtcggcggatcgcgcagcgcggcagaatccttcaaagccttccgcggacgcgaaccgcgcatagacgcactcttgcgccacagcggtttcgacaacgcggtctga

SEQ ID NO: 41353 - DNA, 204 bp, Neisseria meningitidis; identical to SEQ ID NO: 38753

SEQ ID NO: 41354 - DNA, 351 bp, Neisseria meningitidis
atggcatactctgcggacttaagaaacaaagctttaaactattacgaacaatgcaaaaacatcagccaaaccgcagcaacgtttaacttgtcaagaaacacgctttacctgtggattcgccttaaaaaacaaacaggcagcctaaaacatcaagttaccggtctaaatgccgtcaaatcggataggcaaaaaccggctcaatatattgggcaacaccaggatgcctatctgcatgaaatcgccaaacattttgattgtacggcagccaccatttgctatgcactcaaacagatggggataacgcacaaaaaaagaccaccacttacaaagaacaagacccggccaaagtaa

SEQ ID NO: 41355 - DNA, 579 bp, Neisseria meningitidis
atgaatattttattattagacggcggcaaggcgttcggacattctcacggcgggttaaaccgcacgcttcacaaaaaagcgaaagaagttttgaccgcgctcggacacaatgttcaagaaaccgtgattgatgccggctatgatgttgaggcagaaatcgaaaaattcgtttggatggatgctgtgatttggcagatgccgggctggtggatgcacgagccttggacagtgaaaaaatacatagacgaagtattaaccgctggacacggcaaactctaccaaagcgacggcagacaccgcgtcaatccgactgagggctacggcacaggcggcttgttgcaaggcaaaaaacatatgctttcactgacttggaatgcgccgattgaggcgtttacccgcgaaggcgatttctttgaaggcaaaggcgttgatgttttgtatatgcacttccacaaagccaacgagtttttgggtatgacccgcctgccgacattcttatgtaacgatgtggttaaaaatccgcaagtggaaaaatacttggcagattatcaggcacacttggaaaaagtgttcggctaa

SEQ ID NO: 41356 - DNA, 285 bp, Neisseria meningitidis
atgcagcctgcggtttatattttagcaagccaacgtaatggcacgttatacattggcgttacatctgatttggtgcaacgtatttaccaacatagggagcatttgattgagggatttacattacggtacaacgttactatgctggtttggtatgaactgcatcctacgatggagagtgcaattactcgggaaaaacagttgaagaaatggaacagggcttggaaattgcaactgattgaagaaaataatgtttcttggcaggatttatggtttgatattatttag

SEQ ID NO: 41357 - DNA, 870 bp, Neisseria meningitidis
atgaagcgcatctttttgcccgccttgcccgccatcctgcctttatccacttatgccgacctgcccttgacgattgaagacataatgaccgacaagggaaaatggaaactggaaacttcccttacctacctgaacagcgaaaacagccgcgccgaacttgccgcaccggtttacattcaaaccggcgcaacctcgtttatccccattccgaccgaaatccaagaaaacggcagcaataccgatatgctcgccggcacgctcggtttgcgctacggactgaccggcaataccgacatttacggcagcggcagctatctgtggcacgaagaacgcaaactcgacggcaacggcaaaacccgcaacaaacggatgtctgacatatccgccggtatcagccataccttcctcaaagacgacaaaaaccccgccctaatcggctttcttgaaagcacggtttacgaaaaatcgcgcaacaaagcctcgtcgggaaaatcgtggctcatcggtgccaccacctacaaagccatcgaccccgtcgtcctctcattgaccgctgcctaccgtatcaacggcagcaaaaccctttcaagcaacaccaaatacaaagcaggcaattactggatgctgaatcccaatatatccttcgccgccaacgacagaatcagcctcacgggcggcatccaatggctgggcaaacagcccgaccgcatagacggcaaaaaagaatccgcaagaaacacatccacctacgcccatttcggcgcaggtttcggtttcaccaaaaccacggctttaaacgcatccgcacgtttcaacgtttcagggcaaagcagttccgaactgaaattgggcgtacagcatacattttaa

SEQ ID NO: 41358 - DNA, 525 bp, Neisseria meningitidis
atgttgctattacggcgagataatattgatagggctttcaagattgtcaaaaataggcgttttgattctccttggtggcctggtgagtacgatgccggtatgaatttccttggcgtacaaggagagttgaaggttcacgagctgcatcacagaacagcaaccctgtgctttgagtggcttggcgaagtatctgcgcctcgcagaaaagaggactacaaagacctcaagccaaatgtattgtatgactttgatggttccggtaagcattttgctaaccctgacgcaaggtatctattgcccgtcggttcaagcggcttaatcttaaaacatatccaaatcgatgacgaagacactctgttgcggctatggtgcgcacgaaatatcccaatgccacaccggctatctaaaatcccgatgcttcggcagtattatctaagcaaggcatggcacgaaatttatactatcaaccaacacctaaggaaaacgaagctgatagttgatgtggcatacggccccacagattaa

SEQ ID NO: 41359 - DNA, 666 bp, Neisseria meningitidis
atgagaaaaagtcgtctaagccagtataaacaaaataaactcattgagctatttgtcgcaggtgtaactgcaagaacggcagcagagttagtaggcgttaataaaaataccgcagcctattattttcatcgtttacgattacttatttatcaaaacagcccacatttggaaatgtttgatggcgaagtagaagcagatgaaagttattttggcggacaacgcaaaggcaaacgcggtcgcggtgctgccggtaaagtcgccgtattcggtcttttgaagcgaaatggtaaggtttatacggttacagtaccgaatactcaaaccgctactttatttcctattatccgtgaacaagtgaaacctgacagcattgtttatacggattgttatcgtagctatgatgtattagatgtgcgcgaatttagccattttagcttcgctgaaacttcgttttcgtatcaatcacagcacacattttgccgaacgacaaaaccatattaatggaattgagaacttttggaaccaggcaaaacgtcatttacgcaagtttaacggcattcccaaagcgcattttgagctgtatttaaaggagtgcgaatggcgttttaacaacagtgagataaaagttcttgttccattttaaaacaattagtaaaatcgagttta

SEQ ID NO: 41360 - DNA, 243 bp, Neisseria meningitidis
atgatcccttatgttaaaaggaatcctatgaaagaatacaaagtcgtcatttatcaggaaagcccgttgtccagcctgtttttcggcgcggcaaaggtcaaccccgtcaatttcagcgcgttcctcaacaaacaaacccccgaaggctggcgggtcgtaacgatggaaaaagatttgcgccgtatgctgctgtttttcaaacgcgaagcctacgtcgtcattttggagcgggaccgtgtttaa

SEQ ID NO: 41361 - DNA, 567 bp, Neisseria meningitidis
atgagcatcaagtccgacaaatggatacgccgaatgagcgaagaattcggcatgatcgaccctttcgagccgaaccaaatcaaagaagccgacggcaaacgcatcatctcctacggtacgtccagctacggctacgacatccgctgcgcaaacgaatttaaaatcttcaccaacatcaacagcaccatcgtcgatcccaaaaacttcgacccgaaaaacttcgttaccgttgaagacgactgctgcatcatcccgcccaattccttcgcactggcgcgcacggtcgaatatttccgcatcccgcgcaacgtcctgaccgtctgcttgggcaaatccacctacgcccgctgcggcattatcgtcaacgttaccccgttcgaaccggaatgggaaggctacgttaccctcgaattttccaacaccacccccctgcccgccaaaatctacgcaggcgaaggcgtggcgcaagtcctcttcttcgagagcgacgaaatctgcgaaacctcatacaaagaccgcaacggcaaatatatggggcaaaccggcgttaccctgcccaaagcctga

SEQ ID NO: 41362 - DNA, 333 bp, Neisseria meningitidis
atgagcagcgaattgattgtacacaccagcgatgccgcttttgaaaaagacgttttaaatgcagatatccccgtcctgctggacttttgggctccgtggtgcggcccctgcaaaatgattgccccgattttggacgacattgccgccgaatttgaaggccgtctgaaagtggtcaaaatcaacatcgacgacaacgaagccaccccgtcccgtttcggcgtgcgcggcattccgaccctgatggtgtttaaaaacggcgaagtcgtcgccaccaaagtcggcgcattggcaaaaggccagctaaccacctttgtcgaagcctctatcgcctga

SEQ ID NO: 41363 - DNA, 1332 bp, Neisseria meningitidis
atgctgttcaaccacaccgcttccgaactcctcgacctctgccgccgcacgctcgacttggcaaaagcgacgggcgcaaccgccgccgaagccgatttcagcgaatcattgggacaaagcgtcagcgtgcggctgggcgaaatcgaacaaatcgagttccagcaggacaagtcgctggacattaccgtttacgtcggcaaacgcaaaggccgcgccagtactgccgacttctccgaaaaagccctgcaagacaccgtcaaagccgccatcgacatcgcccgctacactgccgaagacgattgcgcaggtttggcagacgcttcgcttatggcgcaacacatcggcgaccccgacctttaccacgaatgggatttggatacggaagccgccgtcggcttggcaaaacaatgcgaacaagccgccctgaacgaggatgagcgcatcgaaaactccgaaggcgcggcggtgcaaaccggccattaccaatacgtttacggcaacacccacggttttgccgcacaccggcaaggcacgcaccacagcatttcctgcagcgtcgttgccgccgacgaaaacgggatgcagcgcgactactggtacgattccgcctgccgccatccggatatggacagccccgaaaccatcggtcaaaccgccgcccgccgcactttgcgccgactcggcagccgcagcatcccgacaggcagctaccccgtcctcttcgataccaccgtttcgggcggtcttatcggacacctcgtcggcgcactctccggcggcgcactctaccgccaaagcagtttcctgatcgacagcatcggcaaaaaagtcctgcccgatttcctcaacctgcgcgaagaaccgcacatcccccgctctttccgcagcagctattttgatgcggaaggcgttgccaccgcaccgcgcttcgtgattcaaaacggcattgtcaaaggctatttcctcagcagttacagcgcgcgcaaactcggtatgcagaccacgggcaacgccggcggcgcgcacaacctgtatttgaaccatacgcacgaaacgcaatccgacctgctgaaagaaatggggacgggattattggttaccaaactgatgggacagggcgcgaacaccattaccggtgactactcgcgcggcgcggcgggtttttgggtggaaaacggcatcattgcctaccccgtccacgagattaccgtagccggacgcttgcaggatatgtaccgagacatcgtcggcgtggcggatgacgctttgcggcgttcgtccaacaaaatcggctcgattctgattgcggggatgacggttgccggaagctaa

SEQ ID NO: 41364 - DNA, 342 bp, Neisseria meningitidis
atgcccaaaatcaccgtacttccacacacgacattatgccccgaaggcgcggttatcgaagacgcgcccgaaggcaaaaccgtccttgacgtgctgctcgaccatgatatcgaagtcgatcacgcctgcgaaaaatcctgcgcctgcacaacctgccacgtgattatccgcaaaggtttcgacagcctggaagagccgaccgaattggaagaagacctgctcgatcaggcttggggtttggaagccgattcgcgcctgagttgtcaggcggttgtcgccggcgaagatttgattgtggaaatccccaaatacaccatcaaccacgcgcgcgaagaacactga

SEQ ID NO: 41365 - DNA, 1290 bp, Neisseria meningitidis
atgaaaaaactcaacacccaatcgcccgatttccaagccggactcaaagccctgctggcttttgaaaccgcgcaaaaccccgaaaccgaacgcatcgtcgccgacatttgcgccgacgtgcaaaagcgcggcgatgcggctttgattgaatacaccaacaaattcgatcagacaaacgctaaaagcatcgatgatttaatacttacgcaagccgatttgaaagcggcgttcgagcgcattccgaacgacgttcagacggcattgcagaccgccgcccgccgtgtcgaaagctaccaccaacgccaaaaaatggaatcgtggagctacaccgatgaagacggcacgctgttgggacaacaaatcacaccgcttgaccgcgtcggcatttacgtccccggcggcaaggcggcgtatccgagttccgtcatcatgaacgccatgcccgcccacgtcgcaggtgtgaaagaaatcatcatggtcgtgccgacaccaaaaggcgaacgcaacgacatcgtacttgccgccgcatacgtcgccggcgtaaccaaagtcttcaccgtcggcggcgcgcaggcggttgccgccctcgcctacggcacggaaaccatcccccaagtcgataaaatcaccggtccgggcaacgccttcgtcgccgccgccaaacgccgcgtgttcggcgtggtcggcatcgacatggtggcggggccgtctgaaatcctggtcatcgccgacggcacgacacctgccgattgggtggcgatggatttgttcagccaggccgaacacgacgaaattgcccaagccatcttaattggcacgtcgcaagcgtatctcgacgaagtagaagccgctatggacaggctcatcgaaaccatgccgcgccgcgacatcatcgaagcctcgctcggcaacaggggcgcgatgatactcgccaaagacttggacgaagcctgcgaaatcgccaactacatttcccccgaacacttggaactgtcagtcgaaaatccgcaggaatgggcgaaaaaaatccgccacgccggtgcgattttcatgggacgctacaccggcgaaagcctcggcgactactgcgccggcccaaaccatgtgttgcccaccagccgcaccgcccgcttttcctcgcctttggggacatatgatttccaaaaacgctccagcctgattcaggtttcggaacacggcgcgcaaaaattaggcgaaaccgccagcgtgctggcacacggcgaaagcctgaccgcccacgcccgcgcggcagagttccgtatgaaataa

SEQ ID NO: 41366 - DNA, 840 bp, Neisseria meningitidis
atgctggtcgcttttttaattatgttgcgcgagggtatcgaagccgcgctcatcgtcggcatcgttgccggttttctgaaacagtccggacattccaaactgatgcctaaggtctggttcggggtcgtccttgcttctttgatgtgtttggggctggggtacggcatccattcggcaacgggcgagattccccaaaagcagcaggagttcgtcgtcggcattatcggtctggttgctgtcgcgatgctgacttatatgattttatggatgaaaaaggcggcgcgttcgatgaagcggcagcttcaggactccgtgcaggcggctttgaaccgtggcagcggtcaaggatgggccttggtcggtatggcgtttcttgccgtggcgcgcgaaggtctggagagcgtttttttcctgcttgccgtattcaaacagagcccgacgtggcagatgccggccggtgcggtagcgggggttttggctgccgccgtgattggcgcgttgatttatcagggtgggatgcgcctgaatctggcgaagtttttccgttggacaggggcgtttctgattatcgttgccgctggtctgcttgccggttcactgcgtgcgctgcacgaagcaggcatttggaacgcgcttcaggacattgtgttcgactcatcaaaatatttgcacgaagacagcccgttgggcgtgctgctcggcggatttttcggctataccgaccatccgacgcagggcgaggccttggtttggctgctgtaccttattcccgtcataacttggtttttgtgcggcagcaggccgtctgaaactttaacccgtaaagaggagctgaaatga

SEQ ID NO: 41367 - DNA, 1281 bp, Neisseria meningitidis
atgtcaatttctattttcttgaaacgggtaatattccgacaccacgaaaggcaaatcatgtctgcgcaatcacaaaacaatcatacgtccccattggtcgtcttgaccacgctgttcttcatgatgggttttattacctgcatgaacgacatccttatccctcatttgaaagaaattttcgacctgtcttacgttcaggcgatgctgatccaattctgtttctttaccgcctatgcggtgatgtccatcccgatgggggcttttgtcggcaaagtcggctacaaaaacggcgttatcggcggctttctgctgacggcggtcggatgcctgctgttttatcctgctgcgggtagccattcttacgcggtatttttgggcgcgttgtttattttggcttccggcgtaacgctgcttcaggtcgccggtaatccttatgttaccctgctggcgaaacccggcaaggaatcggcaacactgacgctggttcaggcgtttaacgctttgggtacgaccattgcgccgcaaatcggcgcgttcctgattctggcggacgcaacccaaaccgtcagcaaggcggaacagatttcttccgtacagattccctatttgggactggcggggctgctgattatccttgccgttttcgtgaaaatgatccggctgcccgacgcgcgcaaaattgccgccgaggaaagcgcgcacaaccacgacggcaaaaccagcgtatggcaatacaaacatctcgtgttcggcacggcaggcattttctgctatgtcggcgcggaggtgtctatcggttcgttgatggtcaacgtattgggttatctgaaagggctggatcatgcttctgccgcgcattacctgtcgttctattggggcggcgcgatggtcggacgtttcctcggttcggcggtgatggcgaaattcgcgcccaaccgttatttggcgtttaacgcatcggctgcggtcgtactgcttgccgtcgcgatggcgacgggtagcggcaatgcggatgtggcgatgtggtcgctgcttgccatcggttttttcaactcgattatgttcccgacgattttctctttggcaaccaaaggattgggaaaatttaccaacgcggcttccggtgtactgtgtaccgcgattgtcggcggtgcggtcgttcctgtcgtgcagggctgggtggcagatacttacaccctgatgtcttcgtttgtcgtttccgtcatctgttatctgtatatcgtgttttttgcggtgtacggatatagggcggacaaataa

SEQ ID NO: 41368 - DNA, 2604 bp, Neisseria meningitidis
atgagcaaaatcgtccgttatctgaaagattaccaaacgcctgcctaccgcatccttgaaaccgacctgcattttgatattgccgaaccgcaaaccgtcgtgaagtcgcgtttgacggttgagccgcagagggtaggggagccgctggtgttggacggttcggcgaaactcttgtccgtcaaaatcaacggggcggcggcggattatgtgttggaaggtgagacgctgacgattgcagacgtgccgtccgaacgcttcaccgtcgaagtggaaaccgaaatcctgccggcggaaaacaaatcgctgatggggctgtatgcgtccgccggtaacctgtttacccagtgcgagccggagggcttccgcaaaatcacgttctatatcgaccgtccggatgtcatgtccaagttcacgaccaccatcgtcgcggacaaaaaacgctatcccgttttgctctccaacggcaacaaaatcgacggcggcgagtattcagacggccgccattgggtgaaatgggaagacccgtttgccaaaccgagttatctgtttgctttggtcgcgggcgatttggcggtcacggaagactatttcaccaccatgagcggcagaaacgtcaaaatcgagttttacactgccgaggcggacaagcccaaggtcggctttgccgtggaatccttgaaaaacgcgatgaagtgggacgaaacgcgcttcggtttggaatacgacttggatattttcatggtcgtcgccgtgggagatttcaatatgggcgcgatggaaaacaagggtttgaacatctttaacaccaagttcgtcctcgccgacagccgcaccgccaccgataccgatttcgaaggcatcgaatccgtggtcggacacgaatatttccacaactggacgggcaaccgcgtgacctgccgcgactggttccagctttcgttgaaggaagggctgaccgtgttccgcgaccaagaattttccggcgaccgcgccagccgcgccgtgcgccgcatcgaaaacatccgccttttgcgccagcaccagttccccgaagacgcaggcccgacggcgcatccggtgcgccccgccagctatgaggagatgaacaatttctacaccatgaccgtttatgaaaaaggcgcggaagtggtgcggatgtatcacaccctgctcggcgaagagggcttccaaaaaggcatgaagctctacttccaacgccacgacggacaggctgttacctgcgacgatttccgcgtggcgatggcggacgcgaacggcatcaatctcgaccagtttgccttgtggtacagccaggcgggcacgcccgtcttggaagcggaaggtcgtctgaaaaacaatagtttcgagttaaccatcaaacaaaccgtgccgcccacgcccgatatggcggacaagcagccgatgatgattcccgtcaaagtcgggctgctgaaccgcaacggcgaagcggtggcattcgattatcagggcaaacgcgcaaccgaagccgtgttactgctgaccgaagccgaacagaccttccagttcgaaagcgtaaccgaagccgtcgttccctcgctgctgcgcgggttcagcgcgccagtgcatctgaactatccgtacagcaacgacgacctgctgctcctgctcgcccacgacagcgacgccttcacgcgctgggaagccgcccaaacgctctaccgccgtgccgtcgccgccaaccttgccgcactttcagacggtattgaactgccgaaacacgaaaaactgcttgccgccgtcgaaaaagtcatttcagacggcctcttggacaacgccttcaaagccctgcttttgggcgtgccgtctgaagccgagctgtgggacggcgcggaaaacatcgacccgctgcgctaccatcaggcgcgcgaagccttgttggatacgcttgccgtccgcttcctgccgaaatggcacgaattgaaccgtcaggcggcgaagcaggaaaaccaaagctacgaatacagccccgaagccgccggttggcgcacgctgcgcaatgtctgccgcgccttcgtcctgcgcgccgatcccgcgcacatcgaaaccgttgccgagaaatacgccgaaatggcgcaaaacatgacccacgaatggggcatcctgtccgccgtcaacggcaacgaaagcgatacgcgcaaccgcctgctggcgcagtttgccgacaagttttcagacgacgcgctggtgatggacaaatatttcgccctcgtcggctcaagccgccgcagcgacaccctgcaacaggttcaaaccgccttgcagcatccgaagttcagcctcgaaaaccccaacaaagcccgctcgctcatcggcagcttcagccgcaacgtaccgcattttcacgcagaagacggcagcggctaccgcttcatcgccgacaaagtcatcgaaatcgaccgctttaacccgcaggtcgccgcccgcctagtgcaggcgttcaatctctgcaataagctcgaaccgcaccgcaaaaacttggtgaaacaagcattgcagcgcattcgggcgcaggaaggattgtcgaaagacgtgggcgaaatcgtcggcaaaattttggattga

SEQ ID NO: 41369 - DNA, 582 bp, Neisseria meningitidis
atgaacctgcgcgatgatttgcaactgatttacgaccggatacccgaaggcagccgcgtcttggacttgggctgcggcgacggcgaactgcttgccgccttggtcgaacacaaaaaatgcagcggctacggcatcgaaatcgacaccgacagcgtgattgccgcgatgtcgcgcggcgtgaatgttatccaagccgatttggaagaaggtttaaccgcattcaacgatcaaagttttgatgtgattgtgttgagccagaccatccaagcgatgcagaataccgaaaaaatcctgcgctgcctgatgcgcgtggcaaaacaggcaatcgtcagcttcccgaatttcggctactggcgcaaccgcgtccaaatcgcactcggcggacatatgccggtttccgaacgtatgccctaccattggtatgatacgccgaacatccattggtgtacgctcaaagactttgatttgttgtgcgccaaaaacaacatacgcgtcctcgagcgcgccgtgatgacgggcaacagacaggtcaaacatttccccaaccttttgggcagccttgcgttttaccgcgtcgggtaa

SEQ ID NO: 41370 - DNA, 423 bp, Neisseria meningitidis
atgagcatcatgcaagttgaggtggtcagtagcgagcaaaacatctattcgggcgaagccagctttgtagtggttccgaccgttcaaggtgagcttggtatttacccgcgacacgagccgattatgagtttggtgcggccgggggctttgcgtttgaccgttccgggcgaggataaagaggttttggttgctgtttccggcggtgttttggaagtacagcctgataaagtaactgtcttggcggatgttgccgtccgcagtgcggagatggatcaggcacgtgcggaagaggcgaaaaaagccgcagaagcgggcatttcccaagctaaagacgataaggctttggcggaagcacataaagcattggctgctgcgattgcacagctcaaaactttggactatatccgttcgcacaagaaataa

SEQ ID NO: 41371 - DNA, 594 bp, Neisseria meningitidis
ttgtacggcagccaccgtttgctatgcactcaaacagatggggataacgcgcaaaaaaagaccaccacttacaaagaacaagacccggccaaagtaacgcattatttgacacagctggccgaattttccgactaccaacgtgtttatttggatgaaacaggatttgaccgctacctgttccgtccctatgcccgcagcctgaaagggcaaatagtgaaagcgcagataagtggaaaaagataccaacgcttatctttggtgtccgcacaagtcggcaactggctgattgctccgatggtttatcaaaatacgatgaccggagtcttttttgaagcgtggtttcagcaatgcctactgcccgcattgactcaaaaatcgttgattattttagataatgcgcgatttcaccgtatgagtgtcttacgggaaatggcggaaaaattgggacataaggtattgcctcttgcaccttattcacctgagctcaacccgattgagaaagtgtgggcgaatattaagcggtatctgcgaaccgttttgtctgattacgcccgatttgacgatgcactactgtcctattttgattttaattga

SEQ ID NO: 41372 - DNA, 2745 bp, Neisseria meningitidis
atgcaacagcaacatttgttccgattaaatattttatgcctgtctttaatgactgcgctgcccgcttatgcagaaaatgtgcaagccggacaagcacaggaaaaacagttggataccatacaggtaaaagccaaaaaacagaaaacccgccgcgataacgaagtaaccggtttgggcaaattggtcaaaaccgccgacaccctcagcaaggaacaggtactcgatatccgcgacctgactcgctacgaccccggcatcgccgtcgtcgaacaggggcgcggcgcaagctctggctactcgatacgcggtatggacaaaaaccgcgtttctttgacagtggacggcttggcgcaaatacagtcctacaccgcgcaggcggcattgggcgggacgaggacggcgggcagcagcggcgcaatcaatgaaatcgagtatgaaaacgtcaaagctgtcgaaatcagcaaaggctcaaactcggtcgaacaaggcagcggcgcattggcgggctcggtcgcatttcaaaccaaaaccgccgacgatgttatcggggaaggcaggcagtgggggattcagagtaaaaccgcctattccggcaaaaaccgggggcttacccaatccatcgcgctggcggggcgcatcggcggtgcggaggctttgctgatccacaccggccggcgcgcgggggaaatccgcgcccacgaagatgcaggacgcggcgttcagagctttaacaggctggtgccggttgaagacgaccacccatacgctcatttcgtggtcgaagaagaatgccctaatggatatgcggcttgtaaagacaaaccgaaaaaagatattgtcggcaaagacgaacgtcaaacggtttctacccgagactacacgggtcccaaccgcttcctcgccgatccgctttcatacgaaagccggtcgtggttgttccgcccgggttttcgttttgaaaacaaacggcactacatcggcggcatactcgaacacacgcaacaaactttcgacacgcgcgatatgacggttccggcattcctgaccaaggcggtttttgatgcaaataaaaaacaggcgggttctttgtccggcaacggcaaatacgcgggcaaccacaaatacggcggactgtttaccaacggcgaaaacggtgcgctggtgggcgcggaatacggtacgggcgtgttttacgacgagacgcacaccaaaagccgctacggtttggaatatgtctataccaatgccgataaagacacttgggcggattatgcccgcctctcttacgaccggcagggcatcggtttggacaatcattttcagcagacgcactgttctgccgacggttcggacaaatattgccgtccgagtgccgacaagccgttttcctactacaaatccgatcgcgtgatttacggggaaagccacaggctcttgcaggcggcattcaaaaaatccttcgataccgccaaaatccgccacaacctgagcgtgaatctcgggtttgaccgctttggctctaatctccgccatcaggattattattttcaaaatgccaaccgcgcctattcgtcgaaaatacccactcaaaacggcaataaaaaaatcagccccaacggcagcacaaacaatccctattgggtcagcataggcgggggaaatgtggttacggggcaaatctgccgcttgggcaacaatacttatacggactgcacgccgcgcagcatcaacggcaaaagctattacgcggcagttcgggacaatgtccgtttgggcaggtgggcggatgtcggcgcgggcttgcgctacgactaccgcagcacgcattcggacgacggcagcgtttccaccggcacgcaccgcaccctgtcctggaacgcaggcatcgtcctcaaacctgccgactggctggatttgacttaccgcacttcaaccggcttccgcctgccctcgtttgcggaaatgtacggctggcgggcgggtgttcaaagcaaggcggtcaaaatcgatccggaaaaatcgttcaacaaagaagccggcatcgtgtttaaaggcgatttcggcaacttggaggcaagttggttcaacaatgcctaccgcgatttgattgtccggggttatgaagcgcaaattaaaaacggcaaagaagaagccaaaggcgacccggcttacctcaatgcccaaagcgcgcggattaccggcatcaatattttgggcaaaatcgattggaacggcgtatgggataaattgcccgaaggttggtattctacatttgcctataatcgtgtccatgtccgcgacatcaaaaaacgcgcagaccgcaccgatattcaatcacatctgtttgatgccatccaaccctcgcgctatgtcgtcggcttgggctatgaccaaccggaaggcaaatggggtgtgaacggtatgctgacttattccaaagccaaggaaatcacagagttgttgggcagccgtgctttgctcaacggcaacagccgcaatacaaaagccaccgcgcgccgtacccgcccttggtatattgtggatgtgtccggttattacacgattaaaaaacacttcaccctccgtgcgggcgtgtacaacctcctcaactaccgctatgttacttgggaaaatgtgcggcaaactgccggcggcgcagtcaaccaacacaaaaatgtcggcgtttacaaccgatatgccgcccccggccgaaactacacatttagcttggaaatgaagttttaa

SEQ ID NO: 41373 - DNA, 633 bp, Neisseria meningitidis
atgattgtttccattgatgttgatgcacaaaaaacttttacgcctttgtgtcctaaagagctgcctgtaaacgaggggcatttgattgtcgaagagttgaatgcccaagccgctttggcggatttgcgcgtgatgacgaaagatgcgcatcatgcggcagcaaaatggcttgtggataaccctgttgatatgttgaaaccgacaggtttgcctgatgcggatttgacttgggtggctcatgcgatggtcggtacacgcggctatgaattgttggacggtctgccttctgccaaagaatacgattattgcgtttggaaaggcgtcgatcccgaattgcatccttacggcgcgtgttttcacgatattgaggaaaaactgagtactggattgattgagtggctgcgttgtcaaaatacggatatggtcattgtcggcggtttggctacggattattgtgttaaaacaacggttttgcagttgcttaaaggcggcaattggcaggttatcgtcaatgaagcggcttgtcggggcattgcgccggaaaccatcgaaacggcatggcaggaaatgcgttcttctggtgcaatgattttaaaaaatgctaaagaaattaaaaaatatattaataattaa

SEQ ID NO: 41374 - DNA, 1056 bp, Neisseria meningitidis
atgacacaccattaccccacagacgatattaagattaaagaagttaaagagttgttgccgccgattgcccatctttacgagctgccgatttccaaagaggcttcgggcttggttcaccgtacccgtcaggaaatttccgatttggtccacggcatggacaagcggctgttggtcattatcgggccgtgttcgattcacgatccgaaagcggcgttggaatatgcggagcgtttgttgaaactccgcaatcagtataaaaacgagcttttgattgtgatgcgtgtttatttcgagaagccgaggacgacggtgggttggaagggcttgattaacgacccgcatttggacggtacattcgatatcaatttcggtttgcgtcaggcgcgcagcctgttgttgtcgttgaacaatatgggtatgcctgcctctaccgagtttttggatatgattacgccgcaatattatgcggacttgatttcttggggggcaatcggcgcgcggacgaccgaaagccaagttcaccgcgaattggcaagcgggctgtcctgccccgtcggctttaaaaacggtacggatggtaatttgaagattgccattgacgcaatcggtgcggcgagccattcgcatcatttcttgtctgtaaccaaggccgggcattccgccattgtccataccggtggcaatcccgactgtcatgtcattttgcgcggcggcaaagagccgaattatgatgcggaacacgtcagtgaggcggcggaacaactgcgtgcggcaggcgtaaccgacaagctgatgattgattgcagccacgccaacagccgcaaggattacacccggcagatggaagtggcgcaagacattgccgcccaattggaacaggacggcggcaatattatgggcgtgatggtggaaagccatttggtcgaaggcaggcaggacaagccggaagtgtacggcaaaagcattaccgatgcgtgtattggttgggacgcgactgaagaactgttggcattgttggcaggtgcaaacaaaaaacgtatggcgcgcgccggttga

SEQ ID NO: 41375 - DNA, 213 bp, Neisseria meningitidis
atggaaacccttatcctcgacatcggcggcatgagctgcggcggctgcgtcaaaagcgttacccggatattggaaggcgtaaaaggcgtggcaagcgtcgaagtcagccttgaaaacaaaagtgcgaccgtcggatacgaccccgcgcaaaccgatgcaggggcgttgattgaagccgttgaagacggcggctatgatgccgcgttgaaataa

SEQ ID NO: 41376 - DNA, 2889 bp, Neisseria meningitidis
atgagtaacacaaccgtagaacaatttgccgccgagctgaaacgccccgtcgaagacctgttgaaacagttgaaagaagccggcgtcagcaaaaccggcggcggcgattccctgacgctggacgacaaacagcttctgaacgcctacctgaccaagaaaaacggcagcaacggcggcaccatcagcatccgccgcaccaaaaccgaagtcagcaccgttgacggcgtaaaagtcgaaacacgcaaacgcggacgcactgtcaacattccttctgccgaagagttggcagcacaggtaaaagccgcccaaacccaagccgcacctgtccggccggagcagacggcagaagacgcggcaaaagcccgagccgaagctgccgcacgtgcagaagcacgcgccaaagcggaagccgaagcggcaaaactgaaagcggcaaaagccggcggcaaagccaaggccgccgcacagaaacccaccgaagcaaaagccgaaaccgcacccgttgcggcagaaaccaaacccgccgaagaaagcaaagcggaaaaagcccaagccgacaaaataccgtctaaaaaacccgccgagcccaaagaaaaagccgccaagccgaaacacgagcgaaacggcaaaggcaaagatgccaaaaaaccggcgaaacctgccgcacccgccgccccgcaacccgtggtcagcgcggaagaacaggcgcaacgcgacgaagaggcgcgccgtgccgccgcacttcgcgcccaccaggaagccctgttgaaagagaaacaggaacgccaggcacgccgcgaagccatgaaacaacaggcagaacaacaggcaaaagccgcacaggaagccaaaaccggcagacagcgtcccgccaaacctgccgagaaaccgcaggcagccgcgccggccgtcgaaaacaaacctgtcaatccggcaaaagcgaaaaaagaagaccgccgcaaccgcgatgacgaaggtcaaggccgcaacgccaaaggcaaaggcggaaaaggcggacgcgaccgcaacaatgcacgcaatggcgacgacgagcgcgtacgcggcggtaaaaaaggcaaaaaactcaaactcgagccgaatcaacacgccttccaagcaccgaccgaacccgtcgttcatgaagttttggttcccgaaaccattaccgttgccgatttggcgcacaaaatggcggtcaaaggcgtggaagtggtcaaagccctgatgaagatgggcatgatggttaccatcaaccaatccatcgaccaagacaccgccctgattgtggtggaagaactcggccacatcggcaaacctgccgcagccgacgaccctgaagcattcttggacgagggcgcggaagcggtggaagccgaagcattgccgcgtccgcccgtcgttaccgtgatgggccacgtcgaccacggcaaaacctcgctgctggactacatccgccgtaccaaagtggtacagggcgaagcgggcggcattacgcagcacatcggcgcgtaccacgttgaaacccctcgcggcgtgattaccttcttggacaccccgggccacgaagcctttaccgctatgcgcgcacgcggtgcgaaagcaaccgacatcgtgattcttgtggtcgccgccgacgacggcgtgatgccgcaaaccatcgaagcgattgcccacgccaaagcggcaggcgtaccgatggtggttgccgtcaacaaaatcgataaagaagccgccaacccagagcgtatccgccaagagctgaccgcacacgaagtcgtgcctgacgaatggggcggcgatgtacagtttatcgacgtttccgctaaaaaaggcctgaacatcgatgcattgctcgaggcagtcttgctcgaagccgaagttttggaactgaccgcacctgtcgatgcgcccgccaaaggcatcatcgtcgaggcgcgcttggacaaaggccgcggcgcggttgccacattgctggttcaaagcggcacgctgaaaaaaggcgatatgctgctggccggtacggcattcggcaaaatccgcgcgatggtcgatgaaaacggcaaatccattaccgaagccggtccgtccatccccgtcgaaatcctcggcttgtccgacgtaccgaatgcgggtgaagacgcgatggtattggcggacgagaaaaaagcgcgcgaaatcgccctcttccgccaaggcaaataccgcgacgtgcgccttgccaaacagcaggcggcgaagctggaaaatatgttcaacaatatgggcgaaacccaggcccaatctttgtcggtcatcatcaaggcagacgtgcagggctcttacgaggctttggcgggcagcctgaaaaaactgtccaccgacgaggtgaaagtgaacgtgttgcacagcggcgtaggcggcattaccgaatcggatgtcaaccttgccatcgcttcgggcgcgttcattatcggctttaacgtgcgtgcagatgcctcttcgcgcaaacttgccgaaaatgaaaacgtggaaatccgctactacaacatcatctacgatgccatcgacgacgtgaaggcggcgatgagcggcatgctttctccggaagagaaagaacagattaccggtacggtcgaaatccgtcaggtcatctccgtttccaaggtcggcaacattgcaggctgtatggttaccgacggtgtggtcaaacgcgattcccatgcccgcctcatccgcaacaacgtggttatccataccggcgagctgtcttctttgaaacgctacaaagacgacgtcaaagaagtccgtatgggctttgagtgcggcctgatgattaaaggctacaacgaaattatggaaggcgaccaactcgaatgtttcgacatcgtcgaagtggcacgcaccctgtga

SEQ ID NO: 41377 - DNA, 975 bp, Neisseria meningitidis
atggacacactgacccgattcctccccgaacacctgcaacaaaaccaactgaccgaagcactcggcggcgttttgctgtccgtcgtttccgcctgcaccgaaatcaacgccaaagtccgcctcggcgcactggccggcgtattgggtatggcgggcacgggcaatattcagggcgaagaccagaaaaaactggatgttatcgccaacaacattatgattgacacactcaaagccaaccctgctgttgccggcttggcaagcgaggaagaagacactttcgtaagtgccggtgaaaacggacgctatctcgtcctattcgaccctttagacggatcgtccaatattgatgtcaacatttccgtcggtacaattttctccatccttgaaaaacccgaaggcgcattggcaaccgaatcattccttcaaacgggcagacagcaacttgccgcaggctatatcctctacgggcctcaaacccagctcgtattcacattcggacacggcgtatatatgttcacgctcaatgccgaaaacgaatttgtgctgaccaaagaaaaaccgaaagtacccgaaagtaccaaagaatttgccatcaatatgtccaaccgccgccactggctgccccccgtccaacaatacatcgacgagctcttggcgggcgaaaccggcacgcgcggcaaaaactacaatatgcgctgggtagccagcatggttgccgaaatccaccgcatcctgatgcgcggcggcgtgttcatgtatccgcaagacaaacgcgaccccgccaagcccggcaaactgcgcctgatgtacgaagccaaccctatgagcctgatactcgaacaggcgggcgcatcggcaagcaacgcatatcaagccatgctcgacatacagcccgaaaacctgcaccaacgcgtcgccgtcttcatgggcagcagcgaagaagtcgcctatctcgaccgcctgcacgcaaaatag

SEQ ID NO: 41378 - DNA, 1509 bp, Neisseria meningitidis
atgcaaaccgattgcgacgtattgattgccggaaacgggctggcggcactgacgctcgccctgtcgctgcctgaatcgttccgcatcgtcattttgtgcaaaaaccggctggacgacaccgccagccgtcatgcgcaaggcgggattgcggcggcgtggtcgggagaggacgacatcgaaaaacacgttgccgataccttggaagctggcgcgggtttgtgcgacgaagccgccgtccgcaccatcctgtcgcagggcaaaccggcaatcgaatggctgctgtcgcagggcgtggcgttcgactggaatcataacggcctgcacctgacacgcgaaggcgggcatacctgccgccgaatcgcccacgtcgccgattacacgggcgaagccgtcatgcagagcctgattgcccaaatacgccgctgcccgaacatccgcgtttacgagcggcagatggcgttggacatccaaaccgaatcaggcgcagcgtacggactgaccgtcctcgactgccgaacgcaagaaacctaccgcatccgcgcccgccataccgtactcgcaggcggcggcttgggacagatttacgccgccaccaccacgccgcccgaatgcacgggcgacgccatcgccatggcaatacgcgcaggctgcgcagtcgaaaacctcgaatttatccaattccaccccacaggcttggcaaggccgtctgaaaacggacgcaccttcctgatttccgaagccgtgcgcggcgaaggcggcattctgaccaaccaatcgggcgaacggtttatgccgcattacgacctccgtgccgaactcgcaccgcgcgacatcgttgcccgcgacatcgccgccgaaattgccaaacaaacgcaagacttcgtctcgctcgatatcagccatcaacccgcagcgttcgtccgtcagcatttcccgtccatccatcggcactgcctgtcccaatgcggcttggacatcacgcgccaagccatccccgtccgccccgtgcaacactacacctgcggcggcatccaaaccgacccttgcggcagaacctccctgccgcagctctacgccttaggcgaaaccgcctgcacagggctgcacggagccaaccgcctcgccagcaattccctgctcgaatgcgtcgttaccgccagacttgccgcccaaaccatcgcggacggacaagcattccaaaccgtaccgtcccaaaggtcgtctgaacacccctccgccgaagcaggcatcttttcagacggcatccaaagcgcattcagccgccccgtcctgcaagccttcaaccaacgccatctgggcatcctccgcaacgataccggcctgcaccgcgccatcgcccaactgcggctttggaagcaaaaccaaaccgaaccgcacaccgcgtccgaatacgaaaaccgcaacctgctcgaatgcagcctcgccgtcgcccaagccgcatacaggcggagacagaacatcggcgcgcattttaatagtgattgttaa

SEQ ID NO: 41379 - DNA, 444 bp, Neisseria meningitidis
atgccgttgcgcctgcttttagggatattgtgctgcctgccgatttttgcccccgcgcacgcgcaggggcagccggatacggtcggcgactttatccaaaagaaaaaagtcatcgtcgatacatccaaagcggaactctgtttcgctgacgaccgtcagtgccaccccgtcctcatcggtgttgccacgcccaaggggacgttcgggctgacgctgaacagtaccgacaagcccggatacggcggcgaagtcatcggtttcaagcaggagggtgattttcttttcgccctgcaccgcgtttggaatcagataccgtcggaaaggcggaacgaacgcatcgcctccccgtccgtgtccgacaggattatgaccaacggctgcatcaacgtcagcgatgcggtgtacgaaaaactgcgtcattattttgtgttggaagtgatttga

SEQ ID NO: 41380 - DNA, 999 bp, Neisseria meningitidis
atgtccgaaaacaaacaaaacgaagtcctgagcggttacgaacaactcaaacggcgcaaccgccgccgcctcgtaacggcaagttgcctggttgccgcctcctgcatcctgctggcagccgccctcagttccggccctgccgaacagactgccggcgaaacaagcggcgtagaaaacaaagcggcaggtgcggcacaaacccctgccttgaaatccgccgccgacaaaccgcaggacttggcaggcgaagacaagccttctgccgccgacagcgaaatcagcgagcctgaaaacgtaggcgcgccgctggtgctgattaacgaccgcctcgaagacagcaacatcaaaggtttggaagcatccgagaaactgcaacaggcagaaaccgccaaaaccgcaccgaagcaggcaaaacaacgcgctgccgaaaaagtgccggcaactgccgacagtacggatacggtagcggttgaaaaaccgaaacgcactgccgaaacaaaaccgcaaaaagcggaacgcactgccaaagccaagcccaaagccaaagaaaccaaaaccgccgaaaaagttgccgacaaaccgaaaactgccgccgaaaaaaccaaaccggatacggcaaaatccgacagcgcggtaaaagaagcgaaaaaagccgacaaggctgaaagcaaaaaaacagccgaaaaagaccgttcggacggcaaaaaacacgaaacggcacaaaaaaccgacaaagcggacaagaccaaaaccgccgagaaggaaaaatccggtaaaaaagccgccattcaggcaggttatgccgaaaaagaacgcgccttaagcctccagcgcaaaatgaaggcggcgggtatcgattcgaccatcaccgaaattatgaccgacaacggcaaagtttaccgcgtcaaatcaagcaactataaaaacgcaagggatgccgaacgcgatttgaacaaattgcgcgtacacggcatcgccggtcaggtaacgaatgaataa

SEQ ID NO: 41381 - DNA, 720 bp, Neisseria meningitidis
atggcgacactgaccgacaaaaccatcttagttaccggcgcatcgcaagggctgggcgaacaggttgccaaagcctatgcggcagcaggcgcgactgtgattttggttgcccgtcatcagaaaaaactggaaaaagtctatgacgcgattgtcgaagccggacaccccgaacccttcgccatccgtttcgacctgatgagtgcggaagaaaaagaattcaatcagttcgccgccaccattgccgaagccacgcaaggcaaactggacggcatcgtccactgcgccggctatttttacgccctctcgccgctggatttccaaaccgtcgccgaatgggtcaaccaataccgcatcaacaccgtcgcacctatggggctgacccgcgccctgttcccgctgctgaagcagtcgcccgacgcgtccgtcatcttcgtcggcgaaagccacggcgaaacacccaaagcctactggggcggcttcggcgcgtccaaagccgcgttgaactacctgtgcaaagtcgccgccgacgaatgggaacgcttcggcaacctgcgcgccaacgtcctcgtccccggccccatcaattccccgcaacgcatcaaatcccatccgggcgaagccaaaagcgaacgcaaaagctacggggacgtgctgcccgcatttgtctggtgggcaagtgccgaaagcaaagggcggagtggcgaaatcgtttacctctaa

SEQ ID NO: 41382 - DNA, 594 bp, Neisseria meningitidis; identical to SEQ ID NO: 38781

SEQ ID NO: 41383 - DNA, 444 bp, Neisseria meningitidis
atgagcgaagaactgcaacccgtattcagcatcgagcgactgtatgtcaaagacttgtctttggaagtgccgcacgcgccgcaaatctttttggaacagggcgagcccgaagtggatatgcgcgtttccaccggcagccaaaagctggaagacggctactacaacgtggatgtaaccgttaccgtaaccgccaaattggataacgagcgcacgatgtttttgaacgaagtaacccaaagcggcattttccgtttggaaaacatccccgaagaagatgtgcagctgctgttgggcgtggcgtgtccgaacatcctcttcccttacgcgcgcgaagccgtttccagtacggtaacgcgcgccggcttcccgcccgtcctgctcgcgccgattaattttgaggcgatttaccaacaacagcaggaagccgaagccgccggggcttga

SEQ ID NO: 41384 - DNA, 1065 bp, Neisseria meningitidis
atggcttcgtatgacaagataagcggcggatggtatagggtttgcccgaaacggtcaagcaatcgggcgttaattacagtaaaattgccgttttccactttattccgcctgaaaccaatgaccgacatcacaccgtttgccaaccgcttgggcaaaaacatcaaacaccttatgaaatgggcgaaacgcaacggcatcgaagcctggcgcatttacgaccgcgacattccccaattcccttttgccgccgatgtttacggtgatcgaatccaccttcaggaatacgataccggctggctgatgcggcccgaagaatacgaagcgtggcttgccgaagtcttggaagccgtcgccttcgttaccggttttgaacccgaacaaatccgcctcaaacgccgcgaacgccaaaaaggtttgcagcaatacgaaaaaaccggcaaggcgggcgacgatttcgtcatcaccgaaaacggccgcaagttttgggtcaaccttgataagtatttggatacggggctttttttggatcatcgaaacacgcgcaaaaaagtcggcgaaacggcggcgggcaaacgttttttaaacctgttttcctacaccggcagcttcaccgtctatgccgccaccggcggcgcggcatccagcgaaactgtcgatttgtccaacacttatctcgattgggcgaaacgcaattttgaattgaacggcatcgatacggaacggcataaaatcgtccgcgccgacgtgttccaatatcttcagacggcatatggggaaggcaggcagttcgacctcattgtgatggatccgcccagtttttccaacagcaagaaaatgtccgacatcctcgacatccagcgcgaccacaaaaagctgattgacggcgcggtgaagctgctcgcttcagacggcattttgtacttttccaacaacctgcgcagcttcgttttggacgattcggtatcggaacaatacgccgtaaaagacatttccaaacaatccgttcccgaagatttccgcaacaaaaaaatccataggtgctgggaaatccgtaaaaaggcttaa

SEQ ID NO: 41385 - DNA, 588 bp, Neisseria meningitidis
atgccgctacccgacctgaccgatgccgaattaatagagtcgcgtaaactgcttctgcattttgcgcggcttcagttgcccgaccaccctgatttggctgaagatttagtgcaggaaacattgctgtccgcatacagcgcaggcgacagttttcaaggcagggcgcttgtcaacagctggctttttgccatattgaaaaacaaaattattgacgcattacgtcaaatcgggagacaaaggaaagtttttaccgcactggatgacgagctactggatgaagcatttgaaagccatttttcccaaaacgggcattggacgccggaagggcagccgcaacattggaacactccggaaaaatcattaaacaacaacgaattccaaaaaattctgcaaagctgcctatacaacttgcctgaaaacaccgcacgggtatttaccctgaaggaaatactcggtttttcatccgacgaaatacaacaaatgtgcggtatcagcacgtccaactaccacaccattatgcaccgcgcccgagaatcattgcgccaatgcctgcaaatcaaatggttcaaccaagaaaacccgaagtaa

SEQ ID NO: 41386 - DNA, 798 bp, Neisseria meningitidis
atgcgcgcagtccccccgccccatatctccatcacaggcctaggttacctcggcctgccgctggcacaaaagttttaccaacacggcagccgcgtcgccgccataaaacgcagcctgacttcggacgacatcaacctgcccatacacctcgataccatcgacctcaatcaagacagcgcgtttcaaagcgcgaaccttgcccgagatacaagcttttggcggcaccatgccaacaaacccgtttggttctgcctcttgccgccatcatcgctgacacattacgccgataccgtcaaacaatgggcagaacttgcccgggcgtgcaacgtgcaacacctgattttcacaagcagtaccagcgtttacggcgatacagcgcgcgaatgcgacgaaatcgccctacccgatccgcaaaccgagtccgcccgccaaatcctcgccgccgaacaacacctgctcgacagcggcgttccgaacatcgacatcctgcggctgggcgggctttattgcgccgaacgccatcccgtcagccgccttgttcaaaagcaaaacatcccgggcggcaaccgccccatcaacatcgtccaccgtaatatcgccgtcgaaagcctgtttcagacggcatttaaccccagcggcaggcggctgaaaaacattatcgaaccgcgccacccgacacgccgcgaattttttacggaagaagccgccaaactcggcctgcccgcgccggatttcgcacccgacgacagcgtgggcaaaatcatccgtaccgtttgcgataacggcttaagcctgtaa

SEQ ID NO: 41387 - DNA, 627 bp, Neisseria meningitidis
atgaggaaaatccgcaccaaaatctgcggcatcaccacactggaagacgcagcggccgccgcagcggcaggtgcggatgccgtcgggctggtctttttccaaggcagcagccgggccgtcgatattgcccgcgccaaaaaaatcaccgccgcactgccgccgtttgtcagcgttgtcgcccttttcgtcaacgaaagcgcgcaaaacatccgccgcatccttgccgaagtgccgatacacatcatccaattccacggcgacgaagacgacgcattctgccgccagttccaccgcccctatatcaaggccattcgtgttcagacggcatcagacatccgaaacgccgccgaccgcttccccgacgctcaggcactgctgttcgatgcctaccacccttcagaatacggcggcaccggacaccgcttcgactggacgctgctggcggaatattcgggcaaaccgtgggtgcttgccggcgggctgacccctgaaaacgtcggcgaagccgtccgcatcaccggagcggaagcggtcgatgtatccggcggcgtggaagcgtctaaaggcaaaaaagacccagccaaagtcgccgcctttatcgcaaccgccaaccgcctatcccgttaa

SEQ ID NO: 41388 - DNA, 585 bp, Neisseria meningitidis
atgatcagcaggctgaccggcaaactggttgagaaaacccctcctcaaatcgtcatcgatgtcaacggtgtcggctacgaagccgacgtatcgatgcagaccttctgcaacctgccgcccgtgggcgaaagcgtacaactgtttacccagcttatcattcgggaagacgcacatcttttatttggttttgccactgcggaagaacgcaaaaccttccgccaactgattaaggtcagcggcatcggcgcgaaaacggctttgggcattttgtcggcgatgacggcagacgagctggcgcgggcggtggcggaagaagatgtcaaacgcctctcctccgctccgggaatcggcaaaaaaaccgccgaacgcatggtcttggaactgcgcggcaagctggtcgcgcatacggtaacggacgggctgtttgccgccgcacccgccgccgacgaaacggaagacatcgtcggcacgctcctcgccctcggttacagcgaacgcgaggcaaaagcggcggtcaaaggcgttccgaaagggacggacgtgggcgaaggcgtgcgccttgctttgaaaaacctgctgaaataa

SEQ ID NO: 41389 - DNA, 117 bp, Neisseria meningitidis; identical to SEQ ID NO: 38359

SEQ ID NO: 41390 - DNA, 450 bp, Neisseria meningitidis
atgagtatttatgccgtcgcgcacatcgtccacctgtattgcgccatcgcctttgtcggcggcgtgttttttgaagtgctggttttgtccgtcctgcatacgggacgggtgtcgtgcgaggcgcggcgcgaagtggaaaaggcaatgtcttaccgcgccgtcagggtgatgccgtttgtggtcggactgctgttcgccagcggcatcgtgatggcggcaaaccgctatctttctatattgggcgaaccgtttgccacttccttcggtacgatgctgacgctgaaaatcctgttggcgttcagcgtgttggcgcacttcgccatcgccgtcgtcaaaatggcacgttccacactgacggtcggctggtcgaaatacatacacgccgtcgtctttacccatatgctgctgattgtgtttttggcaaaagcgatgttttatatcagctggtaa

SEQ ID NO: 41391 - DNA, 1455 bp, Neisseria meningitidis
atgagcatcgaacacactcctccgacacacgacggcgaaaccggtcaaaaccatgccgaacgcccttccgccgatttcgaccgtgtccactccctctgcgaaatcctcgaacctgcctttgaacaaatcgaaaacggcacaccgctcgaagacgcgccgctgcgcgacaagctgaccgagctgaccgtcctcttgggcgagctgcaccctgccgacgtggcggcggtgttggaatcgctgccgccgcgcgaacgcaacgtcgtttggcttctggtcaaacccgaagacgacggcgaagtattgctggaagtatccgacgcggtgcgcgaaacactgatcgagtcgatggataaggacgaattgttggcggcagttgacgatttggacgcggacgaattggcggaactggcagacgatttgccgcaccaagtggtttatgaagccttgcagacgcgcgacgaggaagagcgcgcgcaagtcaaagcggcaatgtcctacgaagacaaccaagtcggtgcgattatggacttcgagttggtcagcatccgcgccgatgtcgcctgtgaagtggtgctgcgttacctgcgccgcttcgacagcctgcccgaccataccgacaagatttttgtggtcgatgaaaacgatgtgttgcagggcgtgctgcccatccgcaaacttttggtcgccgatcccgaagacttggtggaaaacgtgatggcgaaagatgtcgtgcgtttccgcgccgaagacgacgtggaagaagcggcgcaggcgtttgaacgctacgacttggttaccgcgcccgtcgtcgatgaaaacaaaaagctcatcggtaggattaccgttgacgagatggtggacgtaatccgcgaagaatccgaagccgatatgttgaacatggcaggtttgcaggaagaggaagacctgttcgcccccgtatgggattcggtgaaaaaccgctggatgtggctcgccgtcaacctctgcaccgccttcctcgccagccgcgtcatcggcgcgtttgaaggcagcatcgaaaaaatcgtcgcactcgccgcgctgatgcccatcgtcgccggtatcggcggcaactcgggcaaccagacgattaccatgattgtccgcgcaatggcgatggggcagttgacgggaatgcaggcggggcgtttgctgaaaaaagaagtcggcgtcgccttggtcaacggcattatttggggaacggtcatgggcgcagtatcttggctgctttacggcagcctcggcatcggtttggtcatggttgccgcgatgacgctcaacctgctgctggcggcaaccgtcggcgtattgattcccgtggtaatggaaaagttcggacgcgatcccgcactgggcagctcggtgctgattacggcggtaacggattccggcggcttcctgattttcttgggtctcgccaccctgttcctgctttaa

SEQ ID NO: 41392 - DNA, 489 bp, Neisseria meningitidis
atgaccccgttatttagaaaagccgtttggctgctgtttgccgtttcggtctgtgcatttgccggttctttggcggcacagtatgttttgggtatggagccttgcgttttgtgtatcagtcagcggttatgcgttttggcaaccgcattgtgtacggcaattgtcctgatgtgcagaccaagaggaagggcaggcggtttgttcggtgctgtctttatcagcattcctgccgttacgggtatttctgttgcggcatatcagttgtggttgcagtcgctgccgccgggaaccgctccttcgtgcggcgcgccgtggacgttccgcttgaaaggctggcctttgtttgattggttcgagcctgtcgtgcgcgggttcggaaattgtgccgaaccggattatctgctgggaattgccttgcctgtttggagcgtggcgtattttctggcggttgtcctgacggtttggtgggcgtgggcaagggctaaataa

SEQ ID NO: 41393 - DNA, 234 bp, Neisseria meningitidis
atgaaattgaccttgatgtttcgtgaatattgcagcttgtgccacaaaatgcgcgatgcactcaaaccttttcaaaatgaatacgggttcgggctggaagtggtcgatgtggatgaaaatcctgttttggaagaaaaatacaatgagctggttcccgttttgttggcgggagatgaggaaatctgccactggtttttggatgaggacaggttgaaacagtttctcgaacggtaa

SEQ ID NO: 41394 - DNA, 474 bp, Neisseria meningitidis; identical to SEQ ID NO: 36318

SEQ ID NO: 41395 - DNA, 1980 bp, Neisseria meningitidis
atgtctcaactggcaaacgcaatccgcttcctctccgcagatgccgttcaaaaagcaaattccggccaccccggcgcgcctatgggtatggcggaaatggcggaaacattgtggacgaaattcctcaatcacaatcccgccaaccccaaattctacaaccgcgaccgcttcgtcctctccaacggccacgcgtctatgctgttgtacagcctgctgcacctgaccggctacaacctaagcattgaagacttgaaaaacttccgccaactgcacagcaaaacccccggccaccccgaatacggctacaccgacggcgtggaaaccacgaccggcccgttggggcaagggattgccaacgcggtgggtatggcattggcagaaaaaatccttgccgccgaatttaataaagacggtttgaacatcgtcgatcattacacctacgtctttatgggcgacggctgtctgatggaaggcgtatcgcacgaagcctgttcgctcgccggcaccttgggcttgggcaaactgattgttttgtatgatgacaacaatatttccattgatggtaaagtggacggctggtttaccgaaaacatcccgcaacgctttgaaagctacggctggcacgtcgttcccaatgtaaacggtcatgacaccgccgccattcaagccgccatcgaagccgcacgtgccgaaaccggcaaaccgtccatcatctgctgcaaaaccttaatcggcaaaggcagtgccaacaaagaaggcagccacaaaacccacggcgcacctttgggcgcggacgaaatcgaagccacgcgcaaacatttgggctggacttaccccgcctttgaaatcccgcaagaaatttacgatgcgtggaatgccaaagaacaaggcgcgaaactggaagccgactggaacgaactgttcgcgcaatatcaagccaaatatcctgccgaagccgcagaatttgtgcgccgtatggataaaaagctgccggacaatttcgatgaatacgttcaagccgcattgaaagaagtgtgcgccaaagccgaaaccatcgccacccgcaaagccagccaaaacagcatcgaaatcttggcaaaagagctgcccgaactggtgggcggctctgccgacctgaccccgtccaacctgaccgactggtcaaacagcgtttccgttacccgcgacaaaggcggcaactacatccactacggcgtgcgcgagttcggtatgggcgcgattatgaacggtttggtattgcacggcggcgtaaaacccttcggcgcgactttcctgatgttcagcgaatacgagcgcaacgccctgcgtatggctgcgttgatgaaaatcaaccctgtatttgtgttcacccacgattccatcggtttgggcgaagacggcccgacccaccagccgattgagcaaaccgccaccctgcgcctgattccgaatatggacgtatggcggccgtgcgacaccgccgaatccttggtcgcttgggcagaagccgtcaaagccgccgatcacccgtcctgcctgattttcagccgtcaaaacctgaaattccaagcgcgcagcgaacaacaactggacgacatcaaacgcggcggctacatcatcagcgaagcccaaggcaacgcccaagccgtcatcattgccaccggttccgaagtcgagctggctttggaagcgcaaaaagccctcgccgcgcaaaacatcgccgtgcgcgtcgtttccatgccgtccaccaacgtattcgaccgccaagacgccgcctatcaagccaccgtcctgcccgaaggtctgccgcgcgttgccgtagaagccggacacgccgacggctggtacaaatacgtcggtctgaacggcgcagtcgtcggcatcaaccgcttcggcgaatccgcccctgccgacttactcttcaaagcattcggctttaccgtggacaatgtggtcgatacagtgaaatcagtgctgtaa

SEQ ID NO: 41396 - DNA, 825 bp, Neisseria meningitidis
atgaaatggctcttcacccttttggcggtactcaatattgccgtattcggcggcacggtgggctataaattggccgttaaagcgacgggcggcgtgccggaaaaccgggccgtcgaaaacacgccccccgcaacgcccgccgccgacaatgcggcggcatccgtggaggatacggcggcactgctcaaaccgggcgacatcctgaccgaagagcaggccgagcagttgcgcttgaaaaaggaagcggaacagaaaaaactgagggagaaaaaacagcgtgaagaaaaagcccgccgcgaaaaactcgccgcagaaaaggcgcaggcggaacgcgaaaacggcgcggcggatgccttatgcgccgcgcaggcaagcctcacgatggacgaagatgactaccaccgcatcaaaggacttttgggcaaatggtcgcacgttgccagcaggagcgtcgaaaaacgcaccgccaaagccaaacctgccgacaaaacctaccgcgtcgtcctgcccgtttccgccgatgccgaaaatcaggcggcggagctgtctgccaaaggtttcaaccccataccgtttgacggcgcattgagtttgggtgtcggcaacagccgggaaaacgcccaagccctgcaaaaccggcttgccggcgccggattcggcggggcgcatattgtcgaacactttgccgaagccgacaggcaggacgattctttgagcgtgtcgcgtatgacggttttgtttaccggcgtgaatgccgccgatgcggacgaaatccgtaaaatcacgtccctatacggcaaactgaacctcaagtcttgcaaatag

SEQ ID NO: 41397 - DNA, 987 bp, Neisseria meningitidis
atgtcttctacgccgaataaacaagccggatatccccgactggtcgccgatatcggcgggacgaatgcacgctttgcgctggaaaccgcgccgcgcgtcatcgaaaaagccgccgtgcttccgtgtaaagactacgatacggtgaccgatgcggtgcgtgcctatctgaatcaaagcggtgcaacagccgtacggcacgcggcatttgccatcgccaacccgattttgggcgactgggtgcagatgaccaaccaccattgggcgttttccatcgaaaccacccgtcagactttggggctggacaccctcatccttttgaacgactttaccgcgcaggcattggcggtaacgcagacttcaagcaaagacctgatgcaggtaggcgggcaaaagcctgtcgaatttgcccccaaagccgttatcggccccggtaccggcctgggcgtgagcggattggtgcacagccacgcaggctgggtggctttggcgggcgagggcgggcataccagtttcccgccgtttgacgatatggaagtgctgatttggcagtacgccaaaaacaaatacggccatgtttccgccgaacgctttttgagcggcgcgggcttgagcttggtttacgaggctttggctgcaaaacagaaagccaaacccgccaaactgatgccgtctgaaatcacggaaaaggctttgagcggcgcgtcgcctttgtgccgtcagactttggacatcttctgcgccatgctcggcacggttgcttccaacctcgccctgacgctgggcgcgcgcggcggcgtgtacctgtgcggcggcattattccccgcgtgttggaatatttcaaaacttccccgttccgcagccgtttcgagaacaagggcaggtttgaagcatatcttgccgcgattcccgtgtatgtcgtcttgagcgagtttcccggaatttccggtgcggctgcggctctcgacaaccatttgagaaacgtttaa

SEQ ID NO: 41398 - DNA, 2799 bp, Neisseria meningitidis
atggactcgttagcaacaacattggttgatgcccaagtcgatttaaacccgcatcaagttgatgctgccttgtttgcctgcaaaaatccgttgtcaaaaggtgtgattttggcggatgaagtaggtttaggaaaaaccattgaagcgggcttggtaatattgcagcattgggcagaacgcaaacgtaaaattctgattatcaccccggccaacttacgcaaacaatggcatcaagagttacaggaaaaatttggcttacagggcatgatattggaggctaaaagttacaatgccataaaaaaagcaggtaaaaaccctttccgtcaagaaaatcccgttatctgctcctatcaatttgctaaatctaaagcggataatattaagcaaattggatgggatttggttgtattagatgaggctcatcgtctgcgcaatgtttataagaaaaacaatgttatcggtaaaacgttaaaagaagcattggaaaatgtatccagcaaggttctattaactgctactcctttgcaaaattctctacttgaactttacggcttagttagcatgatagatgaccgtgtttttggcgacttagagagttttcgtgctcaattcggtgcaaaggccacagaacagaccttatcccatctgcgccagcgactcagccctgtttgccaacgtaccttacgccgtcaagtacaggcttatgttccttacactcagcgccttgccatcctgcaaaaatttacgccatccgaccaagaacgagaattttctcatttggttgccgagtatctgcgccgtccgaatctgcaagcaatgccagaagggcaacgacagcttatttccctagtattgtggaaacttttagcctctagtagccgcgctattgctggtgcgctggatactatgaccaaacgcctacaaggcgtattggcagaatcaaccacgcaagatctggttgaaactctggacgaagattatgaaagcttagatgaaactgcagaagaatgggaagaagaaagcgaatctaacattctaactgctgatgaataccaagcgattgccgatgaaattgaagagcttaaacattttaaacaacttgccgaaaacattcgagaagacgcaaaaagccgcgcattattgaccgcactttccacagcctttaccaaattgaaagaacttggtgcggcgcaaaaagccattatttttaccgaatccaaacgcacccaagcctatctcttagaatgtcttgcccaaactgactatgcaggcgagaatggtgacggtatcgtgttattcaatggtacaaacagcgatccccaagcgcaaaaaatctataaaaactggctcaaacggcatgaaggtagcgataaaattactggttccaaaaccgccgatacccgtgccgctttggtagagcatttcaaagagcgtggcaccatcatgattgccactgaagcaggtgcagaaggcattaacctacaattctgctcactcattatcaattacgatctgccttggaatccacagcgtgttgaacagcgcatcggacgttgtcaccgatatgggcaaaaacatgatgttgtcgtcgtgaattttgttgatgaaaccaatgaagccgaccaacgcgtttacgaattgcttgagcaaaaatttaagctttttgatggtgtatttggtgccagcgacgaagtattgggtgcaatcggtagcggcgtagatatcgaacggcgtattgctgaaatctaccgccaatgccgccagtccgaagacatcaaaactgcctttgatagcctgcaaagtgagctatcggacgaaatcaaccaaaacatgatgaaagcccgtcaaaccctgctggaaaattttgatgaagaagtccgcgaaagactacgcattcgtgctgaagaaagccaagtagcactcaacaaatacgaaaaaattttaatggagttaacacaaagcgaacttggtgacagttcagacttctatgacggtggttttatactcaataagctacctgaaaatctttcagacggccttaacattccaacaggacgatacgaactgccgcgaaaaagtggtgaagctcatctctaccgcattacccaccctttggcgcaagccatcatcgatcgcgccaaaaaacgcgattgtcctccagtacggctaatttttgattatcaagggcataacggcaggatcagtacactcgaaccctatcgcggacgaagcggacaacttatcgccaaactcatcagtatcagcgcactgggtgatatggaacagcacatactgattgccgccataaccgaaaacggtgaaattctacaagctgacgatccagaaaaacttctgcgcctgcccgcacgtattgccgaaaccacaataaaaaccagatttcagacgaccttatctgacaatataactgaacgccgccaaacgctattaaaccaagccaccgaacgtaatttgggttattttgagaaggaagtgcaaaaactagacgactgggcagatgatttaaaacaaggtttggaacaggacattaaagaaaccgatcgtgaaatcaaagaagtccgccgcaccgctgccacttccgctacgttggaagaaaaactaagttggcagaaaaagcagcgcgaattagaaaataaacgcagccgccaacgccgagaactttttgataaacaagatgaaatcgaagtgcggcgtaaccagctgattgaaaaattggaagaaagtttgaaacagaaggtggaagaggaagaattgttttttattgagtgggagattgtgtga

SEQ ID NO: 41399 - DNA, 849 bp, Neisseria meningitidis
atgaatgctgtccaagttttaaactttcaacaaaactccgtccgtactgttgccgataacaaaggcgagttgtggtttttggcaaatgatgtttgcgagattttagggtattccaacccacgtcaagccgtgcaaaaaaactgcaaagaaaagggtgtatctaatagatacacccctacaagaggcggagagcaatcaatgacctacatcaatgaacctaacctgtacaggctgattatcaaatcccgcaagcctgccgcagaagcgtttgaagaatgggtaatggaaaccgtcctgcccaccatccgcaaaacaggcggctaccaaatcggacaaagaaccaccgccgacgaccgtaccggattgcgccaagccgtcgccgcgcttgtcggacgcaaaggcatagactactcctccgcgtacagtatgatacaccaacgcttcaacgtcgaagccatcgaagacctccccgccgagaagctgcctgaagccgtcgcctatgcccacgcgctgaccctgcacacaggcttgacaggcgaagtcctcgaccgcgaaccgttacccgcaccgcaacctgccctgcccatcagcggcaacgccctgtacgacctcgccgttgccgtcagatacggcgcgtgggccatccaaatgggcagagacgtttccctgccgctgaagcagctcggctgcaaacaggcggtaacgatgtggacggtctgggcggaaacacgcagccgcctcaaagccgccgcaaacgccctcgaagccttaaacgcacacgccgacgcggaacacgcggcaaaaatccgcccgatgctgcccgaaatccgcaacctgtcgtcggtttga

SEQ ID NO: 41400 - DNA, 204 bp, Neisseria meningitidis
atggatatgaccctgaagcataaagccgaagcccttttgggcgagccgcttttagacgaacccgtccgacccgagtcgtgggaatgctgcggcagcgactgcggcgaggcgtgtattcagacgatttattgggcggataaggcccgctacgacgcgcaacggcggaaattgaaagaagcgggttggtcggacgatgccgtctga

SEQ ID NO: 41401 - DNA, 492 bp, Neisseria meningitidis
atgagtaccgaaaccaaaaactacattacacccgccggctggcaggcattgaaaaacgaactttaccggctggtcaacaaagaacgccccgaaatcgtccaaatcgtcaattgggcggcaggcaacggcgaccgcagcgaaaacggcgactatctttacggcaaacgccgtatgcgcgaaatcgaccgccgcatccgtttcctgaccaagcgtttggaggctgccgtcgtcatcgatcccgaattgcgcgaagcgaccgaccaagtgtttttcagcgcgaccgtcggcctgttgcgcggcgacgggcgcgagcaaaccgtcaaaattgtcggcatcgatgaaatcgataccgcgcaaaacaaaatttcttggatttcgccgttggcgcgttgcctgattaaagcgcgcgaaggcgacgaagtggttttgaacacgccggaagggcgtgaggaaattgaaatcctttctgtcgaatacatcaaaatcgactga

SEQ ID NO: 41402 - DNA, 1302 bp, Neisseria meningitidis
atgaccgaatccctccgcctccctgccgcctcgctcaaaccttccactgtcgccctgcccggctccaaaagcatcagcaaccgcaccctgctgcttgccgccttgtccgacaatgcttgcgaaatccattccctgctcaaatccgacgataccgaccgtatgctcgaagcactcgataaactcggcgttgaaatcgaatatcttgccgaagaccgtctgaaagtgcacggcacaggcggacgcttccccaaccgcactgccgatttgtttttgggcaacgcgggaacggcgttccgtccgctgactgccgcacttgccgttttgggcggcgattatcatctgcacggcgtgcctcgtatgcacgaacgccccatcggcgatttggccgatgcgctgcggattgccggcgccgatgtcgaatatttcggcaaggaacactatccgccgcttcatatcggcaaacgtcaagacaacggcgaacgcgtgattccgattaaaggcaatgtgtccagccagtttctgaccgcccttttaatggcgttgccgctgaccgggcaggcgtttgaaatccgtatggtcggcgaattgatttccaagccctatatcgacattactttaaaactgatggcgcaattcggcgtacaggttgccaatgaaaactaccgcgtcttcaaaattcccgccgatgcgcactaccacgcgcccgaacacttgcacgtcgaaggcgatgcctccagcgcgtcctacttcctcgcagccggtttgattgccgccacgcccgtctgtgttatcggtatcggcgcaaacagcatacagggcgatgtcgcctttgcccgcgagctggaaaaaatcggggcggacgtggtttggggcgaaaacttcgtcgaagtttcacgcccgaaggaacgtgccgtccaatcctttgatttggatgcgaaccatatccccgatgccgccatgaccctcgccatcgtcgcgcttgctacagggcaaacctgcacgctgcgcaacatcggttcgtggcgcgtcaaagaaaccgaccgcatcgccgcgatggcaaacgagttgcgcaaactcggggcaaaagtcgtcgaagaagccgaagcaattcacatcaccccgcccgaaacgctgacacccgacgccgtcatcgacacgtacgacgaccaccgcatggcgatgtgtttctcgctggtttcgctgttgggcgtacccgtcgtcatcaacgatccgaaatgcacccacaaaaccttcccgacttatttcgacgtgttctcatcgctgaccgaaacagcggaataa

SEQ ID NO: 41403 - DNA, 1389 bp, Neisseria meningitidis
atgaatgcagtcgtagttgccgtaatcgtgatgctggtgctgtcgctgtcgcgcgtgcacgtggtattgagcctgacggtcggcgcgtttgtcggcggcgcggtggcgggtatgccgctgcaaaacattgccgatgcggcgggacaggtcagccaggcggggattatccccgtgttcaacaaaggtttggaaggcggtgcgaagattgcgctttcttatgcgatgctcggcgcgtttgcaatggcgattacccattccggcctgccgcaacagcttgccggcgcggtcgtccgcaagctgaaccggggcggtatgcccgacagcgtgcgttcgggcgagggcgcggtcaaatggctgctgctttccattatccttgtgatgggcattatgagtcagaacatcatccccatccacatcgcctttatcccgatgattgttccgccgctgcttttggtgttcaaccgcctgaaaatcgaccgccgcctgattgcgtgcgtcatcactttcgggctggttacgacttatatgttcctgccttacggcttcggcgcgatttttttgaatgaaatcctgttgggcaacattcattccgccgcgccgcagcttgatgtgaaaaacatcaacgtaatggcggcaatggcgattcccgcgttgggaatgctggccggactcctgctggcgtttgtccattaccgcaaaccgcgcctgtaccaaagcaacaatgccgatacggcgggcaacgccgatgcggcaaaccgtccgcagccgtccgcctaccgcagcctggccgccgccgccgccattgccgtatgctttgccatccagttgatgtatgaagactcgctggtgttgggcgcgatgctcggtttcgccgtatttatgatgttgggggtcatcaaccgcgacaaggcaaacgacgtattcggcgaaggtatcaagatgatggcgatggtcggcttcattatgattgccgcgcagggttttgccgccgtgatgaatgcgaccgggcatatccagccgctggtggaaagcagtatggcgatattcggcaacagcaaaggtatggcggcgttggcgatgctggtggtgggacttttggtaacgatgggcatcggttcgtccttttccactttgccgattattgccgcgatttatgtgcctttgtgtgtcggtttgggtttttcgccgcttgccaccgtcgccattgtcggcacggcgggggcgttgggcgatgccggttcgcctgcgtccgattccacgctgggtccgacgatggggctgaacgccgacgggcagcacgaccacatccgcgattccgttatcccgaccttcatccactacaacatcccgctgctgattgccggctggattgccgcgatggtgctgtaa

SEQ ID NO: 41404 - DNA, 1419 bp, Neisseria meningitidis
atgaatattcacaccctgctctccaaacaatggacgctgccgccattcctgccgaaacggctgctgctgtccctgctgatactgcttgcccccaatgcggtgttttgggttttggcactgctgaccgccaccgcccgcccgattgtcaatttggactatcttcccgccgcgctgctgatcgccctgccttggcgtttcgtcaaaattgccggcgtattggcgttttggctggcggttttgtttgacgggctgatgatggtgatccagcttttcccttttatggacctcatcggcgccatcaacctcgttcccttcatcctgaccgcccccaccccttatcagataatgaccgggctgttgctgctgtatatgctggcgatgccgtttgtgttgcagaaagccgccgccaaaaccgacttccggcacattgccgtctgcgccgccgttgtggcggcagccggctatttcaccggccatttgagttactacgaccgggggccgatggccaatatcttcggcgcaaacaacttctattacgccaaaagtcaggcgatgctctacaccgtcagccagaatgccgactttattaccgccggcctggtcgatcccgtcttcctccccttgggcaatcaacagcgtgccgccacgcatctgaacgagccgaaatctcaaaaaatcctctttatcgtcgccgaatcttgggggctgccggccaatcccgaacttcaaaacgccacttttgccaaactgctggcgcaaaaagaccgtttttcggtttgggaaagcggcagttttcccttcatcggcgcgacggtcgaaggcgaaatgcgcgaactgtgtgcctacggcggtttgcgcgggttcgcactgcgccgcgcgcccgacgaaaaatttgcccgctgcctccccaaccgtttgaaacaagaaggttacgccacctttgcgatgcacggcgcgggcagttcgctttacgaccgcttcagctggtatccgagggcgggctttcaagaaatcaaaaccgccgaaaacctgatcggtaaaaaaacctgcgccattttcggcggcgtgtgcgacagcgagctgttcggcgaagtgtcggcatttttcaaaaaacacagcaaaggattgttttactggatgacgctgaccagccacgccgactatcccgaatccgacattttcaaccacaggctcaaatgcaccgaatacggcctgcccgccgaaaccgacctctgccgcaacttcagcctgcacacccaattcttcgaccaactggcggatttgatccaacgccccgaaatgaaaggcacggaagtcatcatcgtcggcgaccatccgccgcccgtcggcaacctcaatgaaaccttccgctacctcaaacaggggcacgtcgcctggctgcacttcaaaatcaaataa

SEQ ID NO: 41405 - DNA, 921 bp, Neisseria meningitidis
atgacaaagttatacgcagaaatcgccaagatggagacgcaggacgacgacacggtcaaggtttggggttacgcttcaagcgaggaaatcgattcggacggcgaagtcatcgcggcggcagctatgaaggcggcgattcccgattatatgaagtttggcgcggggcgcgagatgcacggctcaaacgctgcgggaacggcaattgaaatcaacgttgaagacgacggcataacctttttcggtgctcatatcatcgaccccgttgtcgtgtcgaaagtcaaaacaggcgtttacaaaggcttttccatcggcggcagcgttaccgcccgcgatgatttgaacaagtcgcaaatcacgggcttgaagctgacggaaatcagccttgtcgagcgccctgccaatcccgatgcggtgtctacctgctttaaggcggacaaaggtgcggaaatggtaaacaacgatacagaacataatgctacatattttagccatttcccttccaaacaaaaaagcaccggcggcagccgatgccccttcctttacaggttcccctattttttatccgcgggcagcactggtttggctgggccttttggtgcgggcgcgccgacggaagcctggtccttcagcttcgccaataccgcagggccgatgcccttaaccttggtcaaatcgtccacagacttgaacgcaccgttttgcgcgcggtattccgcaatggccttcgccttcgccggacctatgcccggcagcgcctccaactcctgcagcgaagccgcattgatgtttaccgccgcaagggagaaggcgcaggagaacagcatacagaacagcacgaacattttcttcatggtttttcctttaagggttgcaaacaataaaccgcatcttgcgacgataaaacgggtcattctaaaatga

SEQ ID NO: 41406 - DNA, 2607 bp, Neisseria meningitidis
atggctgccaaccaacgttaccgcaaaccgctgcccggtacggatttggaatactacgacgcgcgtgcggcgtgtgaggacatcaagcccggctcttacgacaagctgccttacacgagccgcattttggtggagaatttggtcaaccgcgcggacaaagtcgatttgccgacgctgcaaagctggctgggtcagctgattgagggaaaacaggaaatcgactttccttggtatccggcgcgggtggtgtgccacgatattctggggcagaccgcgttggtggatttggcaggtctgcgcgatgcgattgccgaaaaaggcggcgatcctgccaaagtgaatccggtggtgcaaacccagctcatcgtcgaccactcgctggcggtggagtgcggcggctacgaccccgatgccttccgcaaaaaccgcgaaatcgaagacagacgtaacgaagaccgtttccacttcatcaactggacaaaaaccgcatttgaaaatgtggacgtgattccggcgggcaacggcatcatgcaccaaatcaatctggaaaaaatgtcgccggttgttcaagttaaaaacggcgtggcgttccccgatacctgcgtcggcacggattcgcacacgccgcacgtcgatgcgctgggcgtgatttccgtgggtgtgggcggattggaagcggaaaccgtaatgctgggacgcgcgtccatgatgcgcctgcccgatattgtcggtgtggagctgaccggcaaacggcaggcgggcattacggcgacggatattgtgttggcgctgaccgagtttctgcgcaaagagcgcgtggtcggggcgtttgtcgaattcttcggcgagggcgcgagaagcctgtctatcggcgaccgcgcgaccatttccaacatgacgccggagttcggcgcgactgccgcgatgttcgctattgatgagcaaaccattgattatttgaaactgaccggacgcgacgacgcgcaggtgaaattggtggaaacctacgccaaaaccgcaggcttatgggcagatgccttgaaaaccgccgtttatcctcgcgttttgaaatttgatttgagcagcgtaacgcgcaatatggcaggtccaagtaacccgcatgcccgttttgcgaccgccgatttggcggcgaaagggctggcgaagccttacgaagagccttcggacggacaaatgcccgacggcgcggtcatcatcgccgcgattaccagttgcaccaacacttctaacccgcgcaacgtcgttgccgccgcgctgttggcacgcaatgccaaccgcctcggcttgaaacgcaaaccttgggtgaaatcttcatttgccccgggttcaaaagtagccgaaatctatttgaaagaagcaggcctgctgcccgaaatggaaaaactcggcttcggtatcgtcgccttcgcctgcaccacctgtaacggcatgagtggcgcgctggatccgaaaacccagaaagaaatcatcgaccgcgatttgtacgccaccgccgtattatcaggcaaccgcaacttcgacggccgtgtccatccgtatgcgaaacaggctttcctcgcttcgcctccgttggtcgttgcctacgcgctggcaggcagtatccgtttcgatattgaaaacgacgtactcggcgttgcagacggcaaggaaatccgcctgaaagacatttggcctgccgatgaagaaatcgatgccgtcgttgccgaatatgtgaaaccgcagcagttccgcgatgtgtatgtaccgatgttcgacaccggcacagcgcaaaaagcacccagtccgctgtacgactggcgtccgatgtccacctatatccgccgcccaccttactgggaaggcgcactggcaggggaacgcacattaagaggtatgcgtccgctggcgattttgcccgacaacatcaccaccgaccacctctcgccgtccaatgcgattttggccgtcagtgccgcaggcgagtatttggcgaaaatgggtttgcctgaagaagacttcaactcttacgcaacccaccgtggcgaccacttgaccgcccaacgcgcaaccttcgctaatccgaaactgtttaacgaaatggtgagaaacgaagatggcagcgtacgccaaggttcgctggcacgcgttgaacccgaaggtaaaaccatgcgcatgtgggaagccatcgaaacctatatgaaccgcaaacagccgctcatcatcattgccggtgcggactacggtcaaggctcaagccgcgactgggctgcaaaaggcgtacgcctcgccggcgtggaagcgattgttgccgaaggcttcgagcgtatccaccgcaccaacttgatcggtatgggcgtgttgccgttgcagttcaaaccgggtaccaaccgccataccctgcaactggacggtacggaaacctacgacgttatcggcgaacgtacaccgcgctgcgacctgaccctcgtgattcaccgtaaaaacggagaaaccgtcgaagttccggttacctgccgcctcgatactgcagaagaagtattggtatatgaagccggcggcgtgttgcaacggtttgcacaggattttttggaagggaacgcggcttag

SEQ ID NO: 41407 - DNA, 1263 bp, Neisseria meningitidis
atgtcaaacacacaaaaacagcttgcccttgccaaagcggcaaaaaaatccgtcaacacggcggatacggaagaaaaaaaccgcgcgttgcttgctatggcggacagcttggaagcggcggcggcagatattttggcggcaaaccgtttggatttggaagcggcggcaggcaacattcccgaaagcatgaccgaccgccttttgttggacggcaaacgcatttgcacgatggcggacggcatcagggcggttgccgcgctgcccgaccccgtgggcgaaatactggaaacctcgactttgcccaacggcttggaaatcgtcaaaaagcgcgtggcgatgggcgttatcggcattatttacgaaagccgcccgaacgttacttccgatgcggcggctttggcactgaaaagcggcagcgcggtcgtactccgcagcggcaaagatgcattccaatccgcacgcgccatcgttgccgccctgaaaacggggttggcgcaaacccgcatcgaccccgacgcgctccaactgattgaagacaccgggcgcgaaagcagttacgaaatgatgagggcgaaagattatctagacctgctgattccgcgcggcggggcggggctgatacgggcggtggttgaaaatgccgtcgtgccggtcattgaaacggggacgggcatcgtccacatttatatcgacaaggacgcggattgggacaaggcgctccgtatcgtgtacaacgccaaaaccagccgtccgtccgtgtgcaactcgatggaagtgctgctggtgcatgaagacattgctgccgacttcctgcccaagctcgaacggctgttggttcgcgaccgtataaaagccggactgccgcccgtccgcttccgtttggatccgcaggcagcgcggcatatcggcggcgaagcggcgggtgcagacgatttcgataccgagtttttagactacatcctcgccgtgaaaaccgtcgcttcggtcgaagaggcggtcgggcacatcgaaacgcacggcacgcaccattcagacggcatcgttaccgaaaaccgccacgctgcggactatttcacgacccatatcgattctgccgccgtgtatgtcaacgcgtccacgcgctttaccgacggcggcgaattcggcttgggttgcgaaatgggcatctccacgcaaaaactccacgcccggggcccgatgggtttgaaagagctgacgagttacaaatacatcgtacaaggcacgggacaggttagggaataa

SEQ ID NO: 41408 - DNA, 747 bp, Neisseria meningitidis
atggaaaccccgaccaacaccccgcaacgctccctgcgtcaaaacagtatctacctgctgcccaactcctttaccatcgccgcgctgttttccgcattttacgcaatcacccaatccatgcacggacgttatgaaaccgccgccatcgcggtattcatctctatgttgctggacggtatggacgggcgcgtggcgcggctgaccaacagccaaagcgcgttcggggagcagctcgacagccttgccgatatggtcagcttcggcgttgctcccgctctgattgcctacaaatggcagctttggcagttcggcaaaatcggttattccgtcgccttcatctactgcgcctgcgccgccctgcgccttgcgctgttcaacacgctcatcggcaaggtggacaaacgctggtttatcggcgtgcccagtccgactgccgccgcgctgattgtcgggctgatttgggtcaaccacagcgtcgaaaaattccccgccgtccactggtgggcattgggcatcacactgtttgccggcctgtcgatgattgtccaaatccctttttggagttttaaagaaatcaacatccgcagacaagtcccctttgtcggaatgctgcttgccgtcttattgctgcttctggtcacttgggaaccgtcgctcgtcctcttcctgttctttctcggatacagcctgtccggctacattatggcggcacgccgattctggaaaaaatacagaaaggcggattaa

SEQ ID NO: 41409 - DNA, 366 bp, Neisseria meningitidis
atggaccaatactatatggagttaaagaataagttatctaacagaccaatcctactggataatactaatgattttctttttgttttagtaaatacagtgaaagctatgatagaaaatactgataaaagtcagctttcagagttagataaaattttagacggtgtcacaagtcaagaattgaaacttgcctatgatttttgtcaagggaaattcggtcaagcaggtttttcttatcgtaggcacccgaattatttttatttgtccagtttaattgcgacttttccagaatttgagttgtctaaagcagaccgagattacctcaaaggaatcataaattttgataactaccttttatatgagttagat

SEQ ID NO: 41410 - DNA, 237 bp, Neisseria meningitidis; identical to SEQ ID NO: 37424

SEQ ID NO: 41411 - DNA, 336 bp, Neisseria meningitidis
atgttcggaaaagccggattaggcggcctgatgaaacaggcgcagcaaatgcaggaaaatatgaaaaaagcgcaagccaaacttgccgaaaccgaaatagaaggcgaagcaggcaacggcctggtcaaaatcacaatgacctgcgcgcacgaagtacgcaaaatcgacatcagccccgatttgattcaagaagccgccgacgacaaagaaatgctcgaagacctcatcctcgccgccctcaaatccgcccgtgacaaagccgaagaaaccgcaaacaaaacaatgggcgcattcacgcaaggtctaccccccagagtgggcgacttcttccgctga

SEQ ID NO: 41412 - DNA, 855 bp, Neisseria meningitidis
atggaaacccaagaaaacatgattaaaaccgccttacaagcagctcaaaaacctttttttgagtttgcaccgaacaatactccgcttgtattcacaccagaccaagacggtggctggagatacaaatcacaccccgaattgatgcaaaacccgtaccgcaagtgcggcaaattcctcatgcacgataccgccagtcttattaagtttgtacaaaaacacaaacaggacggcacacaaatctacattgatgccgatttcaaatcagggcgtattgatgtcaccgccgtcatcaatggccatacgcaacaagctccgggctggctcgatttttatgccgtatacaccccgcaacacactacatcggcatccaactggctgaacaacaatgcgcaccgcatgaatcagatggagttttcccatttcctgaccaacaatgcccgcaacatcgtatccaaaaatcccggtaacgaaaattccgtttacccgaccgccgccgaagtattggatttcgcgctcaatctcgagtacaccgaaaaaaccaccttcaaacaaggctatcatgaacaggacggcagaatcaactttaccttccaatccgaagactcagggcaaacagagaaaaacctcaaaatgtttgaacgtttcggcatcgagttcaccccgcatcaaggcggtgcatcctactttgttgaagccctgttgaaattccgcatcgacaaaaacagcggcgcactcgtcctgtggtacgaattgcagcaaatcgatgccgtaatcgaacaagcggcaaaagacatttccgaagccgtacaaaaagccttccctgaaatcgacatctatttcggcgtaatcgcctaa

SEQ ID NO: 41413 - DNA, 822 bp, Neisseria meningitidis
atggattttctgattgtcctgaaagccctgatgatgggcttggtagaaggttttaccgaatttttaccgatttccagcaccggacatttgattgtgttcggcaatctgattgattttcacagcaatcacaaggtttttgaaattaccatccagctcggtgcggttttggcggtagtgtttgaataccggcagcgtttcagcaatgtgttgcatggcgtgggaaaagaccggaaagccaaccgtttcgtccttaatcttgccattgcttttatacctgccgccgtgatggggctgttgttcggcaaacaaatcaaagagtatctgtttaaccccttgagtgttgcagtcatgctggttttgggcggtttttttattttgtgggtggagaaacgccaaagccgggcagagcctaaaattgtcgatgttgatgcattgcgtccgattgatgcgttgatgatcggcgttgcccaagtgtttgcactggttccgggtacgtcccgttcgggcagtacgattatgggcgggatgctttggggaatcgagcggaaaacggcaacggagttttcatttttcttggccgttccgatgatggttgcagcaacggcttatgatgtcctgaaacattaccgatttttcaccctgcatgatgtcggtttgattctgataggctttattgctgcctttgtttcaggcttggtagcggtaaaagcgttgctgaggtttgtttccaagaaaaattatattccttttgcctgttaccgcattgtttttggtattgccatcattatattgtggctgtcaggctggataagttgggaatga

SEQ ID NO: 41414 - DNA, 300 bp, Neisseria meningitidis
atgcattatttcagtattcatgaccaatcgggacggcatataggctttttcatcctgcttgccgacgacgaatcggaagcacggctgcaaagcgggcgttttgccgtcaaacttgaaggcggaatggaaaatcatgtcctgtcgccgttcggtcagacggaaatcccccaatattggcgcgtggtcaaagaccgtatcgagctgttttttgacgaagctcccgtcggaactttgcgtaacgaatatctgaccgtgtcggggcagacttttgttttgaacgatttgacagggaatatgtga

SEQ ID NO: 41415 - DNA, 783 bp, Neisseria meningitidis
atggaatcactgactgccataaataaatcgcgcattcggcaggctttccaaaaagcattaaacgattatgaccggcacgccttaatccaacaaaaaatgacgattaatttaatggcgcatttgcaagattatttgccggatatgccattggaaaacgtgttggaattgggctgcggctcaggaatgttgagtgccttgctgcaaaaacagatttcagcgaattattggttatttaatgatttgtgcgatgtgcagccccaactggctgaaaaactgccgcaatcctttgatttttattgcggcgatgcggaaaactttccttttcaacgacaatttgacttaatcgcaagcgcatctgccgtgcaatggtttcatcaacccgacgcttttatcgcccattgcaaaacaggcttgaaagcaaacggattattggcggttgcaacctttggcaaagacaatttaaaagaagtccgccaaattacaaatataggcttaaattacccgactttatcccaatggcagacttggttagccaaagattttgagcttttatggtgtgaggattttaaggcaatactagactttgatacgccgtcagatgtactcaaacaccttaaatatacaggcgtaacagccacgaaccaaaaaaattggacaagaaaaaatctcaatggatttattggcgattacttgtcggcgttcagtatgccgtcgggcaaagtgcacctgacttatcatccgttattttttatcgcgcgctactctgcggcgggcaggcaataa

SEQ ID NO: 41416 - DNA, 633 bp, Neisseria meningitidis
atgacggtatgggtcggactgaccggcggaatcggcagcggcaaatcggcagccgcgcaatgttttgccgatttgggcgtaccgcgtatcgatgcggatgcggcggcgcactcgctgacggcttcagacggcatcgccctgccggaaatcaggcggctgttcggcgacaccgttttcgacacacagggtttgttgcggcgcgacatattgcgtaaagaagtctttgcctccccatcgcgaaaagccttgctcgaatccgtgatgttgccgctgattttctcagaaatcaaaaaacagcaagaaacctttaccgatgcggtttacggcattgtcgaaattccgctgctgacggaaaagcgtcaatttgtcagcctgatacggcgtgtcctgaccataagcgcacctttggaaaaacgtatcggcagggtgatggcccgcagcgggctgacgcgcggcgaggtggcggacatcatcagccatcaggcatccgaatccgaacgcctgctgcttgcagacgatgtgctgctcaatgacggcagcctcaaaagcctgtgtgagaaaacaatgcgcctgcacgcgttttattcagggattttcgcctcaaaaccaacacaaggaaaacacaatgactga

SEQ ID NO: 41417 - DNA, 942 bp, Neisseria meningitidis
atgccgaccccgaaagcctttgccctgctcgggccgaccgccggaggcaaaaccgcgctcgccctcaaaattgccgaaaccctacctgtcgaaatcatcagcctcgattccgcgctggtttaccgcgatatggacatcggcacggcgaaaccgtccgcctccgaacgcgcctttgtcccgcaccaccttatcgacatcatcccgcctaccgaatcatacagcgccgcccgctttgtcgaagactgcacgcgcttggtcggggaaatttcctcacgcggcaggtttgcccttattgtcggcggcacgatgatgtatttccgcgccctgacccaaggtttgaacgatttgcccgaagccgacgcctgcctgcgtgccgacttggacgaacaaaaacagatgtacggcttggattttctctaccgcaccctgcaacaggtcgatcccgaaacagcatgccgtctgaaaccgaacgacagccagcgtatcggacgcgctttggaagtttattatctgaccggcaaaccgatgagcgaacacctcggcagacaaagcccccatacgctccccttcgatttgcataccgccgccctgattcccgaaaaccgcgcccgcctgcatgaaaacatcgccctgcgtttccacctgatgcttgaacagggctttatcggcgaagtagaaaacctgcgccgccgctatcccggcctgaccgccgactcccccgccatccgctgcgtcggctaccgtcaggcatgggaatatctggacggaaaaaccgatttcccggcatttgtcgagaaaggcattgccgccacccgccaacttgccaaacgccaactgacttggttgcgcaaaacacctttagactgcgttgccgacccgttttcagacggcacttcatgcacacgcctgattgaggcggcaaaacggtttttcggcgcataa

SEQ ID NO: 41418 - DNA, 900 bp, Neisseria meningitidis
atgtggttcaagcagattagtttttatccgctcaacaaagaaaagctgcctgaggcggacgtacttgccgacaaacttgctgaagctgaatttacccattgccaaggcttagactggttcagcgaaggctttgccgcaccggtttcgttctctcccgaactcgtttttcctgccgactttaccttgcgcgtcgccctgaaaaaagaggaaaaagtcctgcctgccggcgtcatccgcgatattttggaagagaaggtggcggaaatccaaaacaatgaagcccgcaatgtcggtcgcaaagaaaaacaagagcttaaagagcaaattacagacgacctgctgccccgagcgtttacccgcagcggccgtacagaggcggtgtttaacacccgccacggctatctgctcgtcaacaacgcggcttccgccaaagcagaaaacatcctgaccaagctgcgcgaagccttgggcggtttggaagcctcgctgccgaataccaagcaatcgccctcttccctgatgaccggctggctgttgcaagggcattgcgaaggcggttttgaattggacagcgattgcgaactcaaaggtacgggcgatattgttcccgtcgtcaaagtatccaaacaagatttaaccgccgacgaagtggttcaacacgtcaaaaacggtaaaaccgtaacccagctcggtttggtttggcgcgaacaaatcgcctttatcctcactcaagactttacactcaagcgcatccaatacctcgacgtattgcaggaagaagccgaaagcaacggcgacgatgccgccggtctcgccttcgcctcgcaaatcctgatggctgaatccgtcagcaccatgttggaagagctggtttcctatttgggcggctggcaagattga

SEQ ID NO: 41419 - DNA, 336 bp, Neisseria meningitidis
atgtatgaactctctattgtagaacttgaattagttagtggtgctggtcccattgctgatttcactacaggagtgggaggtgctattggtggtggtgctggatatattgcagggaaagcaggtggtggaaccatcgggggaattctaggctctccatttggtccaggtggtactatagttggtgttgcagctggacaacaatatggtggtaaggttggttctgtaattggggcaggagctggatctgccattggtggtgtgatcggacgaggtattgaaagcattttggataatgatcgatcaggtaatgattacggtgatggaacagggtattaa

SEQ ID NO: 41420 - DNA, 1266 bp, Neisseria meningitidis
atgtctgaagcccttgcaaaagaaaccctcaatccgtttgaaatcgcgcgcaaacaggtcaaaaccgcctgcgaccggctaaaaaccgatccggccgtttatgaaatcctgaagagtccgacccgcgtgttggaagtcaattttcccgtcaaactcgacgacgacacggtcaaaaccttcacgggctaccgttcgcaacacaacaacgccgtcggcccctataaaggcggcgtgcgcttccatcccggagtgaatctggacgaagtcaaagccttgtcaatttggatggccatcaaatgctgcgttgcgggtattccttatggcggcggcaaaggcggcattaccttggatccgcgcgattattccgaggcggaactggaacgcatcgcccgcgcttattccgaagccatttctccgctgatcggcgagaaaatcgatattcccgcacctgatgtgaacaccaacggcaaaatcatgtcttggatggttgatgcctatgaaaacgtggtgaaacattctgcaccgggcgtatttaccggtaaaccggttgagttcggcggctctttggcgcgtaccgaagccacgggttacggcgtgaacctcgccgccgtccaagccttggaaaaactgggcaaagacgtgaagggtgccacttacgccattcaaggtttcggtaatgtgggttaccacacaggttattacgcgcatcaatccggcgcgaaagttgttgcggtttctactgtcgatgttgccatttacaacgaaaacggtttggatatggaagccctgttcaaagagttccaagaaaaaggcttcatcaccaacgaagccggttacggcaaggaaattaccaacgccgaacttttggctttggatgtggacgtactcgccccttgcgcgctggaaaaccaactgacttccgaaaacgccggtaaagtccgcgcgaaaatcgtggtcgaaggcgcgaacggtccgactacgcccgaagccgacgttatcctgcgtcaaaacggcgtattggtcgtgcccgatattctggcgaactgcggcggcgtggtcgtttcctatttcgagtgggtgcaaaacctgcaaggctattattgggagtttgacgaagttcaggaaaaagaaaccgtcgtcctgcgccgtgcgttccgcgatatatggaacttggctcaagagtatgatgtcgatttgcgaaccgcgtcttacatgatgagtatccgccgtgttgaaaaagcgatgaaactgcgcggttggtattga

SEQ ID NO: 41421 - DNA, 420 bp, Neisseria meningitidis
atggacaataagaccaaactgcgcttgggcggcctgattttactgactaccgccgttttaagcctcattatcgtattgattgtcgactcctggccgcttgccatcctgcttgccgccgtcatcgtcgccgccgctgcgggcggttttgtttggacatcccgccgacagcaacgccagtttatcgaacgcctgaaaaaattcgacatcgatcccgaaaaaggcagaatcaacgaggcaaacctgcgccgtatgtaccacagcggcggacaacaccagaaagatgcgattaccctgatctgcctgtcgcaaaaatgttcggtggacgaggcgcacgctatgttcaaaaaacgcccgacacgtcaggaaatcaatcaaatggcggcaaaacagtcgcgcggtcagaaacgtccgcaccgttaa

SEQ ID NO: 41422 - DNA, 594 bp, Neisseria meningitidis
atggcaagcattcaaaacttatacgagaccgtcgtcggtgtgcttggcgatcaggcaagcaaagtcatttcagctttgggcgagattaccgtcgagtgtctgcccgagcactatatttcagtcatgaccgcattgcgtgaccatgaagagttgcatttcgagcttctggttgacttgtgcggtgtcgattacagcacttacaaaaacgaagcatggcagggcaaacgctttgccgtcgtcagtcagctgctttccgttaaaaacaatcaacgcatccgcgtgcgcgtctgggtttcagacgacgacttccccgtagtcgaatccgtcgtcgatatttacaacagcgcggattggtacgaacgcgaagcctttgatatgtacggcatcatgttcaacaaccatcccgacctgcgccgcatcctgaccgattacggcttcgtcggacatccgttccgcaaagacttcccgatttccggctatgtggaaatgcgttacgacgaagagcaaaaacgcgtgatttaccaacctgttaccatcgagccgcgcgagatcacgccgcgtatcgtccgtgaggagaactacggtggccaataa

SEQ ID NO: 41423 - DNA, 624 bp, Neisseria meningitidis
atgaaacgattgactttattggcctttgttttggctgccggtgcggtttccgcctctcccaaagcagacgtggaaaaaggcaaacaggttgccgcaacggtttgtgcggcttgccatgcagcagacggtaacagcggcattgcgatgtatccgcgtttggcggcacagcatactgcttacatctatcatcaaactatcggcatccgcgacggtaaacgcacccacggttcggcagctgtgatgaaaccggtggtaatgaatttgagcgatcaggatattttgaacgtatccgtattctatgccaaacagcagcccaaatccggtgaagccaatcctaaggaaaatcccgaattgggtgcgaaaatctatcgcggcggtttgagcgataaaaaagtgccggcgtgtatgtcctgccacggtccgagcggtgcgggtatgccgggaggcggaagcgaaattcaggcttatccgcgtttgggcggtcagcatcaggcatatattgttgaacagatgaatgcctacaagtccggtcagcgtaaaaataccatcatggaagatattgcaaaccgtatgtctgaagaagatttgaaagcggtcgccaactttatccaaggtttgcgttaa

SEQ ID NO: 41424 - DNA, 1008 bp, Neisseria meningitidis
atgagcaccttcttccggcaaaccgcccaagccatgattgccagacacatcgaccgcttcccactattgaagttggaccaggtgattgattggcaaccgatcgaacaatacctgaaccgtcaaagaacccgttacctccgagaccaccgcggccgtcccgcctatcccctgttgtccatgttcaaagccgtcctgctcggacaatggcacagcctctccgatcccgaactcgaacacagcctcatcacccgcatcgatttcaacctgttttgccgttttgacgaactgagcatccctgattacagcaccttatgccgctaccgcaattggctggcgcaagacgacaccctgtccgaattgctcaaactgatcaaccgacaactgaccgaaaaaggcctaaaagtagagaaagcatccgccgctgtcgttgacgccaccattattcagaccgccggcagcaaacagcgtcaggccatagaagtcgatgaagaaggacaaatcagcggccaaaccacaccgagtaaggacagcgatgcccgttggataaagaaaaacggcctctacaaactcggttacaaacaacatacccgtaccgatgcggaaggctatatcgagaaactgcacattacccccgccaatgcccatgagtgcaaacacctgccgccgttgttggaaggggtacctagaggtacgaccgtctatgccgacaaaggctacgacagtgcagaaaaccggcaacatctggaagaacatcagttgcaggacggcattatgcgcaaagcctgccgcaaccgcccgctgtcggaagtgcaaaccaaacgcaaccgatatttgtcgaagacccgttatgtggttgaacagagcttcggtacgctgcaccgtaaattccgctacgctcgggcagcctatttcggactgattaaagtgagtgcgcaaagccatctgaaggcgatgtgtttgaacctgttgaaagccgccaacaggctaagtgcgcccgctgccgcctaa

SEQ ID NO: 41425 - DNA, 363 bp, Neisseria meningitidis
atgaatctgccacgcaaccgctttatcctgctctcggcattgtggtttgcaggcagcatttactcactgcttttcaaagctgccgaaaccgcgccaccgccttttccgcatttcgacaaagcagcacaccttgccctgtttttcgcacaaatctggcttttgaccaaagcattcaaaaccggaaaacttcccatcccctaccgcagcctgatggtctttgccctctgtttcgccctcttcagcgaatgcgcgcaggcatggtttaccgcaacgagaaccggcagtttgggcgatgttcttgccgatatggcaggtacggttctcgcactctttgccgcccgcgccgccgaccgcccggactga

SEQ ID NO: 41426 - DNA, 786 bp, Neisseria meningitidis
atgggctttctgcaaggcaaaaaaattctgattaccggcatgatttccgagcgttccatcgcttacggcatcgccaaagcctgccgcgaacaaggcgcggatttggcgtttacctacgttgtagacaaactggaagagcgcgtccgcaaaatggcggcggaattggattccgaactcgtattccgctgcgatgtcgccagcgacgacgaaatcaaccaagtgttcgccgatttgggcaaacattgggacggcttggacggtttggtgcattccatcggttttgcgccgaaagaagccttgagcggcgacttcctcgatagcatcagccgcgaagcgttcaacaccgcacacgaaatttccgcatacagcctgcccgcattggcaaaagccgcccgtccgatgatgcgcggcagaaactccgccattgtcgccctgagctacttgggcgcggtgcgcgcgattccgaattacaacgtgatgggtatggcaaaagccagccttgaggcgggcatccgttttaccgccgcctgtctgggcaaagaaggcatccgctgcaacggcatttccgccggtccgatcaaaacactcgccgcctccggcatcgccgatttcggcaaactcttgggacacgtcgccgcccacaatccgctgcgccgcaacgttaccatcgaagaagtcggcaataccgccgccttcctgctgtccgacctgtcgtccggcattaccggcgaaatcacttacgttgacggcggttacagcatcaatgccttgagcaccgagggataa

SEQ ID NO: 41427 - DNA, 552 bp, Neisseria meningitidis
gtgaactattgcgaatttgccgcctcacttcccgaaaacaccgacaacccgaacaaacattaccacgacacgcaatacggttttccgattgacagcgacaacggactgtttgaacggctggtgttggaaatcaatcaggcaggattaagctggacgctgatgctgaaaaagcggcaggcgtttcagacggcatttgaaggtttcgacatcgatacggttgccgccttcgacgacaccgaccgcgaacgcctgcttgccgacgcgggcattgtccgcaaccgcctgaaaatcgatgccgccattttcaatgcacggcaaatccaagcgttgcaacaagaatacggctcgttcaagaactggctcgacgcgcaccatccgcgaagcaaagacgaatgggtcaaactctttaaaaaacatttcaaattcgtcggcggcgaaatcgtcggcgaatttctgatgagtaccggctacctcaaaggcgcgcacgccgaaagctgtccggtttaccgcgaaaccctgaaataccacccgaaatggctcgatgccgtctga

SEQ ID NO: 41428 - DNA, 2190 bp, Neisseria meningitidis
atgatctaccaccgcatcgccgtaaacgtgccgctttcagacggccttttgacttattcccattccgatccgcttcctccgggaacgcgggtgcttgtgcctttccgcaataaaaccgtggtcgggatggtgtgggaaacggatattgcgccggatatggatacggcgcggattttgagcgttcggacggccttttcggacgagccgctgctgcccgaaagctggcgtgatttgttggcgtttacgtcgcgttattaccactatccgacggggcaggcggtgtttgccgcgctgccgcagggtttgaaggaaacgcgcgcggtggaaatgccgcagccgccgttgttttacgcgctgaacgaagcgggcagggcgcaaacgccgccgccggcgcggttcaacaaaaaagcggctttgtgggacgcgctgctgtcgggcgaaatgacgatggcagcgttgaagcaggtaaacgcgcaggcggcgaaattgattgaagattgggcggtgcagggttggattgaaacgacggaagcggcgaaacccgttttaaggccgtaccacgggcaggcttcgcactctgaatttgtgttgaatgccaaccagcagaaagcttccgatgccattcagacggtctttggcagcttccaaccgtttctgctgtatggcatcaccggcagcggcaagaccgaggtgtatttcgatgcgatggcgaaagtgttggcgcaggggcggcaggtgttgtttctgttgcccgaaatcaacctcacgccgcagcttttgaagcgtgtggaaaaccgttttgccgacgtgccgactgccgtgttgcacagccagatggcggcaggcaggcgcacgcaggattatttgcgcgcgatgttggggcaggcgaaattggtcatcggcacgcggctggcggtgttcacgccgatggatgatgtcgggctgattgtggtcgatgaggaacacgacggctcgttcaaacaggacaacgaattacgctaccacgcccgcgatttggcggtgtggcgggcgaagcagggcggctgcccgatcatattgggcagtgccacccccagcttggagagctggcacaaggcgcaaagcggcgcgtaccgcctgctgcaactgaccgaacgcgcccataccgccgcgcaactgccgcaagtggacattctcaacgtaggccgtctgaaacttgacaacggcttctcgccgcaagccttgcaacttttgaagcagaactttgaagcgggcggtatgtcgctggtgtacctcaatcgtcgcggtttcgcgcccgcgctgttttgcggcgactgcggccataccttcggctgcccgaactgctccgccaaaatggtgctgcaccaacgcgcccgccaactgcgctgccaccactgcgaccaccgcgaacccatcccgtacaaatgccccgactgcggtaaccaagacctgaccgccgtcggccacggcacgcagcgcgtcgaagaaaccctgcgcgccttcctgcccaaggcagccgtcgtccgcgtcgatagggacagtacggcgcacaaaaacgactgggcggatttgtaccgccgcatcgccgacaacgaaatcgacattctggtcggcacgcagatgcttgccaaaggccatgatttcgcgcggctcaacctcgttatcgtattgaacgccgacggcagcctgtacagcgcggactttcgcgcgccggaaaggctgttcgccgagctgatgcaggtgtccggcagggcggggcgcgccgataaacccggcaaggtgttgatacagacccaactgcccgaacatcccgtcttcgccgccgtcaaagcgcaggactacgccgtgtttgccgaaaacgaattgaacgagcggcaaatgttcgccatgccgcccttcggtttccagaccgccgtccgcgccgacgcgccgcgtgttgccgatgcgatggaatttctcaacgccgccaaagaaaccctcgccccgctgttgcccgaaagcgtttcacagtttggcgcggctccgatgctgatggtgcgcctcgccgaacgcgaacgcgctcaaatcttcctcgaatcaacatcccgacaggatttgcaccgcgccgtgagtttgtgggtgcaggtgttgcagcagaacagggacggcaaaatcagatggtcggtggatgtcgatccgcaggaggcttga

SEQ ID NO: 41429 - DNA, 855 bp, Neisseria meningitidis
atggcagaaattactgcaaaaatggttgccgatctgcgcgccgctaccggcctgggcatgatggaatgcaaaaaagccttggttgaagccgaaggcaacttcgacaaagccgaagaaatcctgcgtattaaatctggtgcgaaagctggtaaactggctggccgtaccgctgccgaaggcgtattggcttacgcgatcaacggcaatgtcggcgcattggttgaagtaaactgcgaaaccgacttcgttgctaaagacgccggcttcgtagaatttgccaacttcgttgctaaaactgctgccgagaaaaaaccggcttctgttgaagaactgagcgaactggttgaagcagaacgcaaagccatcatcgctaaattgggcgagaacatgtctgttcgccgcttccaagtgatcgacactgccaaccaactggttgcctacatccacggtgcattggctaccgaaggcgtattggttgagttcaaaggctctgaagacgtagcacgcaaaatcggtatgcacatcgttgccgctaaaccacaatgcgtaagcgaagctgaagtagatgctgaaaccgttgaaaaagaacgccacatctacaccgaacaagctatcgcttccggcaaacctgccgacatcgccgctaaaatggttgaaggccgtatccgtaaattcttggctgaaatcactctgaacggccaagcattcgtgatgaaccctgaccaaactgttgcccaattcgctaaagaaaacggcactgaagtggttagcttcgtacgctacaaagtaggcgacggtatcgagaaagccgttgtcgactacgcagccgaagtagccgcagccgccaaagtgtaa

SEQ ID NO: 41430 - DNA, 183 bp, Neisseria meningitidis
atggctgaacaaaaaaagattagggttacattggttaaaagcctgattggtacaattgaatctcatcgtgcatgtgcacgcggtttaggtttgcgtcgtcgcgagcatacggtagaggttttagatacccctgaaaaccgtggtatgattaataaaatcagctacttgttgaaagtggagtct

SEQ ID NO: 41431 - DNA, 636 bp, Neisseria meningitidis
ttgaacatcaaatattcgggcatcgaaaacaggtttgaaaccaccatcctgaagaaaaacggcgtaagatacggcttcgtctccttcgcccccaaccttgccgccgtcaaactgaacgactatgccaaagtcaaaaaactgattgccaaaaccaaacaaaaagccgagatcgttattgtgatgttccacggcggcgcagaagggaaacaggcggaacacctgccgttcgataccgaaatcttctatggggaaaacaggggcaacgtcgttgagtttgcgcggcttgccgtcgattccggcgcggatgtcgtattcgggcaggggccgcacgttacacgcgccgtcgaactttaccgcgaccgcttcatctcctacagcggcggcaattttgccacctacggcgcaatcaacacctccggcatcagcggcatcgcccccatttttaaaatcatcaccgacaaacaggggcggttcgtttccggcaacattatccccatcactcaaatcggcgataaaatcccaaaaatcgaccccgagaaaaccgttattgagcggattatttatctgaaccgcagcgatttccccaacgggaacggactggatgtctcgcccgacggcagcatcacgcgccggtaa

SEQ ID NO: 41432 - DNA, 180 bp, Neisseria meningitidis
atggccgttcaacaaaacaaaaaatccccttccaaacgcggtatgcaccgttcgcacgacgcgctgaccgcgcccgcactgtctgtcgacagcacaaccggcgaagtacaccgcccgcaccacatctcccccaacggtatgtaccgcggccgcaaagtggtcaaagtcaaaggcgaataa

SEQ ID NO: 41433 - DNA, 450 bp, Neisseria meningitidis
ttggcatcatcatcaagatacaggatgtattggttggaaagcgatgaacaaaagaagataattatgtggaaaatttataaagaaaatagcactgacttaaattttgccctaggtagtatatattgccaagcaatcaatcttaccgaatttaaaatgtgggtcgaaaaaatcataagggaaatggatttagatgaaattccaaattatttttttgatctaacagatcttcaatcgctattccatctaattgatattataggatttgttcccgaaaataacttatcaaaaaatcaggataatgcattaacaggtattgctttcttaagagggatagatgtctatgattcgcctatctcaaaagaaaaagcattaaaagccttaaagaaacatcctgaaatttatcagaggtttcagcatttctttccgtttgtagaactgcccccgctttaa

SEQ ID NO: 41434 - DNA, 801 bp, Neisseria meningitidis
atgaaaaagaccatttttaacattaccaaaatggactgcccgtccgaagaacagctcattcgcatgcgtttaaaagatgtgtctgatatttatgaattacagtttgatattgctgggcggtgcttaaccgtctatcacgataatcaagatacaacgattttacaagtacttgaaccgcttaattttgatagtcatatcatttccaccgaagtgattgttgataagatagtgtttaacaagcctgatgagcacttagaaaaaagattattatatcaagtgctcatgattaactttgtgttttttatcatagagtgttcggttggtatttttgctaattctatggggctgattgctgatagtctagatatgctggcggacagctttgtctatatattggcgctatcagccattggtatgacgctggcgtataaaaaacgtgtggcatttttggcggggataacgcagataacattggcgttatttggggtgatagaagtgattaggcgttttatcggtgctgagcagctgcccaattatcaactgatgattggcacggcatttttggcattgattgcaaactggctgtgcttatatctactgagcaaaaatcaaaataaagaaatccatatcaaagccagcatgatttttacatccaatgacattatcatcaatatcggtgtgatagcggcgggagcattgacgttattgactcattctagctatcctgatttaatcattggcatgattgtctttgtcattgtactatttggtgccagaaatattttaaaattggcaaaataa

SEQ ID NO: 41435 - DNA, 672 bp, Neisseria meningitidis
atgaaaaccgtttccaccgccgttgtccttgccgccgctgccgtttcactgcccggctgtgcgaccgaatcctcacgcagtctcgaggtagcaaaagtcgcctcctacaatacgcaatatcatggtgttcgtaccccgatttccgtcggaacattcgacaaccgctccagcttccaaaaaggcattttctccgacggggaagaccgtttgggcagccaggcaaaaaccattctggtaacgcacctgcaacagaccaaccgcttcaacgtactgaaccgcaccaatttgatcgcattaaaacaggaatccggcatttccggcaaagcgcataacctgaaaggcgcagattatgtcgttaccggcgatgtaaccgaattcggacgcagagatgtcggcgatcatcagctcttcggcattttgggtcgcggcaaatcgcaaatcgcctatgcaaaagtggctctgaatatcgtcaacgtcaatacttccgaaatcgtctattccgcacagggcgcgggcgaatacgcactttccaaccgtgaaatcatcggtttcggcggcacttccggctacgatgcgactttgaacggcaaagttttagacttggcaatccgcgaagccgtcaacagcctggttcaggctgttgacaacggcgcatggcaacccaaccgttaa

SEQ ID NO: 41436 - DNA, 426 bp, Neisseria meningitidis
atgaaaacagcccgccgccgttcccgcgagcttgccgtacaagccgtttaccaatcccttatcaaccgcaccgccgcgcccgaaattgctaaaaacatccgcgaaatgcccgactttgccaaagcggacgaagaattgttcaacaaacttttcttcggtacgcaaaccaacgcagcggactacatccaaaaaatccgccccctgctcgaccgcgacgaaaaagacctcaatcccatcgaacgcgccgtcctgctgaccgcctgccacgagctgtccgccatgcccgaaacaccctaccccgtcatcatcaacgaagccatcgaagttaccaaaaccttcggcggcacggacgggcacaaattcgtcaacggtatcctcgacaaactcgccgctcaaatccgccccgacgagcccaaacgccgttga

SEQ ID NO: 41437 - DNA, 1344 bp, Neisseria meningitidis
atgattaaaatcaaaaaaggtctaaacctgcccatcgcgggcagaccggagcaagtcatttatgacggcccggccattaccgaagtcgcgttgcttggcgaagaatatgccggtatgcgcccctcgatgaaagtcaaggaaggcgatgccgtcaaaaaaggccaagtgctgtttgaagacaaaaagaatccgggcgtggtgtttaccgcgccggcttcaggcaaaatcgccgccatccatcgcggcgaaaagcgcgtacttcagtcggtcgtgattgccgttgaaggcaacgacgaaatcgaattcgaccgctacgcgcccgatgccttggcaaaattgagcggcaaagaagtgcgccgcaatctgattcaatccggtttgtggactgcgctgcgtacccgtccgttcagcaaaatccctgccgtcgatgccgagccgttcgccatcttcgtcaatgcgatggacaccaatccgctggcggccgaccctacggtcattatcaaagaagccgccgaggatttcagacgaggtttgctggtattgagccgtttgaccgagcgtaaaatccatgtgtgtaaggcagctggcgcagacgtgccgtctgaaaatgctgccaacatcgaaacacatgaattcggcggcccgcatccggccggtttgagtggcacgcacattcatttcattgagccggtcggtgcaaacaaaaccgtttggaccatcaattatcaagatgtaattgccatcggacgtttgtttgcaacaggccgtctgaacaccgagcgcgtgattgccttgggtggttctcaagtcaacaaaccacgcctcttgcgtaccgttttgggtgcgaaagtatcgcaaattactgcgggcgaattggttgacgcagacaaccgcgtgatttccggctcagtattgaacggcgcgattacacaaggcgcgcacgattatttgggacgctaccacaatcagatttccgttatcgaagaaggccgcagcaaagagctgttcggctgggttgcgccgcagccggacaaatactccatcacgcgtacgaccctcggccatttcctgaaaaacaaactcttcaagttcacgacagccgtcaacggtggcgaccgcgccatggtgccgattggtacttacgagcgcgtaatgccgctagacatcctgcctaccctgcttttgcgcgatttaatcgtcggcgataccgacagcgcgcaggcattgggttgcttggaattggacgaagaagacctcgctttgtgcagcttcgtctgcccgggcaaatacgaatacggcccgctgttgcgcaaagtgctggaaaccattgagaaggaaggctga

SEQ ID NO: 41438 - DNA, 459 bp, Neisseria meningitidis
atgaaaacccaaatcagccttgctgctgccgccatcacactgctcctttccgcctgcggaggcagcggaataccttcccaacccaaaggcgaaatttccgaaaaccgcaccgccgcgttcaaatccatgatgcccgaattcacacgcatgggcaaaatggtcaaagacgaagaaccttacgatgtcgaaaaattcaaacaggcggcagcgtcgtttgccgaaagcagcaagaaaccgttcacactttttgagtccgatccgcaaggcaacggccgcgccctgcccgccgtttggtcggatggtgcaaaatttgaagccgaaaaaacaaaattcgccgccgccgtcgaaaaactcaacgccgcagcacaaaccggcaaactggatgaaatcaaagccgcctacggcgaaaccggcgcaagctgcaaatcctgccacgacagtttccgcgcacccgaataa

SEQ ID NO: 41439 - DNA, 201 bp, Neisseria meningitidis
atgtttgtctgcatctgcaatgccgttaccgaccatcaaatcaaggaaaccatcgccgccggcgcgaccacaatgggcgatttgcagtcgcaattgggcgtagcgagctgctgcggctgctgcggggagcttgccgcttcgtttctgacggcgcacaatgcgcaaccgacggttacggcgggtatcaacgttcaagcgtaa

SEQ ID NO: 41440 - DNA, 480 bp, Neisseria meningitidis
atggctaacttagtaaaaacctttctgcttggcgaattggtaaaaggtatgggcgtaacgctcaaaaactttttcgcccgcaaagacacgatttattttcccgaagagaaaacgccgcaatccgtgcgtttccgcggcctgcacgcgcagcggcggtatccgaacggtgaggaacgctgcattgcgtgtaagttgtgcgaggcggtgtgtccggcaatggcgatcaatatcgaatcggaagaacgagaagacggcacccgccgcaccaagcgttacgacatcgacctgaccaagtgcatcttctgcggtttctgcgaagaggcctgcccgaccgatgcgattgtggaaacccatatttttgaataccacggcgagaaaaaaggcgacttgcacatgaccaagccgattcttttggcaatcggcgacaaatacgaagccgaaatcgccaaacgcaaagccgctgacgcgccgtatcgttaa

SEQ ID NO: 41441 - DNA, 1839 bp, Neisseria meningitidis
atgttacccgcccgtttcaccattttatctgtgctcgcggcagccctgcttgccgggcaggcgtatgccgccggcgcggcggatgcgaagccgccgaaggaagtcggaaaggttttcagaaagcagcagcgttacagcgaggaagaaatcaaaaacgaacgcgcacggcttgcggcagtgggcgagcgggttaatcagatatttacgttgctgggaggggaaaccgccttgcaaaaggggcaggcgggaacggctctggcaacctatatgctgatgttggaacgcacaaaatcccccgaagtcgccgaacgcgccttggaaatggccgtgtcgctgaacgcgtttgaacaggcggaaatgatttatcagaaatggcggcagattgagcctataccgggtaaggcgcaaaaacgggcggggtggctgcggaacgtgctgagggaaagaggaaatcagcatctggacggactggaagaagtgctggctcaggcggacgaaggacagaaccgcagggtgtttttattgttggcacaagccgccgtgcaacaggacgggttggcgcaaaaagcatcgaaagcggttcgccgcgcggcgttgaaatatgaacatctgcccgaagcggcggttgccgatgtggtgttcagcgtacagggacgcgaaaaggaaaaggcaatcggagctttgcagcgtttggcgaagctcgatacggaaatattgccccccactttaatgacgttgcgtctgactgcacgcaaatatcccgaaatactcgacggctttttcgagcagacagacacccaaaacctttcggccgtctggcaggaaatggaaattatgaatctggtttccctgcacaggttggatgatgcctatgcgcgtttgaacgtgctgttggaacgcaatccgaatgcagacctgtatattcaggcagcgatattggcggcaaaccgaaaagaaggtgcttccgttatcgacggctacgccgaaaaggcatacggcagggggacgggggaacagcggggcagggcggcaatgacggcggcgatgatatatgccgaccgaagggattacaccaaagtcaggcagtggttgaaaaaagtgtccgcgccggaatacctgttcgacaaaggtgtgctggcggctgcggcggctgtcgagttggacggcggcagggcggctttgcggcagatcggcagggtgcggaaacttcccgaacagcaggggcggtattttacggcagacaatttgtccaaaatacagatgttcgccctgtcgaagctgcccgacaaacgggaggctttgagggggttggacaagattatcgaaaaaccgcctgccggcagtaatacagagttacaggcagaggcattggtacagcggtcagttgtttacgaccggcttggcaagcggaaaaaaatgatttcagatcttgaaagggcgttcaggcttgcacccgataacgctcagattatgaataatctgggctacagcctgctttccgattccaaacgtttggacgaaggcttcgccctgcttcagacggcataccaaatcaacccggacgataccgctgtcaacgacagcataggctgggcgtattacctgaaaggcgacgcggaaagcgcgctgccgtatctgcggtattcgtttgaaaacgaccccgagcccgaagttgccgcccatttgggcgaagtgttgtgggcattgggcgaacgcgatcaggcggttgacgtatggacgcaggcggcacaccttacgggagacaagaaaatatggcgggaaacgctcaaacgtcacggcatcgcattgccccaaccttcccgcaaaccccggaaataa

SEQ ID NO: 41442 - DNA, 1281 bp, Neisseria meningitidis
atggaaaactcattgaaagaagccgccctcaagttccacgaattacccgttccgggcaaaatttccgttaccccgaccaaatctctggcgaccgacaaagatttggcgttggcgtactctccgggcgtagccgctccttgtatggaaatccatgccgatccgcaaaatgcctacaaatacaccgccaaaggcaacttggtcgctgtcatttccaacggtacggccgttttgggcttgggcgacatcggcgcgctggcgggcaaacccgtgatggaaggcaaaggcgtattgttcaaaaaattcgccggtgtggacgtgttcgacatcgaaatcgatgaaaaagacccgcaaaaactcgtggacatcatcgccgctttagagccgaccttcggcggcatcaacctcgaagacatcaaagcacccgagtgtttctacatcgaacgcgaattacgcaaacgctgcaaaatccccgtattccacgacgaccagcacggcacggccatcattaccgccgccgccgtattgaacgccctgcgttttaccggccgtaaaatcgaagaagcgaccttggtttgctctggtgcgggtgcggccgcgattgcctgcttgaaccaattgctggatttgggcttgaaacgcgaaaacgtgaccgtttgcgactccaaaggcgtgatttaccaaacccgcgaagacaaagaccgcatggatgagtccaaacagttctacgccattgaagacaacggtcaacgcgtgcttgccgatgccgtcaaaggcaaagacatcttcttgggcctctccggcgcgaacctgctgacgcctgaaatgctgaacaccatgaacgaaaaacccatcgtgttcgccatggccaacccgaatccggaaattctgccgccgctggcaaaagaaacccgtccggacgtggttatcggtaccggccgctccgacttcccgaaccaagtgaacaatgtattgtgcttcccgttcatcttccgtggcgcgttggatgtcggcgcgacgaccatcaacgaagaaatgaaacgcgcctgcgtgtatgctttggcggatttggcgatggaagaagtaaccgaagaagtggttgccgcttacggtaagaaatttgaattcggcgcggaatacctgattccgactccgttcgattcccgcctgctgccgcgcgttgctacggctgccgccaaagcagcgatggaaagcggagtggcaacccgtccgattgcagatttggaagcttacgctgccaagctgagcgaatggaagctgtaa

SEQ ID NO: 41443 - DNA, 1074 bp, Neisseria meningitidis; identical to SEQ ID NO: 39216

SEQ ID NO: 41444 - DNA, 294 bp, Neisseria meningitidis
atgccgacaaaggctatgacagaacatctggaagagcgtcagttgttagacggtattatgcgcaaagcctgccgcaaccgtccgctggcggaagcgcaaaccaaacgcaaccgatatttgtcgaagacccgttatgtggtcgaacaaagctttggtacgctgcaccgtaaattccgctatgcccgggcagcctatttcggactgattaaagtgagtgcgcaaagccatctgaaggcgatgtgtttgaacctgttgaaagcgcccaacaggttaagtgcgcctgttgccgcctaa

SEQ ID NO: 41445 - DNA, 1056 bp, Neisseria meningitidis
atgatgaaaatcaaagccctgatgattgccgccgcattgctggcagcagccgatgtccacgccgcaccgcaaaaggcaaaaaccgcatccgccaaagttgccaaagttgccaaagttgccaaagttgccaaagttgccaaagttgccaaagttgccaaagttgccgccacggcgcaaaaagaagccgcacccgcacaacagcagggcggtatccgcttttcagacggcattgccgccgttgccgacaacgaagtcatcacgcgccgccggcttgccgaagccgttgccgaagccaaagccaacctgcccaaagaggcgcagataagcgaatccgagctgtcccgacaggtgctgatgcagcttgtcaaccaatccctgattgtacaggcgggcaaacgccgcaacattcaagcaagcgaagcggaaatcgatgccgtcgtcgcaaaaaattccgccctcaaaaacctcagccccgcccaacgccgcgattttgccgacaacatcattgccgaaaaagtccgccagcaggcagtgatgcagaacagccgagtgagcgaagctgaaatcgatgccttcctcgagcaggcgcaaaaacaaggcatcaccctgcccgaaggcgcaccgttgcgccaataccgcgcccaacacatcctgattaaagccgacagcgaaaacgctgccgtcggcgcggaaagcaccatccgcaaaatctacggagaggcccgcagcggcacagacttttccagcctggcgcgccaatattcgcaagacgcgagcgcgggcaacggcggagatttgggctggtttgccgacggcgtgatggttcccgcctttgaagaagccgtccacgcgctcaaacccggacaggtcggcgcgcccgtccgcacccaattcggctggcatatcatcaaattgaacgaagtgcgcgatgccggcacacctcaggaacgtatccgcaattccgtgcggcaatacatcttccaacaaaaagccgaacaggcaaccgtcaacctgttgcgtgacctgcattccggcgcgtatgtcgacatccgctaa

SEQ ID NO: 41446 - DNA, 678 bp, Neisseria meningitidis
atgcaagccgatttcaaccgccccgtcctcgccgtcgataccggaacttcctatttgtcgctcgcgctgcgcgccgacggcgaaacccgcctgttccatcaagaggccggcagccgccaatccgaactgatcctgccggaaatccgcactctattccgaaatgcgggcattaccgccgccgatttgggggcgattgtttatacgaaaggtcccggcgcgtttacgggactgcgtatcggcatcggcgtggcgcaaggtttggcaacgccgtttgatacccccttaatcggcataccctcactcgatgccgccgcctcgatgccgccgccgcaaagctgcatactcgccgctgcggacgcgcgtatgggcgaagtgttttatgcgtggttcgacacgctgaaccgccgccgtttgagcgattatcaggtcgggcgggcggcagacatccggctgccggagggatgtgccttttcagacggcataggcagcgcgttcgcgttggaagaaacgccgccgttttcaggcaaacccgatatgccgaccgccgccgacttcctcaatctggcggcggaaggcggttttcccgccgtcgctgctgcacactccgaactgctctacgtccgcaacaaaatcgccctaaccgccaaagaacaggcggaacggaaagcccgaacatga

SEQ ID NO: 41447 - DNA, 663 bp, Neisseria meningitidis
atgaatttgaaattagtgtttgaatcgggcgatcccgtcctgatcggtgtgtttgtgttgatgctgttgatgagtatcgtaacgtggtgtttggttgtcttgcgctgcatcaagctgtatcgggcgcgcaaagggaatgccgccgtcaaacggcatatgcgcgatactttgtcgctgaacgacgcggtcgaaaaagtgcgcgccgtcgatgcgcctttgtccaaactggcgcaagaggcattgcagtcttaccgcaactaccgccgaaacgaagcgtccgaactggcgcaggctttgccgttgaacgagtatttggtcattcaaatccgcaacagtatggcgcagattatgcgccggtttgattacgggatgaccgcgcttgcctccatcggcgcgaccgcgccgtttatcgggttgttcggcacggtttgggggatttaccacgccctgatcaatatcgggcaaagcgggcagatgagtattgcggcggttgccggcccgattggcgaggcactggtggcgacggcggcgggtttgttcgtggcgattccggcggtgttggcatacaacttcctcaatcgcggcacaaaaatactgacccaggatttggatgcgatggcgcacgatttgcacgtccgcctgcttaatcaaaaggatagctga

SEQ ID NO: 41448 - DNA, 738 bp, Neisseria meningitidis
atgggcggacagaaaacgcatttcgggttcagcacggtcaacgaagatgagaaagccggaaaagtggcggaagtgttccactccgtcgccaaaaactacgacattatgaacgatgtgatgtcggcagggctgcacagggtgtggaagcatttcaccatcaacacggcgcacctgaaaaaaggcgataaagtgttggacattgcgggcggtacgggcgatttgtcccgagggtgggcgaaacgcgtcggcaaggaaggcgaggtttggctgaccgatattaattcttctatgctgaccgtcgggcgcgaccgtcttttgaacgaaggcatgattttgcccgtgtcgcttgccgatgcggaaaaactgcctttccctgacaattatttcaacttggtttccgtggcgttcggcttgcggaatatgacgcataaagatgccgcgctgaaagagatgtaccgtgttttgaaacccggcgggacattgctggtattggagttttccaaaatctacaagccactcgaaggcgcgtatgatttctattcgttcaagctgctgccggcgatgggcaggctgattgcgaaagatgcggagagttaccagtatcttgccgaatccatccgtatgcaccccgatcaggaaactttaaagcaaatgatgctggatgccggatttgacagtgtggactatcataatatgagtgcggggatcgttgcgctgcataagggcgtgaaattttaa

SEQ ID NO: 41449 - DNA, 351 bp, Neisseria meningitidis
gtgttggacggtgtttttaccgttggggcgttaatggcgtttatgtcctacaaaagtcagtttgagagtaaagcagggtcattgattgaccagtttgtgcaaatcaaaatgctaggattgcacgctgaacgtttggcggatattgtgctagaagaaacagaaaacgagcagaacaatgatttcaggctgcctgaaaatttagaacactttgatattcaaatagaaaatgtttcttttcgctatgctgaaaatgaaccatacattttgcaagattttagtttaatcatcaaacagggaacagcaaaaatccccgctgcaacggggatttttgttcggctctcgcctgtgtga

SEQ ID NO: 41450 - DNA, 1170 bp, Neisseria meningitidis
atgacagcacataaaatcctgcccgtcctactttccatcatcttaggcgtttctcacgcaacggccgcatcgcccgcgcccaacagaccgacggtacacgccgcccccacgctccaaacacccgaaaccctcacagcggcacacatcgttatcgaccttcaaagcagacagactttatccgccaaaaacatcaatacccctgtcgaaccggcggcactaacccaactgatgaccgcatatttagttttcaaaaacatgaaatcgggaaatatccaatctgaagaaaacttaaaaatacccgaatccgcatgggcttcagaaggaagcagaatgtttgtacgtcccggcgatacggtcggcaccgacaaactcttaaaaggcatgattgccctatccgcaaacgatgccgccctaacccttgccggccggctgggcaacggctcgattgaaaattttgtgcaacaaatgaacaaagaagcccgacgcttgggcatgaagaacactgtattcaaaaacccgacaggcttgagtagagaaggacaggtttccaccgccaaagacctcgccctgctgtctgaagcattgatgcgcgactttccggaatattacccgctgttttccatcaaatctttcaaattcaaaaatatagaacaaaacaaccgcaatatccttttatatagggacaacaatgtaaacggtctgaaagccggacacacagaaagcggcggctacaaccttgccgtgtcatacaccggaaacggcaggcatatccttgtcatcacactaggttcagaatcggcggaaatacgcgcctcagacaacagtaagctgctgaactgggcattgcaagccttcgatacgcccaaaatatatccgaaaggcaaaaccgttgcccaaatccaaatttccggaggcagcaaaaaaaccgtccgcgcaggcttcctcaaagaagcctacatcactctgccacataaggaagcgaaaatggcagaacagattttggaaaccatacagccgattcccgccccagtaaaaaaagggcaaattttaggaaaaatcaaaatcagacaaaacggatacaccattgccgaaaaagaaatcgtcgcactggaaaatgtaaaaaaaagaagccggtggcaaaggctttgggcgtgtctgacagggcagtaa

SEQ ID NO: 41451 - DNA, 1239 bp, Neisseria meningitidis
atggctttttatgcttttaaggcgatgcgtgcggccgcgttggctgccgccgttgcattggtactgtcgtcttgcggtaaaggcggagacgcggcgcagggcgggcagcctgctggtcgggaagcccctgcgcccgtcgtcggtgtcgtaaccgtccatccgcaaaccgtcgcgttgaccgtcgagttgccggggcgtttggaatcgctgcgtaccgccgatgtccgtgcgcaagttggcggcattatccaaaaacgcctgttccaagaaggcagttatgtccgtgccggacagccgctgtatcagatcgacagttccacttatgaagcaaatctggaaagcgcgcgcgcgcaactggcaacggctcaggcaacgcttgccaaagcggatgcggatttggcgcgatacaagcctttggttgccgccgaagccgtcagccggcaggaatacgatgctgcggtaacggcgaaacgttctgccgaggcaggtgtcaaagcagcacaggcggcgatcaaatctgccggcatcaatctgaaccgttcgcgcattaccgcgccgatttccggctttatcggtcagtccaaagtttccgaaggtacgctgttgaatgcgggcgatacgaccgtgctggcaaccatccgccaaaccaatccgatgtatgtgaacgttacccagtctgcatccgaagtgatgaaattgcgccgtcagatagccgaaggcaaactgctggcggcggatggtgtgattgcggtcggcatcaaatttgacgacggcacagtttaccctgaaaaaggccgcctgctgtttgccgatccgaccgtcaacgaatcgaccggtcagattaccctgcgcgccgccgtaccgaacgatcagaatatcctgatgcccggcctgtatgtgcgcgtgctgatggaccaagtggcggtggataacgcatttgttgtgccgcagcaggcggtaacgcgcggtgcgaaagataccgtgatgattgtgaatgcccaaggcggtatggaaccccgcgaggtaacggttgcgcaacagcagggtacgaattggattgttacgtcgggtctgaaggacggggacaaggtggttgtggaaggcatcagtatcgccagtataacgggtgcgaaaaaggtaacgcccaaagaatgggcgccgtctgaaaaccaagccgccgcgcctcaatccggcgttcagacggcatctgaagccaaaactgcttctgaagcggaataa

SEQ ID NO: 41452 - DNA, 111 bp, Neisseria meningitidis; identical to SEQ ID NO: 40033

SEQ ID NO: 41453 - DNA, 225 bp, Neisseria meningitidis
atgaacagcgaaactttagacgtaaccggattgaaatgccctttgccgattttgcgggcgaaaaaggctttggcgcaaatgcagcagggcgacgtgttgaccgttctggcaaccgacggcggcgcaccgggggattttgaggctttttgccgccaaaccggtcatgtgctgttggatgcttccgaacaggacggcgtgttcacgctggtcgtccaacacaaataa

SEQ ID NO: 41454 - DNA, 1053 bp, Neisseria meningitidis
atgacgcttgaagaacaacaagccaaagaagcattggacggcattatcaaaaaatcccgtgtccatctttataaacccattcaaattgcagaaattttatatcatgaccgttgtataaaacagttggattttttaaatttagatacttaccgcaaccaatctaaacgctggagggatgaaatctgccgtcggtttttaggacggatttctacttcatctgcaaaattccaagataatctgtttgaaaaaaatgcaatgccgcctgaaaaactagcggtattgggaacattaaacagacagttggacggcggggtagaatcgtacatttataaacagtttttcaatcgtttttcccaaatgagcgaagcattggcttatgtcggcaatacagacagatactccttccaactgtctgaatttctaaatttattttggctcgagccgggattgaaaagaagtatagacaagatatatgaaatcgttgtttatgcattatttgatgcattggtttcagaattaggtataacggtttcgattgattttcctaaggaaaacctgtttttatgggaggaatatcaagattttgccgaaaaaattgtctctattccccaaaatgggcatttaaaacttcctgcaaaaatccatcgtgtaggcgtaaccaatgctgctgatagagggttggatatgtggtctaacttcggattggctatacaagtcaaacatctctctttagacgaagagttggcagaagatattgtatcctccattagcgcagatagaattgtcattgtctgcaaaaaggcagaacaatcggtgattgtttcattactgacgcaaataggctggaaaagccgaattcaaaatatcgtaaccgaggatgatttgatacgttggtacgaaaaagcattgagaggccaatatccgattgcagaagcgttgttggaaaatattaaaactgaaattatgcgtgaatttcctgccgttaatgaagccaatgaatttttagatttcgcccaaagtcgcggatatgacattactgttactcatttctaa

SEQ ID NO: 41455 - DNA, 753 bp, Neisseria meningitidis
atgaccgacatccttattgacaacaccgccaccgaaaccgtccgcaccctgatacgggcattcccccttgtgcccgtttcccaaccgcccgaacaaggcagttacctccttgccgaacacgataccgtcagcctcaggcttgtcggggaaaaaagcagcgtcatcgtcgattttgcctccggcgcggcacaataccggcgcacaaaaggcgggggcgaactcatcgccaaagccgtcaaccacaccgcgcaccccaccgtttgggacgcaaccgcaggattggggcgcgacagcttcgtcctcgcctcgctcgggctggccgttaccgccttcgagcaacatcccgccgtcgcctgcctgctttcagacggcatccgccgcgccctcctcaatcccgaaacgcaagacaccgccgcgcgcatcaacctccatttcggcaacgccgcagtacaaatgcccgcccttgttcaaacacaaggcaaacccgacatcgtctatctcgaccccatgtatcccgaacgccgcaaaagtgccgccgttaaaaaagaaatgacctacttccaccggctcgtcggcgaagcgcaagatgaagcggcactcctccataccgccagacagactgcaaaaaaacgcgtcgtcgtcaaacgcccccgcctcggcgaacaccttgccggacaagcccctgcctaccaatacaccggcaaaagcacccgcttcgacgtttacctgccctacgggacgggcaagggataa

SEQ ID NO: 41456 - DNA, 504 bp, Neisseria meningitidis
atgaacacccttcaaaaaggttttacccttatcgagctgatgattgtgattgccatcgtcggcattttggcggcagtcgcccttcctgcttatcaagactacacagcccgcgcacaagtttccgaagccattcttttggctgaaggtcaaaaatcagccgtcaccgagtattacctgaatcacggcgaatggccatccgacaatagtgccgccggcgtggcatcttcttcaacaatcaaaggaaaatatgttaaggaagttacagtcgcaaacggcgtcgttaccgcagaaatgaaatcaagcggcgtaaacaaagaaatcaaagacaaaaaactctccctgtgggccaagcgtcaagacggttcggtaaaatggttctgcggacagccggttacgcgcaccgccgccgacagcgacgacgtcgccgccgccaccgacgccaacggcaagatcgacaccaagcacctgccgtcaacctgccgcgacgcttcatctgccagctaa

SEQ ID NO: 41457 - DNA, 1050 bp, Neisseria meningitidis
atgtccaaacagcccaccagcaaacgccaatggcgcgacggcgcagccccgtctgccaagaaaaccgccaaaccgttcaaaagcaaagcccgtcccaaagacgaaacggacaaaaccgccgcccaagcttacggacaaaaagcttcagacggcatcaaacctcaaaacctccccaaacagcgcgccgccaaagccaaaaaactcgtcgtccgcaatcccaaccaaaaaattatggaacacgcgcgcgatttaaaagaacgccgcagcgacctatcgcgcatggaacccgaacgcctgcaaaaagtgcttgccgcgtccggcgtcggctcgcgccgcgaaatggaagaatggatcaacaacggctgggtaacggtcaacggcaaaaccgcgcaactgggcgacaaagtcacccccgacgaccacgttaccgtcaaaggcagcatcatcaagctcaaatgggccgaccgcctgccgcgcatcatcctgtattacaaacaagaaggcgaaatcgtttcccgcgacgacccgcaaggcagggtcagcatcttcgaccgcctgccgcaggccgccagcagccgctgggtcgccatcggacgcttggacatcaacaccagcggacttctgattctcaccacctccggcgaactcgtccaacgtttcgcccaccccagcttcgaagtcgaacgcgaatacgccgtgcgcgtactgggcgggctgaccggcgaacaaatgcgcgtcctcaccgaagaaggcgtgatgctcgaagacggcttggcaaaagtcgaacgcatccgcgaacaaggcggcgaaggcgcgaacaaatggtacaacgtcgtgattaaagaaggccgcaaccgcgaagtgcgccgcatttttgaaagccaagggctcaccgtcagccgcctcgtgcgcgtcggcttcggccccatcggactgcccaaccgcctcaaacgcggacagttctacgaactcaaccccgccgaagtcgccaacatcctcaaatgggcggaaatgctgctgccgggcgaacgccgccgcaaaaaagcctaa

SEQ ID NO: 41458 - DNA, 1635 bp, Neisseria meningitidis
atggcagcaaaagacgtacagttcggcaatgaagtccgccaaaaaatggtaaacggcgtgaacattttggcaaacgccgtgcgcgtaaccttgggccccaaaggccgcaacgtagtcgttgaccgcgctttcggcggcccgcacatcaccaaagacggcgtaaccgtcgccaaagaaatcgaactgaaagacaagtttgaaaatatgggcgcgcaaatggtgaaagaagtcgcgtccaaaaccaacgacgtggcgggcgacggtacgactaccgccaccgtattggcacaatccatcgttgccgaaggcatgaaatacgttaccgccggtatgaacccgaccgacctgaaacgcggtatcgacaaagccgttgccgctttggttgaagagctaaaaaacatcgccaaaccttgcgacacttccaaagaaatcgcccaagtcggctcgatttccgccaactctgacgaacaagtcggcgcgattatcgccgaagcgatggaaaaagtcggcaaagaaggcgtgattaccgttgaagacggcaaatctttggaaaacgagctggacgtggttgaaggtatgcagttcgaccgcggctacctgtctccttacttcatcaacgacgctgaaaaacaaatcgctgctttggacaatccgtttgtattgttgttcgacaaaaaaatcagcaatatccgcgatttgttgcctgttttggaacaagtggccaaagccagccgcccgctcttgattatcgctgaagacgtggaaggcgaagccttggcgactttggtggtgaacaacatccgcggcatcctgaaaaccgtggccgtgaaagcaccgggctttggcgaccgccgcaaagccatgttgcaagacatcgctatcctgaccggcggcaccgtgattgccgaagaagtcggcttgtctctggaaaaagcgactttggacgacttgggtcaagccaaacgcatcgaaatcggtaaagaaaacaccaccatcatcgacggcttcggcgacgcagcccaaatcgaagcgcgtgttgccgaaatccgccaacaaatcgaaaccgcaaccagcgaatacgacaaagaaaaactgcaagagcgcgttgctaaattggcaggcggcgtggcagtgatcaaagtcggtgcggcgaccgaagtcgaaatgaaagagaaaaaagaccgcgtggaagacgcgctgcacgctacccgtgccgccgttgaagaaggcgtggttgcaggcggcggcgtagccctgttgcgcgcccgtgctgctttggaaaacctgcacaccggcaatgccgaccaagacgcaggcgtacaaatcgtcttgcgtgccgttgagtctccgctgcgccaaatcgttgccaacgcaggcggcgaacctagcgtggtcgtcaacaaagtgttggaaggcaaaggcaactacggttacaacgctggcagcggcgaatacggcgacatgatcgaaatgggcgtactcgaccctgccaaagtaacccgttccgcgctgcaacacgctgcgtctatcgccggtctgatgttgaccacagactgcatgatcgctgaaatccctgaagaaaaacctgctatgcctgatatgggcggcatgggtggtatgggcggcatgatgtaa

SEQ ID NO: 41459 - DNA, 729 bp, Neisseria meningitidis
atgcttttaggtgtcaacatcgaccacatcgccaccgtccgcaacgcgcgcggcacgacttatcccagccctgtggaagcggcactggttgccgaaacgcacggtgccgacctgattaccatgcacctgcgcgaagaccgccgccacatcaaagacgcggacgtgttcgccgtcaaaaacgccatccgcacgcgcctgaaccttgaaatggcgttgacggaagaaatgctcgaaaacgcgcttaaagtgatgccggaagacgtgtgcatcgtgccggaaaaacgtcaggaaatcacgaccgaaggcggtttggacgtattggcgcaacaagacaaaattgccgagttcaccaaaatcctgaccgacgcaggcatccgcgtgtctttgtttatcgatgccgacgacaggcaaatccaagccgcctatgatgtcggcgcgcccgttgtcgagctgcacaccggcgcgtatgccgacgcgcgcagccacgccgaacaaatcaggcagttcgagcgcatccaaaacggcgcacatttcgccggagatttgggcttggtcgtcaacgccggacacggactgaccatacacaacgttacccccatcgcccaaatcctcgccatccgcgaactgaacatcgggcattcgctgattgcccaagccctcttcctcggactgcccgaagccgtgcgccaaatgaaggaggcgatgttcagggcaaggctgctgccgtaa

SEQ ID NO: 41460 - DNA, 240 bp, Neisseria meningitidis
atgattctcaacatacgcaaaatgggaaactcgcaaggcgtgattctgcccaaatcattattgggtcaaataggggcagtggacagcttggctgttacagttgaaaagggcaatattattttaagctgtcctaccgttcgcaggggatgggcagaagctgccgcaatgcttgtcgaaaccgagcaggagcattttttttccgaaattgaaaacgaagcggataaagaatggatatggtag

SEQ ID NO: 41461 - DNA, 702 bp, Neisseria meningitidis
atgtctttgaaaacagtaaccgttatcggcgcaatggaacaagaaatcgagcttttgcgcgagatgatggaaaatgtcaaagccgtctctttcggcaagtttgccgcctatgaaggcgaattagcgggaaaacgcatggtgcttgcattgagcggcatcggcaaggtcaacgcggcggttgcaacagcttggcttatccatcaattcgcaccggactgcgtcatcaacaccggcagcgcgggcggtttgggcaagggtttgaaagtcggcgatgtcgtggtcggcacagaaatcgcgcaccacgatgtcgatgtaaccgcattcggctatgtttggggacaagtgccgcaactgccggcaaggttcgcttcagacggcatattgattgaaacggcaaaacgggcggcgcggacgtttgaaggcgcggcggtagaacaagggctgattgtcagcggcgaccgcttcgtccacagcagcgaaggcgtggcggaaatccgcaagcacttccccgaagttaaggcggtagaaatggaagcggcggcaatcgcccaaacctgtcatcagttggaaacgcctttcgtcatcatccgcgcggtttccgattcggcagacgaaaaggcagacatcagctttgacgagttcttgaaaacggcggcggcaaattccgcaaaaatggtggcagaaatcgtcaaatctttataa

SEQ ID NO: 41462 - DNA, 447 bp, Neisseria meningitidis
atgtcggggatggcgggacggcatccgtacggcgtccggtcgggtttgcggaggaacggcttgaaactttgggatattcattttagaatgacccgttttatcgtcgcaagatgcggtttattgtttgcaacccttaaaggaaaaaccatgaagaaaatgttcgtgctgttctgtatgctgttctcctgcgccttctcccttgcggcggtaaacatcaatgcggcttcgctgcaggagttggaggcgctgccgggcataggtccggcgaaggcgaaggccattgcggaataccgcgcgcaaaacggtgcgttcaagtctgtggacgatttgaccaaggttaagggcatcggccctgcggtattggcgaagctgaaggaccaggcttccgtcggcgcgcccgcaccaaaaggcccagccaaaccagtgctgcccgcggataaaaaatag

SEQ ID NO: 41463 - DNA, 222 bp, Neisseria meningitidis
atgagacaagacaacagaccgcgcaaaacgccatacgcaggggcggcggttttcctgattttcggtttcgcctttgcaggcatgacgcaccacgcccccgaaaaccacacggcggatattccgccccctgttgagacgcagccgcaaacgcccgcaatatgggaaaccgacccgatggctggtgttgtgttagagcctgtatcggaggaggcggaaaaatga

SEQ ID NO: 41464 - DNA, 654 bp, Neisseria meningitidis
atgttttccgtaccgcgttcctttttgccgggcgttttcgtacttgccgcgcttgccgcctgcaaacctcaagacaacagtgcggcgcaagccgcttcttcaagtgcatccgcgtcggctgcggaaaatgcggcaaagccgcaaacgcgcggtacggatatgcgtaaggaagacatcggcggcgatttcacgctgaccgacggcgaaggcaagcctttcagcctgagcgatttgaaaggcaaggtcgtgattctgtctttcggctttacgcactgtcccgatgtctgcccgacagagcttttgacgtacagtgacacgttgaagcagttgggcgggcaggctaaggacgtgaaagtggtgttcgtcagcatcgatccggaacgcgacacgcctgaaatcatcggcaagtatgccaaacagttcaatccggactttatcggtctgacggcaacgggcggccaaaacctgccggtcatcaagcagcaataccgcgtggtttctgccaaagtcaatcaaaaagacgacagcgaaaactatttggtcgaccactcttccggtgcgtatctcatcgacaaaaacggtgaggttgccattttctcgccttacggaagcgagccggaaacgattgctgccgatgtaaggaccctgctctga

SEQ ID NO: 41465 - DNA, 1002 bp, Neisseria meningitidis; identical to SEQ ID NO: 41243

SEQ ID NO: 41466 - DNA, 1725 bp, Neisseria meningitidis
gtgaaaccgctgcgcagactgacaaacctccttgccgcctgcgccgtagcggcggccgcactcatacagcccgccctcgcggcggacttggcgcaagacccgttcattaccgataacgcccaacggcagcactacgaacccggcggcaaataccacctcttcggcgacccgcgcggcagcgtctccgaccgcaccggtcaaatcaacgtcatccaagactatacccaccggatgggcaacctgctcatccagcaggcaaacatcaacggcacaatcggctaccacacccgcttttcgggacacggacacgaagaacacgccccctttgacaaccatgccagccgcagcgcaagcaaagaacaaggcaacgttgacgaaggctttaccgtgtaccggctcaactgggaaggacacgagcaccatcccgccgatgcctacgacggcccgaagggcggcaattaccccaaacctacgggcgcacgcgacgaatacacctatcacgtcaacggcacagcacgcagcatcaaactcaatccgaccgacacccgcagcatccggcaacgcatatccgacaattacagcaacctcggcagcaatttctccgaccgcgccgatgaagccaacagaaaaatgttcgagcacaatgccaagctcgaccgctggggcaacagcatggagtttatcaacggcgtcgccgccggcgcgctcaacccctttatcagcgcgggcgaagccttgggcataggcgacatactgtacggaacgcgctatgccatagacaaagccgcaatgcgcaacatcgcccccttacccgccgagggcaaattcgccgccatcggcggcttgggcagcgtggcgggctttgaaaagaatacgcgtgaagccgttgaccggtggatacaggaaaaccccaatgccgccgaaaccgtcgaagccctggtcaacgtcctgccgtttgccaaagtcaaaaacctgacaaaggcggcaaaaccggggaaggctgcggttagtggggatttttctaaatcctacacctgctccttccacggcagcaccttggtcaaaacggcagacggctacaaagccattgcccatattcaagccggcgaccgcgtcttcgccaaagatgaaaccagtggaaaaactggatacaaacctgttaccgcccgatacggcaatccgtatcgggaaaccgtttacattgaaatttcagacggcatcggtaacagccaaaccctgatttccaacagcatccatccgttttacagtcaaggaaaatggatacaggcaggtcgtctgaaaaaaggcgacaccctgctttccgaaagcggtgcaaaacagacagttcaaaacattaccctcaaacagcagccgctcaaagcctacaatctgaccgttgccgattggcatacttacttcgtcaagggtaatcaggcggaaacggaaggggtttgggttcataattcttgtcctcccaaaagagctcccgaataccatgcaggaactgtatccgaatctaattttttaaatgtagctgagaaatggctaggagaaaactataagtcatatccaaatggtcgatatgtatcacaagatggaatgcgacaggtacgatatggtcatcatgaaacaaattcatctacacatcatggtcattttgaatcatatgacaaacccaatggacgtgtaatagaaaatagtgtagtaacaattattcaggattaa

SEQ ID NO: 41467 - DNA, 828 bp, Neisseria meningitidis
atgaaactgattgaacaacatcaaatttttggcggttcgcaacaagtttgggcgcatcatgcccaaacgctgcaatgcgaaatgaaatttgccgtctatttgccaaataatccagaaaatcgaccgcttggtgtgatttattggctttccggcttgacgtgtacggaacaaaatttcattaccaaatcaggctttcagcgttatgcggcagaacatcaagtaattgtggtggcccccgataccagccctcgcggagagcaagtgccgaacgatgatgcttacgatttaggacagggtgcaggcttttatttgaatgcgaccgaacagccttgggcggcgaattatcaaatgtatgattacattttgaacgagctgccccgtctgattgagaaacactttcctaccaacggcaaacgttccattatgggacattcaatgggcggacacggcgcattggtattggcgctgcggaatcaggaacgttatcaaagtgtttctgccttttcgcctattttatcgccaagcctcgtgccgtggggagaaaaagcctttactgcttatttagggaaagaccgtgaaaaatggcagcaatatgatgctaactcactcattcaacaaggctataaagtgcaaggtatgcgcatcgatcaaggcttggaagatgagtttttgccgacacaattgcgtaccgaagattttatcgaaacctgccgtgcggcaaaccagccggtcgatgtgcgtttccataaaggctacgatcacagctattacttcatcgccagttttattggcgagcatattgcttatcacgccgcgtttttgaagtaa

SEQ ID NO: 41468 - DNA, 267 bp, Neisseria meningitidis; identical to SEQ ID NO: 37278

SEQ ID NO: 41469 - DNA, 354 bp, Neisseria meningitidis
atgaatgaacacaacctgttaattttctgtttaaaagacaatgtttcaattagtgaatatactgaaatggttgattgggcttataaaaacattcaatctgaaacagttgtagaaattacggaaaatcaaattattgaatatcaaaatcgtggattatgggggcttgtttctgaaattaccgataattggttatttggaccaagtgagggggattggctaatagataaggaaagtattttggctgtaaaagaaaaattacaaaattcagatttttctacagagcccttagtgaaaaatattattcatgtacttgaatatgctataaagaatgaaaaaacagtaatttttcatttt

SEQ ID NO: 41470 - DNA, 1128 bp, Neisseria meningitidis
ttgttaattcactatatcgacatcgccaaacgaaacttcgtcatcgccgtttcgtctttgtctaaaaccaaaaccgaaaccaacaaccccaaaggtatcgcccatactatcgaataccttaaaaaacacaaggtcgccctcgtcgtgacggaaagtaccggcggtctcgaaatccccgccgccaaagccatccgccgagcaggcatagccgtgattatcgccaacccgcgtcagacgcatcagtttgcccaatcgcagccgctgaccaaaaccgacgccaaagatgccaaaatgcccgccttcttcgcacagatgacggcacagaaagaagattcgcaaaccatgccctaccaaccgcccaccgaagcggaagaagtgttggaagccttggttaaccgccgcaaccaatcggcggatatgcggactgccgagaaaaaccgtctgcatcaggttcacgaaacgcaagtcggaagcgtcaaacaactgattgcccattttgaccggctgattgacgaattggacaaacaaatcgacgaccacacccacacgcattttgacggcaaagcccaagtggcagaacaaatcaaaggcatcggttcgataacgacggctacgctgatggcgatgttgcccgaattggggcggctgagccacaaacggatagcgagtctggtcggcattgccccgcacccgagggagagcgaggaaaccaaattcaaagccgctgctttggcggaaggtctgcggtgcgtaaggcactgtatatggctaccgtggcagcgacacgttttgaaccgcttattcgggatttctaccaacgcctgctgtccaagggtaagccgtataaggttgctgttgcggcatgtatgcgcaaactgctggagacctttgcaaaattcctttccctcccgacagccgaaacccaaacacaggttttcagctgttttcagctgttttcgccccaaatatctcctaattctacccaaatacccccttaatcctgcccggatacccgataatcaggcatccgggccgccttttaggcgcaaacaggcacacttagcctgttggcggctttcaacaggttcaaacacatcgccttcagatggctttgcgcactcactttaa

SEQ ID NO: 41471 - DNA, 1137 bp, Neisseria meningitidis
atggaaatgaaacaaaccgattcaagcatcaaatctcgtgcggcggtggcattcgcccctaaccaacccttacaaattgtggaaatcgacgtggaaatgccgcgtaaaggcgaggtgttaatccgcaatacccacacgggcgtgtgccatactgatgcgtttacgttatcaggaagcgatcctgaaggcgtattccctgtggtgcttggacacgaaggtgcgggtgtggtcgttgctgtgggcgaaggtgtgtcaagcgtaaaaccgggtgatcacgtgattccgctttacaccgccgaatgtggcgaatgtgagttttgttgttcaggtaaaaccaacttgtgcgtctcagtgcgtgatacacaaggtaaaggcttaatgccggacggcacgacgcgtttttcttatcaaggtcagccgatttatcactatatgggctgttcgactttcagtgaatactccgttgttgccgaagtttcactggcgaaaatcaaccctgaagccaaccatgaacaagtatgtttgctcggctgcggcgttaccacaggtattggtgcggtacataatacggcaaaagtgcaagaaggcgactctgttgccgtgtttggtttgggggcgattggtttggcggtggtgcaaggtgcgcgtcaagccaaagccggccgcattatcgccattgataccaatccatcaaaatttgagttggcaaaacagttcggtgcaacggattgtttgaacccgaacgattacgataaaccaattaaagatgtgttgttagacatcaacaaatggggcattgaccatacctttgaatgtatcggcaatgtaaacgtaatgcgtcaagcattagaaagtgcacatcgtggttggggtcaatccattatcatcggcgtagcaggtgcaggacaagaaatttcaacgcgtccgttccagttggtaacaggtcgtgtttggaaaggttcagcatttggcggtgtgaaaggtcgctctgaactgccgaaaatggtggaagattcaatgaaaggcgacattgagttagaaccgtttgtaacccacacaatgacactcgatcaaatcaataaagcctttgacttaatgcacgaaggtaaatcgatccgcgccgttattcactactaa

SEQ ID NO: 41472 - DNA, 2145 bp, Neisseria meningitidis
atgaaaaccccactcctcaagcctctgctcattacctcgcttcccgttttcgccagtgtttttaccgccgcctccatcgtctggcagctaggcgaacccaagctcgccatgcccttcgtactcggcatcatcgccggcggccttgtcgatttggacaaccgcctgaccggacggctgaaaaacatcatcgccaccgtcgccctgtttaccctctcctcgctcacggcacaaagcaccctcggcacagggctgcccttcatcctcgccatgaccctgatgaccttcggctttaccattttaggcgcggtcgggctgaaataccgcaccttcgccttcggcgcactcgccgtcgccacctacaccacacttacctacacccccgaaacctactggctgaccaaccccttcatgattttatgcggcaccgtactgtacagcaccgccatcatcctgttccaaatcatcctgccccaccgccccgtccaagaaagcgtcgccaacgcctacgacgcactcggcggctacctcgaagctaaagccgactttttcgatcccgacgaagccgaatggataggcaaccgccacatcgacctcgccatgagcaacaccggcgtcatcaccgccttcaaccaatgccgttccgccctgttttaccgccttcgcggcaaacaccgccacccgcgcaccgccaaaatgctgcgttactactttgccgcccaagacatacacgaacgcatcagctccgcccacgtcgattatcaggaaatgtccgaaaaattcaaaaacaccgacatcatcttccgcatccaccgcctgctcgaaatgcagggacaagcctgccgcaacaccgcccaagccctgcgcgcaagcaaagactacgtttacagcaaacgcctcggccgcgccatcgaaggctgccgccaatcgctgcgcctcctttcagacagcaacgacagtcccgacatccgccacctgcgccgccttctcgacaacctcggcagcgtcgaccagcagttccgccaactccagcacaacggcctgcaggcagaaaacgaccgcatgggcgacacccgcatcgccgccctcgaaaccggcagcctcaaaaacacctggcaggcaatccgtcctcagctaaacctcgaatcaggcgtattccgccatgccgtccgcctgtccctcgtcgttgccgccgcctgcaccatcgtcgaagccctcaacctcggctactggatactactgaccgcccttttcgtctgccaacccaactacaccgccaccaaaagccgcgtccgccagcgcatcgccggcaccgtactcggcgtaatcgtcggctcgctcgtcccctactttaccccctccgtcgaaaccaagctttggatcgtcatcgccagtaccaccctctttttcatgacccgcacctacaaatacagcttctcgacatttttcatcaccattcaagccctgaccagcctctccctcgcagggttggacgtatacgccgccatgcccgtacgcatcatcgacaccattatcggcgcatcccttgcctgggcggcagtcagctacctatggccagactggaaatacctcacgctcgaacgcaccgccgcccttgccgtatgcagcaacggcgcctatctcgaaaaaatcgccgaacgcctcaaaagcggcgaaacggccgacgacgtcgaataccgcgccacccgccgccgcgcccacgaacacaccgccgccctcagcagcaccctttccgacatgagcagcgaacccgcaaaattcgccgacagcctgcaacccggctttaccctgctcaaaaccggctacgccctgaccggctacatctccgccctcggcgcataccgcagcgaaatgcacgaagaatgcagccccgactttaccgcacagttccacctcgccgccgaacacaccgcccacatcttccaacacctgcccgaaaccgaacccgacgactttcagacagcactgaatacactgcgcggcgaactcgacaccctccgcacccacagcagcggaacacaaagccacatcctcctccaacagctccaactcatcgcccggcagctcgaaccctactaccgcgcctaccgacaaattccgcacaggcagccccaaaacgcagcctga

SEQ ID NO: 41473 - DNA, 1854 bp, Neisseria meningitidis
atgaaccgttatcctttatggaaatatctgctgattgtgttcacgattgcggttgccgcagtgtattcgctgcccaacctattcggcgaaacacccgccgtgcaggtatcgaccaaccgacaagccatcatcatcaacgaacagactcaattcaaagtggatgccgcgctgaaaaacgcaggtattcagaccgacgggatgtttgttgtggacaattcactgaaagtgcgtttcaaagacacagaaacgcagcttaaagcgcgcgacgtcatcgaaaacactttgggcgaagggtatattaccgcgctcaacctgttggcggacagccccgaatggatggcgaaaatcaaagccaatccgatgtttttgggtttggacttgcgcggcggcgtgcatttcaccatgcaggtcgatatgaaagcggcgatgcagaaaacgtttgaacgttattcgggcgacatccgccgcgaactgcgccgcgaaaaaatccgcagcggcacggtgcgtcaggctggaaacagcctgaccgtccctttgcaggatgcaggtgatgtgcaaaaggcactgccgcagttgcgcaagctgtttcctgaagcaacgctgaattcagacggcagcaatatcgtcttgacgctttcggaagaggcggtcaataaagtgcgttccgatgcggtcaaacagaacatcactaccctgcacaaccgtgtgaacgagttgggcgtggccgaacccgtcatccagcagtcaggtgcagaccgtatcgtcgtgcagcttccgggcgttcaggatactgccaaggcaaaagacatcatcggccgtaccgcgactttggaattgcgtatggtggaggacgatcctgccaagttgcgcgaggcattggaaggcaacgtgccgagcggttatgagctgctttcaagcggcggagatcgtcccgaaactctgctaatcagcaaacaggtcgagctgacgggcgacaacatcaacgatgcgcaaccgagtttcgaccaaatgggcgcacctgccgtcagtctgagcttggacagcgcgggcggcagcattttcggcgaactgactgccgcaaatgtcggcaaacgcatggcgatggttttgatcgaccaaggaaaatccgaggttgtaaccgcgccggttatccgtactgccattacaggcggacgcgtggaaatttccggaagcatgacgacagccgaagccaatgatacgtctttgctgttgcgtgccggttctcttgccgcgccgatgcagattgtcgaagaacgtaccatcggtccgtctttgggtaaggagaacatcgaaaaaggcttccattcgactttatggggttttgccatcgttgctgcattcatggtggtttactatcgtctgatgggtttcttttctaccattgcattgagtgccaacatactgttcctaatcggtattttgtctgccatgcaggcaacgttgacgttaccgggtatggccgcgctggcgttgactttgggtatggcaatcgactccaacgtcttgattaacgaacgtatccgcgaagaattgcgtgccggcgtgccgccgcagcaggcaatcaatctcggtttccaacacgcatgggcgaccattgtcgattccaacctgacttcgctgattgccggtatcgcgcttttggtattcggttccggcccggtacgcggttttgcggtcgtacactgtttgggtattctgacttcgatgtattcctccgtcgtcgtattccgtgcgttggtcaatctgtggtacggacgcagacgcaaattgcagaatatttccatcggtgcggtatggaaacctgaagccgaaactgcggcaggtaaggagtaa

SEQ ID NO: 41474 - DNA, 198 bp, Neisseria meningitidis
atgagcgacccgattttagaagccttggcgcgtattgaaaacaagactgatcaaacgctgaaaaatcagaaagaaatgcaggcggaaattgcgcaaatccgccaagacacgaaacgcacggccattacattcggcgcactgggcggcggcgtgattacggtcggctgggaattgcttaaagcgaaaatgggactgtaa

SEQ ID NO: 41475 - DNA, 867 bp, Neisseria meningitidis
atgaaaggcatcatactggcaggcggcagcggcacgcgcctctaccccatcacgcgcggcgtatccaaacagctcctgcccgtgtacgacaaaccgatgatttattaccccttgtcggttttgatgctggcgggaatccgcgatattttggtgattaccgcgcctgaagacaacgcctctttcaaacgcctgcttggcgacggcagcgatttcggcatttccatcagttatgccgtgcaacccagtccggacggcttggcacaggcatttatcatcggcgaagaatttatcggcaacgacaatgtttgcttggttttgggcgacaatattttttacggtcagtcgtttacgcaaacattgaaacaggcggcagcgcaaacgcacggcgcaaccgtgtttgcttatcaggtcaaaaaccccgaacgtttcggcgtggttgaatttaacgaaaacttccgcgccgtttccatcgaagaaaaaccgcaacggcccaaatccgattgggcggtaaccggcttgtatttctacgacaaccgcgccgtcgagttcgccaaacagctcaaaccgtccgcacgcggcgaattggaaatttccgacctcaaccaaatgtatttggaagacggttcattgtccgtccaaatattaggacgcggtttcgcatggttggacaccggcacccacgagagcctgcacgaagccgcttcattcgtccaaaccgtgcaaaacatccaagacctgcacatcgcctgcctcgaagaaatcgcttggcgcaacggctggctgacgaaaaaagatgtggaaacacgggcaaagcccttagaaaaaaccgcctacgggcaatacctgctgcgcctgatcggcaaataa

SEQ ID NO: 41476 - DNA, 504 bp, Neisseria meningitidis
atggctttattgaatatcttgcaatatcccgacgagcgtctgcacacggtggcaaagcctgtcgaacaagtcgacgagcgcatccggaagctgattgccgatatgtttgaaacgatgtacgaatcgcgcggcatcgggctggcggcgacgcaggtcgatgtgcacgagcgcgtggtcgtgatggatttgaccgaagaccgcagcgaaccgcgcgtgttcatcaaccccgtcatcgttgaaaaagacggcgaaaccacttacgaagagggctgcctgtccgtgccgggcatttacgacaccgtaacccgcgccgaacgcgtcaaggtcgaggctttgaacgaaaaaggcgaaaagttcacgctggaggcggacggcttgctggcgatttgcgtgcagcacgagttggatcacctgatgggcatcgtgtttgtcgaacgcctgtcgcagctcaagcaggggcggattaagaccaagctgaaaaaacgtcagaaacatacgatttga

SEQ ID NO: 41477 - DNA, 696 bp, Neisseria meningitidis
atggctaaagtatctaaacgcttgaaagctcttcgctcttctgtggaagccaataaattatatgcaattgatgaagcaattgctttggtaaaaaaagcagcgactgctaaatttgacgagtctgttgacgtatctttcaacttgggcgttgatccgcgtaaatctgaccaagttatccgtggttcggtcgttctgcctaaaggcaccggtaagataacccgtgtggctgtatttactcaaggtgcaaatgcagaagctgctaaagaagctggtgcagatatcgtcggtttcgaagatttggctgctgaaatcaaagcaggcaatctgaactttgacgttgttattgcttctcccgatgcaatgcgtattgttggtcaattgggtaccatcttgggtcctcgtggtctgatgccaaaccctaaagtaggtacggttacccctaatgttgccgaagcagtaaaaaatgcaaaagcaggtcaagtgcagtaccgtaccgacaaggcaggtattgttcatgcaacgattggtcgtgcttcattcgctgaagctgatttgaaagagaactttgatgcgttgctggatgctatcgttaaagccaagcctgctgccgctaaaggtcagtatctgaaaaaagttgctgtgtctagcaccatgggtttgggtattcgcgttgatacatcaagcgtaaataactaa

SEQ ID NO: 41478 - DNA, 1008 bp, Neisseria meningitidis; identical to SEQ ID NO: 40719

SEQ ID NO: 41479 - DNA, 951 bp, Neisseria meningitidis
atgtcccaacaccgcaaactgattattttgggttccggccccgccggatacaccgccgccgtctatgccgcgcgtgccaatttaaaccccgtcattattacaggtatcgcgcaaggcgggcaactgatgaccaccaccgaagtggacaactggcctgccgatgccgacggcgtgcaagggccggaattgatggcgcggtttctcgcccacgccgaacgtttcggaacggaaatcatttttgaccaaatcaacgccgtcgatctgcaaaaacgcccgtttacactcaaaggcgatatgggcgagtacacttgcgatgccctgattgtcgcaacaggcgcgtccgccaaatacctcggtttgccgagtgaggaagcgtttgcaggaaaaggcgtttccgcttgtgccacctgcgacggtttcttctacaaaaaccaagatgttgccgtagttggcggcggcaatacggcagttgaagaggcactctaccttgccaatatcgccaaaaccgttaccctgatccaccgccgcagcgagttccgtgccgaaaaaatcatgatcgacaaactgatgaaacgcgtggaagagggcaaaatcatcctcaagctggaaagcaacctgcaagaagtactgggcgacgatcggggcgtaaacggcgcattattaaaaaacaacgacggttctgagcaacaaattgccgtcagcggcatttttatcgccatcgggcacaagccgaataccgatattttcaaaggtcagttggaaatggacgaagccggttacctgaaaaccaaaggcggcacggcggacaatgtcggcgcaaccaatatcgaaggcgtatgggcggcgggcgacgtaaaagaccatacctaccgtcaggcgattaccagcgcggcttccggctgtcaggcggctttggacgcggaacgctggctgggcagccaaaacatttga

SEQ ID NO: 41480 - DNA, 492 bp, Neisseria meningitidis
atgaattccctctttgtggacaatactgttttcattacacggctgaaagccgggcatatcggcaggttggttcaggcgttgtttgaggagtggcacggatttgaaccgtggtcttctgtggataagattcatgcctattacggcagatgtttgaaagatgacgaactgccgctggcttttgcggctgtggatgatttcggaaccctgttgggttcggctgcggtcaagcggcatgatatggaaagttttccacagtatgaatattggttgggtgatgtctttgttttacctgaatatcgcggaaaaggcattggcaggaggctggtcgcccactgcataggcgcagcgcgttcgctggggataaagttcttgtatctttatacgcctgatgtgcaaatattttatgaatcattcggctgggcggttgtcgggcgacatttccataacggtgaatgggttacggttatgcgtttggatatggataaggtttaa

SEQ ID NO: 41481 - DNA, 1245 bp, Neisseria meningitidis
atggaacagcagcaaagatacatcagcgtactggatatcggtacgtctaaagtcctcgcactgatcggggaagttcaagatgacgacaaaatcaacatcgtcggtttggggcaggctccttcacggggcttgcgcgcgggcatggtaaccaatatcgatgccaccgtccaagccatcaggcaggcggtcaatgatgccgagctgatggcggataccaaaattacccacgttaccacaggtatcgcaggcaaccacatccgcagtctcaattcgcaaggtgtggttaaaattaaagacggggaagtcacgcaggcagacatcgaccgcgccattgaaacggcaaaggcaatcaatatcccgcccgatcaaaaaattctcgatgccgtggttcaagactacattatcgacacccaacttggcgtgagggagcccatcggtatgagcggtgtgcgtctggatacgcgggtgcacatcattaccggtgcaagtacggcagtgcagaatgtccaaaaatgtatcgagcggtgcggtttgaaaagcgatcagatcatgcttcagccgttggcaagcgggcaggcggtgctgactgaagatgaaaaagacctcggcgtatgcgtcatcgacattggtggcggaacgaccgatattgccgtttatatgaacggtgccatccgccatacgtccgtcattccggccggtggtaatctgattaccaaagatttgtccaaatcgttgagaacacctctcgatgccgccgagtacattaaaatccattatggcgtggcatcatgcgatacggaaggcttgggtgagatgattgaagttccgggcgtgggtgaccggacatcgcgtcaggtttccagtaaggttttggcagcaatcatcagcgcacgtattcaggagatttttggcgtagtgctgggcgagctgcaaaaatcgggtttccccaaagaagtgctgaatgcgggtatcgttctgaccggcggtgtgtccatgatgaccgggattgtggaatttgccgaaaaaatcttcgatttgcctgtacgcaccggtgcgccccaagaaatgggcggtttgtccgaccgcgtccgcacaccgcgcttttctaccgccatcgggctgcttcatgcagcatgcaagctggaaggaaacttgccgcagccggaaaacggtgcagtgcaagagagggaagggggcggcggtttgttggcaagattgaaacggtggattgaaaacagcttctga

SEQ ID NO: 41482 - DNA, 618 bp, Neisseria meningitidis
atgaccttcccgccactcaaatccccgctcaaattctacgccgtcgtccccaccgccgattgggtggggcgcatggtcaaagcaggtgccgacacggtgcaactgcgctgcaaggccctgcacggcgatgaattgaaacgcgaaatcgcccgctgtgtcgccgcctgtcagggcagccatacgcagcttttcatcaatgaccactggcgcgaggcaatcgaagcaggcgcgtacggcgtgcatctcggacaagaagacatggacaccgccgaccttgccgccatcgccgccgccggtttgcgcttgggtttgagtacgcactccgttgccgaactcgaccgcgccctgtccgtacaccctagctacatcgccagcggcgcgattttcccgaccacgaccaagcaaatgcccaccgccccgcaaggcttggacaaactgtgcgagtatgtgaaacaggcaggcggcacgcccgtcgtcgccatcggcggtatcgacttgaacaacgcccgagccgtactcgccaccggcgtttcctcactcgccgccgtccgcgccgtaaccgaagcggcaaatcccgaagcggtggttaaagcgtttcaggctttgtgggatggataa

SEQ ID NO: 41483 - DNA, 1194 bp, Neisseria meningitidis
atgttcttcaagcacatcgaagccgcccccgccgatccgattctcggtttgggcgaagcgttcaaagccgaaacccgccccgaaaaagtcaacctcggcatcggcgtttataaagacgcatccggcgcgacacccctcgtcaaagccgtcaaagaagccgaaaaacgcctgttggaaagcgaaaccaccaaaaactacctcaccatcgacggcgttgccgactacaacgcgcaaacccaaatcctgctgttcggcaaagaccacgaaatcatcgccagccgtcgcgccaaaacagcgcaaagcctcggcggtacgggcgcattgcgtattgcggccgagtttgccaaacgccagttgaacgcgcaaaccatctggatttccaatccgacttggcccaaccacaacgccatcgccaaagcggtcggtatccaagacaaaccttatcgttactatgatgccgccaaacacggtttggattgggacggcatgattgaggacttgagccaagcgcaaaaaggcgacatcgtcctgctgcacggctgctgccacaatcctaccggcatcgaccctacgcccgaacaatgggaaactttggcaaaactttctgccgaaaaaggctggttgccgctgtttgactttgcctaccaaggcttcggcaatggtttggaagaagatgcctacggcttgcgcgtgttcttgaaacacaatacagaattgctgattgccagctcttattccaaaaacttcggtatgtacaacgagcgcgtcggcgcgttcactttggtggccgaagatgaagaaacagcagcccgcgcccacagccaagtcaaaaccatcatccgtaccttgtattccaacccggcttcacacggtgcgaacaccattgcgctggtgttgaaaaatgatgatttgaaagcacaatggattgccgaactcgatgaaatgcgcggccgcatcaaagccatgcgccaaaaatttgtcgggttgctcaaagccaaaggtgcaagccaaaactttgatttcattatcaaacaaaacggtatgttctctttcagcggcttgactcccgaacaagtcgaccgcctgaaaaacgagtttgccatttatgccgtccgctccggccgcatcaacgtcgccggcattaccgacgacaacatcgattatctgtgcgaaagcatcgtgaaagtcttgtaa

SEQ ID NO: 41484 - DNA, 486 bp, Neisseria meningitidis
atgacacaaatcggcatcatcatgggcagcaacagcgattggcccgttatgcggcaggcagcgcagtttcttgaagagttcggcgtagaatatgaggcgcgcgtcgtttccgcacaccgcactccggatttaatgttccaatacgccgaaaccgcacgggcgcgcggcatcaaagccatcatcgcgggtgcgggcggcgcggcgcatttacccggcatggttgccgccaagaccaccgtccccgttttgggcgtacccgtccccagcaaatacctgcgcggcgaagattcgcttttatcgattgtacaaatgcccaaaggcgtacccgtcgccacattcgccatcggcgaggcaggcgcggcaaatgccgcattgttcgccgtttccatgctggccaacgaaaaccccgaactggcgcaaaaactggcagacttccgagccaaacaggaacaggctgttttgagtatggaattggaacagatttaa

SEQ ID NO: 41485 - DNA, 1311 bp, Neisseria meningitidis
atgtacgctaaaaaaggcggtttgggactggttaaaagccgccgtttcgcacctcttttcgctacgcagtttctcggcgcgttcaacgacaatgtgttcaaaaccgcgctgtttgtgatgattgggttttacggtttggggcaaaacggcttcctgcctgccggacagatgttgaacttgggcgcgttgctgtttattttgccgtatttcctgttttcctcgctgtcggggcagttgggtaacaaattcgacaaggccgttttggcgcgttgggtcaaggtgctggaaatgattattatggcggtggcggcatacgggttttatatccggtctgccccgctgcttttggcgtgtctgttttgcatgggcgcgcaatcgacgctgttcgggccgctgaaatacgccatcctgcccgattatctcgacgacaaagagttgatgatgggcaacagcctgattgaatcgggtacgtttgtcgccatcctgttcggtcagattttgggaacggcggtggcaggtgtaccgccttatattgtcgggatactagttttgctggtcgccgtcggaggcacggtcggcagcctgtttatgccgtccgtacccgccaaggctgccgatacccaaattgagtggaatattgtccgtggcacaaaatccctgctgcgtgaaacggtgcggcacaagcccgtttttaccgccattatcggtatttcgtggttttggtttgtcggcgcggtttataccacgcaactgccgacctttacccaaatccatctgggcggcaacgacaatgtttttaacctgatgcttgccctgttttccatcggtattgccgccggttcggtactgtgtgccaagttcagcagggaacgcctgatgttggcttgggtaacggttggtgcgttgggtttgacggtttgcggcctggttttggtgtggctgacgcacggacaccgttttgaagggctgaacggcattttttggtttttatcgcaaggatgggcataccccgtcatgctggtgatgatgctgatcggctttttcggcggatttttctccgttccgctctatacctggctgcaaactgccagcagcgaaaccttccgcgcccgcgccgttgccgccaacaatatcgttaacggtatttttatggtttccgccgccgttttgagcgcggtgttgctgtttttgtttgacagcatttcactgctgtacctgattgtcgccttgggcaatattccgttggcggtatttttgattaagcgcgaaaggcggtttttaggcgcggcggcaatcggggaaaaacggtaa

SEQ ID NO: 41486 - DNA, 2712 bp, Neisseria meningitidis
atgagcatcagaactcaaaactatatcaacggacgtttgtctttgcgtgcaccgcaagcagaaagtttggcaaagctgaagcaggctttggatatcgcaccggaaatggcgcagaaagatcgcgatgtaacggcggtgttgaataccttgaaagccgaattcccaaccttgcaggattttgagcgcgaatttccatcattgtgctttgctttggcaacaggggtggggaaaacccgcctaatgggagcatttatcgcctatctgcatttggcacacggtatcaataatttttttgtacttgcaccgaacctgacgatttataacaagctgattgccgactttacaccgaatacgccgaaatatgtgtttaaaggtatcagtgaatttgcggtgaatcctcctaaactgattagcggcgacaactatgagcagcaagatttgagtatgggtatggataatctttttggtgagattaccgttaatgtattcaacatttccaaaatcaacagcgaggtgcgcggcggcaaagaaccaaaaatcaaacggatgcgtgaagtgctgggtgatagttatttcaactatctggcgaatctgcccgatttggtgttgctgatggatgaatcgcaccgctatcgggcacaggcgggaatgcgggcgattaatgaattaaatccgctttttggcttagagttaactgccacaccatttgtggaatccaccaaagcgcctattccgttcaaaaacgtgattgtagattatcctttggctcgggcaatggacgatggttttgtcaaaatgcctgcggtggttacgcagcgcaattttgatgcgaaaaattatacgcccgaagaaattgagaaaatcaagttagaagacggcgtgcgtgtgcatgaaaacaccaaggtcgagcttataacttatgctcgggaaaataatgttgccgtggtgaagccttttatgctggtgattgcccgcgataccacgcacgcggcacaattattgtctttactggaatcgaataacttttataacgggcgttatcagggcaaagtgattcaggtggattcgagtaaatcaggaaaagacgaagaagaaatgattgaacggcttttggcggtggaaagtgtggatgagccgacggaaatcgtgattcatgtcaatatgctcaaagagggctgggacgttaccaatctttataccatcgtaccgctgcgcgctgccaatgctagaacactgatcgagcaatctatcggacgcggtttgcgtctgccttacggaaaacgtacgggagtggaagtggtggatagattgaacattatcgcccacgaccgctttcaggaaatcatcgatgaagccaataaaggcgattcggtgctgaaattgaaacaggtaattttggatgcgctaggtgctgacgataaaaaagtcagcgtgcaggtgtatagcggtgtggaaacgaaattgggattggcggaaacgtcgtctgagaatacaaaacaaaatacttttcaaactaatgcttcagtcaattatcagcctgtttttaaaactgaaaccgaaaaacgcattgcccacacagtaatggaagctgctgcaaaatatgctgtccgtccaagtgaagcgccaacttcccaagcattattgacagcggaaatccgcgaaaaaatcgttcaagaagttcagacggcattacaaccggttcaaggtgaattgctatcggatgagctggatatagtcgagattgttgctaaaaccacagaaataatggtgaatcaaaccatcgatattcctagaattacagttgttcccggcggggaagtcagcacgggatttcatccgttcaaactcgatttaagcagcctgcatctacaaccgagtgaacgtgaaatcactattcacaacctgcataccaacgaacaaagcagcctgtctgccgaattgggtatgaaggaaaaacgccctgaagattatattgttttttcgctgatggatttcgatgatatcgactattccacccaagccgacttgctttacgatttggcggggcagatggtggcgcacctgcgcgattatttatccgaagaggaagttttaaatgtgttggataaagaacgtcgtctgattgcccgtgaaatccatgcgcaaatgatggcgcatttttgggaaaaagcggcaagttatgaagcccgcgtcagccaagggtttagtacgctcaaaccatgcaactatacagtttcagccgatgagccgattcattctgtgcgccaaacaccgaaagatgttagccgtattaagcaattgctgtttggcagcttttccaaatgtctgtatcccttacaaaaattcgactctgatactgaacgccgttttgctgtgattctggaacgagacgcgcaaaaatggttcaagccagcgcaaggacaattccagatctactggaaatcaggtttggattctaaagaatatatccctgattttgttgtagagaccaaagattctatctggcttgttgaaaccaaagcaggcaaagatttaaaagatcctgaagttttggcaaaagctgatgcagcttttgaatggtgcaaacacgctacggattatgcgttgcagcacaatggtaagcattggcgttatgtgctgattccgcatgatgaagttgccgaatcaaaaaaattggcagattttttaagatttgagaaaaagcctgtctaa

SEQ ID NO: 41487 - DNA, 1104 bp, Neisseria meningitidis
atgtcttcttttatttttcccgataacgggttcgaatggcgcaacgaaagtctgcaaaagccgcccaaaggttggcattatgtccgcgaaagtggtgcaaacggcattttgaaggctgcctatcaaaatattgcaactgtctggcagggcgatttccacaatgccaaacaggtgctttccgcaatgaagaagaaggtccgcaaacctgccgccgtccgttccgatgcggatatcgccgcccttttccacgcccaccgtatgaagcaggcgcagcagagccgtattctgaatatgcttgccgttgaaatccgccccggttttgtgttggacaacaaacgcgcgcccgatatacgcgccgccctgctcgacgtgtacggagaggcggacggcaaaccgtttttcctgccgctcaatctgctgctggggtttatgggtgcgcacgagtggcataagaaaggggttgccgttccgcagctgggcggcagcatacacgttcctttcggcgtattctcgccgttgcgcggcgaatacctcgacctgctcgcccatgcgccgtcaacgggttttcagacggcattcgatatcgggacgggctcgggcgtgcttgccgccattttggcgaaacagggcattccttccgtcatcggcacggataccaatccgaaagccgtcgcctgcgcccgtgccaatattgcccgtttgggctttgaaaaacaggttgaaatccgcgaaaccgatctgtttcccgaagggtttgtcgatctgatcgtctgcaatccgccctggcttcccgccaagccgacttccgccgtcgaatccgcgttatacgaccccgaatctgcgatgctggctgcgtttttgcgggatgcgccgaaacatctgaatcccgacggagaaatccgcctgatcatttccgatcttgccgaacatctgcacctgcgtccgtccgattttctggataaggcatttgctcaggcgggtttgcgcgttgcggatgttttgaaaaccaaaccggttcacaaaaaagctgccgatccgaacaatccgctggcttttgcccgaaacagggaaactactttcctgtaccgtttgaaaaaggcataa

SEQ ID NO: 41488 - DNA, 591 bp, Neisseria meningitidis
atgcttttgtttatcgacaattacgacagttttacttacaacatcgtccagtatttcactgaattggggcaggaagttgccgtgcgccgcaacgatgatattacgttggaggaaatcgaggcattgaatccgcaatatctcgttatcggccccggtccgtgttcgcccaaagaagcggggatttccgtggcggcgatgcgccatttcgccggccggctgccgattatgggcgtgtgcctcgggcatcagacgataggcgaggcgttcggcggcaggatagtccgcgccaaaacgctgatgcacggtaaggtgtcgcccgtgtcccattcgggcaagggtatgtttaagggtttgcccaatccggttacctgtacgcgttatcacagcctcgttatcgatcggaatacgatgcccgaatgtttggaagtaacggcttggactgaggacggcgagattatgggtgtgcgccataaggaatatgccgtcgagggcgtgcagttccaccccgaagccctcttgaccgagcacggacatgatatgttaaacaattttttaatcgaatttcaaaacttcaaaccgcaaaaaatctga

SEQ ID NO: 41489 - DNA, 279 bp, Neisseria meningitidis; identical to SEQ ID NO: 36930

SEQ ID NO: 41490 - DNA, 309 bp, Neisseria meningitidis
ttgcggaaagaccgcaaatggacgcagatttccgccgccctatacggacaaaacaagacccgatccgccgaagccgtcacgcggagcttcaaaaaaaaccccgctgtaaacggcaagagcaaaggagcaggcgcaggatacggcggacacctccgcgccatacagggattccgataccgggcagggacgctccggccgacagttacggcgcaaattaagcgggaacatctcaaaaaacaagcccgattggaagaatccgatcgggcttgttttgcaactgttttgtcatgccgtgaaatatccgcatga

SEQ ID NO: 41491 - DNA, 1902 bp, Neisseria meningitidis
atgactacgccaaaaaaaaccgccaaaacttccggcaacgaagcgcgcgaacttgccgacttgagcgaagacatcggtatccgcttcaaatatccgaactcggaacgcgtgtatctgcaaggcagccgcgacgacatccgcgtgcctttgcgtgaaatccgtcaggacgacacctatacggcgcaaggtacggaagccaatccgccgattcccgtctatgacaccagcggcgtgtacggcgatccggcggcacacatcaatttaaaacaaggtctgccgcacatccgcacggcgtggctggacgaacgcggcgataccgaaatcctgcccaagctctccagcgaatacggcatcgaacgcgcacacgatccgaaaaccgcccatctgcgcttcaaccaaatcacccgcccgcgccgcgccaaagccggccgcaacgtaacccagcttcactacgcgcgccaaggcattatcactcccgaaatggagtttgtcgccatacgcgaacgtttaaaattagacgaattgtcccaaaaaccggaatacgccaagctcttgaaacaacacgcagggcaaagtttcggcgcgaatatcccgacccatcccgaccaaatcacgcctgaattcgtgcgccgagaaatcgccgccggacgcgcgattattcccgccaacatcaaccaccccgaactcgaaccgatgattatcggccgcaactttcgtgtcaaaatcaacggcaacttgggcaactccgccgtaacctccagcctgaccgaagaagtcgaaaaaatggtgtggtcgctgcgttggggcgcggacacgattatggacttatccacaggcgcacacatccacgaaacgcgcgaatggattatccgcaacgcgcccgtccccatcggcacagtgcctatttatcaggctttggaaaaaaccggcggcattgccgaagatttgacttgggatttgttccgtgacaccttaatcgagcaggcggaacaaggcgtggactatttcaccatacacgcgggcgtgttgctgcgttatgtaccgatgaccgccaaccgcctcaccggcatcgtctcgcgcggcggttcgattatggcgaaatggtgtttggcacatcatcgggaaaacttcctctacacgcatttcgacgaaatctgcgaaattatgaaagcgtatgacgtatcgttcagcctcggcgacggcctgcgccccggctgcattgccgatgccaacgacgaatcccaattcgccgaactgcacaccttgggcgaattgaccgataaagcgtggaaacatgacgtacaagtcatgatcgaaggccccggccatgtgccgctgcaacgcgtcaaagaaaatatgaccgaagagctgcaacactgttttgaagcgccgttttacacactcggcccgcttgttaccgacatcgcccccggctacgaccacatcacctcgggcataggcgcggcgaatatcggctggtacggcacggcgatgctttgttacgttacccccaaagagcatttggggctgcccgacaaagaagacgtgcgcaccggcatcatcacctacaaactcgccgcccacgccgccgacctcgccaaaggctggccgggcgcacagttgcgcgacaacgccctgagcaaggcgcgtttcgagttccgctggcgcgaccagttccgcctaagcctcgaccccgaacgcgccgaaagcttccacgacgaaaccctgcccgccgaaggcgcgaaaatcgcccacttctgctcaatgtgcggccccaaattctgctcgatgaaaatcacgcaggaagtgcgcgactacgccgacaagcaaaaagcccaacggcagggcatggaggaaaaagcggtcgagttcgtcaaaaaaggcgcgaagatttacagttga

SEQ ID NO: 41492 - DNA, 1344 bp, Neisseria meningitidis
atgagccaaaaccatactattttacaaaacctccccgtcggtcagaaagtcggcatcgccttctccggcggacttgatacctctgccgcgctgttgtggatgaaactcaaaggcgcgctgccttatgcctacactgccaacctcggtcagcccgatgaagacgactacaacgccattcccaaaaaagcgatggaatacggtgcggaaaacgcccgcctgattgactgccgcacacagctggcacacgaaggcatcgccgccatccaatgcggcgcgttccacgtttccaccggcggcatcgcctacttcaacaccacgcctctgggccgcgccgtaaccggcacgatgcttgtttccgcaatgaaagaagacgatgtgaatatttggggcgacggcagcacctacaaaggcaacgacatcgagcgtttctaccgctacggtttgctcaccaatcccgcgctgaaaatctacaaaccctggctcgatcagcaatttatcgacgaactcggcggccgtcacgaaatgagcgaatttctgattgccaacggcttcaactacaaaatgtcggtggaaaaagcctactccaccgattccaatatgttgggtgccacccacgaagccaaagacttggaatttttgaactcgggcatcaaaatcgtcaaacccattatgggcgttgccttttgggacgaaaacgtcgaaatcgaacccgaagaagtcagcgtacgctttgaagaaggcgtgccggttgcactaaacggcaaagaatacgccgaccccgtcgaactcttcctcgaagccaaccgcatcggcggccgtcacggcttgggcatgagcgaccaaatcgaaaaccgcatcatcgaagccaaatcgcgcggcatctacgaagccccgggcatggcgttgttccatatcgcctacgaacgcttggtaaccggcatccacaacgaagacaccatcgaacaataccgcatcaacggcctgcgcctcggacgtttgctctaccaaggccgctggttcgacagccaagccttgatgttgcgcgaaaccgcccaacgctgggtcgccaaagccgttaccggcgaagttaccctcgaactgcggcgcggcaacgactactcgattctgaacaccgaatcgcccaacctgacctaccaacctgaacgcctgagtatggaaaaagtcgaagacgctgcgttcactccgctcgaccgcatcggacagctcacgatgcgcaacctcgacatcaccgacacccgcgccaaactgggtatttattcgcaaagcggtttgctctcgctgggcgaaggttcggtattgccgcagttgggcaataagcaataa

SEQ ID NO: 41493 - DNA, 603 bp, Neisseria meningitidis
atgaccatttactacaaagaccgcgccttttacgacgcggataccctcgaccaagcccccgagggcgcgcgccccattacgcccgaacaacacgctgggctgctcgccgccctcaattccggctgcatcgtgtccgacgatttgaccgtttccccgccgcgcccgtccgaataccacgaatgggacggaaaaggctgggtacttaagccgactgccaaaaagaaaatgctgcaagaggcgaagtctgaaaaactggcggaaatcaaccgcgccgcgcaatcctatatcgaccgtgcggcgggcttggacaaagtgccggaatttgaggtagcgacttggacaacgcaagcattcgaggcgaaggcatggcatgccgaccccaatgctgtcacgccgacgcttgacgccattgccgcttcccgaggcgtgcctcccgatgttttaaggcaaaaagcttatgaaaaaacactcaaattcgaacttttgaccgcgcatgttgcaggcttgaggcaggcggcggaagacaaaatcaacgccgcggctaatcttgatgaactgactgatatatcgctcgtcatcgacctgaaagccgaggctgaatga

SEQ ID NO: 41494 - DNA, 1338 bp, Neisseria meningitidis
atgacttttcaaaataaaaaaatcctcgtcgccgggcttggtagcacgggtatttccatgattgcctacctgcgcaaaaacggcgcggaggttgccgcgtatgatgcggagctgaaaccggagcgcgtgtcgcaaatcggtaagatgtttgacaggctggtgttttacacgggtcgtctgaaagatgcgctggacaacggtttcgatattctggcactcagccccggcatcagcgagcggcagccggatattgaggcgttcaagcaaaacggcggacgcgtgttgggcgacatcgaattgctggcggacattgtgaaccgccgaggcgacaaggtaattgcgattaccggcagcaacggcaaaaccacggtaacgagcctggtcggctatctctgcatcaagtgcgggctggataccgttatcgcgggcaatatcggcacgccggttttggaggcggaatggcagcgcgaaggcaaaaaggcggacgtgtgggtgttggagctttccagcttccaactggaaaacaccgaaagcctgcgcccgactgcggcgacggtgctgaacatttccgaagaccatctcgaccgctacgacgacttgctcgactacgcgcataccaaagccaagattttccgtggcgatggcgtgcaggttttgaatgcggacgatgcgttctgtcgtgcgatgaagcgcgccgggcgcgaggtgaaatggttttcgttggaacacgaagccgatttttggttggcacgcgagacaggtcgcctgaaacaaggcaatgaagatttgattgccacgcaagacattccgttacaaggcttacacaacgctgcaaatgttatggctgccgtggctttgtgtgaggctatcggtttgtcgcgaaatgaattgctcgaacacgtcaaaacctttcaaggcctgccgcaccgtgtggaaaaaatcggcgagaaaaacggcgtggtgtttatcgacgacagcaaaggcacgaatgtcggcgcgactgccgccgcgattgccggtttgcaaaatccgctcttcgtgattttaggcggcatgggcaaagggcaggacttcacgcccctgcgcgacgcgcttgccggcaaggcaaaaggcgtgttcctgatcggtattgatgcgccgcaaatccgccgcgatttggacggctgcgatctgaatatgaccgactgcgccactttggaagaagcggttcagaaggcatatgcccaagccgaagcgggcgacatcgtgttgctcagccccgcctgcgcaagcttcgatatgtttaaaggctatgcgcaccgttcggaagtgtttatcggggcgtttaaggctttgtga

SEQ ID NO: 41495 - DNA, 864 bp, Neisseria meningitidis
atgagaatcctattgacaggctcgaaaagccaactggcacgctgcctgcgcgaccgtcttcctgaagactgggaaaccattgcgacggattccgcatccctagacattaccgatgccgatgccgtctgcaacatggtcaaaagtttccaacccgacgctattgtcaacacggctgcctatactgccgtcgacaaagcggaaggcgatgcggcagcggcatttgccgtcaatgcttccgccgtttacaaccttgccttggcagcacatcgcgcccatgcccgattcatccacatctcaaccgactatatctttgacggtaaagggaaaaggccctatcaggaaagcgactttaccaatccttccaatgtatacggacaatccaaaaccgcaggcgagctgctcgcactgtctgccaatcccgacagccttatcctgcggacttcttggctgtttagcgaatacggggacaactttgtccgcacgatgctgaaccttgcgcgggaacgttccccgctgtccgccgtccacaaccaaatcggctgcccgacctatgccggcgatttagctgccgccatcatccgccttttgcagcaaacgtcgcccgtgcgcggcatttaccactacgccggcggcaaatccgtatcctggtacgaatttgcccaacatattttccaagcggcatcgcaacagcagacatccttccccgttcccgaattgactgccgtttcagacaaggaatatccgaccgccgcccccaggcccgcatacagcattttggactgccgcaaaatcgaaaacgacttcagcatcaaaccgtcagactggcaaaaagcccttgcacaggtcgtttccaagctgctctga

SEQ ID NO: 41496 - DNA, 2172 bp, Neisseria meningitidis
atgaacgccccgtttttccgcctcagcctgctctcgcttaccctggcggcaggttttgcccatgcggcagaaaataatgccaatgtcgcattggataccgttaccgtaaaaggcgaccgccaaggcagcaaaatccgtaccaacatcgttacgcttcaacaaaaagacgaaagcaccgcaaccgatatgcgcgaactcttaaaagaagagccgtccatcgatttcggcggcggcaacggcacgtcccaattcctgacgctgcgcggtatgggtcagaactctgtcgacatcaaggtggacaacgcctattccgacagccaaatcctttaccaccaaggcagatttattgtcgatcccgctttggttaaagtcgtttccgtacaaaaaggcgcgggttccgcctctgccggtatcggcgcgaccaacggcgcgattatcgccaaaaccgtcgatgcccaagacctgctcaaaggcttggataaaaactggggcgtgcgcctcaacagcggctttgccagcaacgaaggcgtaagctacggcgcaagcgtattcggaaaagagggcaacttcgacggtttgttctcttacaaccgcaacgatgaaaaagattacgaagccggcaaaggtttccgcaatgtcaacggcggcaaaaccgtaccgtacagcgcgctggacaaacgcagctacctcgccaaaatcggaacaaccttcggcggcgacgaccaccgcatcgtgttgagccatatgaaagaccaacaccggggcatccgcactgtgcgtgaagagtttgccgtcggcgacacaaaatcacggataaatattaaacgccaagcccctgcttaccgcgaaaccactcaatccaacaccaacttggcgtacaccggcaaagatttgggctttgtcgaaaaactggatgccaacgcctatgtgttggaaaagaaacgctattccgccgatgacaaagataacggctacgcaggcaatgtaaaaggccctaaccatacccaaatcaccactcggggtatgaatttcaacttcgacagccgccttgccgaacaaaccctgctgaaatacggtatcaactaccgccatcaggaaatcaaaccgcaagcgtttttgaacggcaaatttaagatctccgataagaaaccagacccaaacgatcccacaaaagaaatagataaggacgctgcagaaaaagcgaaagacaagaaagatatggatcttgtccattcctacaaactgtccaatccgaccaaaaccgataccggcgcgtatatcgaagccattcacgagattgacggctttaccctgaccggcgggctgcgttacgaccgcttcaaggtgaaaacccacgacggcaaaaccgtttcaagcagcaaccttaacccgagtttcggcgtgatttggcagccgcacgaacactggagcttcagcgcgagccacaactacgccagccgcagcccgcgcctgtatgacgcgctgcaaacccacggtaaacgcggcatcatctcgattgccgacggcacgaaagccgaacgcgcgcgcaataccgaaatcggcttcaactacaacgacggcacgtttgccgccaacggcagctacttctggcagaccatcaaagacgcgcttgccaatccgcaaaaccgccacgactctgtcgccgtccgtgaagccgtcaatgccggctacatcaaaaaccacggttacgaattgggcgcgtcctaccgcaccggcggcctgactgccaaagtcggcgtaagccacagcaaaccgcgcttttacgatacccatcctaaaaaactgttgagcgcgaatcccgagtttggcgcacaagtcggccgcacttggacggcctcccttgcctaccgcttcaaaaacccgaatctggaaatcggctggcgcggacgctatgttcaaaaagctgagggttcgatattggtgtcaggtcaaaaagaccgccaaggcaaactggaaaacgttgtacgcaaaggtttcggtgtgaacgacatcttcgccaactggaaaccgctgggcaaagacacgctcaatgttaatctttcggttaacaacgtgttcaacacgttctactatccgcacagccaacgctggaccaataccctgccgggcgtgggacgtgatgtacgcttgggcgtgaactacaagttctaa

SEQ ID NO: 41497 - DNA, 948 bp, Neisseria meningitidis
atggaatttttcattatcttgttggtagccgtcgccgttttcggtttcaaatcctttgttgtcatcccacaacaggaagtccacgttgtcgaaaggctcgggcgtttccatcgcgccctgacggccggtttgaatattttgattccctttatcgaccgcgttgcctaccgccattcgctgaaagaaatccctttagacgtacccagccaggtctgcatcacgcgcgacaatacgcagctgactgttgacggcatcatctatttccaagtaaccgaccccaaactcgcctcatacggttcgagcaactacattatggcgattactcagcttgcccaaacgacgctgcgttccgttatcgggcgtatggagttggacaaaacgtttgaagaacgcgacgaaatcaacagcaccgtcgtctccgccctcgatgaagccgccggagcttggggcgtgaaggttttgcgttatgagattaaagacttggttccgccgcaagaaatccttcgctcaatgcaggcgcaaattactgccgaacgcgaaaaacgcgcccgtatcgccgaatccgaaggccgtaaaatcgaacaaatcaaccttgccagcggtcagcgcgaagccgaaatccaacaatccgaaggcgaggctcaggctgcggtcaatgcgtcaaatgccgagaaaatcgcccgcatcaaccgcgccaaaggcgaagcggaatccctgcgccttgttgccgaagccaatgccgaagccatccgtcaaattgccgccgcccttcaaacccaaggcggcgcggatgcggtcaatctgaagattgcggaacaatacgtcgccgcgttcaacaatcttgccaaagaaagcaatacgctgattatgcccgccaatgttgccgacatcggcagcctgatttctgccggtatgaaaattatcgacagcagcaaaaccgccaaataa

SEQ ID NO: 41498 - DNA, 1518 bp, Neisseria meningitidis
atgtctcctaaaaaaatacccatttggcttaccggcctcatcctactgattgccctaccgcttaccctgccttttttatatgtcgctatgcgttcgtggcaggtcggcatcaaccgcgccgtcgaactgttgttccgcccgcgtatgtgggatttgctctccaacaccttgacgatgatggcgggcgttaccctgatttccattgttttgggcattgcctgcgcccttttgttccaacgttaccgcttcttcggcaaaaccttttttcagacggcaatcaccctgcctttgtgcatccccgcatttgtcagctgtttcacctggatcagcctgaccttccgtgtcgaaggcttttgggggacagtgatgattatgagcctgtcctcgttcccgctcgcctacctgcccgtcgaggcggcactcaaacgcatcagcctgtcttacgaagaagtcagcctgtccttgggcaaaagccgcctgcaaacctttttttccgccatcctcccccagctcaaacccgccatcggcagcagcgtgttactgattgccctgcatatgctggtcgaatttggcgcggtatctattttgaactaccccacttttaccaccgccattttccaagaatacgaaatgtcctacaacaacaataccgccgccctgctttccgctgttttaatggcggtgtgcggcatcgtcgtatttggagaaagcatatttcgcggcaaagccaagatttaccacagcggcaaaggcgttgcccgtccttatcccgtcaaaaccctcaaactgcccggtcagatcggcgcgattgtttttttaagcagcttgttgactttgggcattattatcccctttggcgtattgatacattggatgatggtcggcacttccggcacattcgcgctcgtatccgtatttgatgcctttatccgttccttaagcgtatcggctttaggtgcgattttgactatattatgtgccttgccccttgtttgggcatcggttcgctatcgcaattttttaaccgtttggatagacaggctgccgtttttactgcacgccgtccccggtttggttatcgccctatccttggtttatttcagcatcaactacacccctgccgtttaccaaacctttatcgtcgtcatccttgcctatttcatgctttacctgccgatggcgcaaaccaccctgaggacttccttggaacaactccccaaagggatggaacaggtcggcgcaacattggggcgcggacacttctttattttcaggacgttggtactgccgtccatcctgcccggcattaccgccgcattcgcactcgtcttcctcaaactgatgaaagagctgaccgccaccctgctgctgaccaccgacgatgtccacacactctccaccgccgtttgggaatacacatcggacgcacaatacgccgccgccaccccttacgcgctgatgctggtattattttccggcatccccgtattcctgctgaagaaatacgccttcaaataa

SEQ ID NO: 41499 - DNA, 489 bp, Neisseria meningitidis
atgaccgtactgaccgtcatcctcgccctcgccctgatagccgtcggcacggcgggcatcgtttaccccgccctgcccggattggcattgatgtttgccggaacatggctgcttgcctatgccggcggctaccaaatctacggcgcgggcgttttgtggacggtcggactcatcagccttgccggcatactggcggactatgtggcaggcatatgggggacaaaatataccggagcgggcaagctcgccgttcgcggcgcattggtcggcagcatcatcggcatatttttctcccttcccggactaatactcggtccctttatcggcgcggcggcaggcgaactgatcgatcggcgcaatatgcttcaggcaggtaaagcgggcttgggtacgctgttggggcttatcgtcggtacgacattcaaaatcggctgcgccgtatccatcttgtttatcctgttggtgaaatacatcgcctacctgttttaa

SEQ ID NO: 41500 - DNA, 861 bp, Neisseria meningitidis
atgtctgatttgtctgtattgtcgccgtttgccgtgcctttggcagcggtgttcgggctgctggtcggaagtttcttaaatgtcgtcatttaccgcgtgccggtcatgatggagcgcggctggacggtatttgccaaagaatatttaaacctgccgctgaccgaagaggaaagccgtaccttcaacctgatgaaaccggattcctgctgtcccaaatgccgcgtgccgatacgcgcgtggcagaacatcccgattgtcagctacctgctcctgcgcggcaaatgcgcctcctgccaaaccaaaatcagcatacgctatcccttaatcgaactgctgaccggcgtattgttcgggctggttgcctggcaatacggctggtcttggattacattgggcggtttgatactgaccgcgtttctgatttccctgacctttatcgatgcggacacccaatacctgcccgactcgatgacattacccttgatttggctggggctgatatttaatttggacggcggcttcgtgcctttgcagtctgccgttttaggtgcggttgccggctatggttcgatatggcttttatgcgcggtatataaactgattaaaggcgaaatcggtatgggcaacggagatttcaaactgattgccgcattgggcgcgtggctcggcatatccgcattgcccgtgctgatttttgtttcctcgctgatcggtttggtcgcggcaatcgttatgcgcgtcgccaaggggcagcattttgccttcggccccgcactgacagtttcgggctggataatttttacggcaaacgattccgtatggcgggcggtcaactggtggctgacccatccggtgctgtaa

SEQ ID NO: 41501 - DNA, 240 bp, Neisseria meningitidis
atgccccatacccttcccgatatttctcaatgcatcagacaaaatttagaacaatatttcaaagacctgaacggtaccgaaccttgcggcgtgtacgatatggtattgcatcaggtggaaaagccgctgctggtgtgtgtgatggagcaatgcggcggtaatcagtccaaagcctccgtcatgttgggactgaaccgcaataccttgcgtaaaaaactgattcaacacggtttgctgtga

SEQ ID NO: 41502 - DNA, 402 bp, Neisseria meningitidis
atgaaagacaagcacgattcttccgccatgcggctggacaaatggctttgggcggcacgttttttcaagacccgttcccttgcgcaaaagcacatcgaactgggtagggttcaagtaaacggctcgaaggtcaaaaacagtaaaaccatagacatcggcgatattatcgacctgacgctcaattcccttccctataaaatcaaggttaaaggtttgaaccaccaacgccgcccggcatccgaggcgcggcttctgtatgaagaagacgcgaaaacggcaacattgagggaagagcgcaaacagctcgaccaattcagccgcatcacttccgcctatcccgacggcagaccgaccaagcgcgaccgccgccaactggataggctgaaaaaaggagactggtaa

SEQ ID NO: 41503 - DNA, 918 bp, Neisseria meningitidis
atgagcatcatccactacctctcgctgcacgtcgaatccgcgcgcaccgcgctcaaacagcttctgcgccaacctttcggcacactgcttaccctcataatgctcgccgtcgccatgaccctgccgctgtttatgtatttgggcatccaaagcggacaaagcgttttaggcaaactcaacgagtcgccgcaaatcacaatctatatggaaaccgccgccgcacaaagcgacagcgataccgtgcgcagcctgctgacgcgcgacaaacgactcgacaacatccgctttatcagcaaagaagacggtttggaagaattacagtccaatctcgaccaaaatctgatttccatgcttgacggtaaccccctgccggatgtctttatcgttacccccgacccggcaaccactcccgaccaaatgcaggcaatctaccgagacattaccaatctgcctatggtcgaatccgccaacatggatacggaatgggtacagacactgtaccaaatcaacgaattcatccgtaaaatcttatggtttctttccctgacgctggggatggcgttcgtccttgtcgcgcacaacaccatccgactgcaaatcctcagccgcaaagaagaaatcgaaatcaccaaactcttgggcgcgcccgcgtcgtttatccgccgcccattcctttatcaagccatgtggcagagcatcctttccgccgccgtcagcttggggctttgcggttggctgctctctgccgtgcgccccttggtcgatgccatcttcaaaccctacggacttaatatcggctggcgtttcttctacccgggagaaatcgcactggtgttcggcttcgtcatcgcgttgggcgtattcggcgcgtggcttgccaccacccagcacctgctcggcttcaaagccaaaaaataa

SEQ ID NO: 41504 - DNA, 653 bp, Neisseria meningitidis
atgaagataacacactgcaaattaaagaaaaaagtacagaaagaactgctccgtttttttgcgctggaaattaccgcccgttctgccgccgatattttgggtatccatcccaattcggcagcactgttctaccgtaaaatccgcacggttatcaaccatcatttggccttggctgccgatgaggtttttgagggccctgtcgagccggacgaaagcgatttcggcggacggcgtaaaggcagacgtggtcgcgggcggcaggaaaagtggttgtcttcggcattctgaaacgcaacggacgggtctataccgttgtcgtaaacaatgccaagtctgaaacgttactccctgtcatcaaaaagaaaatcatgccggacagtattgtttataccgatagtctgagcagctgcgacaagttggacgtgagcggttttatccattaccgcatcaaccattccaaggagtgtgcagaccgtcagaaccacattaacggcattgagaacttttggaatcaggcaaaacgcgtcttgcgaaaatacaacggaatcgatcgtaaatctttcccgctgttcttgaaagaatgcgaatttcgatttaacttcggcacaccgtctcaacagcttaaaatcctgcgggattggtgtggaatttag

SEQ ID NO: 41505 - DNA, 489 bp, Neisseria meningitidis
atgaaaaaataccttatccctctttccattgcggcagttctttccggctgccagtctatttatgtgcccacattgacggaaatccccgtgaatcctatcaataccgtcaaaacggaagcacctgcaaaaggtttccgccttgcctcttcgcattggacggatgttgccaaaatcagcgatgaagcgacgcgcttgggctatcaggtgggtatcggtaaaatgaccaaggttcaggcggcgcaatatctgaacaacttcagaaaacgcctggtcggacgcaatgccgtcgatgacagtatgtatgaaatctacctgcgttcggcgatagacagccagcggggcgcaatcaatacggaacagtccaagctgtatatccagaatgccttgcgcggctggcagcagcgttggaaaaatatggatgtcaaacccaacaaccccgcatttaccaactttttgatggaagtgatgaagatgcagcccttgaaatga

SEQ ID NO: 41506 - DNA, 1248 bp, Neisseria meningitidis
atgcaacttaccgctgtcggactcaatcatcaaaccgcacctttaagcatacgggaaaagctggcgtttgccgcggcctgcctgcccgaagccgtccgcaatcttgcccgaagcaatgcggcaacggaggcggtaatcctttctacctgcaaccgtaccgagctttactgtgtaggtgattcggaagaaatcatccgttggctcgcagactatcacagccttcccatagaagaaatcagcccctacctttatactttggggatgcaggagactgtgcgccatgctttccgcgtcgcctgcggcttggattcgatggtgttgggcgagccgcagattttaggacagattaaggatgccgttagggttgctcaagagcaggaaagtatgggtaagaaactcaatgccctgttccaaaaaaccttttccgttgctaaagaggtccgtaccgatactgccgtcggcgaaaactcggtttccatggcttccgcttccgtcaaattggcggaacagatttttcccgacatcggcgatttgaatgtcttgtttatcggcgcaggcgaaatgattgagctggttgccacttattttgccgccaaaagtccccggctgatgacggttgccaaccggacgctggcgcgtgcacaggagttgtgcgacaagctcggtgtcaacgccgaaccgtgcctgctgtccgatctgcctgccattctgcacgattacgacgtagtggtttcttcaacggcaagccagttgcccattgtcggcaaaggcatggtggagcgtgcattgaaacaaaggcagagtatgccgttgttcatgcttgatttggcagtgccgcgtgacattgaagcggaagtcggcgatttgaatgatgcctatctttatacggtggacgatatggtcaacatcgtccaaagcggcaaggaggcaaggcagaaggccgccgccgccgccgaaacgctggtatccgagaaggttgccgaatttgtcaggcagcagcagggcaggcagagcgtccccttgattaaagccttgcgggacgagggcgagaaagcgcgcaagcaggtgttggaaaatgcgatgaaacagcttgccaaaggcgcaacggcagaagaggttttggaacggctgtccgtccaactgaccaacaagctgctgcattcgccgacccaaactttgaataaggcgggggaagaagataaagatttggttcatgccgtcgcgcagatttatcatttggacaaataa

SEQ ID NO: 41507 - DNA, 789 bp, Neisseria meningitidis; identical to SEQ ID NO: 36434

SEQ ID NO: 41508 - DNA, 384 bp, Neisseria meningitidis
atgaccgatacggatacccaagccgaccgcttcgagcagatgatgtggcaggcggtggacaaactttttgaacagcataacggcaaactcgaaagcatggacggacgggaacaggagctggttttgatttggcgggcggaagccgacatcggtaacggcggcatactgcaatttgtctgcaactggtgttttcccgccgccgaaaagactagttccgttctgaaaaaaatcggcgcgatacacagcgcaatgctgatccatcgggcggcagacgcattggacaaagaaatccgccgcctccaatcggaaggtaaaaacctgaaagaaatgtgggatataacatctcgacaacaaaaccgcctcactgctgaacagtctggatga

SEQ ID NO: 41509 - DNA, 1689 bp, Neisseria meningitidis
atgttacaatccgaaaattcgaaaaatttaatctcttgttcaataaaggctttaccaatcatgatttctaccaacggcatcaccatgcagttcggcgcgaagccgctgtttgaaaacgtatccgttaaattcggcgaaggcaaccgctacggtttgatcggcgcgaacggctcaggcaaatccaccttcatgaaaatcctcggcggcgatttggaacagacggccggcgaagtggcgattgaaaacggcgtgcgtttgggtaaattgcgccaagaccagtttgcctacgaagacatgcgcgtgctggacgtggtgatgatggggcataccgaaatgtgggcggcgatgaccgaacgtgatgcgatttacgccaatcccgaagccaccgaagatgactacatgaaagccgccgaactggaagccaagttcgccgaatacgacggctacaccgccgaagcgcgtgccgccgaactgttgagcggcgtgggcatttccgaagatttgcacaatgcgaaaatggcggaagtcgccccgggcttcaaactgcgcgtattgctggcgcaggcgctgttctccaagccggatgtattgctcttggacgaaccgaccaataacttggacattaataccatccgctggttggaaggcgtgttgaaccaatacgactccacgatgattatcatcagccacgaccgccactttttgaacgaagtctgcacgcatatggcggatttggactacaacaccatcaccatctatccgggcaactacgacgactacatgctcgcctccgcccaatcgcgcgaacgcgccctgaaagacaatgccaaagccaaagagaaactgcaagagctgcaagagttcgtcgcccgcttctctgccaacaaatccaaagcccgtcaggcaaccagccgtctgaaacaggccgacaaaatcaaatcggagatggtcgaagtcaaaccttccacccgtcaaaacccgtatatccgttttgaagccgatgaaaaagccaagctgcaccgtcaggctgtggaagttgaaaaactggcgaaacgctttgaaacccagttgtttaaaaacctgaacttcatccttgaagcgggacaacgcctcgccatcatcggcccgaacggcgcgggcaaatccaccctgctgaaactcttggccggcgcgtacaaccccgaatattcagacggcctgttaccggacgaaggcaccatcaaatgggcggaaaaagccagtgtcggctactatccgcaagaccatgaaaacgacttcgacgtcgatatggatttgagcgaatggatgcgccaatgggggcaggacggcgacgacgaacaagtcatccgcggcactttggggcgtttgctcttcggcagtaacgatgtcgtgaaaaaagtgaaggttctctccggcggcgaaaaaggccgtatgctttacggcaaactgttgctgttgaaacccaatgtcttagtcatggatgaaccgaccaaccacatggacatggaaagcatcgaatccttgaacatggcgctggaaaaatacaacggcacgctgattttcgtctcccacgaccgtcagttcgtttcttccctggcaacccaaatcatcgaactggacggcaaaggcggatatgaacactacttgggcgattacgaaagttacttggagaaaaaaggcgtagcataa

SEQ ID NO: 41510 - DNA, 1260 bp, Neisseria meningitidis
atgcacgtctccgaattacaaaccctgcacatttccaaactcttagaattggcggaagaacacggcatcgaaaacgccaaccgattccgcaaacaagacctcgtatttgccatcgtccgccagatgatgaaaaaaggcgagggtttcacctgctccggcacgcttgaaatcctgcccgacggcttcggcttcctccgcagcgcggacacgtcctatcttgccggccccgacgacatctatgtctcgcccacccaaatccgccgcttcaacctgcatacgggcgacaccatcgaaggaagcgtgcgcgtcccaaaagacaacgaacgctattttgccctagtcaggcttgataccatcaacggcgaccacccggaagtatgccgccataaaatcctgtttgaaaacctgaccccgctgtttccgaccgaacagttgaagctggaacgcgatttaaagtccgaagaaaaccttaccggacgtgccatcgacctgatttcccccatcggcaaaggtcaacgcgccctcttggttgccccgcccaaaagcggtaaaaccgtgatgctgcaaaatattgcccatgccattaccgcaaactatcctgaagtcgagctcatcgtcctcttgattgacgaacgtcccgaagaagttaccgaaatgagccgctccgtccgtggcgaagtagtctcctccacttttgacgagccggcgcaacgccacgtccaagttgccgaaatggtgcttgaaaaagccaagcgtatggtggaacacaaaaaagacgtggtcatcctgctggattcgattacccgccttgcccgcgcctacaataccgtcgtgcctacctcgggcaaaatcctaaccggcggtgtcgatgccaacgcactgcaccgtcccaaacgtttcttcggcgcggcgcgcaacgtggaagaaggcggttcgctgaccatcattgccaccgcattggttgaaaccggcagccgtatggacgatgtgatttacgaagaattcaaaggcaccggcaatatggaattgcacctcgaccgccgtatggcggaaaaacgcctcttccccgccatcaacatcaacaaatccggcacgcgccgcgaagagctgcttgtgccgaacgaccagttgcaacgtatgtggctcttacgcaagttcctgcacccgatggacgaaatcgaggcagccgaatttttaatcgggaaaatcaaagcctctaaaaacaatgatgatttctttgaactgatgcgcggcaaataa

SEQ ID NO: 41511 - DNA, 126 bp, Neisseria meningitidis
ttgcgaaaatacaacggaatcgatcgtaaatctttcccgctgttcttgaaagaatgcgaatttcgatttaacttcggcacaccgtctcaacagcttaaaatcctgcgggattggtgtgggatttag

SEQ ID NO: 41512 - DNA, 441 bp, Neisseria meningitidis; identical to SEQ ID NO: 36413

SEQ ID NO: 41513 - DNA, 696 bp, Neisseria meningitidis
atgaaagcgatgatactggcggcaggacgcggcgagcgtatgcgccctttgaccgataccactccgaagccgctgcttgatgtggcgggtaagcctctaatcggttggcacctatgccgtctgaagcaggcggggtttaccgaaatcgtcatcaaccacgcttggctgggtcggcagatagaagaggctttgggcgacggctcggcttatggcgtgaacatcgcctattcgcccgaacccgcaggcggcttggaaacggcaggcggcatcgcgcaggcattgccgctgttgggcgatgccccgtttttggtcgtcaatggcgacgtgctgaccgacatcgattttaccgccgcgtttcaggcggcatcgtccctgcccgagcacatttccgcccatctgtggctggcggacaatccgccgcacaaccccgacggcgatttttccctgctgcccgacggcagcgtgcggccggaagtaaatggcggcaacggattgacatttagcggcgtgggtatttaccgtcctgaaatgtttgatggaatcgaagcgggcagtgtggcgaaactcgcgcccgtattgcggggcgaaatgcggcaaaaccgcgtcagcggacagaagcatacgggcttgtggctggatgtcggcacggtatgccgtctgaaagaggctcaagcccttgcaggggcttggaagtga

SEQ ID NO: 41514 - DNA, 300 bp, Neisseria meningitidis
atgaccgcatccatgtacatccttttgctgcttgccttgatttttgccaacgcccccttcctcacgaccaggctgttcggcatcgtaccgctcaagcgcaaacatttcgggcaccacttgatcgagctggcggcaggtttcgcgctgaccgccgttcttgcctacatcctcgaatcccgtgcgggagcggtacacgatcagggttgggagttctacgccaccgtcgtctgcctgtacctgatttttgcgtttccctgtttcgtgtggcggtatttttggcacacgcgcaacagggaatag

SEQ ID NO: 41515 - DNA, 240 bp, Neisseria meningitidis
ttggaaatgtttgatggcgaagtagaagcagatgaaagttattttgctgaacgacaaaaccatattaatggaattgagaacttttggaaccgggcaaaacgtcatttacgcaagtttgacggcattcccaaagcgcattttgagctgtatttaaaggggtacgaacggcgttttaacaacagtgagataaaagttcaaatttccattttaaaacaattagtaaaatcgagtttatcctag

SEQ ID NO: 41516 - DNA, 1251 bp, Neisseria meningitidis
atgtttgttccgctggcaatgcttgcaggtatgttttcctactacgaaaccttccacgaaacggaagcgttgcaggacgacctgctccgtcaggcggcattgtacgtcgcccccgattccaaacccgaaactttgcccgagggcgacggcgatacgcgtattttggtacagatgccgcagcaggaagaccctgttgtcagcctgcctgcgcatctggcggacggtctgcacacgcttcaggcggacggggacgacgattattaccgcgtctatatccgcacgaccgaacagggacggattgccgttatgcaggaaaacgaataccgtgaagatttggcggcggatgcggcacggcaaagcgtgttgcccctgctggcggcactgccgctgatgatactgctgaccgtgtggattacgcacaaagccatgcgccccgtccgcaaattgtcgcaaagtctcgaacaacgccgaatcaatgacctgtctgctttgagtgtggacaatattcccagtgaaatcagagggttcgtaaccgccatcaacctgcttttgaaacgtgcggatgaagacatccgccaccgtcagcggtttgtcgccgacgcggcacacgaattgcgtacgccgatgacagccctttcccttcaggcggaacggctcaacaatatgtcgctcccacccgatgcagcgcggcagcctgccgttttgcagcagagcatcaggcgcaacaaacacctgctcgaacagcttttggcactggcgcgttcgcagtcggacgaaacccctctgacgaaaacgacattcggtctgcaaagccgtttccgccaagtgttgcaggaactgatgccgctggctttggaaaaacgtcaggacatcggtgtggcggtcagaggcgatgtcgaagtgtctgccgacgaaacagaaatctatacgctgattaaaacctttgccgataacgcggtacgttacacgccgcctgaaggcaggatagatttgggtttcacggacgaagggaaatatcttgccgtgtgggtggaagataacgggaacggcattcccgaatccgaacgcgcccgcgtcctcgatccgttttaccgtattttgggaatggagcagcaggggacggggctggggctgtccatcgccgacacgcttgccacagaatacggcagatatttggaattgtccgacagccgccggtttgggcgcgggctgctgatacgcgccttgttggacaaggaatccctgaaatag

SEQ ID NO: 41517 - DNA, 468 bp, Neisseria meningitidis
atgactgaactgcaacatcccgtcctcgtcgtcgatgacgaaaccgacattctcgacctgatggaaatgaccctgatgaaaatgggcttgcgcgtccataccgcgtcaggcgttgccgaagccaaaaacaagctcgacagccaacgctattcgctcgtcctgaccgatatgcgtatgccggacggctcggggctggaagtcgtccaacacatcaacagccgcctgctcgatacgccggttgccgtcatcaccgccttcggcaacgccgatcaggcacaggaagcgttgcgttgcggcgcgttcgaccccgataccatgcagatacaggactatctcgaccaaatcgaacgcgacatcatcgaacaaaccctcaaacaaaccgaaggcaaccgcacgcaggccgccaaacgcttgggcatcagcttccgttccatgcgctaccgtatggaacgcctcaacatcggctga

SEQ ID NO: 41518 - DNA, 849 bp, Neisseria meningitidis
atgttaagcaaaatcagcgaatcactggcaaacctttccggtgcggaacgcaaagtcgccgaatgtgcattggcggaacccaaatggttcgtccatgccgccgttgccgaaattgccgaacgtgcgtccgtcagccagccgaccgtcatccgattctgccgcagcttgggttataaagggctgcccgagttcaagctcgccttgtccgccagcatcggtcatgagggtatgccctatgtccacgaagaactcaacgccgacgacgatatggcaagcgtggtcgagaaagtattgggcaatgccgccgcctcgctgttgggcgaacgccgcttcctgaaagagtcggagctggaaaacgccattgccacgctgatgcacgcccgccgcgtcgagttttacggtgtcggcaattccggtatcgttgcgcaggacgcgcaacacaagtttttccgtttcggaatgtccacggtcgcctatgtcgatacgcacacgcagctgatggcagcatccgttttgagcgatcaggatgttttggttgccatttccaacacgggttcgtctatcgaacttttggatgcggtcagcatcgccaaagaaaacggcgcgtccgtcatcgcactgacccgcaacgattcgcctctggcgcaacttgccgactgcgtgttgagcgttgccacacaggaaaatgccgaactctacacgcccatggtttcccgcctcttgcagcttgccgtcatcgacattctcgccatcggacttgccctgcgcttgggcgatgctgccagcctgcaattgcagaaaagcaaaaaaagcatacacaacaagcacatcgattacgacaaagattga

SEQ ID NO: 41519 - DNA, 177 bp, Neisseria meningitidis; identical to SEQ ID NO: 38352

SEQ ID NO: 41520 - DNA, 132 bp, Neisseria meningitidis
atgcgtgttttgctggtggaagacgatgcgatgattgcggaggcggtgtcggcaagtttgaaagacggcggctatgcggtggattgggtcaaaaacggcgcgcggttgccgctgcccagccttatgacttga

SEQ ID NO: 41521 - DNA, 1398 bp, Neisseria meningitidis
atgagccaaggcaaaatcgtacaaattatcggtgcggttgttgacgtggaatttccacgcgacatgattccgcgcgtttacgacgctttgaaattagacgaaaacggtctgactttggaagtccaacagcttttgggcgacggcgtagtccgtaccattgcgatgggcagctcggacggtttgaaacgcggcatgactgtgaacaataccggtgcgcccattactgtgccggtaggtaaaggtacgttgggacgcattgtcgatgtattgggaacgcctgttgacgaagcaggtccgatcgataccgacaagagccgtgccatccaccaagccgcccctaagtttgacgaactgtcttccacaaccgaattgctcgaaacgggcattaaagtgattgacttgctgtgtccgtttgccaaaggcggtaaagtaggtctgttcggcggtgccggtgtgggtaaaaccgtgaacatgatggaattgatcaacaacatcgccaaagcgcacagcggcttgtccgtgttcgcaggcgtgggtgagcgtacccgcgaaggtaacgacttctaccacgagatgaaagattccaacgtattggataaagtggcaatggtttacggtcagatgaacgaacctccgggcaaccgtttgcgcgtcgcattgaccggtttgaccatggcggaatacttccgtgacgaaaaagacgaaaacggcaaaggccgcgacgtattgttcttcgtggacaacatctaccgttacactctggccggtaccgaagtatccgcattgttgggccgtatgccgtctgcagtgggctaccaaccgacattggcagaagaaatgggtcgtttgcaggagcgtattacctctacccaaaccggttctattacttccatccaagccgtatatgtacctgcggacgatttgaccgacccgtctccggcaacaacgttcgcccacttggacgcaaccgtcgtattgagccgcgatattgcctctttgggtatttacccggcagtcgatccgcttgattccacttcgcgccaattggatccgatggtcttgggtcaagaacactacgacgtggcgcgcggcgtacagtccaccctgcagaaatacaaagaattgcgcgacatcatcgccatcttgggtatggacgaattgtctgatgaagacaaactgaccgtaatgcgtgcgcgtaaaatccaacgcttcctgtcccaaccgttccacgttgccgaagtgtttacaggttctccgggtaaatatgtcgccctgcgcgataccattgccggcttcaaagccatcttgaacggcgaatacgatcatctgcccgagcaggcattctatatggtcggcagcatcgaagaagcggttgagaaagcgaaaaccttaaactga

SEQ ID NO: 41522 - DNA, 474 bp, Neisseria meningitidis
atgttatccgcagaatctttaaaacaaattgatattgagttggcaaaatatcctgccgaccaacgccgctccgccattatgggcgcattgcgtattgcccagaccgaaaaaggctggcttgctcccgaggctatcgcctttgtcgcagactatatcggcatctcgcctgcgcaagcctacgaagtcgctactttctacaatatgtacgaccttgagcctgtcggcaaatacaaactgaccgtttgtaccaacctgccctgcgccctgcgcggcggtatggctaccggcgaatacctcaaacaaagactcggtatcggctacggcgaaaccacgcccgacggcaaatttacccttgtcgaaggcgaatgcatgggggcgtgcggcgacgctccggttatgctggtcaacaaccacagcatgtgcagctttatgaccgaagaggcgattgagaagaaactggcggagttggagtag

SEQ ID NO: 41523 - DNA, 606 bp, Neisseria meningitidis
atggcacccgttaaggaaattctgatgaaacacaccgtatccgcatcggtcatcctgcttttgaccgcttgcgcgcaattacctcaaaataacgaaaacctgtggcagctgtccgaacacatcagcagttttgcagcagaagggcggttggcagtgaaagcggaagggaaaggttcgtatgcaaatttcgattggacataccaaccgcccgtggaaaccatcaatatcaatacccctttgggcagtacgctcgggcagttgtgtcaagacagggacggcgcattggcagtggacggcaaaggaaatgtctatcaggcggaaagtgcggaagaattgagcaggcagctggtcggtttcaaactgccaatccaatatctgcatatctgggcagatggcaggcgtgtggcgggcgcgccttaccgcatcctgccggacggcatattggaacaatacggttggactgtcggcagaaccgccgacagtggggggcaagtccgaacgttgcaactgaataacggaaatttgaacatcaggctggttttcaccgaaatcggtatgccgtctgaaaccgaaaccctggaacgctgtgcggcgcgcacgagataa

SEQ ID NO: 41524 - DNA, 1794 bp, Neisseria meningitidis
atgcaattagatatagaccgcttggttgcttatttcggcggcgtgaacgcgcttgccgaagcgttgaaacagcacgatcccgaaaatgccgcgacgaccgccgccatctataaatggcgcacgcgcggctcgctgcctctggcgcaactgcaaaagctgaccgcgttggcggaagcgcaaggcaggccgctggatttgaatgcttttttacaaaaaaacgaatctctggagagaacagaaatgacacaggccaaccgcgttatcattttcgacaccaccctgcgcgacggcgagcagtcgcccggcgccgctatgaccaaagaggaaaaaatccgcgtcgcccgccagctggaaaaattgggtgtggacatcatcgaagcgggttttgccgctgccagcccgggcgatttcgaggcggtcaatgcgattgcgaaaaccattaccaaatcaacggtctgttcattgtcccgcgccatcgagcgggacatccgtcaggcgggtgaggccgttgcgcccgcgccgaaaaaacgcatccacaccttcatcgccaccagccccatccatatggagtacaaattgaagatgaagccgaagcaggtgattgaggcggcggtcaaagcggtgaaaatcgctcgtgaatacaccgacgatgtggaattttcctgcgaagacgcgttgcgttcggaaatcgatttccttgccgaaatctgcggcgcggtgattgaagcgggcgcgaccaccatcaatattcccgataccgtcggctattcaatcccgtacaaaaccgaagaatttttccgcgaactgattgccaaaacgcccaacggcggcaaagtcgtttggtcggcacactgccacaacgatttgggcttggcggttgccaattcgcttgccgcattaaaaggcggcgcgcgtcaggtggaatgtactgtcaacggcttgggcgaacgtgcaggcaatgcttcggttgaagaaatcgtgatggcgttgaaagtgcgccacgacttgttcggcttggaaaccggcatcgataccacgcaaatcgtgccttcgtccaaactggtgtccaccattacgggctatcccgtgcagcccaataaagccattgtcggtgccaatgccttttcgcatgaatcgggcatccatcaggatggggtgctgaaacaccgcgaaacttacgagattatgtccgccgaatcggtcggctgggcaacaaaccgtttgagcttgggcaaattgtccggccgcaacgccttcaaaaccaagctggcggatttgggcatcgagttggaaagcgaagaggcactgaacgccgcgtttgcccgcttcaaagaactcgccgacaaaaaacgcgaaatcttcgatgaagacctgcacgcactggtatccgacgaaatgggcagcatgaatgccgagagctacaaattcatctcccaaaaaatcagcaccgaaaccggcgaagagccgcgcgccgacatcgtgttcagcatcaaaggcgaagaaaaacgcgcttccgccacaggctccggccccgtggatgcgattttcaaagcgattgaaagcgtggcgcaaagcggcgcggctttgcagatttattccgtcaacgccgtcacgcaaggtacggaaagccagggcgaaaccagcgtccgtctggcgcgcggcaaccgcgtcgtcaacggtcagggcgcggataccgacgttttggttgccactgccaaagcctacctttccgctttgagcaagctggaatttagtgccgccaaaccgaaagcgcagggcagcggtacgatttga

SEQ ID NO: 41525 - DNA, 252 bp, Neisseria meningitidis
atgtcgctttttattaccgacgagtgcatcaactgcgacgtatgcgaacccgaatgccccaatgatgccatttcccaaggcgaggaaatttacgaaatcaaccccaacctctgcacgcagtgcgtcggacactacgatgagccgcagtgccagcaggtttgcccggtggactgcatcctgattgacgaagaacatcccgaaacccatgacgagttgatggcgaaatacgaaaagattatccagtttaaataa

SEQ ID NO: 41526 - DNA, 1512 bp, Neisseria meningitidis
atgagcgaacaaaaccatccgcaaaccgagccgcagttggacgaaaaccaaatcatcgccctgcgccgcgaaaaactgcacaacatccgccaacagcgcaacgcctatcccaacgacttcaaacgcgacagcttcgccgccgatttgcacgcccaatacggcgaaatcggcaaagaagaactcgatccgcaaggcattcccgtcaaagtggccggccgcatgatgctgaagcgtcaaatgggcaaggcgagctttgccaccattcaagacgtgtccgggcaaatccagctttatctgaacaacaaaggcgtgagccaagaagttttggacgacttcaaccattgggatttgggcgacatcgtcggcgcggaaggcactttgttcaaaaccaaccacggcgaactgaccgtacgcgtgtccgacatccgcctgttgtccaaatccttgcgtccgctgccggacaaacacaaaggcttgagcgatcaggaaaccaaataccgccaacgctatgtcgatttgattgccaacgaagaatcgcgcaatacctttatcaaacgcagccaaatcatccaatccgtgcgtaattttatggtgggcgagcattatctcgaagtcgaaaccccgatgatgcacccgattcccggcggcgcgacggcaaaacccttcgttactcatcacaatgccttagatattccgctttacctgcgtatcgcgcctgagctgtatttgaaacgcctggttgtcggcggcttggaacgcgtgtttgaaatcaaccgcagcttccgcaacgaaggcatgtccgtgcgccacaaccccgaatttacgatgattgaattttacgaagccttctccgactacgaacgtatgatgcagatggcggaagacatcatccgcaacgcatcgcgcacagtaaacggtacggcaaacatcacttacaatggcaaagaagtcgatttggaaagcccgttcgagcgtctgaccatcctcgaagccatcaaaaaatacaatccgcactacaccgacgagcagttgaacgatgcggaatggctgaaaaaagaaatcgtcaaacacggtgaaagcctgccgccgtccccgggcatcggcagcctgcaactcgccctgtttgaaggttgcgccgagggcaagctgtggaacccgacctttattgtcgattacccggtcgaagtttccccgttggcgcgcgcttcggatacgaaacaaggtctgaccgagcgtttcgaattgttcgttgtcggccgcgaactggcaaacggctattccgagttgaacgaccccgaagaccaagccgaacgcttcaaatcgcaagtggcgcaaaaagacgcgggcgacgatgaagcgatgcactacgatgccgactacatccgcgcgatggaattcggtctgccgccgacaggcggttgcggtatcggtatcgaccgcttagtgatgttgctgaccgattcgcaaaccatccgcgatgtgattctgtttccgcagatgcgtcccgagtaa

SEQ ID NO: 41527 - DNA, 372 bp, Neisseria meningitidis
atgcttaaaaccctgacttttgccgcactgcatttcagcaccgccttcagtataacctatgtactgacgggcagtataggcgtatcgggggcggtcgcgctggtcgagcccctaatcaacaccgtcgttttctatagtggattaacaaaaaccagtacggcgttgcctcgccttagctcaacgagaacgattctctaaggtgctgaagcaccaagtgaatcggttccgtactatttgtactgtctgcggcttcgtcgccttgtcctgatttttgttaatccactatatttccatgaaaaagcatggaacctttacgaaaaaaataaaacagtccaacaaacacagccgtttcaactgcaccggtgcggctga

SEQ ID NO: 41528 - DNA, 2364 bp, Neisseria meningitidis
atgcaattctcctattcatggctgaaaacccaagccgataccgaactttctgccgataaactggaacatcttttgaccatggccggtttggaagtggaagaaatcgatactgccgcccctgctttcagtggcgtggttgttgccgaagtaaaatccgttgaaaaacatccggatgcagaccgtttgaacgttacccgagttgatgcgggtacgggcgggttggtgcagattgtgtgcggtgcgccgaatgtgaaagcgggcatcaaagtgccgtgttcgttgccgggtgccgttttgccgggtaatttcaaaatcaagccgaccaaaatgcgcggcgtgccatcaaacggtatgttgtgttccaccgacgaactcggtctgcccgacgacggtgtgaacggcctgcacattctgcctgaagatgcgcccgtcggtaccaatatccgcgaatacttggatttggacgatacgctgtttacgttgaaaattacgcctaaccgcgccgactgcttgagcatcaaaggcattgcgcgcgaagtgtccgcattgacggggtgcgcgttcaggcagcccgaaatccataccgcgccgatcacgggcagtcgaaaacagcccgtgcagattaacgcgcctgccgattgcggccgttttatcagccgcgttattgaaaatgtcaatgcgaaagcggctactcccgattggatgaaacaacgtttggaacgcagcggtatccgcagcatttccgcattggtggacatcggcaactatgtgatgctggaaatcggtcagccgatgcacgttttcgatgcggataaaatttcgggcagtttgattgtccgccgcgctaaaaatggcgaaatattggaatgtttgaatgaaaaaaccgtgtctctgtccgacaatacattggtcgtggcggacgaaaaaggcgcgttgagtttggcgggactgatgggcggcgcggcaagctcggtttcagacggcacgcaaaatatcgtgctggaagcggcttggtttgcgcccgaaatcatcgccggcaaatcgcgccaatacggtttcggttcggattcgtcgttccgcttcgagcgcggcgtggattaccgtttgcaggcggatgccattgaacgtgctaccgaattggtgttgcagatttgcggtggtgcggcaggcgagatggtggaagcgcaaggcgaattgcctgaagccaagcaggtcggattgcgtttggaccgtctgaaaaccgtgttgggcgtggacattcctgccgaacaggtggaaaccattttgcaacacttgggcctgcagcccgagaaaacggcggaaggcttccgcgttaccgcgccgagcttccgtttcgacatcgaaattgaggctgatttgattgaagaaatcggacgcgtttacggctatgaaaacatccccgacgattacacgtcaggccgtctgaaaatgctggaactgcccgaaacacgccgcccgcgttttgccgtttacaacgaaatggcggcgcgcggctaccgcgaagtggtcagctatgccttcgttaacgagcagtgggaacaagattttgccgccaacgccgaccccatccgcctgcaaaacccgttggcggcgcaatatgccgtgatgcgttccacactcatcggcggcttggtggaaattttgcaaaacaacctgaaccgcaaacaaaaccgcgtgcgcgtgtttgaaatcgcccgcgtgttcggcaaaggttcagacggccggtttgtccaaaacgaacgcatcggcggcttgtggtacggcgcggcaatgcccgaacaatggggcgggaaaacgcgcaatgcggatttttacgacattaaggcagatgtggaaaatctgttgaaaaacaaagcagtcgagttcgttaaaaccggacatcccgccctgcatcccggacgtgccgccaatatcgtttcagacggcaaagtcatcggctttgtcggcgaactgcatccgaaatggctgcaaaaatacgacctgccgcaagcgccgctggtatttgaaatcgatatggcggccgtgttggaatgcgggaaaacgcgctatcgggtcgtatcgaaattccagccggtgcgccgcgatttggcgtttgtgatgccggaagctatgagccatgatgatttgctgcttgtcttgaaaggcgcggcaaacaagttggtacaggaaatcagcgtgtttgacgtgtatcgcggcacgggactgcccgaagggatgaagagcgtggcggtcaaagtgattttgcaggatatggaaaacacgctgacggatgaggcagtcgagccgcttatcggaaaactgattggcgcggcaacggcggcaggggcgcggcttcgcagttaa

SEQ ID NO: 41529 - DNA, 1923 bp, Neisseria meningitidis
atgattgaaatcaaaaacctcaccctgcaacgcggtttgaaaatcctgctcgacaaagccaacgccactgtcaatcccggtcagcgcgtcggtttgatcggcaaaaacgggacgggcaaatccagcctgtttgccttactcaagggtgaaatcactcaggacggcggcgatgtctcgattccgaaaaactggcggctcgcttccgtttcccaagaaacgcccgatttggatatttccgctttggattacgttttgcagggcgatgccgagttgcaggcttttcagacggcattgaggcaggcggaagcgcaaaatgacggcatgaagcaggcggaatatcatgctaaattggaagaaatcgacgcttataccgcgccggcccgcgcggcaaaattgttgaacgggctgggtttttcgcaagaagaacacagccgccccgtcaaatccttttccggcggctggcgtatgcgcctgaatcttgcgcaagccctgatttgccgcgccgatttgctcttgcttgacgaaccgaccaaccacttggatttggaaaccgtcttgtggctggaaaaccaccttgcctctttaccctgcacgcaaatcatcatttcccacgaccgcgatttcctcaatgcggcaaccacccaaaccatcgaattatcgcagcaaaagctcacgcaatacggcggcaattacgatttttaccaaaacgaacgcgcgcagcgtctcgcgcagcaacaagccgcctatgtcaaacagcaggcgcaaatcaaacatctgcaatcctttatcgaccgcttcaaagccaaagccaccaaagccgttcaggcgcaaagccgcatgaaggctttggcaaagctcgaacgcatcgctcccgcgcatttggacagcgagttttcctttgagttttacaatcccgagcatctgcccaatcctttgctgaagctggaacacgcagatttgggttacgaaggcaaaactgttttgcacgacattaccctgtcgctggaaagcggcgcgcgctatggtttattgggtgtcaacggcagcggtaaatctacatttatcaaagccttggcgggcaaaatcgatttgctctccggcagcatcgtccgttccgaaaaactcaatatcggctattttgcccaacaccaactcgataccatccgcgccgaccaaaaccctgtttggcatattcagcagctttctcccgaagtacgcgaacaagaaatccgaaatttcctcggcggcttcaattttgttggcgatatggcgttacagaaaaccgaacctttttccggcggagaaaaagcccgcctcgccctcgccatgattatctggcaaaagccgaacctgctgctgcttgacgaaccaaccaaccatctggacttggatatgcgccacgccctgacgctcgctctgcaaagtttccaaggcgccttaatcatcgtatcgcacgaccgcagcctgcttgaagcgactaccgacagcttcctcctgatcgacaaaggccgtctgaagaacttcgacggcgatttgaacgattaccgccaatggcgtttggcacaggaaaacgccgccgccgcacccgcagcatccgcacaaagccaaagccgcaaagacaccaagcgcatcgaagcgcaaatccgtcaggaaaaagcccgacgcggcaagccgatacagcagaaaatagaccgtgccgaaaaagaaatggcgcagctttccgaaattcagacggcatgtgaagcatttttagcacaagaagacgcttaccttgaagcaaacaaagaaaaattgcaaaataccttatccctgctggcaaaagtcaaaacacaacttgcccaaatcgaagaggtttggctggcttgtcaagaagaattggaacggattgaaactgaaatcgagaaacagtttgccgagcgataa

SEQ ID NO: 41530 - DNA, 336 bp, Neisseria meningitidis
atgtttaaagattggaaagaacataccgcattggttaaaaaatcgttcggcgagctgggtaaggcgcatcctaaaatgctgcaggcatacggcgcattggaacaggccgccgccgccgaagcattggatgccaaaacgcgcgaactgattgccatcgccgttgccattaccacacgttgtgagagctgcatcagtgttcacgccgccgccgccgccaaagccggtgcgaccgacagcgaaatcgccggcgcattggcaaccgccatcgccctgaatgccggtgccgcttacacttacgccctgcgtgcattggaagcggttgaaacgcaaaaataa

SEQ ID NO: 41531 - DNA, 606 bp, Neisseria meningitidis
atgaagaaaatcggactgttcggcggcactttcgacccgatacacaacgggcatctccacatcgcccgcgcctttgccgacgaaatcggcttggacacggttgttttcctgccggcaggcggcccgtatcacaaagacgctgcctccgcttccgcagccgaccgccttgccatggtcgaactggcgacggcagaagacgcgcgttttgccgtcagcgattgcgacatcgtccgagaaggtgcaacctatacttttgataccgtccaaatcttccgccagcagttcccatccgcgcaactttggtggctgatgggcagcgacagcctgatgaagctgcacacatggaaaaaatggcagatgctcgtgcgcgaaaccaatatcgccgtcgccatgaggcagggcgacagcctgcaccaaaccccgcgcgaactgcacgcatggctgggcaagtcccttcaggacggcagcgtccgcatcttgtccgccccgatgcataatgtgtcgtcaacggaaatccgccgcaaccttgccggccaaggcgtttcagacggcatcccgcctgccgccgcacgctacatccgcgaacacggtttgtatgaaaaataa

SEQ ID NO: 41532 - DNA, 1047 bp, Neisseria meningitidis
atgtcagacgacaaaagcaaagcccttgccgccgcactggcgcaaatcgaaaaaagtttcggcaaaggcgccatcatgaaaatggacggcagccagcaggaagaaaacctcgaagttatttccaccggatcgctcggattagacctcgccctcggagtcggcggtctgccgcgcgggcgcatcgtcgaaatcttcggccccgaatcctccggcaaaaccaccctctgcctcgaagccgtcgcccaatgccagaaaaacggcggcgtgtgcgcctttgtcgatgccgaacacgcctttgatcccgtttacgcccgcaaactcggcgtaaaagtcgaagagctttacctgtcccagcccgatactggcgaacaggctttggaaatctgcgacacactcgtccgttcaggcggcatagatatggtagtcgtcgattccgtagccgcactcgtccccaaagccgaaatcgaaggcgatatgggggacagccatgtcggactgcaggcgcgcctgatgagtcaggctttgcgcaaactgaccggacacatcaaaaaaaccaacacgctggttgtgttcatcaaccaaatccggatgaagatcggcgtaatgttcggcagccccgaaaccaccaccggcggcaacgcgctgaaattctattcttccgtccgcctcgacatccgccgcaccggatccatcaaaaaaggcgaagaagtattgggcaacgaaacccgcgtcaaagtcatcaaaaacaaagtcgcccccccgttccgtcaggcagagtttgacatcctctacggagaaggcatcagttgggaaggcgaattgatcgacatcggcgtgaaaaacgacatcatcaacaaatccggcgcgtggtacagctacaacggcgcgaaaatcggtcagggcaaagacaacgtccgcgtctggctgaaggaaaatcccgaagtcgccaatgaaatcgacgcaaaaatccgcgccctcaacggcgtagaaatgcacatcaccgaagggacgcaggacgaaaccgacggcgaacgccccgaagaataa

SEQ ID NO: 41533 - DNA, 462 bp, Neisseria meningitidis
atgaccgaagtcatcgcctacctcatcgaacatttccaagatttcgatacctgcccgccgcccgaagacttgggtatgctgcttgaagaagcgggtttcgatacgatggaaatcggcaacaccctgatgatgatggaagtattgctcaacagctccgaattttccgccgaacctgccgacagcggcgcattgcgcgtgtacagcaaagaagaaaccgacaacctgccgcaggaagtgatggggctgatgcagtatctgattgaagaaaaagccgtcagctgcgaacagcgggaaatcatcatccacgcgctgatgcacatccccggcgacgaaattaccgtagataccgccaaagtgctgaccctgctgcttttatgggcaaacaagagcgagctgcccgtgttggtcggcgacgagctgatgagtgcgcttttactcgacaacaaacccacgatgaactga

SEQ ID NO: 41534 - DNA, 3249 bp, Neisseria meningitidis
atggctgccttcaaacctaatccaatcaactacatcctcggcctcgatatcggcatcgcatccgtcggctgggcgatggtagaaattgacgaagaagaaaaccccatccgcctgattgatttgggcgtgcgcgtatttgagcgtgccgaagtaccgaaaacaggcgactcccttgccatggtaaggcgtttggcgcgcagtgtccgccgcctgacccgccgtcgcgcccatcgcctgcttcgggcccgccgcctattgaaacgcgaaggcgtattacaagccgctgattttgacgaaaacggcttgatcaaatccttaccgaatacaccatggcaacttcgcgcagccgcattagaccgcaaactgacgcctttagagtggtcggcagtcttgttgcatttaatcaaacaccgcggttatttgtcgcaaagaaaaaacgagggcgaaactgccgataaagagcttggcgctttgctcaaaggcgtagccgacaatgcccatgccttacagacaggcgatttccgcacaccggccgaattggctttaaataaatttgagaaagaaagcggccatatccgcaatcagcgcggcgattattcgcatacgttcagccgcaaagatttacaggcggagctgattttgctgtttgaaaaacaaaaagaatttggcaatccgcatatttcaggcggccttaaagaaggtattgaaaccctactgatgacgcaacgccctgccctgtccggcgatgccgttcaaaaaatgttggggcattgcaccttcgaaccggcagagccgaaagccgctaaaaacacctacacagccgaacgtttcatctggctgaccaagctgaacaacctgcgtattttagagcaaggcagcgagcggccattgaccgataccgaacgcgccacgcttatggacgagccatacagaaaatccaaactgacttacgcacaagcccgtaagctgctgggtttagaagataccgcctttttcaaaggcttgcgctatggtaaagacaatgccgaagcctcaacattgatggaaatgaaggcctaccatgccatcagccgtgcactggaaaaagaaggattgaaagacaaaaaatccccattaaacctttctcccgaattacaagacgaaatcggcacggcattctccctgttcaaaaccgatgaagacattacaggccgtctgaaagaccgtatacagcccgaaatcttagaagcgctgttgaaacacatcagcttcgataagttcgtccaaatttccttgaaagcattgcgccgaattgtgcctctaatggaacaaggcaaacgttacgatgaagcctgcgccgaaatctacggagaccattacggcaagaagaatacggaagaaaagatttatctgccgccgattcccgccgacgaaatccgcaaccccgtcgtcttgcgcgccttatctcaagcacgtaaggtcattaacggcgtggtacgccgttacggctccccagctcgtatccatattgaaactgcaagggaagtaggtaaatcgtttaaagaccgcaaagaaattgagaaacgccaagaagaaaaccgcaaagacagggaaaaagccgccgccaaattccgagagtatttccccaattttgtcggagaacccaaatccaaagatattctgaaactgcgcctgtacgagcaacaacacggcaaatgcctgtattcgggcaaagaaatcaacttaggccgtctgaacgaaaaaggctatgtcgaaatcgaccatgccctgccgttctcgcgcacatgggacgacagtttcaacaataaagtactggtattgggcagcgaaaaccaaaacaaaggcaatcaaaccccttacgaatacttcaacggcaaagacaacagccgcgaatggcaggaatttaaagcgcgtgtcgaaaccagccgtttcccgcgcagtaaaaaacaacggattctgctgcaaaaattcgatgaagacggctttaaagaacgcaatctgaacgacacgcgctacgtcaaccgtttcctgtgtcaatttgttgccgaccgtatgcggctgacaggtaaaggcaagaaacgtgtctttgcatccaacggacaaattaccaatctgttgcgcggcttttggggattgcgcaaagtgcgtgcggaaaacgaccgccatcacgccttggacgccgtcgtcgttgcctgctcgaccgttgccatgcagcagaaaattacccgttttgtacgctataaagagatgaacgcgtttgacggtaaaaccatagacaaagaaaccggagaagtgctgcatcaaaaaacacacttcccacaaccttgggaatttttcgcacaagaagtcatgattcgcgtcttcggcaaaccggacggcaaacccgaattcgaagaagccgataccccagaaaaactgcgcacgttgcttgccgaaaaattatcatctcgccccgaagccgtacacgaatacgttacgccactgtttgtttcacgcgcgcccaatcggaagatgagcgggcaagggcatatggagaccgtcaaatccgccaaacgactggacgaaggcgtcagcgtgttgcgcgtaccgttaacacagttaaaactgaaagacttggaaaaaatggtcaatcgggagcgcgaacctaagctatacgaagcactgaaagcacggctggaagcacataaagacgatcctgccaaagcctttgccgagccgttttacaaatacgataaagcaggcaaccgcacccaacaggtaaaagccgtacgcgtagagcaagtacagaaaaccggcgtatgggtgcgcaaccataacggtattgccgacaacgcaaccatggtgcgcgtagatgtgtttgagaaaggcgacaagtattatctggtaccgatttacagttggcaggtagcgaaagggattttgccggatagggctgttgtacaaggaaaagatgaagaagattggcaacttattgatgatagtttcaactttaaattctcattacaccctaatgatttagtcgaggttataacaaaaaaagctagaatgtttggttactttgccagctgccatcgaggcacaggtaatatcaatatacgcattcatgatcttgatcataaaattggcaaaaatggaatactggaaggtatcggcgtcaaaaccgccctttcattccaaaaataccaaattgacgaactgggcaaagaaatcagaccatgccgtctgaaaaaacgcccgcctgtccgttaa

SEQ ID NO: 41535 - DNA, 1188 bp, Neisseria meningitidis
atgactgaacactataaaacccttccggaacacgagctgctgattcagaagtctttgatcagcaatctgaatctttgggattgggtatttgccgtgctggtttttgcggctacggttttcgtacagacccgttccggtatgcatatggacatttacgaaacggtcatgttgtgggcgagtgccggtattgccgtgtttttgggttggtttttcaaaccgatgcgctggtttgttcctttaagcgtattgcttgcctatgccgccgtcggtctgtatggcggcaacatcaaatcggcagagattttcctgttgcggtatttcctcagcagccagtcggcgattatgtggcagtgcgcctttgtctttttcgccctgttcgcctatatttcgggcgcggttttggcaagcgtaaaaaatgtgccgaccaacacgctgttgggtatgggaaccgtgtttgcatgggtgtctgccgtagcaggctttaccggtctgctggtacgttggcacgaaagctatctgctccgtcccgatgcggggcatattccggtttccaacctgtatgaagtgttcatcctgtttttggtgattaccgcgctgatgtatctttattatgaaggtaagttcgccatacagaaattgggcggcttcgtgttcggctttatggcggtcgtggttggattcgtcttgtggtacagcgtgtcccgcgaggcgcataccatccagccgctgattccggcattgcaatcttggtggatgaaaatccacgttccggcaaactttatcggttacggcgcgttttgcatttccgcgatgctcggtattgccgaactggtttccctgcgtgcggaaggaaaaggcggaaaactgtggctgccgccgtcggcattgatcgacgaggtgatgtataaggcgattgccgtcggctttctgttctttaccattgccaccattttgggtgcgctgtgggcggcagatgcttggggacgctattggagttgggatccgaaagagacgtgggcgttcatcgtctggctcaattacgccgtttggctgcacttgcggctggttgccggttggcgcggcaaagtgctggcgtggtgggcgattatcggtttgttcgtaaccgcatttgcttttatcggcgtgaatatgtttttgagcgggctgcattcttacggaacgctttga

SEQ ID NO: 41536 - DNA, 1455 bp, Neisseria meningitidis
atgactacgcaaaccatcaaatttcacatgaagccggaaactttcaagcaaaacgccgcaatttcccttcaagacaagcctttgcgcaaaagcctgcgtaccgcgatggatatgctgatgaccaaacgcaaagccgttttgaccgacgaagaagagctgcaaagcttgcgcgatttgtgcgaacacatccgccagcgttccctgtccaaattgcccgcgctgttggagcagttggaagaaaacctgaccaagttgggcgtaaaagtacactgggcggaaacaccggccgaagcctgcgaaatcatccacgacatcatcacagccaaaaacggcaagctgatggtcaaaggcaaatcgatggtcagcgaggaaatcgagctgaaccattatcttgaagcaaaaggcattaaagcggtagaaagcgacttgggcgagttcatcgtccaaatggcaggcgaaaaaccgacccatatcgtgatgcctgcaatccataaaaccaaagaacaggtgagcgaactgttccaccaaaacctcggcacaccgcttacagacgatgtggaccaactgaccggcttcgcccgcaaagccctgcgcgatatttacagcactgccgatgtcggcttgagcggcgtgaacttcgccgttgccgaaacaggtacgctgtgtctggtggaaaacgaaggcaacggtcgcttgagtaccaccgtaccgcccgtgcatatcgctattaccggcattgaaaaagtggtggcgaaattgtccgacatcccacccttgtacagtctgctgccgcgctccgccatcggtcaaaacatcacaacctatttcaatatgattaccggcccgcgccgcagtgaagaattagacggtccgcaagaaatgcacttggttctgctcgacaacggccgcagccaggcttatgccgaagaccaaatgcgccgcaccctgcaatgtatccgttgcggcgcgtgtatgaaccattgcccggtttatacccgcatcggcggcgcggcatacggcacaacctatcccggcccgattggcgagattatttcccctcacctgttgggtctggatgccacccgcgatctgccaaccgcctgtaccatgtgcggtgcgtgtgtggaagtctgtccggtacgcatcccgattaccgaacaaatgcagcgtttgcgcgttgaagcgcaacgttcgccgaccgaaaccgtgccgcaccccatccgagggcaaggcgcatcgcataccttcggcgaacaaatggcgtggcgcacattcaacggtattttcagcggcagcaaaacctaccgcgccttcggttgggcagccaccaagttccgcaacctgaccccgcgcaaacagttgggttggacgcaaaaccgcgtgccgatgaaaccggcgaagaaaaccctgcacgaactgatggcagaaaaaatgcgccaaaaagaacaggcataa

SEQ ID NO: 41537 - DNA, 219 bp, Neisseria meningitidis; identical to SEQ ID NO: 36380

SEQ ID NO: 41538 - DNA, 1473 bp, Neisseria meningitidis
atgaaccagacaagccgcgatctgacccgcatcagccacaacactaaaatcgtcgccacccttgggccgggcagcaacaacgtcgaactgttggaagacatgatccgcgtcggcggtctgaacgtcgtccgcttcaacttcagccacggcacgcccgaattccatcaggaaaacgcccgcatcgtgcgcgaggcggcaaaacgcaccggacaggaaatcgccatcattgccgacctgcagggcccgaaaatccgcgtgggcaaaatcgccggcggcggcatcgaattgaacaaaggcgaaacgctggtactggatgccgcgctcgaaggcgaaggcacgcgcgaggcggtcggtttggactaccgcgacctgcccgacgacgttgccgcaggcgatgtcttgtggctggacgacggcctgctgaccctgaccgtggaatccgtcgaaggcagcaggattatcacaagggtggaaaacagccacgtcctgaaaagcaacaagggcatcaacaaacgcggcggcggtctgtccgcaggcgcgttgaccgaaaaagacttccgcgacctgaaaaccgcgattgccatcggttgcgactacctcgccatcagctttgtgaaatctgccgaagatttgcacatcgcgcgcgccaaagtcgaagaagaaatgaagggcagcactgccgtgcgccccggtttggtttccaaaatcgaacgcgtagaagcgattgaaaaccttgatgaaatcatcctcgccggcgacggcattatggttgcacgcggcgacttggcggtcgaagtcggacacgccgccgtccccgccctgcaaaaacggatgatccgccgcgcccgcgagttgcgccgcttcagcattacggcgacgcaaatgatggaatcgatgattaccaaccccgtgccgacccgcgccgaagtcagcgatgtggcaaacgcggtattggacggcaccgatgcggtgatgtgttccgccgaaaccgccgtcggcgcgtatccgtttgaaaccgtcagccaaatggcgattatctgcgcggctgcggaaaaagagcaggattcgctcaacggcgttgccgaacaggtcgagtatcccgaagcggtcagcaccaacctggcggttgccggcggtgcggtcagcgtggcgcgcgcggttcacgccaaagccatcgtcgccctgaccgaaagcggttcgaccgcctttgaaatcagccgccacaacatcaccctgccgattttcgcgctgaccccgagcgtttccgcccaacgccgtatggcgatgtaccggggcgtgcgcccgctgattttggcaaccagtaccgaccacgacacggcgttaaacgaagtcgaaacgatgctggtggaacacaacatcctgcattccggcgaccaatacatcattaccagcggttcgcaaatgcgcgaatccggttcgaccaacacactggaagtgctgcgcgtcaaataa

SEQ ID NO: 41539 - DNA, 1056 bp, Neisseria meningitidis
atgaaaaacagtaagttaaaggcggttgattttttctgtggcggaggtggaatgagctatggaatgcaatccgccggtattcaggttttagccgggatagattacgaacccagctgcaaagaaacatatgaagccaatataaatgccaaatttatacaggctgatgtttttgaattgcagcctgaaaccttggaaaaagaactcgggttaaaaaagaatgatgatgatttgattcttataggttgtagtccttgtcaatattggagtgttattcaaacagacaaaagaaaatcggaaaaatccaagagtttgcttttggagtttcagcggtttgtagaatatttcaatcccggatatgttgttgtagagaacgtaccgggaattctgagcagaatgaaagaaagcaggcttgataatttcataaagttattggaagaaaaaggatttaccgtccatttcggtattcacaatacggctgattacggaattccccaaagccgtaaaagatttacgttaattgcaaacagaataaccaaagaaaagctggaaccagtcaagtattcgggcaaacggcttacggtacgcgatgttttgggaatggaaaacggctttcccaaaattatggcagggcatcaagacgagacggatttcatgcatagttgtgcgggattatctgacatcaatttgaaacgattggctttgatacctaaaaacggaggaaaccgtttggcttttgcgcatattcccgaattacagctggaatgttttatcggaaaagacaatagttttaaagacacgttcggtaggctatggtgggataagcccgcacctaccataacgaccaaattctttagtatttccaacggaaggtttgcccatcctgaggaagatagggcgttatccctgcgcgaaggtgcaacattgcaatcgttccctcgtaactatgtctttaaagcgggcagcagggacaagatagcccgtttgattggtaatgccgttcctccgatgtatgcggaaaaaataggcagggcaattgttgataatatcgaatgttag

SEQ ID NO: 41540 - DNA, 888 bp, Neisseria meningitidis
atgcagaaatccaaattatcttggttcttgaaactgatgttggcactgtcgctggcgtttctgtatatcccgctggttgttttggtcatctattcgtttaacgaatccaagctggtaaccgtttggggcggcttttcgaccaagtggtacggcgcattgctggaaaacgacaccatcttggaagccgcttggctgtcgctgcggattgccgttgtgtcttcgcttgctgccgtcgttttgggcacgctggcaggctatgcgatggcgcggattaaacgttttcgcggcagtaccttgttcgccggtatgatttccgcacctatggtgatgcccgacgtgattaccggtctgtctatgctgctgctgattattcaggtacagatatttttgcagggcagcgaatggttacaacatctctacttcgatcgtggctttttcaccatcttcctcggacatacgacgctgtgtatggcgtacattaccgttgttatccgttcgcgtctggttgagcttgaccaatcgctcgaagaagccgcaatggatttgggcgcgcgtccgctgaaaatcttttttgtcatcactttgcctttgattgcccctgccatcgcttcaggctttctgctcggcattaccctgtctttggatgatttggtaattacctcattcctctccggccccggttcatccacattgccgcaggtgattttctccaaaatcaagctgggtcttgatcctcagatgaatgtcttggcgaccatcctaatcggcatcatcggaacattggtcatcatcgtcaattattggatgatgaggcaggcaaccaagcgcgaccgagaagcggcagaagcctaccgccaagaaaaattggctgctgagaaagcgcattga

SEQ ID NO: 41541 - DNA, 504 bp, Neisseria meningitidis
atgcacgcgcttcatttttcggcttcggacaaggccgcgctttatcgggaggtgttgccgcagattgagtctgtggtggcggacgagacggattgggtgtcgaatttggcgaacacggcggcggttttgaaggaggcgttcggttggttttgggtgggtttttatttggtcgatacgcgttcggacgaattggttttggcaccgtttcaggggcctttggcgtgtacgcggattccgttcggacgcggggtgtgcggtcaggcttgggcgaagggcgggacggtggtcgtcggggatgtcaacgcgtatcccgaccatattgcctgttcgtctttgtcgcgttcggagattgtcgtgccgctgttttcagacggacgctgtatcggcgtgttggacgcggacagcgaacatttggcgcagtttgatgagacagatgctttgtatttgggcgaactggcgaagattttggagaagcggtttgaggcttcgcgtcaggcggtttga

SEQ ID NO: 41542 - DNA, 276 bp, Neisseria meningitidis
ttgcgcggcaaaaccaaagtgatgacgacccagatgtgtgcttcccgcgatgtcagcaaaagcgccaaaggttggagtgtcggtatcggtctgaatgtaggcaaacagttgaccgacagcgtcggtctcgagtttgatccatactaccgtcacaaaacaatctgcaaaccccgtgagattgttttggacggcgacaaaaccaaaatgggccgctccaaatccaacgagtacggcttccgcgtaaccgcaacgttctatagtcaattaaaatcaaag

SEQ ID NO: 41543 - DNA, 306 bp, Neisseria meningitidis
atgaacatcgaacaagtccacatcgaagtcatgcacgcccggctgaccgtcaacacgccggcagaagaaaaagacacactgttgcaggcagtcggaatgctcaacggcaaagccgaagccatccgcgaaggcggacgcgtcgcggacagcgaaaaaatcgtcattatggccacgctcaacgtcgtccacgacctgttgaaaacctccctgaacggcggcgatttggcaatcggcgattttgcgcgtaaaatagccgatatggacaacgcctgccaaaaagcactatcccgcttggcgcaggaataa

SEQ ID NO: 41544 - DNA, 600 bp, Neisseria meningitidis
atgcgcaaacagaacactttgacgggaatcccgacttctgacggacagagggggtttgcactgtttatcgtgctgatggtgatgatcgtcgtggcttttttggttgtaactgccgcgcagtcttacaataccgagcagcggatcagtgccaacgaatcagacaggaaattggctttgtctttggccgaggcggctttgcgggaaggcgaacttcaggttttggatttggaatatgatacggacagtaaggttacatttagcgaaaactgtggagaaggtctgtgtaccgcagtgaatgtgtggacaaatacaaataatgataatgaagaggcttttgacaatatcgtggtgcaaggcaagcccaccgttgaggcggtgaagcgtttttgccctgcaaattctaccgacctgtgcattgacaagaaagggatggaatataagaaaggcacgagaagcgtcagcaaaccaccgcgctatattatcgaatatttgggcgtgaagaacggagaaaatgtttatcgggttactgccaaggcttggggtaagaatgccaataccgtggtcgtccttcaatcttatgtaagcaataatgatgagtaa

SEQ ID NO: 41545 - DNA, 885 bp, Neisseria meningitidis
atgtatgcgatgttgggtgatgtgcgatttgagcttttaaacagcttcacatcgcttgaggcggaacattcggcgaactttgccaagcatgaggtcttaaaaggccgtccgcgcctgcaggccttgcaaaacgaactgacgacgttgcgtttctctctcaagttgcattggcggctgggtaatcccgacacggcttataagggtctgctgtcggctttggaggcgcagcaggcagtgtctttggtttacggcagcggccgttttgtcggatggtttgtgcttgagcggctgacggagcgcacgttgattcaggacgcgcaaggtcggacggcggcgcgggagttggatgtggagctgacccagtttgtcggcgacccgaataatcccctgcctacgcccgcagtcaaatcgggcaggcaaaatccgctcctgtccttattaccggagagcgttcgggctcaggcatcggatgtagtgagtgcggtcgaaaaaggtatcaaggtttaccgcgctgcggaatcgggcatagccgatatgcagaacctgatacgcgcggccaaagatttgaaaaacgacccgtcagggacattaaacctgttgggggacgcactcaatgtcggtggcagcactttaggaaggctcaataccttgccggaagtaacggcggttttcggcgacctgaaaggcgcggcagaatttgcggcacaggccggacaagcggccaaccggctgggcggagccgtcggcggttatgagggcggttcggtaggaagttggttggatgcggtggaaaacggcgtagccgaagcatcggatgcgctggcaaacggctctgccgccgcccaggctttgaccggctatcttgcggcaagaaaggataaatga

SEQ ID NO: 41546 - DNA, 408 bp, Neisseria meningitidis
atggaaattcgggcaataaaatatacggcaatggctgcgttgcttgcatttacggttgcaggctgccagttggcgggttggtatgagtgttcgtccctgtccggctggtgtaagccgagaaaaccggctgccatcgatttttgggatattggcggcgagagtccgccgtctttagaggactacgagataccgctttcagacggcaatcgttccgtcagggcaaacgaatatgaatccgcacaacaatcttacttttacaggaaaatagggaagtttgaagcctgcgggctggattggcgtacgcgtgacggcaaacctttgattgagacgttcaaacaggaaggttttgattgtttgaaaaagcagggattgaagcgaaacagcctgtccgagcgcgtccgatggtaa

SEQ ID NO: 41547 - DNA, 525 bp, Neisseria meningitidis
atgtcattgaacaaagtcatcctcatcggccgcctcggacgcgatcccgaagtgcgctatatgcccaacggcgaggcggtgtgtaatttcagcgtcgccaccagcgaaacttggaacgaccgcaacggccaacgtgtagagcgtactgagtggcacaacatcaccatgtaccgcaaactggcggaaattgccgggcaatacctcaaaaaaggcgggctggtttatctggaaggcagaatccaaagccgcaaataccaaggcaaagacggcatcgaacgcaccgcttacgatattgtcgccaacgaaatgaaaatgttgggcgggcgcaatgaaaacagcggcggtgcgccttacgaggaaggttacggtcagagtcaggaggcttaccaacgccccgcgcagcaaagccggcagcccgcctccgacgcgccgtcccatccccaagaagcaccagccgcgccgcgccgccaacccgtgcctgccgccgccccggtcgaggacattgacgacgatatcccgttctga

SEQ ID NO: 41548 - DNA, 165 bp, Neisseria meningitidis; identical to SEQ ID NO: 38385

SEQ ID NO: 41549 - DNA, 249 bp, Neisseria meningitidis
atgctgacacccgaacaagtcaaggccctgattgcaggcgtggcaaaatgcgaacacatcgaagtagaaggcgacggacaccattttttcgccgtcatcgtttcatcagaatttgaaggcaaggcacgcctcgcgcgccaccgcctgattaaagacggactcaaagcccaactggaaagtaacgaactgcacgcactttccatttcggttgccgccactccggcggaatgggcagccaaagcacaataa

SEQ ID NO: 41550 - DNA, 780 bp, Neisseria meningitidis
atgatgcaaaaaacacaacaaactctaccgattatcccttggatgggcggcaaacgtcgattggcaaaacacctgttgcccatgtttcccgagcattcgtgttatgttgagctgttttccggcggcgcggcgttgttctttatgcgcccaacgcctgctaaagtagaggtactcaacgacatcaacggacagctcatcaacctataccgcgtggtacaacaccactttgacgagttcgtccgccaattcgattggacgttgaccagtcgcgaggtatttgcccgtctgcaaagcaccccgcctgactgtatgaccgatatacaacgtgccgctcggttcttctaccttcaacacaacgccttcggcggcaagaccgtccatcaacattttggtacggcaaccacatcaaaagcgtgggatgcgtcgcagattagggcaaaattgacagcatctcaagcccgtttgagaggagtatttatcgagaacgaaccgtgggagcgctgtttcaagcgatatgaccgagagcataccttcttctacgcagacccgccgtactggcaaaccgcagggtacgaccacgcattcgattggccgcagtatgagctgctggccaaagcgatggtggagagcaagggaaaattcatgctatctatcaatgaccatcctgatataagggagttgttcaaagacttccgcatcacacagcttgagcttgcctatacggttggcagagacaaaaccggtaaaacaaacggtgagctggtcatatgtaattggtaa

SEQ ID NO: 41551 - DNA, 1227 bp, Neisseria meningitidis
atgtcgggcaatgcctcctctccttcatcttccgccggcatcgggctgatttggttcggcgcggcggtatcgattgccgaaatcagcacgggcacactgcttgcgcctttgggctggcagcgcggtctggcggctctacttttgggtcatgccgtcggcggcgcgctgttttttgcggcggcgtatatcggcgcactgaccggacgcagctcgatggaaagcgtgcgcctgtcgttcagcaaacgcggttcagtgctgttttccgtggcgaatatgctgcaactggccggctggacggcggtgatgatttacgccggcgcaacggtcagctccgctttgggcaaagtgttgtgggacgtcgaatcttttgtctggtgggcattggcaaacggcgcgctgattgtgctgtggctggttttcggcgcacgcaaaacaggcgggctgaaaaccgtttcgatgctgctgatgctgcttgccgtgttgtggttgagcgtcgaagtgttcgcttcgtccggcacaaacgcagcccccgccgtttcagacggcatgagtttcggaacggcagtcgagctgtccgccgtgatgccgctttcctggctgccgcttgccgccgactacacgcgccacgcgcgccgcccgtttgcggcaaccctgacggcaacgctcgcctacacgctgactggctgctggatgtatgccttgggtttggcagcggcgttgttcaccggagaaaccgacgtggcaaaaatcctgctgggcgcaggtttgggtgcggcaggcattttggcggtcgtcctctccaccgttaccacaacgtttctcgatgcctattccgccggcgcgagtgcgaacaacatttccgcgcgttttgcggaaacacccgtcgctgtcggcgttaccctgatcggcacggtgcttgccgtcatgctgcccgttaccgaatatgaaaacttcctgctgcttatcggctcggtatttgcgccgatggcagcagttttgattgccgacttcttcgtcttgaaacggcgtgaggagattgaaagctttgactttgctggactggttctgtggctggcgggcttcatcctctaccgcttcctgctctcgtccggctgggaaagcagcatcggtctgaccgcccccgtaatgtctgccgttgccattgccaccgtatcggtacgccttttctttaaaaaaacccaatctttacaaaggaacccgtcatga

SEQ ID NO: 41552 - DNA, 621 bp, Neisseria meningitidis
atgaaaccgcaattcatcactttggacggcatagacggtgccggcaaatccaccaaccttgccgtcatcaaggcatggtttgaacggagggggctgcccgtgctgttcacgcgcgagccgggcggaacgccggtcggtgaggccttgcgcgaaatcctgctcaaccctgaaaccaaagccggtttgcgtgcggaaacactgatgatgttcgccgccagaatgcagcatattgaagacgtgatattgcctgcactttcagacggcatccatgtcgtgtccgaccgttttaccgatgcaaccttcgcctatcagggcggcgggcgggggatgccgtctgaagacattgaaattttggaacattgggtgcagggcggtttgcgccccgatttgaccctgctgttggatgtgccactcgaagtgtcgatggcgcgtatcgggcagacgcgcgagaaagaccgtttcgagcaggagcaggcggatttctttatgcgtgtgcgcggcgtttatctcgaccgagccgccgcctgtcccgaacggtacgccgttatcgacagtaaccgcaacttggatgaagtcagaaacagcatagaaaaagtgttggacggacatttcggctgctga

SEQ ID NO: 41553 - DNA, 879 bp, Neisseria meningitidis
atgaattacgcaaaagaaatcaatgcgttaaacaacagcctttccgatttgaaaggcgacatcaacgtttcgtttgaatttttcccgccgaaaaacgaacaaatggaaacgatgctgtgggattccatccaccgtctgcaaaccctgcatcccaagttcgtatccgtaacctacggcgcaaattccggcgaacgcgaccgcacgcacggcatcgtcaaacgcattaagcaagaaaccggcttggaagccgcgccgcacctgaccggcatcgacgcttctcccgacgaattgcgccaaattgccaaagattattgggacagcggcatccgccgcattgtcgccctgcgcggcgacgagccgcccggttacgagaaaaaaccgttttatgccgaagacttggttaagctattacgctccgtcgccgacttcgacatttctgtagcagcatatcccgaagtgcatcccgaagcgaaatccgcacaagccgacctgattaatttgaaacgcaaaatcgatgcgggcgcgaaccacgtcatcacccaattcttcttcgatgtggaacgctacctgcgcttccgcgaccgctgcgtgatgttgggcatcgatgtggaaatcgtccccggtattttgcctgttaccaacttcaagcagctcggtaaaatggctcaagtaaccaacgtcaaaatcccaagctggctgtcgcaaatgtatgaaggtttggacgacgaccaaggtacgcgcaatctggtggcggcaagtatcgccatcgatatggtcaaagtcctgtcccgcgaaggcgtgaaagatttccacttctatacgcttaaccgcagcgagctgacttacgccatttgccatattttaggcgtgcgcccttaa

SEQ ID NO: 41554 - DNA, 1218 bp, Neisseria meningitidis
atgacagcacccgtaccaacgtgtaatatgtcgggaaatccaataaatttacacaagctaacacttatcatgcccctccccctcccctctcccgaagcacggcaattctcgctcaaactgcaaaccctcattgccgaaaaaatcggcaaacacggcaactggattccattttcacgttttatggaattggttttatacgctccgcaatacggctactacaccggcggcagccataaaatcggcaataccggggattttattaccgcaccgaccctcacctctctgtttgcacagacactggcacgccaacttcaagaacttctatcccaaacggcgggcaatatctatgaattcggcgcgggaaccggacagcttgccgccgatttgttgggcagcatttcggacggcatcagccgttactatattattgaaatatcgccggagctggcagcacgtcagaaaaacctgattcaagcacgcgcaccggaagcatctcaaaaagttgtccacttgaccgcacttcccgaagcgtttgacggcatcatcatcggcaacgaagtactcgatgccatacctgtcgaaatcgtccgtaaagatgaaggcggctcattcgagcatgtcggcgtttgcacggacaacggccgtttcgcctattctgcaagacccttgcacgacccgtcgctttccacctcggcttccctctattttcctcaaacagattatccctacaccagcgaactacatccgcaacaatatgcctttatccgcacccttgcctcaagactcgaacacggctgcatgatattcatcgactacggttttgatgcagcgcagtattaccacccgcaacgcaatcaaggtactctaatcggacactaccgacatcacgttatccacaatccttttgacttcatcggattggccgacctgaccgcgcatgtcaactttaccgacattgcccaagccgggacggatgccggattagatttgataggttaccttccccaatcccatttcttattgaacctgggcattaccgagctattggcacagacggggaaaacgaattcggcagcctatatccgtgaagctgctgccgttcagaaactgattgaccagcacgaaatgggcgaactgtttaaagtcatcgtattcggaaaaaatatcggcgtcgactgggcaggattccgcttcggcgacatctgccacaaactctaa

SEQ ID NO: 41555 - DNA, 324 bp, Neisseria meningitidis; identical to SEQ ID NO: 38645

SEQ ID NO: 41556 - DNA, 462 bp, Neisseria meningitidis
atggatttgcgcaaattaaaaaaactgattgatttggttgaagaatcgggtatcgccgaaatcgaagtaaccgaaggcgaggaaaaagtccgcatcacccgtaccattgcagctgcggcagctcccgtttacgccgcgcccgtacctgccgccgcgccggccgtaacgcctgccgccgcacccgttgcggcatccgcgcccgccgccgcacctgccgcccgcgatttgtccgacgcgcaaaaatcacctatggtcggcacgttctaccgcgcacccggcccgaatgccgcgccttttgtcgaagtcggccaacaggttaaagccggcgacacgctgtgcatcatcgaagcgatgaagctgatgaacgaaatcgaagccgaaaaatccggcacggtcaaagaaattttggtcgaaaacggtacgcccgtcgaattcggcgaaccgctcttcatcatcggataa

SEQ ID NO: 41557 - DNA, 438 bp, Neisseria meningitidis
atggaccaaaccgtttacctttacaccgacggcgcgtgcaaaggcaatcccggcgcgggcggctggggcgtgttaatgcgctacggtagccacgaaaaagaacttttcggcggcgaagcgcaaaccaccaacaaccgcatggaactgactgccgtcatcgaaggactgaaatccctcaaacgccactgcaccgtcatcatctgcaccgactcgcaatacgttaaaaacggcatggaaaactggatacacggttggaagcgcaacggctggaaaaccgccgccaaacagcccgtcaaaaacgacgacttgtggaaagaactcgacacactggtcggacagcatcaagtcagctgggcttgggtgaaaggacacgcgggacacgccgaaaacgaacgcgccgacgatttggcaaaccgtggcgcggcgcagttttcctga

SEQ ID NO: 41558 - DNA, 450 bp, Neisseria meningitidis
atgagccttatcggcgaaattttgcctttgtcccatattgttttggatatggaggtgggcagtaaaaaaaggctgtttgaggaagcaggcctgcttttggaacgcgaatcctcattgtcccatgctgatgttttcgaatgtctttttgcccgtgaaaaactcggttcgaccggtttggggcagggcgttgccatcccgcacggccgtcatgccggcgtgaagcaggcgacgggcgcgttcatccgcacgcgcgaacccgtcggatttgacgcaccggacggcaaaccggtttccctggtttttatcttgctggttccggaaaatgcgacgggtgagcatttggaagtcttatccaaactggccggcaagttttcccaaaaaagcatcagagaatcgctgatgacggtttcttctgcggaagaagcccgcgccattctgatcgaagaataa

SEQ ID NO: 41559 - DNA, 2604 bp, Neisseria meningitidis
atgaataaaaaatatgcaacaaaagccgaaattaatgccgccgcgcatggccggtggcgtgaggttttagaagcgtgcggcataccgtccgaaattttagataaaaaacatcacccctgtccgtcatgcggcggatccgaccgattcaggtttacggacggtagcggttcaagtcgcgggagtggtgtttggatttgtaaccagtgcaagccagatggcggcagtccgtttgatttgttgatggatgtttgcgggtatagttttaacgaggctagagacaaagttgcctccttgcttgggttggcgcatggggatttggtagataaggctccgaagccgttacctcctcctgctccagtaaaggaggaggagcgtgatttgtggaagccaatcgttcctgtgcctgaatatgcgctgaattctatgagctttgggaatggatttagaaaatcagacgacctgatttttaaatctgttttccgcgatagctccagcgcggttttgggcggtgttgcccgatttagaaaatcagacggcggaaaaatcgatctgccttatacgttttgcgagcataagaaaacaggcgaaaagatgtggcgttggcgttgttgggataacccgcgcccattgtacggtcttgattctttggctgctgacccatcattaccggttttggttgttgagggggagaaatgtaagaacgcggcagatgctcagggttataactatgccgtcctgacgtggcatggcggttgtaataactgggataagtctgattggtcggcggtcgttgatcgcgatgtcgtcttatggcctgattgcgattcgctgcgtcaaaagctaacaaagaaagagcgcgatgatggtgttgaccctgaatccaaaccgtttctgccgcgcaatgagcagggcggaatgaaggcgatgcttggtattgccgatgtgctgacaaagcagaattgccgcgtttggttggtcaatattcctgctccagggatatggcctcatggtttcgatattgcagatgcgattgcagacggcgggcgcatcgtcgacccttccgaagtattgagctggatgggcgcggcggattggctggttgagtatgtgccggaagcggaaatgccgtctgaaaactttcccgcacccattcaaggtatggagccggaatctgagcagttgcatgaatctctcgaagcaacaggcaatcaagggggcgcgggggatatggatgacgaatatttggccaaattgcaaaaactgaaatctgatttcgggcttgttgaaggtaaagaccacggggtgaacaggaagactggggttacatatacccgaaaagccatgaccgtccatttcggcaaagacgttgttgatgcttggtatgaatggggccgtgcgccggtgctgactatgtacgaaatcaaccgtctgaaaaaagactacgcattgattcaggcggtaaaagatgatgacacgcaagatatgatggagcgtttcatttatcttgatggttcggcatcgatttgggacaacaaactatggcgcgttgtccctgaaaaggcggctcgtctgtcgatgacgcctgatggttttaaaatttgggtcaatagcccgagccgaattgtaaaacggttcgaccgattggtctttgagcctggtcgggtgttgtctgacgactatatcaacatcttccgaggcatgccgattgaaccgaaattcccgattcccaaagaggatatgcccgaaacaaactacgaattgtatagattattccctgaaatcaagccgattctgaatttgattaatcacttatgtaatggggattaccaacaggtcgaatacattttgaattggctggcttatccgttacaaaacgtaggcgcaaagatgacgaccgccgttgtcatgcacggtcatatacacggtgcgggtaaatctttctttttcgaggaaatcgtgaagccgatgtacggcgaatacggcgcaacatatggtcaagaggacttggaaagcaactatacggcaaaccgatcaggcaaaatgttcggtatttttgaagaggtttacacaaatcagcaaaaatacaataaaacaggcagccaaaaacatatgattaccggcaagacgatgcgcgtcgagcggaaatttcaggatgcttacgaagaagcaaaccatatgaattgtgtgtttttgagtaatgaatctcatcctttcaaaattgaggaaaacgaccggcgttatttcgttgtatggcctgagaaaaagttggacaaaaaattgcgcgatgaagttttagactgtatcggcaacgatggtgtccgtttgttttacagtttcctgctgtgttggaatttttatctgacttacgggcaacagggagcagaaaacgaaaaaggatacgaggtaatcaaactggaagagcctgtaagattcgatccaaacacgccgccgccgatgactgccgcgaaacaaaacgtcatttcctatggccgatatgcttggcaaaccttttattcggagtgggctggcggtggtattaaagacctgccgttttgctgttgcattacagacgaccttggattcggatttcaagtgcaacactag

SEQ ID NO: 41560 - DNA, 573 bp, Neisseria meningitidis
atggacaatcacgccgaagcacactggcaggacggttggctgcaaagcgtgcgccacattccgtcgccgaatttcggcccgagggagtccaaagaagaggtttcccttgtcgtattgcacaatatctcgctgccgccgttcgaatacggcacggatgcggtggaaaagctttttgccaaccgcctagacccgaacgaccacccgtttttcggattgatacacactttgcgcgtatccagccatttcttaatcaaacgcgacggcaaaacggtgcagttcgtatcatgcggcgatatggcgtaccacgcgggcgtatcctcgtttcgcggacgggaaaaatgcaacgcattttccatcggcatcgaactggaaggctgcgatttcgaaccgtttgccgaagcgcaataccgttcgctcgaagccttgttggacgcaatctgccgccgctaccccatcacagcggtaacggggcaccaagacatcgcgcccggccgcaaaaccgaccccggccattttttcgactggcggcggatacgggggaaagggtttcccgtggacagaaatgccgtctga

SEQ ID NO: 41561 - DNA, 600 bp, Neisseria meningitidis
atgtctgaaaaaccggaaaaaatcgttttggcaagcggcaatgccggcaagctcgaagaattcggcaacttattcaaaccttacagcatcaccgtattgccgcaatccacattcggcatacccgaatgccccgaaccctattccacctttgtcgaaaatgcgctggcaaaagcacgccatgccgccaaatacagcgggctgcccgcacttgccgacgacagcggcatctgtgccgccgccctaaacggcgcaccgggcatacattccgcccgatacgccggcagcaatcccaaatccgataccgccaacaacctgaaacttgccgccgaacttgccggcaaagccgacaaaagctgttgctacgtctgcgtattggtttttgtcctccataaagacgacccgcgtccgattattgccgaaggcgtatggcacggacaatggaacggcgttcccgccggtgaaaacggtttcggttacgacccgtatttttatctgcccggacacggcaaaaccgccgccgaattggattcggaggtcaaaaaccgcgaaagccaccgcgcgcaggcacttgccgaactcttacgcaaactcgccctttaa

SEQ ID NO: 41562 - DNA, 291 bp, Neisseria meningitidis
ttgagaataaaaaaatccttcttcggggggcaggttgtttatttgcccagaagcattgttaattcaacaaaaatggatgcactgtatgtttccgctccattttatttcgacgatgattttcaggtctgttatggcgaacactacaatatcgttttccctttgcttgtccccttgtataaacaggaagccgaattggtggaaaagaaaggttggaatgcttttgagcagttcttgctggataatgaagttgacaacctttcggatatgaatcggaaaccgtttgcttggtaa

SEQ ID NO: 41563 - DNA, 1422 bp, Neisseria meningitidis
atgcgccacctacccctgttttcactaatgcttttccccgcatcggtttacgccgcagatttggacggcgcaaacctaaacctgctgtggagcctgccctttgccctgattttgctgtctatcgcattgggtcccttgtttttttcgcatacctggcatcaccattacggcaaaattaccgccttttggacattgctcttcctcatcccgttcagtttggtttttggcgcgtccgccggtatccataccgtcgcacacgcactcgttgaagaatacatccccttcatcctgctgctgcttgccctgtacaccatttcaggcggcattttggtttggggcgacttgaacggcacacccaagctcaacaccgccctgcttgccgtcggtacggcacttgcctctatcatgggaacgaccggcgcagcaatgctgatgattcgtccgctgctgaaagccaaccaaaaccgtacccgccgcgtgcacatcgtcatcttcttcattttcctggttgcaaacatcggcggcggtctgacccctttgggcgaccccccactcttcctcggcttcctcaaaggcgtagatttcatgtggacggtcaaacatatgttcgcccccgtcctgatcagcaccgctgtcctgttgaccgccttctatttcatcgacaaccgtttcttcaaacaggaaagcattgcacaagatacgccggcacaacaggaaaaacccgaaaaaatcgccatcttcggcaaatggaacttcctcctgctttcgggcgtggtcggcgcggttctaatgtccggcctttggaaacccgaacacccgggatttgaaatcctcggcagccgttacgccctgcaaaacctcgtccgcgatgtcatcctgattgcattgaccgccgtatctatggcaatcacgcccaaacaagtccgcgcaggcaacgaattcaactttgaacccatcgccgaagtgggcaaactcttcctcggcatcttcatcaccatctttcccgtcctgagcattctgaaagcaggcgaggcaggcgcgctgggcggggtggtatcgctggttcacgatacggcgggtcatccgattaatgtgatgtatttttggatgagcggcatattgtcggcattcttggataacgcgcccacttatctcgtttttttcaatatggcaggcggcgatgcccaagccttgatgacgggttccctgtttcattcgctgctggcggtttctatgggttcggtattcatgggcgcactaacctacatcggcaacgcaccgaacttcatggtcaaggccattgccgaacagcgcggcgtaccgatgccgactttcttcggctatatgatgtggtcggtcgccttcctgacacccgtcttcatcgtacatacccttatctttttcgttttcaaactgctgtaa

SEQ ID NO: 41564 - DNA, 477 bp, Neisseria meningitidis
atggaacacctatttgggaaatggctgcccgacctgcccgccgacgtttcagacggcatcagcctgccgatggtgcggctgctgcacacccggtcgctgaccgccgcattgcgcgccttgccgcatacattttcggtggaactgctgaaactgggcgaattggagacggaatgcggagggaggctggtgcgcgaagttttgttgaagctggaccgtatccctgttgttgaggcaaggagcgaatgccgtatcggttcggcgttttggcaaaacattttggactgcggcacgcgtcctttgggcgagcgtctgtttcaagccgatttggaaggggcgcgttcggtgtttgagtttgccgttttcggcgaaggatgcggacggtactttgccgcgcggcgttctcggttttcccgtcacggcgaggaaatgctgctgaccgagtattttctgcccgaactgaaacgctttatcggataa

SEQ ID NO: 41565 - DNA, 216 bp, Neisseria meningitidis
atgaccatcacagaagaatactccatcgacatccgcgtaaccgcagaacaggggaaaaacgactacggctaccccaccgaacgctacggatgcgacatcatcaacacagacggggagctacttgtcggcatagagccagagtacaaaaccccctttgccgccgtcaaacaagcactcatctgtctgacaaaagacaacctcaaaaacgctgcctga

SEQ ID NO: 41566 - DNA, 591 bp, Neisseria meningitidis
atgtcggaaaggataatactgccggtcttgtcgttgggcggcgttcgtctcgaaccgttggatgtgcatcatgaaacgggtttgcgcgaggcggtttgcgatggggaggtttggaagctgggggtaacgtccgcacctcatccggatagggtggcagactatatcggaacagcattggcaacgcgtttggcgtttgcggttgtcgatgaagaggcgggcagggtggtcgggacaacggcgtattatcattttgaaccgcagattccgcgtttggatatcggattcacatggtatgcggcatcggcacggcggacacggataaacacctgttgcaaaatcatgctgttggattacgcatttgatgttttggcttgccgttgcgtgggatggcgcacggatattctgaaccttgcctcgcaacgtgccatcgaaaggctgggcgcggaaaaagacggcgtgctgcgtatgcatatactccgtaaagacggcagtgtgcgcgatacggttgtgtacagtatgctgaggaaagattggtgcaaaaacagggaaatcctgaccggcaggttggcgggatatggcgtgcaggtgtga

SEQ ID NO: 41567 - DNA, 780 bp, Neisseria meningitidis
atgaaagaacacaaagcccgcaagcgtttcgggcagaattttttgcaggacacgcggattatcagcgatattgtcaacgccgtgcgcccgcaggcggatgatgtcgtgattgaaatcggtccgggtttggcggcgattaccgaacctttggcgaaaaagctgaaccgcctgcacgttgtcgaaatcgaccgcgacatcgtatgccgtctgaaaacgctgccgtttgcggataaactggtgattcacgaaggcgatgtattgcagtttgatttcaacggcatcgcaggcaaaaagaaaatcgtcggcaacctgccctacaacatttccacgccgcttttgttcaagctggcggaggtggcggacgatgtcgtcgatatgcactttatgctgcaaaaagaagtggtcgatcgtatggttgccgcgccgaaaagcaacgactacggccgcttgggcgtgatgctgcaatatttcttcgatatggaaatgctgattgacgtgccgcccgaatcgttcgaccccgcgccgaaagtggattcggccgtcgtccgcatgattccggtgaaacaccgtatcggcaaggcggacgatttcgagcatttcgccaaactcgtgaaactcgccttccaccaacgccgcaaaaccatacgcaacaatctgaaagagcttgcaggcgacgatgatttgcaggcagtcggcatcaatccgcaagaccgcgccgaacatatcgcgccggaaaaatacgtagcgttgagcaattatctggcgggcaaggccgtctga

SEQ ID NO: 41568 - DNA, 246 bp, Neisseria meningitidis; identical to SEQ ID NO: 39751

SEQ ID NO: 41569 - DNA, 717 bp, Neisseria meningitidis
atggataaggacaaggggtcttatgcgggtattcctgtacaaaataccaaagaattagtttggcagaaaatacaagaaatacctatttctgaatgtggggaaccgttggtcagtgtgggtaataccggacgcattcgtgtcaatcctgtttatttttctcagggtattgaaggtgcaataaatactgttttattgcgtagaagtgttgctgataggctgactcaggttgtctctttgctgccggaagtgtacgggttggaaatttttgatggttggcgtcctgtcatagtgcaaagagcattacgagaaaatatgaagcaagaaattgaaaaacgccatccggaatatgatgaagttcaagttagagaagcactggactgtttttctgctgatccagatcgggcaggaatgcctctgccccatttgacgggcggatctgttgatgtcggattgtttgatataaaaagtggcaaaagtttggatatgggaagtgagtttgatgcaactggacatttatcttatagcgatgctttagagaaagaaggtgagtatttctcctctgctcgtaatttacgccggattttgattcatgcgatgagagaggcaggatttagtaatttgccaaccgaatggtggcatttcgattatggcaaccaaaattgggcttattttacccaacaaagcaacgcagtttttggggcggtagaagagcaggat

SEQ ID NO: 41570 - DNA, 1143 bp, Neisseria meningitidis
atgaatactttatatacacttttcgccacctgcccgcgcggcttggaaaccgttttatcgcaagaactcgaaagcctcggctgtaccgatgtacaagcgtttgacggcggcgtttcctgccggggcggattggaacaggcctacgccgccaacctgcactcgcgtaccgccggccgtatcctgctacgcctgaccaaaggtacataccgcaccgagcgcgacatctacaaacttgccaaaaacattaactggtttaattggtttactttacagcagacgttcaaagtcaaagtcgaggcaaagcgtgccaacgttaagagcatccaatttgtcggtttgaccgtcaaagatgccgtctgcgacgctttccgcgacatttacgatgcccgtccgagcgtggacaaagccgcgcccgatgtccgcatccacgcctttttggacgaacgcaatgttgaaatcttcatcgacacttcgggcgaagccctgttcaaacgcggctaccgcctggataccggcgaagccccgctgcgcgaaaaccttgccgccggactgctgctctcggcaggctacgacggcacgcagccgtttcaagacccgttttgcggcagcggcacgattgctatcgaagccgcttggattgccacaggccgcgcaccgggcatgatgcgccgcttcggttttgaaaaactgcaaaatttcgataaaacgctgtgggcggatttgcgccgccgcgccgaagcgcaaacccgccccgtccgcgccccgattgcaggcagcgacagcgaccgccgcatcgttcagacggcattggacaacgcacgcagtgccggggtggacgacatcgtttccttcagcgttgccgacgcgcagtccgtccgtccgaacggcgaaaacggcattatggtgtccaatccgccctacggcgtgcgccttgaggaagtccgcgctttgcaggcactttatccgcagttggggacgtggttgaaaaaacactatgccggctggcgggtcggtatgtttaccggcgacagggaaatgcccaaattcatgcgcctgtcgccaaaacgcaaaatcccgctttataacggcaacatcgactgccgcctgttcctgattgatatggtgcagggatcgaaccgttga

SEQ ID NO: 41571 - DNA, 1740 bp, Neisseria meningitidis
atggcacaagaaagagtaaaaccactagagcttgaattattatgtgaaaaattaaatcatgatttttcaggaaaaattacaggtcaggggcaaaatgacgaatccaagagacgtaattttttatcaaaagccattgcagcttttgtattacatgaagaaacaacagcaagtttggatgatgcagtttcagccagtgttgatggtggtttagaccatgggattgacgctattcttattgatagcaatcatgtaatttggctagttcaatcaaagtatattgacactggtgctggtgagcctgaattaggagatgtttctaagtttcgtgatggtattattgatttgttagaaggaagatttgatagatttaatgatgctataaagagtaaaaagacagacatagaaaatgttatgaatagcggtatatgtaaagttaaggctattttagcatattcgggaacagcgatctctgataataaaagagatattttttctgatatagaaagaacttttaatgattcatcacctgactttatacgctgttatgcttacggattaagtacactacatgaactgcataagtcttgtttagaagaaaactcaattgatgaagaaattgaattggtaaactttggtcatattcaacaaccatataaagcttattatggacaaataaaggcagagaaattatttagcctatggaatacgcataaacataagctggttgaaaaaaatatacgtagatttaaaggagaaacatctgttaatcaaagcttaaagaaaacattagatgataatccagaacattttttctatttcaataatggcattacttttttatgcaattcaattgttgaaataggttcgagaaattcaaataggcagaccggaaaatttaaggttcagggactttccataattaatggagctcaaactgttggtgtaattggaagcaaatctttcgagttttatcagcaacatcctatacatgtttttgctactttcttatgcttaaatggaacgcctgatgatttttctatcgaagttacccaagcaagaaatagacaaaacgctgtttctctggaggattttgcttctttagatgataaccagattcggctaagagatacgttgagtatagcaggagttacttatttaattaaacaagggtatgatgattctcctgattctgatacctgctttaatattcgtgaattggtgccactgttagcctgtacggtaacaagtagtgattggcaggaatatgttatagcggctaaatccgataaaacacgattgtttcagcaagtcgctttaacatctcatcgtaaaaaaatgaaagatgcttatcagaaactattttcggattctagaacagccacggaaatatggagaatcgtgcaacttggcagaataatcaaacaaatagttaaggatcgcgcaagtggcgaatcaattgaacatagtgttaatttgcaagcaaaagacattttgaatcaaggtatttggttaatcattcatattgtttttcttagaacaaaactgcaaaatggcaataagctcttcattacggaagatgaaaaacaaaggttatcttctgaaattgatacgataagccacaaattagtaaatgttatacagtcagaacaatgggaaaaaactgcacaagcaatttttgagaatcaaacagactgtaacacgatcaaaaataggctgatggctgctctagcatcggcataa

SEQ ID NO: 41572 - DNA, 414 bp, Neisseria meningitidis
atgatgcccgcctacgcctacgccgcgctcgctttttccgccttcacttccgccaccctcctgcccggcacatccgaagccgcctttgccctgttcgtccaccgctttcccgaacacgcatacggcgcgttgctgtgcgccggccttgccaacggattgggcagtatggtttcctattggatggggcgtttgctgccctcccgaaaaatgccgtctgaaaaaacactgaatctgatgcggcgtttcggtatttggctgcttgcgtttgcctggctgcccgtcgtcggcgacgcactgccgcttgccgccggctggctgcggttgaatccgtggacaagcgggctgatgctggttatcggcaaaacggcgcgttacgccttcattctgtggggaatgcaatattacgccgcctga

SEQ ID NO: 41573 - DNA, 1287 bp, Neisseria meningitidis
atgagcgcaatcgttgatattttcgcccgcgaaattttggactcacgcggcaaccccacagtcgagtgtgatgtattgctcgaatccggcgtaatgggacgcgcagccgtaccgagcggcgcgtccaccggtcaaaaagaggctttggaacttcgcgacggcgacaaatcccgctattccggcaagggcgtattgaaggcggtcgaacacgtcaacaaccaaatcgcccaagccctcattggtatcgatgccaacgagcaatcttatatcgaccaaatcatgatcgaattggacggtactgaaaacaaaggcaatttgggtgcgaatgcgactttggcggtttctatggcggttgcacgcgccgctgccgaagactcaggcctgccgctttaccgctacttgggcggcgcaggcccgatgtccctgcccgtaccgatgatgaacgtcatcaacggcggcgaacacgccaacaacagcctgaacatccaagagtttatgattatgcccgtcggcgcaaaatctttccgcgaagcattgcgctgcggtgcggaaattttccacgccttgaaaaaactgtgcgacagcaaaggcttcccaaccacagtcggcgacgaaggcggtttcgcccccaacctgaacagccacaaagaagccctgcaactgatggttgaagccaccgaagccgccggctacaaagcgggcgaagacgtattattcgcattggactgcgcctccagcgagttctacaaagacggcaaataccacttggaagccgaaggccgctcctacaccaacgcggaatttgccgaatatctggaaagtctggtcaacgagttccccatcatctccatcgaagacggcatggatgaaaatgactgggaaggctggaaactgctgaccgaaaaactgggtggcaaagtccaactcgttggcgacgacctcttcgttaccaacccgaaaatccttgccgaaggcattgaaaaaggcgtggcaaacgcactattggtcaaagtcaaccaaatcggtactttgagcgagaccctgaaagccgtcgacttagccaaacgcaaccgctacgccagcgtaatgagccaccgctccggcgaaaccgaagacagcaccattgccgacttggcagtcgccaccaactgtatgcagatcaaaaccggttctttgagccgttccgaccgcatggcaaaatacaaccaactgctgcgtatcgaggaagaattggcggaagccgccgactaccccggcaaagccgcattctaccaactgggcaaataa

SEQ ID NO: 41574 - DNA, 321 bp, Neisseria meningitidis
atgccgcattattctttttattcaagcagtaggaaaatgacggataccaaattgaacaccaaagaaattttggaactgaaagcgcgcgcgcaccatctccatcctgttgtgatggtcggtcagcagggtctgacggacgcggtcatcaaggaaaccgatgcggcattgacggcgcatgagctgattaaagtgcgcgtattcggcgacgaccgtgccgaacgtatcgaaatctgcactgccttatgtgaggcggttgacgcgcaacctgttcagcatatcgggaaacttttggtattgtggcgtaagaatatcgaaggctga

SEQ ID NO: 41575 - DNA, 672 bp, Neisseria meningitidis
atgactttttccgcgattctgttctatatccttgccgccatcgttttgtacggtgcggttcgtaccgttaccgcgaaaaaccccgtgcatgccgctttgcatctggtgctgaccttctgcgtgagcgcgatgctttggatgctgatgcaggccgagtttttgggcgtgacgctggtggtggtttacgtcggcgctgtgatggtgttgttcctgttcgtcgtgatgatgctgaatatcgacattgaagaaatgcgtgccggtttctggcggcacgcgcctgttgccggtgtggtcggcacattgttggcggttgccctgattctgattttggtcaacccgaaaaccgaccttgccgcatttggcctgatgaaagacattccggccgattacaacaatatccgcgatttgggcagccgtatttataccgactatctgttgccgtttgaattggctgcggtattgctgctgttgggtatggtggcggcgattgcgctggttcaccgcaaaaccaccaatccgaaacgcatggatcctgccgaccaagtcaaagtacgcgccgaccaaggccgtatgcgtctggtgaaaatggaagcggtcaaaccgcaagttgaatctgccgaagaaagcgaagtttcagacgacctcaaacagaaagaggagggcaaagcatga

SEQ ID NO: 41576 - DNA, 987 bp, Neisseria meningitidis
atgcaataccgaatcagaagagaaaacgaagcacccgaagcaaaaaatgcgggggaaaccttatgggagcgcgacattatgcgcgaagtgctgctgtccgcctatcgggacaggcgcagggagaggatgtggaaaaacatctggcgcgccgtcagcaccctgattctggttgccctgattgcaggcattttccgaaaagacgaagccgcattgcagttggcgggcaatacgccgcataccgcagtcgtcaacctgtacggcgaaatcggcaacggcgtagaagaccaggtcaaaaaactcaaagacggtatggaagccgcctataaaaacccgcaggcaaaagccatcatcatccgcgccaacagccccggcggttcgcctgtcgtgtccaacaccgcttttgaagaaatacgccgtctgaaagcgcagcaccccggcattcccgtttatctcgtggcggaagatatgtgcgcgtccggctgctactacatcgcggcggcggcggacaaaatctatgccgacccgtccagcatcgtcggcagcatcggcgttatcggcagcagtttcgacgcgaccggcctgatggaaaaaatcggcgtgaaacgcagggttaaaattgcgggcagcaacaaaggcatgggcgatccgttttcgcccgaaacgcccgaacagtcgaaaatctgggaagaaatgctgaccggcatacacggcgagttcatcaaagccgtcaaaaccggacgcggcggccgcctcaaattccgacaatatcccgacgtgttcagcggtcgggtgtacacaggcgcggatgcgcagaaagtcgggctggtggacggactcggcaatatttacagcgtggcgcgagacgtggtcaaagcccccgatgtggtggattacactccgaaggacgatttcggcagaatcttgggcagacgcttcggcgcagaactcaaagcaagcgtgcgcgaagccctgcaggccgtccggtag

SEQ ID NO: 41577 - DNA, 333 bp, Neisseria meningitidis
atgactgaaacattccgatggcgtgttgcttcggacaataaggctgtacataaattcgatgtccgttccgtccgctttggcgacggctacgagcaacggcagcctaaatctttgaaaccgaagctgcgaagctgggagattaagatagtcggacaaaaggctttgatgggagaaatcaaagccttttttgatgcccggcgcggtgttgagccgtttaattggagaccgcccgacggcgtgcctgtattggtcaaggtatcggaatatcaggaaacggcgaagggtggcaaagcctacgaattgagctgtacgtttgaggaggtgctttcatga

SEQ ID NO: 41578 - DNA, 186 bp, Neisseria meningitidis; identical to SEQ ID NO: 38014

SEQ ID NO: 41579 - DNA, 543 bp, Neisseria meningitidis
atgggcaaaaccgtaaccttaaccgctggacacagcaacaccgacccgggtgcggtcaacggcagcgaccgtgaggcggacttggcgcaggatatgcgcaacattgtggctgctattttgcgcgatgactacggtttgactgttaaaaccgacggcacaggcaaaggcaatatgccgctgcgtgaagctgtaaaactgattcgcggctcggatgtggcgattgagttccataccaactcggcggccggtaaagcagctacgggcattgaggcgttgagtaccgttaaaaacaaacgctggtgtcaggtgttgagcaaagctgttgccaagaaaaccggctggaaactgcgcggcgaagacggctttaaacccgacaatgcgggccatcattcgcgcctggcttatgcgcaggctggcggcattgttgagccttttttcatcagcaacgacactgatttggccttgtttaagacgaccaaatggggcatctgccgcgcgattgcggacgcgattgcgatgaaattgggggcggcaagagtatga

SEQ ID NO: 41580 - DNA, 249 bp, Neisseria meningitidis
atgatggtttttgacgatattgccaaacggaaaatccgttttcaaacccgccggggattgttggaattagatttaatcttcggcaggtttatggaaaaagaattcgagcatttgagcgataaagagctgtccgagttttccgaaatccttgaatttcaagatcaagaattgcttgccttgattaacgggcattcggaaacggacaaagggcaccttatcccgatgcttgaaaaaatcagacgggcatga

SEQ ID NO: 41581 - DNA, 1371 bp, Neisseria meningitidis
atgttagacaatttaaccggccgcttcagcaatgtcttcaaaaacatccgggggcaggccaaactgaccgaagacaatattaaagaggccttgcgcgaagtccgcctcgccctgcttgaggcggatgtcgccctgcctgtcgtcaaagagttcgtcaacaacgtcaaagaaaaggccctcggtcaggaagtggcgggcagcctgacgccggatcaggcatttatcggcgtggtcaacaaagccctgaccgaactgatgggcaaggaaaacaaaacgctggatttatcggtttcaccgcctgccatcgttttaatggccggtttgcagggtgccggtaagacaacaaccgtcggtaaactcgcccgtctgctgaaaaacgatcagaagaaaaaagttttggtggtatctgccgacgtttaccgccctgccgcgattgaacagctgcgcctgttggccgaacaggtcggcgtggactttttcccatccgataccaaccaaaaaccggttgagattgcaactgccgccgtcgattacgccaaaaaacatttttacgatgtattgatggtcgataccgccggccgtttggcaatcgatgaggagatgatgaacgaaatcaaagcccttcacgcggcggttaacccggtggaaactttgttcgtcatcgatgcgatgctgggtcaggatgcggtgaacactgctcaggcatttaatgaagccctgccgctgaccggcatcgtgttgaccaagatggacggcgattcgcgcggcggtgcggcattgtccgtacgccatgtaaccggcaagccgattaaatttatcggtgtcggcgaaaaaatcaacggcctcgaacctttccaccccgaccgtcttgccagccgtatcctcggcatgggcgacgtattgaccctgattgaagacgtccaaaaaggtattgatgaagaagccgccgccaaaatggcgaaaaagctgcacaaaggcaaaggcttcgacctcaacgactttaaagaacaaatccagcaaatgcgcaatatgggcggtttggaaaacctgatgtcgaaaatgccgggcgaactgggtcaaatatcgaaacaaatccccgaaggtacggctgaaaaagcgatgggtaaagtagaagccatcatcaactcgatgactccaaaagaacgcgccaaccctgccctgctcaaagccagccgcaaacgccgtattgcaatgggtgcgggcacgaccgtacaggaagtgaacaaattgctcaaacagtttgaacaaatgcaacaaatgatgaagatgttcagcggcaacggcttgggcaaactgatgcgtatggcgaaaggaatgaagggaatgaaaggaatgttcccgggtttgtaa

SEQ ID NO: 41582 - DNA, 417 bp, Neisseria meningitidis
atgtatctgttggataccaacgttatcagcgaaacacgccaggcaaatcgggcagacggcaacgttagagcatggctaaacaccattgacccggccgaaatgtacaccagcgcaattgtcatgatggaacttgaacggggcgttttgggtatggagcgcaaagacggacagcagggcggaatattgcgccgctggctggaagaagttgtaaagcccacattcaaagaccgcatattgcccatagacgaaaccaccgccgaaatatgcgcccgtttgcacatacccgacaaaagccccgaaaacgacgcctggatagcggcaacagccaagcagcacggtttaactttggcaacgcgaaatatcaaagactttgatcatagcggcgtgaaattgataaacccgtttgagaccgtctaa

SEQ ID NO: 41583 - DNA, 1077 bp, Neisseria meningitidis
atgcaagaatggttccaaaacctctttgccgcaacgctcggtctgggcgatttgggcatcaccgtaggcttggtggtatccgtcatcgtcaaaatcgtgattatcctgattccgctgattctgaccgttgcctacctgacgtatttcgaacgtaaagtcatcggctttatgcagcttcgcgtcggcccgaacgtaaccggcccgtggggtctgattcagccgtttgccgacgtgttcaaactcttgtttaaagaagtaacccgtccgaagttgtcaaacaaagccctgttctacatcggcccgattatgtcgcttgcaccgtctttcgcggcgtgggcagtgattccgttcaacgaagaatgggtgctgaccaacatcaatatcggccttttgtacatcctgatgattacctcgctgtcggtttacggcgtgatcatcgcgggctgggcttccaactccaaatattcgttcttgggcgcaatgcgtgcttccgcgcaaagcatttcctacgaaatcgccatgagtgccgcgctggtgtgcgtcgtgatggtgtcgggcagcatgaacttctccgacatcgttgccgcacaagctaaaggtattgccggcggttcggtattctcttggaactggctgccgctcttccccatcttcatcgtttatctgatttccgccgttgccgaaaccaaccgtgcgccgtttgacgtggcagagggtgagtctgaaatcgttgccggccaccacgtcgaatattccggcttcgcattcgcgctgttcttccttgccgaatacattttcatgattctgattgccgcgctgacatcgctgatgttcctcggcggttggttgtctccgttcccgcaaagctggggcattgtcggtacgccttccgccttctggatgtttgtgaaaatggcggcggtgttgtactggtacctgtggatccgtgcaaccttcccgcgctaccgttacgaccaaatcatgcgtttgggctggaaagtgctgattccgatcggcttcgcctacatcgtggttttgggcgtgtggatgatttcaccgctgaatttgtggaaataa

SEQ ID NO: 41584 - DNA, 1125 bp, Neisseria meningitidis
atgcagaatacttcctttgataatgaatccgattatagcgacgattcagactttgcgtcagcttccgaaactgaaaaccgtatcggtctgaccgttccgctcgagcttgccggcgggcggttggatgcggtgttggcgaaacttctgcccgactactcgcgcagccgcctgacatcatggattaaagaaggcgcggttattgtaaacgataaaccttcgcaacccaaagacaaaatgataggcggcgagcaaatttgtgtaaccgtccgtccgagtgaggaaaatctggcgtttgttccagagcctatggctttggatattatttacgaagacgataccgtcatcgtcgtcaacaaaccggccggactggtggtgcatccggcggcgggcaactggacggggacgctgctcaacggcctgttggcgcactgtcccgaattgagccaagtacctcgtgcaggcatcgtacaccgtttggacaaagaaaccagcgggctgatggtggttgccaaaaccctgccggcgcaaaattccctcgtgcaacatcttcaagagcgcacggtcaaacgcatttaccgcgccgtcgccaacggcatcgttccctttgacggtaaaatcgaaacccaaatcggacgcgatccgcacaaccgcctgaaaatggcagtcgtcaaattcggcggcaaaccagccgttacccacgtcaaagtgttggaacgctatctggcgcacagctatatcgaatgctcgctcgaaacaggcaggacgcaccaaatccgcgtccatatgcgtgaggccaaccatccgcttgccgccgacccggtttacggcaacccgcgccatccgtgcggcgacacggtgaaagaagccgttaaaagtttgggtgcgcgtcaggcattgcacgcctaccgcttaagtttcactcatccgaaaaccggcgaaaccgtttcgtttgaagcaccgattccggacgacatatatcatttgttgtctgtcctccgtcttgaagccggtttggattcgtctttgagcaatgaagaggaatggcaggacaaattcggcgcggacgacgatgacgattggaacgaagacgactacgatgtcgaagtggtttatgtaagggagtga

SEQ ID NO: 41585 - DNA, 993 bp, Neisseria meningitidis
atggaaaatgtaaaccgcatcgttgcagaaggcattgccgcagtagaagctgcgaaagacttcaacgctctagaacaaatcaaagcccgttatcttggcaaaaccggcgagttgaccggacttctgaaaaccttaggtcaaatgtcgcctgaagagcgcaaaaccataggtgcgcatatcaatgaatgcaaaaaccagtttcagatggcctttaacaataaacgcgatgccctcaacgaagccaagctgcaagcccgacttgccgccgaagcccttgacattaccctgcccggacgcgctcaggaaggtggcagcctgcatcccgtaaccctgaccttgcaacgtgtggtcgaactctttcacggaatgggtttcgaagtggcggatgggcctgaaatcgaagacgatttccacaatttccaagccctgaacatccctgcaaaccatcctgcccgtgcgatgcaggatacgttttacgttgaaaacggcgatgttttgcgtacgcacacttccccgattcaaatccgctatatgcttgacaaaaaagagccacccatccgcattatcgctcccggccgcgtttaccgtgtggacagcgatgccacgcactcgcctatgttccatcaggcggaaggtttgtgggtagaagagggcgtaaccttcgccgatttgaaagccgtgttcaccgactttatccgccgcttttttgaacgcgatgacttgcaagtgcgtttccgtccgtctttcttcccatttaccgagccttctgccgaaatcgacatcatgggtgaaaacggcaaatggctggaagtaggcggttgcggtatggtacatcctaacgtattgaaaaacgtcaatatcgaccctgagaaatataccggtttcgctttcggtatcggtctcgaccgtttcgctatgctgcgttacaacgtgaacgacttgcgtctgttctttgataacgatttgaacttcttgaagcagtttgcgaaataa

SEQ ID NO: 41586 - DNA, 1197 bp, Neisseria meningitidis
atgtcccaaaaattgatcttggttttgaactgcggcagctcgtccctcaaaggcgcggtcctggataacggcagcggcgaagtcctgctgagctgccttgccgaaaaactcaacctgcccgatgcctacatcacattcaaagtaaacggcgaaaaacacaaagtcgatctgtccgcacatcccgaccacaccggcgcggtcgaagccctgatggaagaactcaaagcccacggcctcgacagccgcatcggcgccatcggccaccgcgtcgtcagcggcggcgaactgtacagcgaatccatcctcgttgacgacgaagtcattgccggcatcgaaaaatgcatcccgctcgcccccctgcacaaccccgcccacctcttgggcctgcgtgccgcgcaaagcattttcaaaggcctgcccaacgtcgtcgtattcgatacctccttccaccaaaccatgcccgaagtcgcctacaaatacgccgttccgcaggagttgtatgaaaaatacggcctgcgccgttacggcgcgcacggtaccagctaccgcttcgtcgccgacgaaaccgcgcgcttcctcggcaaagacaaaaaagacctgcgtatggtcattgcccacttgggcaacggcgcgtccatcaccgccgtcgccaacggcgaatcgcgcgacaccagtatgggcctgaccccgctggaagggctggtaatgggtacgcgcagcggcgacatcgatccttccgtattcggcttcctcgccgaaaacgccaatatgaccatcgcccaaatcactgaaatgctgaacaaaaaatccggtctgctcggcatttccggcctgtccaacgactgccgcaccattgaagaagaagccgccaaggggcataaaggcgcgaaattggccttggatatgtttatctaccgccttgccaaatacatcggcagtatggcggttgccgcaggcggtttggacgcactggtctttaccggcggcatcggcgaaaactccgacatcatccgcgaacgcgtgatcggctacttgggcttcctcggtctgaacatcgaccaagaagccaacctgaaagcccgcttcggcaacgccggcgtgattaccactgccgacagcaaagccgttgccgtggtcattccgaccaacgaagagctgatgattgcccacgacactgcccgtttgagcggtctgtaa

SEQ ID NO: 41587 - DNA, 1215 bp, Neisseria meningitidis
atggaatgggcgtttaacagttattacaccttgattgccgccactttggttttgttggtcggcaaggttttggttaagaaaatcaaaatcttgcgtgattttaacatccccgagcccgtggcgggcgggctgattgccgcgattatcctgtttgcgctgcacgaggcgtacggcgtgagcttcaaatttgagaaaccgctgcaaaatgcgtttatgctgattttcttcacgtccatcggcttgagcgcggatttttcccgtttgaaggcgggcggtttgccgctggtggtttttaccgcgattgtgggcggatttatcttggtgcaaaactttgtcggggtcggactggctacggctttgggtttggacccgctcatcggtctgattaccggttcggtgtcgctgacgggcggacacggtacgtcaggtgcgtggggacctaattttgaaacgcaatacggcttggtcggcgcaaccggtttgggtattgcatcggctactttcgggctggtgttcggcggcctgatcggcgggccggttgcgcgccgcctgatcaacaaaatgggccgcaaaccggttgaaaacaaaaaacaggatcaggacgacaacgcggacgacgtgttcgagcaggcaaaacgcacccgcctgattacggcggaatctgccgttgaaacgcttgccatgtttgccgcgtgtttggcgtttgccgagattatggacggcttcgacaaagaatacctgttcgacctgcccaaattcgtgtggtgtctgtttggcggcgtggtcatccgcaacatcctcactgccgcattcaaggtcaatatgttcgaccgcgccatcgatgtgttcggcaatgcttcgctttcgcttttcttggcaatggcgttgctgaatttgaaactgtgggagctgaccggtttggcggggcctgtaaccgtgattcttgccgtacaaaccgtggtaatggttttgtacgcgacttttgttacctatgtctttatggggcgcgactatgatgcggcagtattggctgccggccattgcggtttcggcttgggtgcaacgccgacggcggtggcaaatatgcagtccgtcacgcatactttcggcgcgtcgcataaggcgtttttgattgtgcctatggtcggcgcgttcttcgtcgatttgattaatgccgcgattctcaccggttttgtgaatttctttaaaggctga

SEQ ID NO: 41588 - DNA, 309 bp, Neisseria meningitidis
atgaaaactgttccaaccatcctgatcggtatccttttggcatctgcccttcccgcatccgcacacggaatgcataagagcaaacccctgactatggacgagctgccgccgatttgccaacaatatttcaaacgcgccgaaacctgttacaacaaagccggaaacaaagcagatttcgcacgcagcaacaccaaattcctattccaagccctgcctgctgccgatttgggacagcgtaagcaaatgtgccaaatcgctatggattcgtttgcagaaaaaacccgcatcagcaatagcaatgccgtctga

SEQ ID NO: 41589 - DNA, 507 bp, Neisseria meningitidis
atgttcagacggcattttcctgtaagggagaaagcattgaacattaccgttttggcagtcggcaccaaaatgccgcgctgggttgacgaagccgtcgctgaatacgccaaacgcttcggacgcgacgtcgcctacgtactcaaagaaatcaaacccgaaaaacgcggcgcgggcgtgaatgccgcccaaggtatggcggcggaagaaaaacgcatccttgaagccattccgcaaggcgcgttcctcgtcgttcttgacgaacgcggcaaagcaccgacctccgtcgagctggcggaacacctcaaaagctggcagcaaaacggcgaacacgtctgcttcgtcatcggcggcgcggacggtatgaccgaccgcctcaaacagcaggcacgcatgatgatgcgcctgtccagcctgaccctgccgcacgggatggtgcgcgtccttctgaccgagcagctctaccgcgccgcctccatcctgcacaaccatccctatcatcgggaataa

SEQ ID NO: 41590 - DNA, 2580 bp, Neisseria meningitidis
atgcgatacgacaaattaaccgccaaattccaacaggcccttgcagaagctcagagtttggcgttggctgcggacggcagctatctggaagcgggctttgtgctgaaagccctgcttgacgaccaaaacagcggtgctgccgcgctcttggctcatgcgggcgtgaacgtgccgcaggtgaaacagcgtttgcagcagcatttgaacagcctgccgaaagtgtccggccagggcggcgacattctgcccagccgcgaattgcaggcggtgttgaacctgatggacaaagccgcaaccaaacgcggcgatgcctatatcgccagtgaacttttcctgcttgccttggtgcagcagaacgatgcggccggcaaaattttgaaagaagccggcgcgaccgaacaaaacatcaatgccgcgattgacgcggtacgaggaggacaaaacgtgaacgatgccaatgccgaagaccaacgcgatgctttgaaaaaatatacgctcgatctgacccaacgcgcccgagacggtaagctcgaccccgttatcggccgtgacgacgaaatccgccgtgcgattcaggtattgcaacgccgtaccaaaaacaaccctgtgctgattggcgaaccgggcgtgggtaaaaccgccattgttgaaggcttggcgcaacgtatcgtcaacggcgaagtgcctgaatccctgcgcaacaaacgccttttggttctggacttggcggctttgattgccggcgcgaaataccgcggcgaatttgaagaacgcttgaaaggtgtgttgaacgatttggcgaaagacgacggcaacaccctgattttcatcgacgaaatccatactttggtcggtgcgggcaaaaccgacggcgcgatggatgcgggcaatatgctgaaaccggctttggcacgtggcgaattgcactgtatcggcgcgaccaccttggacgaataccgccaatacatcgaaaaagacgcggcactcgaacgccgcttccaaaaagtattggttggcgagccaagtgtagaagacaccatcgctatcttgcgcggtttacaggagcgttatgaaatccaccacggtatcgatattaccgaccctgctatcgttgccgcagcggagttgagcgaccgctacattaccgaccgcttcctgcctgataaagcgattgatttgattgacgaagccgccagccgtgtcaagatggaaaaagaaaccaagccggaagcaatggacaaaatcgaccgccgtctgattcagcttcggatggaaaaggcgcacgttgaaaaagaaaaagacgatgccagcaaaaaacgtttggaactgatagacgaggaaatcaacggtctgcaaaaagaatacgccgatttagacgaaatctggaaagccgaaaaagcaatttcagacggtgctgctaatattaagaaacaaattgacgaagtcaaaattaaaatcgaacaggcaaaacggcaaggcgatttggcactggcttcaaaattgatgtatgaagatttggagcatttggaaaaacagcgtgcagccgccgaacgggcagatacggacagcacaaaaccggcaaacaaactcttgcgtaataatgtcggcgcagaggaaatcgcagaggtggtttcccgtatgaccggcattcccgtatccaaaatgatggaaggcgaacgcgacaaactgctgaaaatggaagaagtattgcaccgccgcgtggtcggacaggacgaagccgtgcgtgccgtgtccgacgctatccgccgcagccgctccggtcttgccgatccgaacaagccttacggcagcttcctgttcttgggcccgaccggcgtgggtaaaaccgagttgtgtaaagccctggcaggctttctgttcgacagcgaagatcatctgattcgcatcgatatgtccgaatatatggaaaaacacgccgttgcccgcttaatcggcgcgcctccgggttatgtcggctacgaagaaggcggctacctgaccgaacaagtgcgccgcaaaccgtacagcgtgattctgctggacgaagtggaaaaagcccatcccgatgtgttcaacatcctgctgcaagtattggatgacggccgcttgaccgacggacaaggccgtaccgtagattttaaaaataccgtgattgtgatgacttccaacatcggcagccagcacatccaacaaatgggcattcaggattacgaagcggtaaaagaagttgtgatggaggatgtgaaagaacatttccgtcctgaaatgatcaaccgcatcgacgaagtggtcgtgttccacggtttggatcaggcaaacatccgcagcattgcgaaaatccagctcaaaggtttggaaaaacgtttggaaaaacaaaacctgcgcctgactgtttccgatgccgcactggacatcatcgccaaagccggtttcgacccgatttacggcgcacgtccgctcaaacgcgccatccagtcggaaatcgaaaacccgctggcaaaagctctgcttgccggaaactatgcgcccgaaagcgaaatcagggtagaagccaacggcgacagactgaaatttgcctga

SEQ ID NO: 41591 - DNA, 4266 bp, Neisseria meningitidis
atgggcggcaaatcgggcggaggacaacggacaccttatgaagccccaaacagtttatccagcgcccagtcgctgcggattattgatgcggtatccgaaggtgtggtttcggggtttgccaacggcgatgatgcgccgttcaaaagcgtgtattttgatgacactcctgtccaaaattcggacggcagctacaattttaatggagttacgggttatttccagcgtggcgagcaagaccagtcctatgttccgggtttcgatgcttccgagcgcaccgtagccgtttcggctgcggtgaagcagaatcagccgatggttcgcgccgttaccgacgaattggtcagccgtttgcggattacggtcgctgtcgagcggaatgcacaggttgaagacaacggcgacaccgtgcctgctgataccttaatgcgcgttgagttgataaacagcaatggtgtgcaggcatcaaatcaggtgcgtttcaatgaaaaatccagcgggacatattatcaggatgtcgaatttgatgtggtgccgcaagtgccgttcaatatccgcgttttccgaatttcgcctgattccaagaccgacaaggtcagcaacaatacctatttttcgtcctacgttgaaatcgttgatgcgaaattgagctatccgcataccgcgtttgcggcattgtcgattgattcggcgcagttcgggaatcagattccgcgtcgcaattatttgatgaaaggccgcttggtcaaagtgccgtccaattacaatcctgaaacccgccaatatacgggtggaacatgggatggcagtttcaaaaccgcatggacaaacaacccggcatgggttttttacgatgtgctgacccagccgagattttccacgctggcacgtcgtctgaatgtggcagacatagacaaatggagcctgtaccaaatcgggaaatattgcgacgagccggtcgatgacggcttcggcggcaaagagccgcgtttcgtctgtaacgcctacattaccgacctgatgcaggcaggtgaatttttgaacaatcttgccagcgtctttaccggtttaccggtttggaacggacagcaagtatccgtcgtcatggatgccgacgccgatccggtggcgcaatataccaatgccaatgttaaagacggcctgtttaattatgcgggtgcagcgttgaagtccattcatactgctgttcatgtgcagtatatagacaaatacgatggctatcgcgctaaaacagaatatgtagccgacaacgaagccatcgcccgctatggtttgaatatcaagcagattactgcgttcggctgcgattcgcgcgggcaggcggcacgtttcggcgcatggacgctgcaaactgagttgcggcagcagaacgccgtaacgtttgaaatcgggcgtgaggggttgaagcatctgccttacgacatcgtgcagattatggacaatcaatacgcgggtgcagagttgtctggacgtgttgccgccatttcgggcaatgtgctgacgctggatcgacctgtatccgatgcggtcggagccttggtgttttattctgaaggcggtagtctgaaatcagcgaagataactgcggcagcaggcaataaggttactttggagcgtgaggtgccgttgcaggctggcgatacgtgggttttatccggcaaagtcaagccgcgcctctaccgtgccatcggcatcaaagagaatacggatgcgggtacttataccgttaccgcgttgctgcatgacccgaaaaaatatgctgcggtggatagttttgcgcattttgaccatgaaattaccacgctgcacaacaccgcccctgtgttgaccgatgcgtctgtcaataccgacggtgggacagttgtggtgacatgggacaacctggccgcaaacggtcaggttttaacttacgatattaagatttaccgtaacaacagcctataccgccatatccctgatgcacagacagcggaaattcgtttggaaaatctgccgaacggcaattatcgggcggaaatacgcggccgtaatgcacggggtgtactgtccgcaccgttggttaaggcttggagtatcgactataccgttaccggattgaggacgacgccgaaaacactgtctgtgaccgtggattgggtattgccgcaaaccgttgtttccgatttggttttcgagctgtggtatagcaagaccaacaatcttcagacggcaacgaaactcgcgtcgctggcgtatccgcaaaacagttataccttaaccggcgtcggcgttgccgacgtttattatttctgggtgcgcatacgtgatattgcaggaaatacgggggaatttaccgctgccgtacagggtagggcagataacaatcctgcgccgatagtgcagcagattcagggtgcaatcgggaagtctgcattaagcagggagctgatagacacgctgaatcgtgatatggctgcggctgcggggttgaaagtgtctgcagaggcagcggaacgtgctaaagccttacaggaggaagcacgggcgcgaacggcggcaatacaggcggaatcatctgcccgaactgccgagcttgccagaaagtcatccgaaatcggtacgcgtattgccgcaacagaagctgtcaatgagcagcaggcgcagcaaatccaaactgttacgtctgtgcaaggcaataccgccgccgggctggaagccgaaaaaaaagcccgtgccgatggcgacagagccgaggcgcaggcgcgtgaaacactggctgtcagacttggtaatgcagaaagcggtatttcggcattgcgggaaaccgtaacacgtcaggatgctgccaggtcgtctgagatcaacacgttgacggcgaagctggagaatgttgaagtcggcggtcggaattatgccttatcaacaggaacagccggcaaagtgttgaccgctagcgggaataatcagaccaaaaccgtcactatcgacgtttcgtctgctttggatctgaagcaaggcgatagtttgattatctcgtgcgatatcgaactggtaaacgccacatcgcctcatggcaaaccatacccgcgaatcggtgcggaattttccgtaatctatgcggacaactcggtaggttattttgctgcgtggtacggcgaagccgtcagcggtacgaccaaaacgctgaaacagcgtattgtcgccaaacgcacggttgccaaagaggttaaagcacttcgaagcttcatcgttcaggcgcggtatcagacatcagaatccatcaaggtttcaaatgtgaaactggaacgcggaacggtagcaactgactggagtcctgcgccggaggacagtaacgccgatacgtctgctctgacggccttgtcggctaaagttcagcaggctagttctgctgttgcagagataggagggaaaatacagtctttgtacacgctgaagactgaggcaatagcaggcggtcgtcgggcagttgcaggggttgcagtgggagccgatggaaagacgggaagtggcgaaatcctcctgatggcagataaagttgcttatgtcgatccgaaagataagacggttacgcccgctttcgttaccgttatcgaaaacggcaaggcgaagcaggctttgaacggcgacctgttcgcgactggttcgatactggcaaagcacatcgctgccaaccagactatcgaagccccaacgctgaatggtgcaaccgtcaatgcaggtctaattaagggtggtacgatacgtggcgcgcgaattgaagccgtggatttggaggccgctaatatcatcggagatgtcgtggcggtcaggacgtttgagctgaagcagtcgccattaggttatcaggaattgatatgccaaatccctgatagccgaaaaacacgccggacggttatcgtgccgccggtttttgctgttgcagaaaacggtgcagttgtcagtctacaactgcacatggatggtgtgattcagcgggaggttacgattcagtcacctgaaaagaggatagcgcgtaacgaaaagttttccgtatgggttcctggccctccgccgctgtatatagggactccgctggaggtgcctcttagtttttccgtcccattccatctaccaaagacaggcagtatatcttttcagaagggtatcgatggtgcagcacattcgttgcatatcctctgccgcattagcggcaattttgattattcacccttgggcgatttatcgggtattgtctgtcttattgtttaa

SEQ ID NO: 41592 - DNA, 180 bp, Neisseria meningitidis
ctaatcgtaaccctaaactatgcccactcccccctaaacatcctctcacccaagctctatcccagtgagccatataacgaaagcgaagcacccggtgctatcacttggttgtggtatcagtcgcctaagcatcgccaagtgtctattgcggagatgatggcttatgtgttgcctgtgtaa

SEQ ID NO: 41593 - DNA, 390 bp, Neisseria meningitidis; identical to SEQ ID NO: 38387

SEQ ID NO: 41594 - DNA, 1380 bp, Neisseria meningitidis
atgtttgctttcaaatccttactcgatatgccgcgcggtgaggcacttgccgtcgtcgtcgctctgattgccgcgatgggctataccatcatttcattggagtggctgccgcatatgtccattattgccgccatcgtcgtgctgattttgtacggcttggcgcgcggtttgaaatacaacgatatgcagcagggcatgataggcgcgttgaatcagggtatgggcgcgatttacctgtttttcttcatcgggctgatggtcagcgcactgatgatgagcggtgcgattccgacgctgatgtattacggtttcgggctgatttctccgacttatttttatttttccgccttcgcgctgtgttccgtcatcggcgtgtccatcggcagcagcctgaccacctgtgctacggtcggcgttgcctttatggggatggcggcggcgtttcatgccgatatggcgatgacggcgggcgcgattgtttcgggcgcattttttggcgacaaaatgtccccgctttccgatacgacgggcatttccgcgtccattgtcggtatcgacctgtttgaacacatcaaaaatatgatgtacaccaccatccccgcgtggcttatcagcgcggcactgatgctttggcttttgccgaatgtcgccgcatacgatatgggtagcgtcgaatccttccgcagccagcttgaagccacgggattggtgcacggctattcgctgattccgtttgcgctgttggtcattttggcattgatgcgcgtcaacgccgtggtcgccatgctctttaccgtcatggttgccgttgccgtaacgtatctgcacagcacgcccgatctgcgtcagctcggcgcgtggttttacggcggttacaaactcgaaggcgaagcgtttaaagatgttgtcaaactgatttcgcgcggcggtttggaaagtatgttcttcacgcagaccatcgtgattctcgggatgagtttgggcgggctgctgtttgcgctgggcgcgattccttccctgctggatgccgtccgcagctttttgacgaatgccggacgtgccacattcagcgttgctatgacttcggtcggggttaatttcctgattggcgagcaatatttgagtattttgttgtcgggtgaaacgttcaaacccgtttacgataagctcggtctgcattcgcgcaacctgtctcggacgctcgaagatgcggggacggtcatcaacccgcttgttccgtggagcgtatgcggcgtgttcatcagccacgcgctgggcgtgccggtttgggaatatctgccgtatgcctttttctgctatttgagtttggctttgaccctgttattcggttggacggggctgactttgagcaaaaaataa

SEQ ID NO: 41595 - DNA, 831 bp, Neisseria meningitidis
atgccgcctgaaaccgcccaaatccgcgttctcctatataatgtcggactttgcgccgcatttcaggattctttaatggcatttgcctcactatttaccctgccggacgacatcaccgccgttttggacgatgttgccctgatgaccaaagccgccgcaaagaaaaccgccggcgtggtcggcgacgatttggcacccaatgccaaccgtgttacgggcgtatcggcagaacgcgagttgccgattgtttggtcgatggcgaaaggttctttttccaacaagccggttttggtgcctgcggccctgctgctttccgccttcctgccgcaactcattacgccgcttttgacggcaggcggcatttatctgtgctttgaaggcgtagaaaagctgctgcacaagtttctgcaccgacatgacgcgcatgctcgtaatggcggcaatcggcatcggcatgactgttttggtgtacggaatcgttgccgtcatcgtcaaactcgacgacttaggcatgctgctgatgcgccgcccacaaaccttttcgcgcagtttggggcaaatgctgactgcctttatgccttgctttatgcgcggtttgagcgtggtcggcacgcttgccatgtttcttatcggcggcgtactggtcgcccacaacctcggccttctgcacgatttcctgcacgcgcaacactgggacgctggctgggcggagtacttcgccaacctcgttgtcgggctgctttccggttcgattgcctgcgcccccgccttgccgctgatgaatcgtttcggcaggcattgatttctttttcaaataccgatgccgtttga

SEQ ID NO: 41596 - DNA, 273 bp, Neisseria meningitidis
atgaagaaaaccggcaaatatcttatctatactgcggcatttaccgcattctgctttgccttccaagaaaaccgttctgaagccaaacagcccgacatcactttatccgcatccctgtgcgaacaattcaacatactgaacgccaaagatatggatgcagaacaagtctccctttccaaagaatgcgacatcatcgagtcttcacacgactgggaaaaagagtacggcaacttgaacgaacaggaaatgctcgccggcatcgtctatgaataa

SEQ ID NO: 41597 - DNA, 711 bp, Neisseria meningitidis
ttgccgaacatcaacacgaaaattgaacccttctatttttgcaaggcatatatggatatgttggaaattttgttccgccatcaagacttcgtcgccatcaacaaaccgggcggcatatccgtccaccaagacagcggcgagaccggactggcccgaacactcgccatacagttgggcgtagagcgtgtgtggctgctgcaccgattggacaaacagaccagcggcattttactgtttgccctcaacagagaaagcgcgtccgcccttagcggacagtttgccggcaaaagcatcaaaaaaacctatttggcactatccgaccgcaaaccgtccaaaaagcagggttggattaaaggcggaatggaaaaatccagacgcggaatgtggaagttgacgcgcaatacagaaaatatcgccgttacccgattccacagcatcagtatcgccgaaaaactgcggctgttcatcctggaaccgcatacgggcaaaacgcaccaattgagagtggcgatgaaaagtttgggcagtccgattctgggcgacagcttatacggcggaacagaatccgaaaccatgtttctgtatgcatggaaaatacaatttgcctaccaaaaccgacaaatcgaaattgttgcacccttaaaaaacgaatggcagactgaaaatatctctcatgcgctggaagaattttatatggcaaaagcaggttaa

SEQ ID NO: 41598 - DNA, 642 bp, Neisseria meningitidis
atgagatgttttatgattcaaaatgtcgttacttcaataatcctgtattctgggacagccgtagacttacttattatcctaatgttattttttgccaaaagaaaaagcagaaaagacatcattaacatctatttaggacaatttctaggctctgttagtctgatattgctaagtttgctttttgcatttgtcttagattatattcctagtaaagagattttaggtttgctcggcttgattccaattttcctaggcatcaaagttttgctgttaggagattctgatggagaggctattgccaaagagggtctgcgcaaagataataaaaacctgatttttctagtcgctatgattacttttgcaagttgtggtgctgacaatattggtgtctttgtcccatattttactaccttaaattcagcgaatttgatagtggctttacttacctttctagtcatgatttatctcttggttttttctgcccaaaaattggcacaagtcccttctgtcggagaaactttggaaaaatatagcagatggtttgttgctgttgtttatttaggattgggggtatatatcctgattgaaaacaacagttttgatatgctatggactgtgtcgggccaggaaaaaatattatga

SEQ ID NO: 41599 - DNA, 810 bp, Neisseria meningitidis
ttgcctcgccttgccggcgcacatactattgttagtgggtatcttgcttttggcagcgacgaatcttataaaaaccattgggacatccgagatgtgtatgccatccagcttttcggcaagaaacgttggcaacttactgcccctgatttccctatgccattgtatatgcaacagactaaagatactgatatttccattcctgaacatatcgatatggatattatccttgaagcaggtgatgtcctctacatcccgcgcggttggtggcacagacctatcccgctcggctgtgaaaccttccacctcgctgtcggtacctttccgcccaacggctataattacctcgagtggctaatgaagaaattccccacgatagaaagtctgcgccacagtttctcagactgggagcaagataggacgcgtatcaacgatactgccgcacaaattgctgccatgattgccgaccccgtcaattacgaagccttcagtgaagacttcctcggcaaagaacgtaccgataccgcttttcatctcgaacagttcgcgaatcccaacgctactctgctttcagacgacgtcaggttgagactaaatgccaataatttggatacgttggaaaaggggtatttgattgggaatgggatgaagataagcgtagatgaattggggaaaaaagttttagaacacatcggtaagaatgaaccgttattgttgaaaaatctactggttaacttcaatcagggaaaacatgaagaagttaggaagttgatttatcagttgatagagttagattttctggaacttttgtga

SEQ ID NO: 41600 - DNA, 657 bp, Neisseria meningitidis
atgactattaaaattattctgatagacgaccacaccctcttccgcagcggcattaaagcccttttgtcgcgccaacacggttttgaagtcatcggcgaagccgcagacggcctctcgggcatcaaaatgattagtcggctgcaacccgatgtcgtcctgctcgatttggatatgcccggcatgaacggacgcgaagcactctcccaaatcatcagcatcaatccgcagcaggcagtgattatgctgaccgtttccgaagacagcgacgacttgaccgaatgtattcgcatcggcgcgcgcggttacctgctgaaaaacatcaacgctgactttctgctcgaaagcatacgcaaagccgccgaaggcgataatgtattctcgcccgagatgaccgccaaactcgttaaaagcctgatttccccccaacctgcccaagggacacaggcactctcctcacttacccctcgcgaactggaaatcttgggctatctcgccgcaggacacagcaacaaaatcatcgcccgccacctcgatcttgccgaatccaccgtcaaagtccacgttcaaaacctgctccgcaaactcaacctcagcagccgggtgcaggccgctgtttacgccatccggcacaacgtcccccaacccgtgctggaataa

SEQ ID NO: 41601 - DNA, 606 bp, Neisseria meningitidis
atgatgaccctctattccggcattacctgccccttcagccaccgctgccgcttcgttttgtacgaaaaaggtatggattttgaaatcaaagacgtcgatatttacaacaaacccgaagacctcgccgtcatgaatccgtataaccaagttcccgtgctggtcgagcgcgatttggtgctgcacgagtccaacatcatcaacgaatacatcgacgaacgcttccctcatccgcagcttatgcccggcgatcccgttatgcgcggccggggccggctggtgctgtaccgtatggaaaaagaattgttcaaccacgtccaagtgttagaaaaccccgccgccaccaacaaggaacaggcaaaagcgcgcgaagccatcggcaacggtctgaccatgcttgccccttcgttcagcaaaagcaaatacatcctcggcgaagatttttctatgattgatgtcgcccttgctccgctgctgtggcggctcgaccactacgatgtcaaactgggcaaaagtgccgcgccgctgctcaaatacgccgagcgcatcttccagcgcgaagcctttatcgaagcactgacacccgccgaaaaagccatgcgcaaataa

SEQ ID NO: 41602 - DNA, 642 bp, Neisseria meningitidis
atgaaagcctttaccaaaattaccgccatcgtcgccccgctcgaccgcagcaacgtcgataccgacgccatcatccccaaacaatttttaaaatccatcaaacgcagcggcttcggccccaatgcctttgacgaatggcgttacctcgaccacggcgaaccgggcatggacaacagcaaacgcccgttgaaccctgatttctcgctgaaccagccgcgttaccaaggcgcgcaaatcctgttgacacgtaaaaacttcggttgcggctcttcacgcgaacacgccccttgggcattggacgactacggcttccgcgccgtcatcgcccccagcttcgccgacatcttcttcaacaactgctacaaaaacggccttttacctatcgtgttgaccgaagaacaggttgaccggcttttcaaagaagttgaagccaacgaaggctatcagctctccatcgaccttgccgaacaaaccctggccacccctggcggcgaaacattcacattcgacattaccgaacaccgcaaacactgcctcttaaacggcttggacgaaatcggactgaccctgcaacatgccgatgaaattcacgcctttgaagaaaaacgccgccaaagccagccttggctgtttaacggttaa

SEQ ID NO: 41603 - DNA, 1155 bp, Neisseria meningitidis
atggctgataaaaaaagccctttgattgccgtcagtgtcggcgaagcgtcgggcgacctattgggggcacacctgatacgcgccatccgcaagcgttgtccgcaggcgcgttttgtcggtatcggcggcgaactgatgaaggcggaaggtttcgagagcctttatgatcaggagcggctggcggtgcgcggctttgtcgaagtggtcaggcggctgccggaaattttacggatacgcagggggctggtacgggatttgctgtcgttgaaacctgatgtctttgtcggtatcgatgcgcccgattttaatctgggtgtggcggagcggctcaaacggtcggggattccgaccgtgcattatgtcagtccgtcggtttgggcgtggcggcgggaacgcgtgggcaaaatcgtgcatcaggtcaaccgcgtgctgtgcctgttcccgatggagccgcagctttatcttgatgcgggcggacgtgcggagtttgtcggtcatccgatggcgcagcttatgcccttggaagacgaccgtgaaacggcgcggcaaactttgggcgtggatgccggcatccccgtattcgccctgctgcccggcagccgtgtcagcgaaatcgactatatggcgccggtgttttttcagacggcattattgttgttgaaacgccatcccgccgcacgcttcctgctgcctgccgcaacggaggcgacgaagcggcgtttggcggaaattttgcagcgttcggagtttgccggattaccgctgacggtaaccgacagacagtctgaaacggtgtgcagggcggcggatgcggtgctggtaacgagcggtacggcgactttggaagtggcgctgtgcaagcgtccgatggtcatcagctacaagatttcgccgctgacttatgcttatgtgaaacgcaaaatcaaagtgccgcatgtcggcctgccgaatatcctgttgggtaaggaggctgtgccggagctgcttcaacatgatgccgtaccggaaaaactggcggcggcgttggcggactggtacgaacaccccgataaggttgccgcgctgcaacaggatttcagggtgttgcacctgctgttgaaaaaagatacggcggatttggccgcgcgcgcggttttggaagaggcgggatgttga

SEQ ID NO: 41604 - DNA, 876 bp, Neisseria meningitidis
atgaatctctacgacctgctccttgccccctttgcagaattcgactttatgcgctacgccctcgcatccgtcttctgcctgtccctcagtgccgcacccgtcggcgtattcctcgtcatgcgccgtatgagcctgataggcgacgcattgagccacgccgtcctgcccggtgccgccgtcggctacatgtttgccggcttgagcctgcccgccatgggtttgggcggcgtagccgcaggcatgctgatggcactgcttgccggactcgtcagccgcttcaccaccctgaaagaagatgccaactttgctgccttttatctcagcagcctcgccatcggcgtagtcctcgtcagcaaaaacgggagcagcgtcgatttgctccacctccttttcggctctgtacttgccgtcgatattcctgccctgcagctcatcgccgccgtctccagcctcacgctcattacccttgccgtcatctaccgcccgctcgtactcgaaagcatcgaccccctgtttctcaaatccgtcggcggcaaaggcgggctttggcacgtcctctttctcgtcctggtcgtcatgaacctcgtatccggctttcaagccctcggcacactcatgtccgtcggactcatgatgctgccagccattaccgcccgcctgtgggcgaagcacatgggcgcactcatcctcctatccgttctgacagccctgctgtgcggcttgagcggactgctcatttcctaccacatcgaaattccctccggtcccgccatcatcctctgttgcagcgtcctttatctcttttccgtcatactcggcaaagaaggcggcattctgaccaaatggctcaaaaaccaccgccaccacaccacctga

SEQ ID NO: 41605 - DNA, 1881 bp, Neisseria meningitidis
atgccctatttcgccctgtttgacgatgccgtaagcggccgcgcaaaacgctatcaaaatcatgtagaaagccgttttttcggtcccgaagaactcgatgctttggacggcgcgctgcaaaagggctggcaaaaagggttgcattcggtgttgtttgcagactacgaattcggtttgccgctgacgggggttgagtccgagcgcggcggcaaccttgccctgcactggtttgccgactgcgccgacaccgatgccgcaagctggcttgcccgacactcagacgaccttcccgccggcatttccacgccgcaatcctccgtatccgaaaccgattacctcgaccgcatccgccaaatccacgaagccatccggcgcggcgacacctatcaaatcaactacaccactcgcctgcacctgcaagcctacggcaatcccgtcagcctctaccgccgcctgcgccagcccgtcccctatgccgtcttgtcccacctgcccgatgcggaggggcaatccgcgtggacgctgtgtttctcgcccgaactcttcctcaacatcgcttcagacggcaccatcagcaccgaaccgatgaaaggcaccgcgccgattttgggcgacggacaagacgaacgccgcgccgccgaattgcaagccgacccgaaaaaccgcgccgaaaacgtgatgattgtcgatttgctgcgcaacgacctcggcaaaatcgcccaaaccggcaaagtatgcgtgcccgagccgtttaaagtgtcgcgtttcggcagcgtttggcagatgaccagcaccatccaagcccaagccctgccaaacacctcgttcgccgacattctccgcgccgccttcccctgcggcagcatcaccggcgcgcccaaaaaaatgagtatgcagattatcgaatcgctcgaaaccgaagcgcgtgggctttatacgggcagcatcggctacctgaaaccttgcgcgggcgggttggggtttgaaggcatattcaacgtcgtcatccgcaccttgtcgctcaaacccgtttcggcttcagacggcattgtttcaggcatcggcggcccggattcaaacgcgcaagcccgaacggcagggcaaggcggggcaacgccgcatccgtttgactccaatccgccgtatcggggcgtgtacggtgtcggttccggcatcgtcatcgacagcgaccccgccgccgaatatcgcgaatgcggctggaaagcccgtttcctcaacgaattgcgccccgacttcggcatttttgaaaccctgcgcgcggaaaacggacgctgcaccctgctcgaccgccacctatgccgtctgaaaacctccgcccaagccctcaacctgcccctgcccgacggctgcgaaaatcaaatcaaacaatacattgccgacttgcccgatggcgcgttccgcgtcaaagccctgctcgcttcagacggcatcagcctgtcccgcgccgttttaaaccgtctgaccgacaaacaacgcgtcatcatttcgccgaccatcctgcccgcacaaaactacctgcgccgcttcaaaaccacctgccgcaccgtcttcgaccaagcgtggcaaaccgccgaaacacaaggcgcgttcgacagcctgtttttcaattcagacggcatcctgctcgaaggcggcagaagcaacgtgttcgtcaaacatcgcggacaatggcttacgccctctttagatttggacattttaaacggcataatgcgccaagccgtattggacgaaccgcaaaaatatttgcaaacaaatcaagtaatcgaaacacacatcacacaaaaaacactgcaagaagccgaagaaatccgcctctccaacgccttgcgcggcgtatttgccgccgcccttgcctga

SEQ ID NO: 41606 - DNA, 1242 bp, Neisseria meningitidis
atgagtaaattcttcaaacgcctgtttgacattgtcgcctccgcctcgggactgattttcctctcgccagtatttttgattttgatatacctcatccgcaagaatctgggttcgcccgtcttcttctttcaggaacgccccggaaaggacggaaaaccttttaaaatggtcaaattccgttccatgcacgacgcgcttgattcagacggcattctgctgcccgacggagaacgcctgacaccgttcggcaaaaaactgcgtgccgccagtttggacgaactgcccgaactgtggaacgtcctcaaaggcgacatgagcctggtcggcccccgcccgctgctgatgcaatatctgccgctgtacgacaacttccaaaaccgccgccacgaaatgaaaccgggcattaccggctgggcgcaggtcaacgggcgcaacgcgctttcgtgggacgaacgcttcgcatgcgacatctggtatatcgaccacttcagcctgtgcctcgacatcaaaatcctactgctgacggttaaaaaagtattaatcaaagaagggatttccgcacagggcgaagccaccatgccccctttcacaggaaaacgcaaacttgccgtcgtcggtgcgggcggacacggcaaagtcgttgccgagcttgccgccgcactcggcacatacggcgaaatcgtttttctggacgaccgcgtccaaggcagcgtcaacggcttccccgtcatcggcacgacgctgctgcttgaaaacagtttatcgcccgaacaattcgacatcgccgtcgccgtcggcaacaaccgcatccgccgccaaatcgccgaaaaagccgccgcgctcggcttcgccctgcccgtcctgattcatccggactcgaccgtctcgccttctgcaacagtcggacaaggcggcgtcgttatggcgaaagccgtcgtacaggctgacagcgtattgaaagacggcgtaattgtgaacactgccgccaccgtcgatcacgattgcctgcttgatgctttcgtccacatcagcccgggcgcgcacctgtcgggcaacacgcgtatcggcgaagaaagctggataggcacaggcgcgtgcagccgccagcagatccgtatcggcagccgcgcaaccattggagcgggcgcagtcgtcgtgcgcgacgtttcagacggcatgaccgtcgcgggcaacccggcaaaaccattggcaggcaaaaataccgagaccctgcggtcgtaa

SEQ ID NO: 41607 - DNA, 207 bp, Neisseria meningitidis
atggatgaagcagtttttgccgattgggcgttgaaaatctgcctgaccggcttgattatttttttgggttttatcgtttggaatttgggcaaggagtccaaagcaggcaaattcggcatcgccattttgtttttggttttgggcttgggcgtgttcggttttgtatttaaagaactgctaatcaagtttttggtattgcccaaatag

SEQ ID NO: 41608 - DNA, 624 bp, Neisseria meningitidis
atgatgaaaccgcacaacctgttccaattcctcgccgtttgctccctgaccgtctccgtcgcttccgcacaggcgggcgcggtggacgcgctcaagcaattcaacaacgatgccgacggtatcagcggcagcttcacccaaaccgtccaaagcaaaaagaaaacccaaaccgcgcacggcacgttcaaaatcctgcgcccgggcctcttcaaatgggaatacacttcgccctacaaacagactattgtcggcgacggtcaaaccgtttggctctacgatgtcgatttggcacaagtgaccaagtcgtcccaagaccaggccataggcggcagccccgccgccatcctgtcgaacaaaaccgccctcgaaagcagctacacgctgaaagaggacggttcgtccaacggcatcgattatgtgctggcaacgcccaaacgcaacaacgccggctaccaatacatccgcatcggcttcaaaggcggcaacctcgccgccatgcagcttaaagacagcttcggcaaccaaacctccatcagtttcggcggtttgaataccaatccccaactctcgcgcggcgcgttcaagtttaccccgcccaaaggcgtggacgtgttgagcaactga

SEQ ID NO: 41609 - DNA, 870 bp, Neisseria meningitidis
atgaaggagcggatagtgggtcaaagcggcgagttgttttgtttcggacaaatgcccgtatggaaggcggaaaacctgccggaaattttgttgtcgggttattcgtccgaaggaggggaatgggtctgcctgaatgtgttgcagggcgatgtcgaagtccgcacgcaggacggggcggcagaggtttggtcggcggaaagcggcgattgcgtgtttgcgccgcagcaggtgttttcggtcaaactgaaaacggacgatgccgaaatccgtttgtcgctgtattgcgcggcggcagactattttcacaaaaaatacgggatgagtgccacgcattctgcggtcgcggcggcacaggataccgtaccggcgggcagggcgttggatatgggctgcggacaggggcgcaacgcgctgtttctcggtttgaaggggtttgaagttactgcagtcgatcacaatccggccgccttggcaaacgtggcggagctggcagaggcggagggcttgaacgtccgcacgctggaatatgacttgaatgccgccgccttgcagggtgagtttgattatattgtggcaacagtggtgctgatgttcctgatgccgcagcgcgtgcccgacgtgattgccgatatgcaggcgcatacggcggcgggcgggtacaacttgattgtatcggcaatggatacggcggatttcccctgcccgatgccgttccccttcaaatttaaagagggagaactgaaggattattatcgggattgggagctggtcgaatataaagaagaattgggcgcgatgcacgccaaagacgaaaacggcaatccgatacggtttaaatttgtaaccatgctggcgaaaaggcctgaataa

SEQ ID NO: 41610 - DNA, 2277 bp, Neisseria meningitidis
atgacaacattacatttctcaggcttcccgcgtgtcggcgccttccgcgaattgaaattcgcacaagaaaaatactggcgcaaagaaatcagcgagcaagaattgctggctgttgctaaagacttgcgcgagaaaaactggaaacaccaggccgctgccaacgctgattacgttgctgtaggcgatttcactttctacgaccacatcctcgacctgcaagtcgctaccggtgccatccctgcccgtttcggcttcgacagccaaaacctgtctttggaacaattcttccaactggcacgcggcaataaagaccaattcgctatcgaaatgaccaaatggttcgacaccaactaccactacttggtgcctgaattccacgccgataccgaattcaaagcgaacgccaaacactacgttcaacagctgcaagaagcccaagctttgggcctgaaagccaaaccgaccgttgttggtccgttgaccttcctgtgggttggtaaagaaaaaggcgctgtcgaatttgaccgcttgagcctgttgccaaaattattgccggtttatgttgaaatcctgaccgaattggccgctgccggtgccgaatggattcaaatcgatgagccagcattggcggttgacctgccgcaagcgtggttggatgcgtaccaagacgtttacgccactttgagccaagtgaatgccaaaatcttgttgagcacttatttcggttcggttgccgcacacgcaggtcgtctgaaagccttgcctgtggccggtttgcacatcgatttggtgcgcgcgcccgagcaattggacgcatttgctgattacggcaaagtgttgtctgccggtgtgattgatggccgtaatatttggcgcgccaatttaaacaacgtattagccacgcttgagccgttgaaagccaaattgggcgaccgcttgtggatttccagctcatgctcgctgctgcacacgccatacgatttgtcggtagaagaaaagctgaaagtcaacaaacctgccttgttctcatggttggctttcaccttgcagaaaacgcaagaattgcgcgtgttgaaaactgcattgaaccaaggccgcgaagccgttgccgccgaattggccgacagccaagccgctgctgattcacgcgccaacagcaccgaaatccaccgcgccgaagtggccaaacgcttggctgatttaccggcagatgccgaccaacgcaaatcaccgtttgccgagcgcattaaagcgcaacaagcatggctgaacctgccgttgctgccgaccaccaatatcggttcgttcccgcaaaccactgaaatccgccaagcgcgtgccgcgttcaaaaaaggcgaattgtctgacgctgattacgaagccgcgatgaaaaaagaaatcgccttggtgattgaagagcaagaaaaactcaatttggatgtgttggtacacggcgaagccgagcgtaacgacatggtggaatatttcggcgaattgctggaaggctttgcctttacccaatacggctgggtacaaagctatggctcacgctgcgtgaaaccaccggtgatttacggcgatgttagccgcccgaacgcgatgactgtggcttggtcaacctacgcccaaaccctgaccaaacgcccgatgaaaggcatgttgaccggtccggtaacgattctgcaatggtcatttgtgcgcaacgatattccgcgcagcaccgtgtgcaaacaaatcgccttggccttaaatgacgaagtattggatttggaaaaagccggtattaaagtgattcaaatcgacgaaccggccatccgcgaaggcctgccgttgaaacgtgccgattgggatgcctacttggcttgggcaagcgaagccttccgcctgtcgtcaaccggttgcgaagacagtacccaaatccacacccatatgtgttactcggaattcaacgacatcctgccggccatcgccagcatggacgcggacgtgattaccatcgaaacttcacgttctgacatggaattgttgaccgcattcggcgaattcaaatacccgaacgacatcggcccgggcgtttacgacatccacagcccgcgcgtaccgactgaagccgaagttgagcacctgttgcgcaaagccatcgaggttgtaccgtttgaacgtctgtgggttaacccagactgcggcctgaaaacacgcggctggaaagaaactctggaacaactccaagtgatgatgaacgtaacccgaaaactgcgtgccgaattggcgaaataa

SEQ ID NO: 41611 - DNA, 237 bp, Neisseria meningitidis; identical to SEQ ID NO: 40080

SEQ ID NO: 41612 - DNA, 2214 bp, Neisseria meningitidis
atgaccgccatcagcccgattcaagacacgcaaagcgcgactctgcaagaattgcgcgaatggttcgacagctactgcgccgcgctgccgaacaacgataaaaaacttgtcttagccgcccgttcgctggcggaagcacattaccccgccgatgccgccacgccgtatggcgagccgctgcccgaccacttcctcggcgcggcgcaaatggttcatgaactcgacctgctccccgatgccgtcgccgccaccctgcttgccgacatcggacgctacgtccccgattggaacctattggtttccgaacgctgcaacagtaccgtcgccgagctggtcaaaggtgtggacgaagtgcagaaactcacccacttcgcccgggtggacagcctcgccacgccagaagaacgcgcccagcaggcagaaactatgcggaaaatgctgctggcgatggttaccgacatccgcgtcgtgttaatcaaactggcgatgcgtacgcgcaccctgcaatttttaagcaacgcccccgacagccccgaaaaacgcgccgtcgccaaagaaaccctcgacatcttcgccccgctcgccaaccgtttgggcgtgtggcagctcaaatggcagctcgaagatttgggcttccgccatcaagaacccgaaaaataccgcgaaattgccctgcttttggacgaaaaacgcaccgaacgcctcgaatacatcgaaaacttcctcaatatcctgcgtacggaactcaaaaaatacaatatccactttgaagtcgccggccgtccgaaacacatctactccatttacaaaaaaatggtgaagaaaaaactcagcttcgacggcctctttgacatccgcgccgtgcggattctgattgataccgtccccgagtgttacaccacgctgggcatcgtccacagcctctggcagcccattcccggcgagttcgacgactacatcgccaaccccaaaggcaacggctataaaagtttgcacaccgtcatcgtcggcccggaagacaaaggcgtggaagtgcaaatccgcaccttcgatatgcaccaattcaacgaattcggtgtcgccgcccactggcgttacaaagagggcggcaaaggcgattccgcctacgaacagaaaatcgcctggttgcgccaactcttggactggcgcgaaaacatggcggaaagcggcaaggaagacctcgccgccgccttcaaaaccgagcttttcaacgacacgatttatgtcctgaccccgcacggcaaagtcctctccctgcccacgggcgcgacccctatcgacttcgcctacgccctgcacagcagcatcggcgaccgttgccgcggtgcgaaagtcgaagggcagattgtgccgctgtccaccccgctcgaaaacggacagcgcgtcgaaatcattaccgccaaagaagggcatccttccgtcaactggctttacgaaggctgggtcaaatccaacaaggcaatcggcaaaatccgcgcctacatccgccagcaaaacgccgacaccgtgcgcgaagaaggccgcgtccaactcgacaaacagcttgccaaactcacgcccaaacccaacctgcaagagcttgccgaaaatctcggctacaaaaagccagaagacctctacaccgccgtcggacaaggcgaaatttccaaccgcgccatccaaaaagcctgcggcacgctgaacgaaccgccgcccgtacccgtcagcgaaaccaccatcgtcaaacagtccaaaatcaaaaaaggcggcaaaaacggcgtgctcatcgacggcgaagacggtctgatgaccacgcttgccaaatgctgcaaacccgcgccgcccgacgacattgtcggcttcgttacccgcgatcgcggcatttcggtacaccgcaaaacctgcccctctttccgacacctcgccgaacaagcacctgaaaaagtgctggacgcaagctgggcggcgttgcaggaaggacaagtgttcgccgtcgatatcgaaatccgcgcccaagaccgctccgggcttttgcgcgacgtatccgacgcactcgcccgccacaaactcaacgttaccgccgtgcaaacccagtcccgcgacttggaagccagcatgaggttcacgctcgaagtcaaacaagttaccgacctcccacgcgtcctcgccagcctcggcgacgtcaaaggcgtattgagcgttacccggctttaa

SEQ ID NO: 41613 - DNA, 1479 bp, Neisseria meningitidis
atgttcagcaagttaacccctttggctgaaaccggcatcccgaccctgtcgtgtgcaaacgcggcagggcgtttgttgcattcagacagccgccaaatcaaacaaggcgatattttcgttgcctgtccgggcgaatatgccgacggacgcagttatatccccgccgccgttgccaacggcgcggcttttgttttttgggacgacgacggcaaattcgcgtggaatcccgaatggaaagtccccaatcaaggcatcaaagatttgaaacaccgtgccggcatattggcggcgcaagtttacggcaacgtttcagacggtctcaaagtctggggcgtaaccggaaccaacggcaaaacctccatcacgcaatggctggcgcaagctgccgatttgttgggcgaaaaaaccgccattgtcggcacggtcggcaacggcttttggggtgcattggaagaaaccacgcataccacacccgcccccgtcgatgtccaaaccctgctctaccgtttccgtcaacaaggcgcaacagtcgccgcgatggaagtctccagccacgggcttgaccagtcgcgcgtcaacggcgtgtcattccgcagcgcaatctttaccaacctcacccgcgaccacctcgactaccacggcacgatggaagcctacggtgccatcaagtcgcgcctgttttactggcatggcttgaaacacgccgttatcaatgtagatgacggatacggcgcagaactcataggccgtctgaaaaaagactgccccgatttggccgtttatagctacggcttcagcgaacacgccgacatccgcattatcgatttcaccgcctcttcagacggcatagcagccgtattccaaaccccgtggggcgaagggaaatgccgcacgcgcctgctcggacggttcaacgcgcaaaacctcgccgcctgcatcgccttgctgtgcgccaacggctatccgcttgataaagtattggatgtgctggcaaaaatccgtcccgcttcagggcgcatggactgcatcatgaacagcggcaaacctttggtcgttgtcgattatgcccatacgcccgacgcattggaaaaagcactcgccaccttgcaggaaatcaaaccgcagggtgcggctttgtggtgcgtattcggttgcggcggcaaccgcgatcgcggcaaacgcccgctgatgggcgcggcagccgtacagggcgcggataaagtcgtcgtcaccagcgacaatccgcgtttggaaaatccgcacgacatcatcaacgacatcctgcctgccgttcccgcgcccgaatgcgtcgaagccgaccgtgccgccgccatccgttatgcggttgaacaagccgccgcaaacgacatcatcctgattgccggcaaagggcatgaaaactatcaggatgtacaaggcgtgaagcaccgtttttccgatcttgaaatcgtcggacaggctttgttaactcgtaaataa

SEQ ID NO: 41614 - DNA, 2295 bp, Neisseria meningitidis
atgcgacgagaaaccaaaatggcacaaactacactcaaacccattgttttatcaattcttttaatcaacacacccctcctcgcccaagcgcatgaaactgagcaatcggtggatttggaaacggtcagcgtcgtcggcaaaagccgtccgcgcgccacttcggggctgctgcacacttcgaccgcctccgacaaaatcatctccggcgataccttgcgccaaaaagccgtcaacttgggcgacgctttggacggcgttccgggcatccacgcttcgcaatacggcggcggcgcgtccgctcccgtcattcgcggtcaaacaggcaggcggattaaggttttgaaccatcacggcgaaacgggcgatatggcggatttttcgcccgatcacgccattatggtagataccgccttgtcgcaacaggttgaaatcctgcgcgggccggttacgctcttgtacagctcgggcaatgtggcggggctggtcgatgttgccgatggcaaaatccccgaaaaaatgcctgaaaacggcgtatcgggcgaactcggattgcgtttgagcagcggcaatctggaaaaactcacgtccggcggcatcaatatcggtttgggcaaaaactttgtattgcacacggaagggctgtaccgcaaatcgggggattacgccgtaccgcgttaccgcaatctgaaacgcctgcccgacagccacgccgattcgcaaacgggcagcatcgggctgtcttgggttggcgaaaaaggttttatcggcgtagcgtacagcgaccgtcgcgaccaatatggtctgcctgcccacagccacgaatacgatgattgccacgccgacatcatctggcaaaagagcttgattaacaaacgctatttacagctttatccgcacctgttgaccgaagaagacgtcgattacgacaatccgggcttgagctgcggcttccacgacgacgatgatgcacacgcccatgcccacaacggcaaaccttggatagacctgcgcaacaaacgctacgaactccgtgccgaatggaagcaaccgttccccggttttgaagccctgcgcgtacacttgaaccgcaacgactaccgccacgacgaaaaagcaggcgatgcggtcgaaaacttttttaacaaccaaacgcaaaacgcccgcatcgagttgcgccaccaacccataggccgtctgaaaggcagctggggcgtgcaatatttacaacaaaaatccagtgctttatctgccacatccgaagcggtcaaacaaccgatgctgcttgacaataaagtgcaacattacagctttttcggtgtagaacaggcaaactgggacaacttcacgcttgaaggcggcgtacgcgtggaaaaacaaaaagcctccatccgctacgataaagcattgattgatcgggaaaactactacaaccatcccctgcccgacctcggcgcgcaccgccaaaccgcccgctcattcgcactttcgggcaactggtatttcacgccacaacacaaactcagcctgaccgcctcccatcaggaacgcctgccgtcaacgcaagagctgtacgcacacggcaaacacgtcgccaccaacacctttgaagtcggcaacaaacacctcaacaaagagcgttccaacaatatcgaactcgcgctgggctacgaaggcgaccgctggcaatacaatctggcactctaccgcaaccgcttcggcaactacatttacgcccaaaccttaaacgacggacgcggccccaaatccatcgaagacgacagcgaaatgaagctcgtgcgctacaaccaatccggtgcggacttctacggcgcagaaggcgaaatctacttcaaaccgacaccgcgctaccgcatcggcgtttccggcgactatgtacgaggccgtctgaaaaacctgccttccctacccggcagggaagatgcctacggcaaccgtcctttcatcgcgcaggacgaccaaaacgcccctcgcgttccggctgcgcgcctcggcgtccacctgaaagcctcgctgaccgaccgcatcgatgccaatttggactactaccgcgtgttcgcccaaaacaaactcgcccgctacgaaacgcgcacacccggacaccatatgctcaacctcggcgcaaactaccgccgcaatacgcgctatggcgagtggaattggtacgtcaaagccgacaacctgctcaaccaatccgtttacgcccacagcagcttcctctctgatacgccgcaaatgggccgcagctttaccggcggcgtgaacgtgaagttttaa

SEQ ID NO: 41615 - DNA, 1362 bp, Neisseria meningitidis
atgctgaaaaaatggttgaataagatgctgccttccggtcggagcagtaaaaaagcggaaagtaaaacggtcattcctgccgaaagacacaacatccgtgccgaaatgttgagctttgccgccgaaaacgtcatacgccgtctgaaaggggcggggtttcaggcttatgtggtcggcggcgcggtcagggatctgctgctcggcatcgaacccaaagatttcgatgtcgcaaccgatgccacgcccgaacaggtgcacaaactcttccgccgcagccgcatcatcggcaggcgttttcaaatcgtccatgtgatgaacggtgcggagattatcgaagtaacgacgtttcgcggcggtgcgaaggttcatcagaacgcgcacggcagaatcatgaaggacaacacctacggcagcatcgaagaagatgcgatgcggcgcgattttacctgcaatgccttgtattacgatccggaaaaagaagagattttggatttccacaacgggattgccgatgttgccgcccgcaggctggttatgattggcgatgccgccgaacgctatcaggaagaccctgtcaggattttgcgcgccatccgcctgtcgggcaaattgggatttgatctgtcggaagaaaccgccgcaccgattgccgaatcaatatgccgtctgaagcacgaacctgtggcaaggctgttcgacgaaattatgaaactgctgttttcagggcacgcgcgcgagtgtctaaaacgtttgaacggatttgacataccggacgacatccatccgctgctcaatgccttgcgcgtttcagacggcatcgccggaaaaatgacggtgcttgccctgaaaaataccgatgagcggctgcgtgccgacaaatcggtttcggtcggtttcgtactggcggccctgatgtggcccgagttggaacgccattggaaaagcaatctgcaacagggtttgaaacccgtgcccgccctgtccgatgcaatcaatacgatgcgcgaaaccgtcgaacgcggttggggcgtaccgcaacgcttttccgccacgatgcgcgaaatttggatgttccagccgcagtttgaaaaccgcaaaggcgcaaggccgcacaaactgtttgcacaggcgcgtttccgtgccgcctatgatttcctgctcttgcgcgccgaaaccggcaatgcggaccgcgcccttgccgagtggtggacggcgtttcagacggcatcgcaggaacaacggacggagatgaccaaaaacgaggccgccgcccgacacgaaaaaaacgaaggacaggcgaaaaaacgccgccgtcgcaggcgcaaacccaagccgaaggttgagggaacggattgggaataa

SEQ ID NO: 41616 - DNA, 777 bp, Neisseria meningitidis
atgaattttatccgttccgtcggggcgaaaaccctcggccttattcaatccctcggcagtattacgctgtttctgctgaacattctggcgaagtccggtacggctttcgtccgtccgcgcctgagcgtgcgccaagtgtatttcgccggcgtgctgtcggtgctgattgttgccgtttcggggctgttcgtcggtatggttttgggtttgcagggttatacgcagttgtcgaaattcaaatccgccgatattttgggctatatggtcgcggcttcgctgttgcgggaactgggtccggtgttggcggcgatcctgtttgccagcagcgcgggcggtgcgatgaccagcgaaatcggtctgatgaaaacgaccgaacagctcgaagcgatgaacgtgatggcggtaaaccctgtcgcccgcgtggttgcgccgcgcttttgggcgggcgtgttttccatgccgcttttggcttcgattttcaacgtggcgggtattttcggcgcgtatttggtcggtgtaacctggctgggcttggacagcggcattttctggtcgcaaatgcagaacaacatcacgatacattacgatgtaatcaacggtctgatcaaatccgccgcgttcggcgtggcggtaacgctgattgccgtgcatcagggcttccactgcgtcccgacctcggaaggcattttgcgcgccagcacgcgcacggtggtttcgtccgccctgacgattttggcggtcgattttatattgaccgcgtggatgtttacagattga

SEQ ID NO: 41617 - DNA, 477 bp, Neisseria meningitidis
atgaacaccatcgcccccaacctcgacggcaaacacctccgcatcggcatcgtacaggcacgcttcaccaacgaaatcggcagcgaaatgctcaaagtctgctgccgcactctcaaagaattgggcgtggcagacgaaaacatcaccgtcgccaccgtacccggcgcacttgaaatccccatcgcactgatgaactttgcctcttctgaaaaatttgacgcactgattgccatcggcgtcgttatccgtggcgaaacctaccatttcgagctggtttccaacgaatccggagcaggggtcagccgcgtcgcactcgactacaacatcccgattgccaatgccgtcctgaccaccgaaaacgacgcacaggcaatcgaacggattgaagaaaaagcctcggatgccgccaaagtcgccgtcgaatgcgccaacctcgtcaacctgctgctcgaagaacagtttgaagacgaagaataa

SEQ ID NO: 41618 - DNA, 612 bp, Neisseria meningitidis
atgattacgacttataaaaccattacctcctcgacgcaggctgagtttaaagataaaggcagccgttttattgtatttgcctatccgattcggacattggctgatgtgaaaaaatacctcgatccgttaaaggaagagcatcataaagcacgacactggtgctatgcctatcgtttgggtgtggatggtgtgcaatttcgtgccaacgatgatggagagccatcaggaagtgctggacgaccaattttgggacagattgattcggtgggtattaccgacgttttggtcgtggtcgtccgctatttcggtggtactttgttaggtgttccaggtctgatacatgcgtacaaagaggcgacggctcaagcgttggcagttgcagaagtagttgaaaagaatattgaaaaaactgtttggctgaaatgtgaatatccgtttttgaatgaagcgatacgcattgccaaacaatatcaggcggatatattggagcgggatttgcagttggattgccgattgacggtaagtttgtcgttggcaaattatgaggcctgtgttgcggcttggaagaatacacggcagattgaggtaaatacggaaaagccttttgaatga

SEQ ID NO: 41619 - DNA, 1392 bp, Neisseria meningitidis
atgcaattgtttttagacaatctcaaagcctttttcgaaaccgtcagcggctgggtctggggatctgttatgttgatgctgctggtcggcaccggcattgtgctgaccgttatgctgaaaggcttacagttcactatgttgggctatgcgctgaaacaggcgtttgtgccgtcaaagaagtatgaaggcggcgaaggccacgaaggcgatatttcccattttgcggcgttgatgaccgcgctgtccgccaccatcggtacgggtaacatcgccggcgtggcgactgcggtggtaaccggcggcccgggcgcggtattttggatgtggatgaccgccattttcggtatggccaccaaatacggcgaaggcgtgttggcggtgaaataccgcgtcaacaattccaaaggcgaaatgtccggcggcccgatgtattacatcgaaaacggcttgggcaaaaactggaaatggatggccgtcgcgtttgcgctgttcggcacattcgcttcgttcggtatcggcagctcggtgcagtccaactcagtcgctcaagcggttcagacgagcttcggcatcaatcctgtctataccggcatcactttgaccgttctaactgccatcgttgtgttgggcggtatcaaaggcatcgccaaagccgcttctttcatcgtacctgccatggcagtgttttatgtggtgggcggtatctccattatcgtgattaattctgatgcactgatgcccgccgtcaacctgattttctccgatgcgttcagcgcgaaagcagtcgccggcggtgctatcggtaccgttatccgctacggcgtggcgcgcggcgtgttctccaatgaggcgggcatgggttctgcaccgattgccgccgcagccgccaaaaccgaccaccccgtccgtcaggctttggtttccatgaccggtacgtttttggacaccatcgtcgtttgctcgattaccggcattattttggtgatgggtctgctcggcgcaggcggcgagtttgtcaaacctgaattgagcggcgcggcgctgacaaccgtcactttccaaaaaatgctgcccggcattggcggctggattgttaccatcggcctgattttctttgcctactcaaccattctcggctggtgttattacggcgagaaatgcgcggtgtatgttttcggcgagaaatttgccggtttgtaccgcgtcggttatgtttcttccgttatgctgggtaccgtgttgagccttgatttggtgtggctggcttcggacacattcaacggcttgatggcattgcccaacctgattgcacttttattgatggcgaaagtcatcgtcaatgaaacgcgcgacttcaaacaaaaaatcacaaacggcgaattgccgcattaa

SEQ ID NO: 41620 - DNA, 366 bp, Neisseria meningitidis; identical to SEQ ID NO: 38539

SEQ ID NO: 41621 - DNA, 900 bp, Neisseria meningitidis
atggttgcaaaaataaaaaaattctcagattcaaccctttccgttttgaataacggcgagcgtcggttttatgtctattgtctgaccgacctgaaaaaagacaaagtcctctacatcggcaaaggcttcggtaatcgtatcttcgagcatgaatgggttgctagtcgttcacaagacccagtctccggcgagattatcgatcggaaactcaaagccatctccaaatgcaagaaactcggtcgctatatcatcagctatcatctgactgaagtcgaagcactcgccgccgaatctgccttaattcattttgttaaatctgtcttgggtaaaaaactcaaaaataaaattgccgggcatggtccgggtggtattagcgtagaagaactagatcgccgctttggattctcttctctcccacttaacgagattaaccccgacgggctgattctcgccatcaaaatccacaatgctttcgatttagatactgacgaagaattagactaccttttcgacaaccaagacgatgccaacctcaaatcgcgtacgttgggcaactgggttatcggtaaagatgttgcttcaaaagtgaaatacgttatcggcgttcacaccggtctgcaaaacgctgttgtcagtgcatacgaagtggacggttttgaaacaatggttgaggaaaccaaaaacggtagaaaacaatcccgttaccgtttccgcactacctctcgtagcgaagaggtattagccaaactcggtctgcaacaaaaatgcctgcccgaattgaagtttggtagcgggggagaaaaagcgtatatcagacccaaaacagagacagaaactgaacaagagaatattcagacgacccccaatccaaaaataaaaaaggaaaaaaccaaatcatga

SEQ ID NO: 41622 - DNA, 945 bp, Neisseria meningitidis; identical to SEQ ID NO: 37790

SEQ ID NO: 41623 - DNA, 303 bp, Neisseria meningitidis
atgcggatattcaaaaaccaatggatagtgaaatttgccaagaagcacaaaatcaacgattccgagctgctggaagcggtagagcgggcggataacgggctgatagacgcagatttaggcggcggtgtgattaagcagcgcatagcaaggcaaggacaaggcagaagcggcggctatcgcagcctgatattgttcaaacaggcagatagggcattttcgtttacgcctttgccaagaacgacagggaaaacatttcggataaagaactggacgtttaccgaaaagccgccgcatattatctga

SEQ ID NO: 41624 - DNA, 1233 bp, Neisseria meningitidis
atgccttctgcccattatcctgaaatgagcgaaaaactgatggcggttttgatggcgatgctggttacgctgatgccgttttccatcgatgcctacctgcccgcgattcccgaaatggcgcagtcgctgaacgcggatgtccaccgcatcgaacagagcctgagtttgtttatgttcggcacggcgttcggacaggtggtcggcggttcggtgtccgacatcaaagggcgcaaacccgtcgcgctgaccggactggccgtctactgccttgccgttgccgccatcgtatttgcttcgagtgccgaacagctcctcaacctgcgcgtcgtgcaggcattcggtgcgggcatgactgtggtcatcgtcggcgcaatggtgcgcgattattattccggacgcaaagccgcccagatgtttgcccttatcggcatcattttgatggttgtgccgctagtcgcacccatggtcggcgcactgttgcagggcttgggtggctggcaggcgatttttgtttttctggcggcgtattcgctggtgctgctcggtttggtgcagtatttcctgcccaagcctgccgtcggcggcaaaatcggacgggatgtgttcgggctggtggctgggcggttcaaacgcgtattgaaaacccgtgccgcgatgggttatctgttttttcaggcattcagcttcggttcgatgttcgcctttctgaccgaatcttccttcgtgtaccagcagctttaccgtgttacgcctcatcaatacgcttgggcatttgcactcaacatcatcacgatgatgtttttcaaccgcattaccgcgtggcggctcaaaaccggcgcacatccgcaaagcatcctgctgtgggggattgtcgtccaatttgccgccaacctgtcccaactcgccgccgtgctgtttttcgggttgcctccgttctggctcttggttgcgtgcgtgatgttttccgtcggcacgcagggcttggtcggcgcgaacacgcaggcatgctttatgtcttatttcaaagaagagggcggcagcgcgaacgccgtgttgggcgtgttccagtccttaatcggcgcgggggtgggtatggcggcgaccttcttgcacgacggttcggcaaccgtgatggcggcaacgatgaccgcgtccacctcttgcggcattgcgcttctgtggctgtgttcgcaccgggcgtggaaggaaaacgaacagagcgaatacctttaa

SEQ ID NO: 41625 - DNA, 474 bp, Neisseria meningitidis
atgaaaggcgaccgtctggttatccgcgagctaaacaaaaacttaggcttgctgctggtaaccatcaaccaatatttccttcacgcccgtattttgaaaaactggggctttgaagaactgggcgaacatttcttcaaacagtccatcgttgaaatgaaagctgccgacgatttgatcgagcgcattctgttcctcgaaggtctgccgaacctgcaagaactgggcaagcttctgattggcgagtccaccgaagaaatcatcgcctgcgatttggaaaaagagaaagaaaaacatgaggcattgattgcggcaatttccgtggcagaagcgcaacaggattatgtcagccgtgatttgttggaaaaacaaaaagacaccaacgaagaacacatcgactggctcgaaacccagcaggaactgatcggcaaaatcggtctgcccaactacctgcaaacagcggcgcaagaggactaa

SEQ ID NO: 41626 - DNA, 264 bp, Neisseria meningitidis
ttgttttcaggcgaatccgccgcatcagaacatactgcgcacgcccatattgacctgccaagtctggcgcatcgtgtgcatcgaagacctttgcgcctcaaaataaagctgccttccgttgtcggcattaccacgcaaaaaaatgaattgcttgatattccaatgttttttatatgtttttatattgtgatgcgatcagacaaacgcccccctgacatttgtttagacggcatcgtattgctaaatttctataagtatgtataa

SEQ ID NO: 41627 - DNA, 969 bp, Neisseria meningitidis
atgaaaattttgcttgtccgcttgtccagtatgggcgatttaattcacactttgcccgcaatcgaagatttggcgcgacaatgtcctgatgtagaactgcattggctatgtgaggctggatttgcagatattgcgcgcctgcatccgtttgtaaaaaaaatccatgtgatgaaatggcggcagtggcgcaaacatctctttcgggctgaaacttggcgggaaatgggtcatctgaaacagactttgcggcaggaagcatttgattttgtattggatagtcaaggtctgattaaaagcgcgtgtttcgccaaaatggcaaaatcccctatttatggtttggataaaaatagcgcgcgtgagggactggctgcggttgtgtatgagaaaacatacgctgtaccgaagggaaaaaatgccgtttggcgcaaccgtgaactgtttgcccaagtatttgggtatgcgatgcctgaaacgcaggtatttggcttgactgttcctgaggcaggccgtctgaaaaatttagcgcagccgtattatgcggctttgcatgcgaccagtcgggacagtaagttatggcctgtggaaaactggcggtcgttgctgcaaaagttgaatgaagaacagcaatgcaatatttacctgccttggggaagtgaagttgaaaaaacgcgtgccgaacagattgcagacggactgccgtttgctattgtgtgcgataaaatgaatttattgcaggcagcgtatctgctgaaatacgcggtcggaattgtcggcgtggataccggtttgctgcatttggcaaatgccttggaaaaacctgtggtcggcatttataccgataccgatccgattaaaacaggcgttcaggtttcgccaattgcaaaaaatttgggcaatatcgggcagattccgaccgcagatttggtttatcaaacgttgatggattgtgttgcagcagacaaaggctaa

SEQ ID NO: 41628 - DNA, 633 bp, Neisseria meningitidis
atggatttgcacaatattcgggaagattacagtaaacgggaattgtcggaaggcgattgcgccgacaatccgatcgagcagttcgagcggtggttggacgaggcggtacgcgcacaggtcaacgagccgacggcggtcaatgtggcggcggttgacggacgcggcaggcctaacagccgtatggtgctgctgaaggaagttaattctgaaggttttgttttctttacgaattatcacagccgcaaggggcgttcgctggatgctcatccatttgcggcgatgacgtttttttggccggagctggagcgtcaggtgcgcgtggaagggcgtgttgaaaggctggcggagaaattgtcggacgaatattttgagagccgcccgtatcagagccgtttgggtgcgtgggcaagcgcgcagagcgaagtgattccgaacaaggcggtattggtggcaaaggcggcggcggtcggactcaaacatcctttgcacgtgccgcgtccgccgcattggggcggctatattgtgattcccgatttgcttgagttctggcagggcaggccgagcaggttgcacgaccgcatccaataccgtttgctggatggtggctggatacgcgagcggctgtcgccttga

SEQ ID NO: 41629 - DNA, 1098 bp, Neisseria meningitidis
atgaaccagacatttaccttgcccgatacgcgcccgtatccccaaaatccgattaaaaaccacctgctgctcaatgcctaccagttggcgcataattcttcccaggcttcgcgcaaactctcgtccggccaacttcaaaccgaaatcaggggaatgcttgagcaaaaccactatatcaacctttccctcgcgttgacgatgtcgcccgatgccggaacttatgccgcgctgctttccagtgtgaacgcggtgctcgattgcgagaaagaaggcgaagtgcagtggttcgccctgccggttgtgctggtgtccggctgcaagaaagaacgggcaatcgagatgaagctgccgacggaggcattgtttgcctgtttgaaaaactatccgcacctgcgcgcgttgacgcaagagacgcaatggctgccttatcttgtgcattcttccgatttgagcgcggtcgcgccggatgagtggtggcgtgccaaacaaaataccgaagcggcggcgcaacacttgcgccgtttcgccccgcgccctttgctgttgcccgaagggcagtccgtccacgtcgtttacgcgctgggtttcggcagcggcaaggttcagacggcattgggtcagaaccttcttcaggcaggcctgcccttaatgcaggtatggcaggaaaatcttgcatcggaaggcgttacgctgtttgccaatccactttccccggattctccggtacgcgcgctttcagacggcagccacacgcgccagcgtatggcgatggatgtgtttgcggcaaacgcgatacgcgccgtccgtatgcagagtccgcgcgtcggcgtggtcgctgcggcaaaggcgggcggacaggttttattcgggtttaatgcgaccgacggcgcgtttgaagtcgtgccgcaggtgtttttgtggcagctttcctttaccgacaatattggcgttattcagcaaaattttttggatttaatggcagaatgccgtgtagaacacgtttacctgttgcacaatcccttgggcgaacaggaaagcatcccgagctatgcggaagcattgaaacgggaagggcacaatccgtttttcagcgcatag

SEQ ID NO: 41630 - DNA, 276 bp, Neisseria meningitidis
atgaatgagggtgaagttgttttaacaccagaacaaatccaaaccttgcgtggttatgctttccgtggcgatacctatggcggttggcgttatttggctaatttgggtgaccgttatgcggatgatgctgctgcaattgtcggtaaggatgcaaacttaaatggtttgaatttatggatgaaaaaaggtgtggaaaacctatgggatgatacggtcggtaaaaagacccgtttaatgtgtatttccgttttttggattgtggttttcaatttgtag

SEQ ID NO: 41631 - DNA, 1065 bp, Neisseria meningitidis; identical to SEQ ID NO: 39469

SEQ ID NO: 41632 - DNA, 198 bp, Neisseria meningitidis
atgcctaaaatgaaaaccaagtctagcgcgaaaaaacgctttaaagtactgggtaacggcggtgtgaaacgcgctcatgcgttcaaacgccacatcttgactaaaaagaccaccaaaaacaaacgccaactgcgcggtacctctatggtaaacgatcgcgatttggcttctgttgctaaaatgttaccctacgcttaa

SEQ ID NO: 41633 - DNA, 1116 bp, Neisseria meningitidis; identical to SEQ ID NO: 38517

SEQ ID NO: 41634 - DNA, 768 bp, Neisseria meningitidis
atggcactggcaaaacgcatcatcccctgtctcgacgtaaaagacgggcgcgtcgtcaaaggcgtgaacttcatcggtttgcgcgacgcgggcgaccccgtcgaagccgccaaacgctacaacggcgaaggcgcggacgaattgaccttcctcgacatcaccgcctcatccgacaaccgcgacaccatcctgcacatcatcgaagaggttgccggacaagtcttcatccccctgaccgtcggcggcggcgtacgcaccgttgccgacatccgccgcctgctcaatgccggcgcggacaaagtcagcatcaacaccgccgccgttacccgtcccgacctgattgacgaagccgccggatttttcggttcgcaagccatcgtcgccgccgtcgatgccaaagccgtcaactccgaaaacacacgctgggaaatctttacccacggcgggcgcaatccgaccggtttggatgcggtggaatgggcgatcgaaatgcaaaaacgcggcgcgggcgaaatcctgcttaccggtatggacagggacggtacgaaacagggtttcaacctgccgctgacccgcgccgttgccgaagccgtcgacatccccgtcatcgcctccggcggggtcggcaatgtccggcacctgattgaaggcataaccgaaggcaaagccgatgccgtacttgccgccggcgttttccatttcggggaaatcgccatccgcgaagccaaacgcgctatgcgcgaagccggcatcgaagtgcgcctctga

SEQ ID NO: 41635 - DNA, 1836 bp, Neisseria meningitidis
atgcatgcacacgcctcagatttggcaaacgattcttttatccggcaggttctcgaccgtcagcatttcgaacccgacgggaaataccacctattcggcagcaggggggaacttgccgagcgcagcggtcatatcggattgggaaacatacaaagccatcagttgggcaacctgatgattcaacaggcggccattaaaggaaatatcggctacattgtccgcttttccgatcacgggcacgaagtccattcccccttcgacaaccatgcctcacattccgattctgatgaagccggtagtcccgttgacggattcagcctttaccgcatccattgggacggatacgaacaccatcccgccgacggctacgacgggccacagggcggcggctatcccgctcccaaaggcgcgagggatatatacagctacgacataaaaggcgttgcccaaaatatccgcctcaacctgaccgacaaccgcagcactggacaacggcttgccgaccgtttccacaatgccggcgctatgctgacgcaaggagtaggcgacggattcaaacgcgccacccgatacagccccgagctggacagatcgggcaatgccgccgaagccttcaacggcactgcagatatcgtcaaaaacatcatcggcgcggcaggagaaattgtcggcgcaggcgatgccgtgcagggtataagcgaaagctcaaacattgctgtcatgcacggcttgggtctgctttccaccgaaaacaagatggcgcgcatcaacgatttggcagatatggcgcaactcaaagactatgccgcagcagccatccgcgattgggcagtccaaaaccccaatgccgcacaaggcatagaagccgtcagtaatatctttacggcagtcatccccgtcaaagggattggagctgttcggggaaaatacggcttgggcggcatcacggcacatcctgtcaagcggtcgcagatgggcgcgatcgcattgccgaaagggaaatccgccgtcagcgacaattttgccgatgcggcatacgccaaatacccgtccccttaccattcccgaaatatccgttcaaacttggagcagcgttacggcaaagaaaacatcacctcctcaaccgtgccgccgtcaaacggcaaaaatgtcaaactggcagaccaacgccacccgaagacaggcgtaccgtttgacggtaaagggtttccgaattttgagaagcacgtgaaatatgatacgaagctcgatattcaagaattatcggggggcggtatacctaaggctaagcctgtgtttgatgcgaaaccgagatgggaggttgataggaagcttaataaattgacaactcgtgagcaggtggagaaaaatgttcaggaaacgagaagaaggagtcagagtagtcagtttaaagcccatacgcaacgagaatgggaaaataaaacagggttagattttaatcattttataggtggtgatatcaataagaaaggcacagtaacaggagggcatagtctaacccgtggtgatgtacgggtgatacaacaaacctcggcacctgataaacatggggtttatcaagcgacagtggaaattaaaaagcctgatggaagttgggaaatgaaaaaaggaaggggcggaaaacctatgacaaatcattctatgttcccaaaagattgggatgaggctagaattagggctgaagttacttcggcttgggagaaaagaaaggaattagaaggtcaaaaatggagaggtacaagtaaatctggtgttgaaatagaaggatttacggaacctaatcgaacagcttatccactttataatagtaaatga

SEQ ID NO: 41636 - DNA, 924 bp, Neisseria meningitidis
atgcaatacagcacactggcaggacaaaccgacaactccctcgtttccaataatttcgggtttttgcgcctgccgcttaattttatgccgtatgaaagtcatgccgattgggttattaccggtgtgccttatgatatggcggtttcagggcgttccggcgcgcgtttcggtcctgaagccatccggcgcgcctccgtcaacctcgcttgggagcaccgcaggtttccatggacatttgatgtgcgcgaacgcctgaacattattgattgcggcgacttggttttttcttttggcgacagcagggattttgtcgaaaaaatggaagcgcacgccggcaaattactttcttccggcaaacgctgtttgagtttgggcggcgaccatttcattaccctaccgttgttgcgcgcccacgcccgctatttcggcaaactcgcactgattcattttgacgcgcacaccgacacctacgacaacggcagcgaatacgaccacggtacgatgttctataccgcccccaaggaaggcctcatcgacccgtcccgttccgtacaaatcggcatacgtaccgaacacagtaaaaaattgccttttactgtgttgaccgccccccaagtcaatgaagacagtgttgaagagaccgtccgtaaaatcaaagaaaccgtcggcaatatgcccgtttacctgactttcgacatagactgcctcgacccgtcgttcgcccccgggaccggtacgcccgtatgcggcggcttgagcagcgacagggcattaaaaatcctacgtgggctgacggatctcgacatcgtcggtatggatgttgtagaagttgccccctcttacgaccaatccgacattaccgctttggccggcgccacaattgccttggaaatgctttaccttcaaggtgcgaaaaaggactga

SEQ ID NO: 41637 - DNA, 588 bp, Neisseria meningitidis
atggaacataagctgccgcaactgccttatgaactggacgcattgtccccgcatctgagcaaagagactttggaattccactacggcaaacaccatcaaacctacatcaccaacctgaacaatcaaatcaaaggtaccgaatttgaaaaactgcctttggaagagattgtgaaaaaatcttcgggcggcgtgttcaacaacgcggcacaaacttggaaccacaccttctactggctgggtttcacgcccaaaggtcaaggcaaaccttccggcgaactggccgccgccatcgacgcgaaatggggcagcttcgagaaattccaagaagcgttcaatgcctgcgcggccggtactttcggctccggttgggcgtggctggtaaaaacccctgccggcggattggatttggtttccacttccaacgccgctacgccgctgaccactgaaaacacgccgctgctgacctgcgacgtgtgggaacacgcctattacatcgactaccgcaacagccgccccaactacctgaaaggtttctgggaaatcgtcaactgggacgaagtcgccaaacgcttcgccgccttgtcctga

SEQ ID NO: 41638 - DNA, 1542 bp, Neisseria meningitidis
atgaagtttttagaccgtgaggcaagcattgccaagccgggtttcaaccgttggctcgtaccgcccgcagcattggcggtgcaccttgccatcgggcagatttacgcctattccgtattcaacgcgccgctgaccaaacttatcggcataaccgaatcggcggccggagattggaagctgacgaccgtaggttggattttcagtatcgcactcgcgatgctgggcgcgtcggccgccctgttcggtacgtggatggaacgggtagggccgcgcaaagccatatttgccgccgcctgctgcttcagcctgggcttcttcgtatccgcattcggcgtgcgtacgcacaacctcttcctgctctatttgggcaacggcgtcatcggcggcgtaggcttgggtttgggctacatcgggccagtttccacactgatgaaatggtttcccgacaagccgggtatggcgaccggtttggcgattatgggtttcggcggcggcgcaatgctggcctcgccgctttccgtatcactgatgaacgccttttcaaacgctgcttcggtcggggttgccgaaaccttcgccgtattgggtctgctttacctcgcactgatgatgtttggcgcgtttaccatccgcgtacctgccgacggctggaaacctgaaggctataccgcgccgaaaacgcaaaacaagctggtcagcagcaatcatgtcaacgtgtcccaagccatgaaaacgccgcagttttggctgttgttctgggtattgtgcctgaacgtaaccgccggcatcggcgtattgggtcaggcatccgtgatgattcaggaactcttttccgaaacctccgtaggcaggcagtcggcagtcggcgcaggtgcggcggcaggcttcgtcagcctcctgagcctgtttaatatgggtgggcgctttttgtggtcgagcgtttccgacaaaatcggacgcaaaaacacctacaccatcttcttcatactcggttcgctgctgtatttcgccgttccctccatcggcgagagcggcagcaaagccctgttcatcatcggcttttgcgtgattatttccatgtacggcggcggatttgccgccattcccgcctacctgaaagacctgttcggcacctatcaggtcggcgcgattcacgggcgcatcctgctggcctggtcaaccgccgccgtcatcggcccggtactggtcaattacatacgccaaagccaaatcgacagcggcataccggcggcacaggcatacagcgtaaccatgtacatcatggcgggtctgctgattatcggtttgttgtgcaacctcgccgtcaaatccgtacacgaaaaacaccacgaaaaagacatcaaaaccgccgcacacagcggcaaccccgatgacgaaaccgccatatccgacgcttaccttgtgggcgaaaaagtttccggcggcggcatatcggtctggtggcgttgggcattggccgtcataccgctcgcctacggcgtggtgatggtctttgtcaaagcactcgaccttttctcctga

SEQ ID NO: 41639 - DNA, 354 bp, Neisseria meningitidis
atgaagcagattatcatcctacaatccgccgtattgtccatatgcgccgcagttgcctttgctgtatggggttttgccggattcctttcggcggtcggtggcggtttgtcctacctgcttcccacgtttgttgcagttttacttttaaaacttttcaggggaaaccccttcctgcaaagcaggatgttcgtcttcggagagattttaaaagtagtgctgtcgctgttgtccatgctcgccgtatttgctgtatggcatcaatcgttggtgttcgccccgtttctgatggggctgctcggtgtcagccatttggtttttttagtattgttgagagtgaaagattatggcaggtga

SEQ ID NO: 41640 - DNA, 1116 bp, Neisseria meningitidis
atgcgcttgtttaaaagcttgaaaaaccctaaaaaaacagatgccaagctccctaaaaaatcttcgggactcaataaccgcgcggcaatcggcatcgatatcgaccagcattccatcaaaatggtccaattgtcaggacgtagtttaaaccaaattcaattggaaaaatacgtcattgccaaattaccaaagaatatcattcaaggcaataaagtccaaaattacgatcaacttgttacatatttgcaacaagcctatgccaaactgggtacttcgtgcaaaaacatcatcgcgtccgtcccgcaaaatctggcaaccatcgaacaattgacctacacagacaaagatgcagaattagacctgcaggggttcgtggagtcctccatctccgaagtcagctcgatatcgctcgaagaagccaattacgactatcaggtcttgtcccaatcggccgccggcgaagctgtgttggccgtcgcatcgagaaaggatgaaatcgaacccctgattgacgcattcaacgccgccggtatgaaattatccgcgcttgatgtggacattttcggacaatacaacgcctacgcgctatggataaaccatttcgcccccgagcttgcagccgaaaaagtcgccattttcggcgtatatgccgcacagacctacgccttggtcatccaagacggaaaaatcctatacaaacaggaaacctccgtcagcgaagaacagctcaaccaactcatccagcgcacctatcaggtaacagaagaaaaagcggaagaaatcatcaactccccgcaaaaaccttccgattaccaagaaagcgtggcaaactatttcaaccagcagattacccaagaaatacaaagggtcttgcagttttattacaccacgcagaccgcagacgatatgaccgacatcaagcatatcctgctgaccggggaagcggtgcgccaggaaggcatcgcccaaaccgtcgcctcacaaaccaatgcagatgtacaatgcgtccatcccgcgcgttattttgcggacaacctcaaaacagacaaacaacaattcgaacttgatgcgccgacactgaccagggcgttcggtttggcggtacggggattataa

SEQ ID NO: 41641 - DNA, 288 bp, Neisseria meningitidis
atggctaaagtttatatcgcaaacactccgttgattttggaaaacgaacaaggcggccaatttcgtgtcgaggtcggcgaagcggtcgaattgacggcggagcagtacgaatcggtcgcggcacacgttaccccgacattgacaaccggcgaagagccggatgcgcaacaaaatgacaccccgccgtccgaagatacgccgtcagatgatgcaggcaatgcccctacgggcgaagttgaaaagccgaaacgcggtaaaaaaccggcagcagccgaaggggcggagtaa

SEQ ID NO: 41642 - DNA, 5499 bp, Neisseria meningitidis
atgaaaaccaaacgttttaaaattaacgccatatccttatccatctttcttgcctatgcccttacgccatactcagaagcggcattggtcagagacgatgtcgattatcaaatattccgtgactttgcagaaaacaaaggcaaattttttgtcggcgcaaccgatttatcagtgaaaaacaaacaaggtcaaaacatcggcaacgcattatccaacgtaccgatgattgattttagcgttgcagatgtcaacaaacgcatagcaacggtagtcgatccccaatatgctgtcagcgtcaaacacgccaaagcagaagtccatactttttattacggtcaatacaacggtcataatgatgtagccgacaaagaaaatgaataccgcgttgtcgaacaaaataactatgaaccccataaagcttggggtgcgagcaacttaggtcgcctcgaagattataatatggcgcgttttaacaagtttgtaactgaagttgcgccgattgcaccaactgatgccggcggcggattggatacctacaaagataaaaaccgtttttcctcttttgtcagagttggcgcaggcaggcaattagtttatgaaaaaggggcttatcatcaagaaggaaatgaaaaaggctacgatttgcgcgatctttcacaagcctatcgttatgccattgcaggtacaccttataaagatattaatattgaccaaacaatgaataccgaaggtttgattggctttggtaatcacaatacacactattcagcagaagaacttaaacaagcactctcgcaagatgcgttaacaaattacggcgtgttgggcgatagcggctctccgttatttgcttttgacaaacaaaaaaatcaatgggtctttttgggaacttatgattattgggcaggttacggaaaaaaatcttggcaagaatggaatatctataaaaaagaatttgcagataaaatcaaacaacgcgataacgccggcaccatcaaaggtaatagagaacatcattggaacattacttttggcacaaacagcaagattggttctacagcggtaaggcttgccaacaatgaaagggatgcaaacaacggacagaatgttacctttgaagacaacggcactttggtattggatcaaaacatcaaccaaggcgcgggcggtctgtttttcaaaggcgattacacagtcaaaggtgcaaataatgacatcacttggctaggtgcggggattgatgttgccgacggcaaaaaagtcgtttggcaagtcaaaaatccgaatggcgacagattggcaaaaatcggcaaaggcacattagaaataaacggcacaggcgttaaccaagggcaattaaaagtcggcgacggtacggttattctgaatcaacaagccgatgccgacaaaaaagtccaggctttctcccaagtcggcattgtcagcggacgcggtacattggtattaaatagttcaaatcagattaatcccgataacctatatttcggtttccgtggcggtcgtttggatgccaatggcaatgacttgacttttgaacacatccgcaacgtggatgaaggtgcgcgcattgtcaaccacaacacagaccatgcctccacaatcacgctaacgggtaaatctttgattaccgatcccaaaaccatctctattcattatattcaaaataatgatgatgacgataatggttattactattaccgccctaggaaaccgattccacaaggcaaagatctttatttcaaaaactaccgttattacgccctaaaatccggcggcagcgtgaacgcaccaatgccggaaaacggtgtggcagaaaataacgactgggtctttatgggatatacgcaagaagaagcccagaaaaacgcgatgaaccacaaaaacaatcagcgtattagcggttttagcggtttctttggagaagaaaacggaaaaggacataacggcgcattaaaccttaatttcaacggcaaaagcgcgcaaaaccgtttcttgttaacaggcggtgccaatttaaacggaaaaataagcgtaactcaaggcaatgtcttgttatcaggtcgtccaacaccacacgcaagagattttgtgaacaaatcttcagcccgaaaagacgcacgtttctccaaaaacaatgaagtcgtatttgaagacgactggataaaccgtacattcaaagccacagaaattacggttaatcaatccgcatcattctcttccggcagaaatgtatccgacatcaccgccaacattaccgcaacagacaacgccaaagtaaatttgggttacaaaaacggcgatgaggtttgcgtgcgctcggactataccggttatgttacctgcaacacaggcaacttatccgataaggctttaaacagctttggagcgacacagattaacggcaatgtgaatctgagtcagaatgcggcattgactttgggcaaggctgcattatgggggcaaattcaagggcaaggaaacagccgtgtcagcctaaaccaacatagcaaatggcatttgaccggcgacagccaggtacacaatctgttattggcggatagccatattcatttgaacaacgcttccgacgcgcaaagtgcaaataaataccacacgctcaaaatcaatcatttatccggtaacgggcattttcattatctgacgcacttggcaaaaaatcttggggataaagtgcttgtgaaggaatccgcatccggtcattatcagctccatgttcaagataaaacaggcgaacccaatcaggaagggctgaatctctttgatgcatcatccgtacgagaccgctcccgcctttctgtttccttggcgaataaccatgtagatttaggcgcattgcgttatacaatcaaaacagaaaacggtattacccgattgtacaatccttatgccgagaaccgccgccgagtcaaaccggccccgtctcctgccacaaacacggcttctcaagcacaaaaggcaacacaaacggacggtgcacaaattgccaagcctcaaaatatcgtcgtcgcaccacctagcccgcaggcaaatcaagccgaagaagcaaaacgccagcaagcaaaagcggagcaagtgaagcgtcagcaagcagaagcagagcgtaaatcggcagagttagcaaaacaaaaagcagaagccgaacgcgaagcaagagagctggcgacccgccaaaaagcagaacaagaacgcagcagcgccgaacttgcacgtcgacatgaaaaagaacgcgaagcggcagagttgtcggcaaaacaaaaagtcgaagccgaacgtgaggctcaagcattggcggtacgccgaaaagcagaagccgaagaggcaaaacgccaagctgcagagcttgcacgccggcatgaaaaagaacgcgaagcggcagagttgtcggcaaaacaaagggtcggggaagaggaacgccgtcaaacagcccaatcccagccgcaacgccgcaaacgccgtgccgcaccgcaggattatatggcagcttcccaagaccgtccgaaacgccgcggacaccgttcggtacagcaaaacaatgtggaaattgcccaagcccaagcagaacttgcgcgccgacagcaggaagaacgcaaagcggcagagttgttggcaaaacaaagggcagaagccgaacgtgaggctcaagcattggctgcgcgccgaaaagcagaagccgaagaggcaaaacgccaagctgccgaacttgcacatcgccaggaagcagaacgcaaagctgccgaacttgcacatcgccaggaagcagaacgcaaagcggcagaattgtcggcaaaccaaaaagccgcagctgaagcccaagcattggcggcacgccaacaaaaagcctttgcgcgtcaacaggaagaagcacgaaaagctgcagcgttagccgccaaacaaaaagcggaaaccgaacgcaaaaccgccgaacttgccaagcaaagggcagcagccgaagcagcaaaacgccagcaagaagctcgccagaccgccgaacttgcacgtcgtcaagaagcggaacgccaagcagcagagttgtcggcaaaacaaaaagccgaaacagatcgagaagcggcagaatcggcgaaacgaaaagctgaggaagaagagcaccgtcaagcagcccaatcccagccgcaacgccgaaaacgccgtgccgcacctcaggattatatggcagcttcccaaaatcgtccgaaacgtcgcggacgcagatctactctgccggcaccgccctcgccatcatttgattcgtcagcttacgcagcacccagggccttgcataatccggactggtatgaaaatgactatgaagaaatccccttggatgcgttggaagatgaaaatgtatctgaatcagttgacacatcagacaaacagcctcaagacaatacggaacttcatgaaaaatatgaaaatgattatgaagaaatccccttggatgcgttggaagatgaagatgtatccgaatcggttgacacatcagacaaacagcctcaagacaatacggaacttcatgaaaaagttgagacagtgagtttgcaaccaagagccgctcagccgcgagcccaagccgtcgcgcaagccgatgcagtcagcaccaataccaactcggctttatctgacgcaatggcaagcacgcaatctatcttgttggatacaggtgcttcattaacacggcacattgcacaaaaatcacgtgctgatgccgaaaaaaacagcgtttggatgtcgaacatcggttatggccgtgattatgcttccgcacaatatcgccggtttagttcgaaacgcacgcaaacacaaatcggcattgaccgcagcttgtccgaaaatatgcagataggcggcgtattgacttactctgacagtcagcatacttttgatcaggcgagcggcaaaaatacttttgtgcaagccaacctttatggtaagtattatttaaatgatgcttggtatgtggccggcgatattggtgcaggcagcttgagaagccggttacaaacacagcaaaaagcaaactttaaccgaacaagtatccaaaccggccttactttgggcaatacgctgaaaatcaatcaattcgagattgtccccagtgcgggaatccgttacagccgcctgtcatctgcagattacaagttgggtaacgacagtgttaaagtaagttctatgtcagtgaaaacactgacggccggactggattttgcttatcggtttaaagtcggcaaccttaccgtaaaacccttgttatctgcagcttactttgccaattatggcaaaggcggcgtgaatgtgggcggtaattccttcgcctataaagcagataatcaacagaaatattcagcaggtgccgcgttactgtaccgtaatgttacattaaacgtaaatggcagtattacaaaaggcaaacaattggaaaaacaaaaatccggacaaattaaaatacagattcgtttctaa

SEQ ID NO: 41643 - DNA, 1773 bp, Neisseria meningitidis
atgattccatccgacttcattgacgagcttttagccaaaaccgatattgtcgatattatcgacgagcaggttccgctgaaaaaaggcggggcgaactatatggcgtgttgcccgttccacaaggaaaaaacgccgtcgttttcggtcagtccaaccaagcagttttaccattgtttcagttgcggggcgcatggttcggcgattggttttgtgatggagcatcaggggctgtcgtttccggaggctgtgcagtttcttgccgaccgtgtgggcatggttgtgcctaaagtgcgtgggcagaacgataatcccgaagtccgtgccgaacgtaagaaaaaacagcagacgctggaagaaacgacggcggcggcggctgatttttatgcgcaacagttgaaattcaatccggcggcaaaagcctatttggacaagcgcggcttgagcgcggaagtcatcgcgcattatggtttgggctacgcgcccgacggctggcagcctttggcgcaagtattccaaccgtacccgaataccgcgttggtggatacgggtatggtgattgacaatgaggggcggtattacgaccgattccgtcatcggattatgttccccatccgcaatccgcgcgggcaggtaattggtttcggcggcagggtgctggacgactccaaacccaaatatctaaactctcccgatacgcctttgttcgataaggggaaaaacctttacggattgtatgaagggcgtgctgctgtcaaggaagcggggcggattctggtggtcgaaggctatatggacgtggtcgcgctggcacagttcggcgtgggctacggcgtggcggccttgggcacggcaacaacagctgaacacgtcaaaatcctgatgcgtcaggcggacagtatttatttctgtttcgacggcgacagcgcggggcggaaagccgcttggcgcgcgctggaaaatgcgttgccgcaattaaaagacgacaaatcactgcattttttgttcctgcccgaggaacacgaccccgacagctacatccgcgcctacggcaaagcgcaatttgaagatgcgctgttgaatcaaagcaagcccttgtcggaatatttctgggaacacctttcagacggcattcatctcaatacgcaggaaggcaaggcggaattggtgaaaaccagttcgccgcttttggcgcagattaccgcgccggcattggcttatttgttaaaacaacggcttagcgagctggtcggcatcgaccccgacaacctcgcgcaactgctgggacaggaagcgccgaagcggcacgtcaaacaaaaaaactacaaactgcccccgatttccgtcaaacagcccgttatgccgacattggtgcaacggcaaatccgcagcctcttgataaatccggattgggctgcatatatagacctgcccgattatttggcgttggacggcgatttcgcctgccttgccaacctcgccgaaaccattaaaaaccatccttccgtgccggcaaccgcacaggttttggaacatatgcgcggttcgccctacgaagaaacaatcaaccgcatcttccggtcggcccttcaatcggaagaaatggaaggcggcggcgaagaagattgcgaaaacttccaaatcggcatcaaaaaactgctcaatgagttaaaatacagccaaatcgaaacattaaaacaaaaaagcctgcaatccggcttaaatgaaagcgagaaaaaacttttgctgtcgctgctgaccgcaaaacaaaattga

SEQ ID NO: 41644 - DNA, 291 bp, Neisseria meningitidis
gtggaatattttatgttgctggcaacagacggggagaatgtgtatgaagcgcgtatggcggcacgtcccgaacacctcaaacggctggagacgctgaagtcggaaggccggctgttgacggcaggcccgaatcctttgccggaggactccaaccgcgtttcgggcagtttgattgtggcgcagttcgagtctttggatgcggcagaggcgtgggcggaagacgatccctatgttcatgcaggcgtgtacagcgaagtgctgatcaagccgtttaaagcggtgttcaaataa

SEQ ID NO: 41645 - DNA, 1389 bp, Neisseria meningitidis
atgtctattaaatttgccgatttgaacctcgataaaaacatcttgtccgccgtcagcagcgagggttacgaaagcccgacgccgattcaggcgcaggcgattccgtttgctttggaaggccgcgacatcatggcttcggcgcaaaccggctccggcaaaaccgccgcctttctgttaccgactttgcagcgactgaccaaacgcagcgaaaaaccgggcaaaggcccgcgtgctttggtgttgaccccgacccgcgaattggcggctcaagtcgagaaaaacgcgctggcgtatgccaaaaatatgcgttggttccgtaccgtcagcatcgtcggcggcgcatcgttcggctaccaaacccgcgccctgagcaaaccggtcgatctgattgtcgccacgccgggccgtctgatggacttgatgcaaagcggcaaagttgattttggacgtttggaagtgctgattttggacgaagccgaccgtatgttggatatgggctttatcgacgacatcgaaaccatcgtcgaagccaccccgaccgaccgtcagactttattgttctccgccacttgggacggcgcggtcggcaaactggcgcgcaaactgaccaaagaccctgaaatcatcgaagtcgaacgcgtggacgaccaaggcaaaatcgaagaacaactgctgtactgcgacgatatgcgtcacaaaaaccgcctgctcgaccacatcctgcgcgatgccaatatcgatcaatgcgtgattttcacgtccaccaaagccatgaccgaagtcatcgcggatgaattgtacgaaaaaggtttcgccgccaactgcctgcacggcgacatgccgcagggctggcgcaaccgcacgctgatggacttgcgcaaaggccgctgcaaaattttggttgccaccgacgttgccgcacgcggtatcgacgtaccgaccattacccacgttatcaactacgacctgccgaaacaggcggaagactacgtccaccgcatcgggcgcaccggccgcgcaggccgcacgggtattgcgattacgtttgccgaagtgaacgaatacgtcaaagtccacaaaatcgaaaaatacattaaccgcaaactgcccgaactgaccatcgaaggcatggaaccgacccgcaaacgcaaatccgcaggcggcaagccaaaaggcaaaggcggctggggcgataggaaatccggcggccggcgcggcgatcataaaccgggcaaagaaggcttcggcggcaaaacgcgcggcgaaagtttcaagaaagaaggctttaagaaagacggtttcaaaaaaaccggcgaaggcttcaaaggcaaacgcaaagccggcgattcttttgcaggcagaggcgaacgccgttacaaagaccgctaa

SEQ ID NO: 41646 - DNA, 534 bp, Neisseria meningitidis
atagtggattaacaaaaaccagtacagcgttgcctcgccttagctcaaagagaacgattctctaaggtgctgaagcaccaagtgaatcggttccgtactgtttgtactgtctgcggcttcgtcgccttgtcctgatttttgttaatccactatacctccgccaatgcccatgagtgcaaacacctgtcgcctttattggaaggggtacctagaggtacgaccgtctatgccgacaaaggctatgacagtgcggaaaaccggcaacatctggaagaacatcagttgcaggacggcattatgcgcaaagcctgccgcaaccgtccgctgtcggaagcgcaaaccaaacgtaaccgatatttgtcgaagacccgttatgtggtcgaacaaagcttcggtacgctgcaccgtaaattccgctacgcccgggcagcctatttcggactgattaaagtgagtgcgcaaagccatctgaaggcgatgtgtttgaacctgttgaaagccgccaacaggctaagtgcgcccgctgccgcctaa

SEQ ID NO: 41647 - DNA, 1635 bp, Neisseria meningitidis
atgaccaaattcattttcgtcaccggcggcgttgtctcctcactgggtaaaggtatcgccgccgcttctattgccgccatcctcgaatcgcgcggcttgaacgttaccatgctcaagctcgatccttatatcaacgtcgatcccggcacgatgagcccgttccaacacggcgaagtgttcgtaaccgacgacggcgcggaaaccgacctcgacttgggacactacgaacgctttatcgattccacgatgacccgccgcaacagcttcagcacggggcaggtgtacgaaaacgttatcgccaaagaacgacggggcgactatttgggcggcacggttcaagtcattccgcacattaccgacgaaatcaaacgacgcatccatgaaggcgcggcaggttacgatgtggcgattgtcgaaatcggcggcacggtcggcgacatcgaatcgctgccgtttttggaagccatccgccagatgcgaagccagttggggcgcaacaacaccttgtttgcccacttgagctacgtcccctacatcgccgccgcaggcgaaatcaaaaccaagccgacccagcacaccgttaaagaaatgttgagcatcggtttgcaacccgacatcctgatttgccgtatggacaggacaatgcctgcggacgaacgccgcaaaatcgccttgttctgcaacgtggaagaacgcgcgattgtcggcagctacgatgtggacagcatctacgaatgccccgaaatgctgcacgaccaaggcatcgacaacatcattaccgagcagttgcagcttaatgtgcaacaggcggatttgaccgcgtggaaaaaaatcgtccacgccatccaaaacccgaaacacaccgtcaaaatcgccatggtcggcaaatacgttgatttgaccgaatcctacaaatcactgattgaagccttgaaacacgcaggtgttcacaccgaaaccgacgtacaaattacctttgttgacagcgaaagcatcgagaaaaacaacggcgacgtttctatgctcaaagatatggacgccatcctcgttcccggcggttttggttcgcgcggcgtggaaggcaaaatcgccgctgtgcgctatgcccgcgaaaacaacgtgccatacttgggcatctgcctcggtatgcagattgcgctgatcgaatacgcccgcgacgtggcaggtttgaaaggtgcgaattccaccgagttcgacctcaaatgcgccgcccccgtcgttgccctgattgacgaatggcaaactgccgacggcagcgtcgaaacccgcgacgaatccgccgatttgggcggcaccatgcgtttgggcgcgcaagaagtcgaattgaaagcaggcagcctcgccgccaaaatctacggcagcgaacacatccgcgaacgccaccgccaccgctacgaagtcaacaacaactacgttcctacgctggaacaggcaggtttggtcatcggcggcgtatccgccggacgcgaacgcttggtcgaaaccatcgaactgccgaaccatccttggttcttcgcctgccagttccaccccgagtttacctccaatccgcgcaaagggcatcctttgttcaccgcgtttgtcaaagctgcgttgaacaataaaaaagcctga

SEQ ID NO: 41648 - DNA, 696 bp, Neisseria meningitidis
atgagtgagttgattttgaaatgcgaaggcgtgggcaaacgctatcgggacggcggtttggacgttcgggtgctgcacggcttggatttggaaatccacgcaggggaaagcaccggcatcatcggttcttcgggcagcggcaaatcgacgctgctgcatattttgggcgggctggatatgccgtctgaaggcagggtgctgctgatgggcgaggatttgcgtaccttaaaccagcggcgtttgggcgatttacgtaaccgccatctcggtttcgtgtaccagttccaccatcttctgcctgaattttcggcactggaaaatgtgatgatgccgcttctgatcggcaaaaaaagccgtgaagaggcagcagaaacggcaatggcgatgctggaaaaggtcggactgaaacaccgttcgacgcaccgcgcgggcgaactttcaggcggtgagcggcagcgtgccgccattgcacgcgccttggttacccaacccaaatgcctgcttgccgacgaaccgaccggcaatctcgatcgtgcgaacgccaggaatgttttggatatgatgctggaactgaaaacagaattgggaacggggctggtggtcgtaacgcacgacgacgaactcgccggccgctttgagcgcgtgatggtcatgaaagacggcagcctgcaccccaaacagggcgcaaacgcctaa

SEQ ID NO: 41649 - DNA, 846 bp, Neisseria meningitidis
atgaaaaacaaaacctcatcacttctcttatggcttgccgcaatgatgctgaccgcgtgttccccgagcaaagaagataaaacgaaagaaaacggcgcatccgccgcctcgtccacggcatccgccgcttcgtcttccgcgccccaaaccgatttgcaaccggccgcatccgcccctgataacgtcaagcaggcagaaagcgcgccgccgtcaaattgcaccgacctgcaccccgccaccggcattgacgatctcatgcagcaaatcgccgaacacatcgactcggactgtctgtttgccctttcccatcacgaactggaaacccgtttcggcttacccggcggcggctatgacaacatacagcggctgctgtttcccgacatccgccctgaagatcccgactaccatcagaaaatcatactggcaattgaagacttgcgttacggaaagcgcacgatcagccggcaggcacaagatgccttgatggaacaggaacgccgcctccgagaagcgacgctgttgctgatacagggcagtcaagaaacccgcggacaaggcgaggagccgaaacgcacgcgttattttgaagtttcggcaacccctgcctattcgagccggcacaacaacggacttggcggcaatttccaatacatcggccaattgcccggctatctgaaaatacacggagaaatgcttgaaaaccaatcactcttccggctgtccaaccgtgaacgcaatcccgacaaaccgtttttagacatccattttgacgaaaatggcaaaatcacgcgtattgtcgtttacgaaaaaaacatctacttcaatccaaacttggggcgaagataa

SEQ ID NO: 41650 - DNA, 927 bp, Neisseria meningitidis
atgagcaccttcttccagcaaaccgcccaagccatgattgccaaacacatcgaccgtttcccgctattgaagttggaccaggtgattggttggcagcagatcgaacagtacctgaatcgtcaaagaacccgttacctccgagaccaccgcggccgtcccgcctatcccctgttgtccatgttcaaagccgtcctgctcggacaatggcacagcctctccgatcccgaactcgaacacagcctcatcacccgcatcgatttcaacctgttttgccgttttgacgaactgagcatccctgattacagcaccttatgccgctaccgcaattggctggcgcaagacgacaccctgtccgaattgctcaaactgatcaaccgacaactgaccgaaaaaggcctaaaagtagagaaagcatccgccgccgtcgttgacgccaccattattcagaccgccggcagcaaacagcgtcaggccatagaagtcgatgaagaaggacaaatcagcggccaaaccacaccgagtaaggacagcgatgcccgttggataaagaaaaacggcctctacaaactcggttacaaacaacatacccgtaccgatgaggaaggctatatcgagaaactgcacatcacccccgccaatgcccatgagtgcaaacacctgccgccgttgttggaaggggtacctagaggtacgaccgtctatgccgacaaaggctatgacagtgcggaaaaccggcaacatctggaagaacatcagttgcaggacggcattatgcgcaaagcctgccgcaaccgtccgctggcggaaacgcaaaccaaacgcaaccgatatttgtcgaagacccgttatgtggtcgaacagagcttcggtacgctgcaccgtaaattccgctacgcccgggcagcctatttcggactgattaagtga

SEQ ID NO: 41651 - DNA, 2091 bp, Neisseria meningitidis
atgccgtctgaaagacgtttccgacccatccctactacacgctttgtccgcaaacgcatcacaggcaagattatggaagtcattcgataccccgattcccccttcaaactccaccaacccttcccgcccgcaggcgaccagcctaccgctattgccgacttgctcgaagggctttcagacggccttgcctaccaaaccctgctcggcgtaaccggttcgggcaaaacctacaccatggcgaacgtcatcgcccaaagcggccgacccgccatcatcatggcgcacaacaaaacccttgccgcccagctttatgccgaaatgcgcgagtttttccctgaaaacgcggtggaatatttcgtctcctactacgactattaccaacccgaagcctatgtgccaagccgcgacttgttcatcgaaaaagacagcgcgatcaacgaacacattgaacaaatgcgcctttctgccaccaaaaacctgatgacgcgcgatgacgtgattatcgtcgccactgtgtccgccatttacggtatcggcgacccgactgagtatcaacaaatggtgttgtccgtcaaagaaggcgacactattgagcagcgcgacatcatcgccacgctcgtttccatgcagtacgaacgcggcgatttggatttcaaacgcggcagcttccgcgtgcgcggcgacgtgattgacgtgtaccccgccgaaagctcggaaaacgccttgcgcatcagcctgtttgacgacgaaatcgaccgcctcgatatgttcgacccgctttcaggcagcctgcaccaacgcgtcggccgctacaccgtcttcccgtccagccactacgttaccccgcgcgacaccgtattgcgcgcctgtgactccatcaaagaagaattgcgcgaacgcattgatttctttaccaaagaaaaccgtcccgtcgaacaacaacgcatcgaacagcgcacccgtttcgacctcgaaatgctctacgaaatgggcttctgtaaaggaatcgaaaactactcccgccacttctccggcaaaaaagaaggcgaaccgccgcccacgctgatggactacctgccaagcaacgccatcatgttcatcgacgaaagccacgttaccgtaacccaaatcggcggtatgtacaaaggcgacgcatcgcgcaagcaaaacctcgtcgattacggcttccgcctgccttccgcccgcgacaaccgcccgctcaaattccacgaatttgaaaaagtcatgccgcaaaccgtcttcgtttccgccactcccgccaaatacgaagaagaacacgccggacaagtggtcgaacaagtcgtccgtcccacagggctggtcgacccccaaatcatcatccgccccgtcgccacccaagttgatgacttaatgagcgaaatcaacgaccgcatccaaaaaggcgaacgcgtactcgttaccaccctcaccaaacgcatggcggagcaactcaccgactattacagtgaactcggcatcaaagtgcgctacctgcacagcgacatcgataccgtcgagcgcgttgaaatcattagagatttgcggctcggtctgtttgacgtactcgtcggcatcaacctcttgcgcgaaggcctcgacatccccgaagtctcccttgttgccatcctcgacgccgacaaagaaggcttcctgcgctcccaccgcagcctgattcaaaccataggccgcgccgcgcgcaacgtgaacggcgtcgcgattctgtacgccgacaaaatcaccgactccatgaaagccgccatcgacgaaaccgaacgccgccgtgaaaaacaaattaaattcaacgaagaacacggcatcgtgccgcaacagattaaaaaacaggtcaaagacatcattgacggcgtgtaccacgaagaagacagcggcaaaggccgtagacaaggcaaaaacaaagttaaagtcggcgaaattcacaacgaagaagacgcgattaaagaaatcgccaaactcgaaaaagccatgcaacaggcggctagggatttgcagtttgaagaagcggcggtgttgagggataggattcgggggattaaggagaatttattattttag

SEQ ID NO: 41652 - DNA, 1242 bp, Neisseria meningitidis
atgctgtctgaaggctcaagcggtttcggacggcatattccatcaggctgtcaaacagggaaaaacaagatgaaacgtgatttgagcaaaatgacctgcatcgaagacttgcgccgcgttgccaagcgcaaaatgccgcgtatgttttacgattacatcgattcgggttcgtggacggaaacgacttatcgggaaaatacttcggatttcaaagacatccgcttccgtcaaaaagtgttggtcaatatggaggggcgcagcctcgaaaccaaaatgattgggcaggatgtgaaaatgccggtggcgattgccccgactggtttcacgggtatggcgcacgcagacggtgaaatcttggcggcgcgggcggcggagaagttcggcattccgtttacgttgtccacgatgtctatctgctcgattgaagacgttgccgagaacacttccgcaccattttggtttcagctttatgtgatgcgcgaccgcgagtttatggaaaacctgattaagcgcgcgaaggatgccaaatgttcggcattggtattgaccgctgatttgcaggttttggggcaacgccacaaagacatcaaaaacggcctgtccgcgccgccgaaaccgaccatcgccaatttaatcaatctggcgaccaagcccgaatggtgtatgaaaatgctgaacacggaacgccgcacgttccgcaatatcgtcggacacgcgaagaacgtcggcgatttgtcttcgctgtcttcatggacttccgaacaattcgacccgcgcctgagctgggacgatgtggcgcgcattaaagatttgtggggcggcaagctgattatcaaaggcattatggaacctgaagacgcggaaaaagcagcgaaaagcggcgcggacgcattgattgtttccaaccacggcggccgacagctcgacgataccgtgtctgccatcaaagccttgcccgacatcgtcagcgcagtgggcagcgacatcgaagtttggatggacagcggcatccgcagcggtcaggatattttgaaggcgtgggctttgggcgcgaaaggtacaatgataggtcgggcgttcctgtatggcttgggcgcgtatggcgaagaaggcgtaacccgtgcgctggaaatcctatataaagaaatggatatatctatggcgtttacaggacaccgcgatattcaagatgtcgatgcctcgattttaaggggtaaagattggggtagggaaacggtttaa

SEQ ID NO: 41653 - DNA, 246 bp, Neisseria meningitidis
atgattggcggtaaagaggtaaacgcgatatttgaccgtgaatttataacggatagcgggtttggcgttgccgttgccaatgccgacccgcaaatcatcgttactgaagacgacctgccggaagacgtgaagtcggtggttgttaccgtgcgtggcaaacgttatgcggtggcggaaaccgattttgacggctgcggaatggttgttgtgcaattgagggcgatacatgacaagccgacttactga

SEQ ID NO: 41654 - DNA, 1809 bp, Neisseria meningitidis
atgcgtaccaactattgcggcctgatcagcgagcaatacttagaccaaaccgttaccgttaaaggctgggtgcaccgccggcgcgaccacggcggtgtgatttttatcgacctgcgcgaccgcgaaggcatcgtccaagtcgtgatcgatcccgacacgcccgaagcgtttgccgctgccgattccgctcgcaacgaatacgttttgagcattaccggccgcgtacgcaaccgtcccgaaggcacgaccaacgataaaatgatttccggcaaaatcgaaatccttgccaaagaaatcgaagtcttgaacgccgccgccacgccgccgttccaaatcgacgatgaaaacatcagcgaaaacgttcgcctgaccaaccgcgttatcgacttgcgccgtccggtgatgcaacgcaacctgcgcctgcgttaccaagttgctatgggcgttcgccgctacttggacgcacaaggcttcatcgacattgaaacgccgatgctgacccgctccacgcccgaaggcgcgcgcgactacctcgtgccgagccgcgttcatccgggcgagttcttcgcgctgccgcaatcgccgcaattgttcaaacaactgttgatggtggcgggtttcgaccgttactaccaaatcaccaagtgcttccgcgacgaagacttgcgtgccgaccgtcagcctgaattcacgcaaatcgacttggaaacctcgttcttaaacgaggatgaaatcatggatatcaccgaaggcatggccaaacaagtcttcaaagacgcgctgggcgtggacttgggcggttttccgcgtatgccttacgccgaagcgatgttctattacggttctgacaaaccggatatgcgtatcggcttgaaatttaccgagttgaccgacttgatgaagacggaagagtttaaagtcttccgtggcgcagccgatatgaaaggcggccgcgtggttgccctgcgcgtgccgaacggtgcgaaattcagccgcaaagaaatcgatgaatacactaaatttgtcggcatctacggtgcgaaaggtctggcatacatcaaagtaaacgatgtgggcaacctttccaacggcgaagacagcggcctgcaatccccgattgtgaaattcctgtccgaaaacgccctgaaggaaatcattgcgcgtaccggcgcggaaaacggcgacatcatcttcttcggtgcggacaaagccaaagtcgtgaacgaagccatcggcgcattgcgtatcaaagtcggcttggaacacggcgcggaaaacggctatttcacagacgaatggaaacctttgtgggttgtcgacttcccaatgttcgaatacgacgaagaagccgaccgctacgttgccgtacaccatccgtttaccgcgccaaaagaaggtcatgaagacctgatggtttccgaccctgcaaactgcctggctcgtgcctacgatatggtattgaacggctgggaaatcggcggcggctctatccgtatccaccgtgcagacgtacaagagaaagtgtttgccgcgctgaaaatcagccctgaagagcaacaagagaaattcggcttcctcttggacaacctgaaattcggtgcgcctcctcacggcggccttgcattcggcctcgaccgtttggttaccctgatgaccggcgccgaatctatccgcgacgtgattgccttcccgaaaacacaacgcgcccaatgcctgctgaccaacgcgcccaacagcgtggacgacaagcagttgcgcgaattgagcttgcgcctgcgtcaaaaggcggctgaaaccaaagaagcataa

SEQ ID NO: 41655 - DNA, 117 bp, Neisseria meningitidis
ttgattataattcactataaatccccttcgttgcgtttggactttgccgataccgcatatccgagaaaggaagcgatgatttactatcccgctgtgctgttccaagaccccgattaa

SEQ ID NO: 41656 - DNA, 996 bp, Neisseria meningitidis
atgagtgcatctcatttgcgcggcctgcgcggccagcttgatccggttttaaccaatctcgcactgggctacaagcaggcggattttattgccgagaaaatcttcccggtggtgtttaccgaaaaagaaggcgtgcgtgtgccggtgttcggcaagggttcatttgtcgagtatcagaccgaacgtgcggtcggtgcggcatcgaatgtgattacgctggactccccaaactttatgccggttgtgttggaagaacatgatttggccgccggtgtagattaccgcgaacaagcggaatcgatgtacgacgagcgcgccaaggcaacacgccgcgcggtcaagggcgtgcagctgcgtcaagaaatcgaaactgccgccctcctgcaaaacaaatcggcttatcagtccggtttcagcaaagacttggccgccacccaaaaatggagcgataaaaactctgatccgttggcagacatcgaaaccgcccgcgagactgtgcgcgcaggctgcggtatacgcccgtcggtgctggtggtaggcgcgagcgtgctgtccgcacttaaacgtcacgagaagctcatcggcgcactgggcgcgaacgaacgcaagtccctgctcacggtcgagcagctgaaaaacctgctggagctggacgacatcatcgtcggcgaggcggtatctacacctgccgccaataaggccacccaagatatttggggcaaattcgccagcctgattgtgcgtccgcatacggcttccggcggcaatgacgagggtgaaccgagcttcggttataccttccgccgtcgcggtatgccggtagttgaccgctacgaagaggttggcggcaaggtggaatacgcgcgctataccgacatccgcaaagcggcagtggtcggcggtgcatgcggacgtggttgcgtaatcggtaaaacgccgtctgaaaggcttcagacggcctatggagagaaatatgactttattcgtgaagtatga

SEQ ID NO: 41657 - DNA, 2016 bp, Neisseria meningitidis
atgaaatcctaccccgacccctaccgccattttgaaaacctcgattccgccgaaacgcaaaacttcgctgctgaagtgaatgccgaaacgcgcgcgcgttttttaaacaacgacaaggcgcgcgcgctttcagacggcattttgaatcaaatgcaggacacgcggcagattccgttttgtcaggaacaccgcgcgcggatgtaccatttccatcaggacacggaatatccgaagggcgtgtaccgcgtgtgtacggcggcgacgtatcgttccggctatcccgagtggaaaatcctgttttcggtggcggatttcgacgaattgctcggcgacgatgtgtatttgggcggtgtgtcgcacttggtggaacagcccgaccgcgcgttgttgacactgagcaaatcgggcggcgatacggcgtacacgctggaagtagatttggaagcaggggaattggtagaaggcggttttcactttccggcaggcaaaaaccatgtgtcgtggcgcgatgaaaacagcgtgtgggtgtgtccggcttgggacgaacgccagttgaccgaatcgggctatccgcgcgaagtatggctggttgaacgcggcaaaagtttcgaggaaagcctgccggtgtatcaaattgccgaagacggcatgatggtaaacgcgtggcgttacctcgatccgcagggttcgccgattgatttgattgaagcgtcagatggtttttacaccaaaacctatttgcaagtgtcggtcgaaggcgaggcgaaaccgttgaacctgcctgccgattgcgacgtggccggctatctagccggacatcttttgctgacattgcgtaaagactggcaccgcgcgaaccaaagctatccgagcggcgcactggtggcagtgaaactgaatcgcggcgaaatcggggcggcgcagcttttgtttgcgcccgatgaaacgcaggcattggaaagcgtggaaacgaccaagcgttttgtcgtggcgagcctgctggaaaacgtacaaggccgtctgaaagcgtggcggtttgccgacggcaaatggcaggaagtcgaactgctgcgcctgccctcgggcgcgttggaaatgaccgaccagccgtggggcggcgatgtggtttaccttgccgccagcgatttcaccacgccgttgacgctgtttgcattggatttgaacgtgatggaactgaccgtcatgcgccgccagccgcagcagttcgtttcagacggcatcgaagtgcggcagttttgggcggtttcgtccgacggcgagcgcatcccttatttccacgtcggcaaaaacgccgcgcccgacacgccgacgctggtctatgcctacggcggtttcggcgtgcccgagctgccgcattatctgggcagcatcggcaaatactggctggaagagggcaacgccttcgtgttggcgaacatccgcggcggcggcgagttcggcccacgctggcatcaggcggcgcagggaatcagcaaacacaaaagcgtcgatgatttgcttgccgtcgtgcgcgatttgtccgaacgcggcatgagttcgccccaacacatcggtttgcagggcggcagcaacggcggcctgattaccgccgccgccttcgtgcgcgaaccgcaaagcataggcgcgttagtgtgcgaagtaccgctgaccgatatgatccgttatccgctgctctccgccggttcaagctggacagacgaatacggcaacccgcagaaatacgaagtctgcaaatgccggttgggcgaattgtcgccgtatcacaatctttcagacggcatcgattatccgccagcgctcattaccaccagcctcagcgacgaccgcgtccatcctgcccacgcgctcaagttctacgccaaactgcgcgaaacctccgcgcaatcttggctctactcacctgacggcggcggccataccggcaacggcacccaacgcgaatccgccgacgaactcgcctgcgtgttgctgtttttgaaagagtttttgggctaa

SEQ ID NO: 41658 - DNA, 834 bp, Neisseria meningitidis
atggcaatcgttaaaatgaagccgacctctgcaggccgtcgcggcatggttcgcgtggtaacagaaggtttgcacaaaggtgcaccttatgcgcccttgcttgaaaagaaaaattctactgccggccgtaacaataatggtcatatcaccacccgtcataaaggcggcggtcataaacaccattaccgtgttgtagactttaaacgtaacaaagacggcattcctgccaaagtagagcgtatcgaatacgatcctaaccgtactgccttcatcgcactgttgtgctatgcagacggcgagcgtcgttacatcattgctcctcgcggtattcaagccggtgccgtattggtttccggtgctgaagctgccatcaaagtaggcaacaccctgccgattcgcaacattcccgttggtacgactatccactgtatcgaaatgaaacccggtaaaggtgctcaaatcgcacgttctgccggtgcttctgcggtattgctggctaaagaaggcgcgtacgctcaagtccgtctgcgctctggcgaagtccgtaaaatcaacgtaaattgccgtgcgaccattggtgaagttggtaacgaagagcaaagcctgaaaaaaatcggtaaagccggtgccaaccgttggcgcggtattcgtccgaccgtacgcggtgttgtcatgaatcctgtcgatcacccgcatggtggtggtgaaggccgtacgggcgaggcccgcgaaccggtcagcccatggggtactcctgctaaaggctaccgcactcgtaataacaaacgcacggataacatgattgttcgtcgccgttactcaaataaaggttaa

SEQ ID NO: 41659 - DNA, 1086 bp, Neisseria meningitidis
atgactgttccccatattccgcgcggccccgtcatggcagacattgccgccttccgcctgaccggagaagaaaaacaacgcctgctcgatcccgccgtaggcggcatcatcctcttccgccgcaacttccaaaacatcgaacagctcaaaacactcaccgccgaaatcaaagccctccgcacacccgaactcatcatcgccgtcgatcacgagggcggaagggtgcaacgtttcatcgaaggcttcacccgcctgcccgcaatgagtacgctcggcgagatttgggacaaagacggcgcgtccgccgccgaaaccgccgccggacaagtcggccgggttttggcaaccgagctttccgcctgcggcatcgacttgtccttcacgcccgtcttagatttggactggggaaactgccccgtcatcggcaaccgcagtttccacagtaaccccgaagccgtaacccgcctcgccctcgcccttcaaaaaggtttggcaaaaggcggtatgaaatcctgcggcaaacattttcccggacacgggtttgtcgaaggggacagccatttggtgctacccgaagacgggcgcagcctcgacgaactcgaagccgccgacctcattcccttccgcattatgagccgcgaaggtatggcggcggttatgcccgcccacgtcgtttatccacaagtggacacaaagcccgcagggttttccgaaatctggctcaaacaaattttgcgccgcgacatcgggttcaaaggcgtgattttctcggacgatttgactatggaaggcgcgtgcggggcaggcggcatcaaagaacgcgcccgcatttcctttgaggcaggttgcgacatcgtcctcgtctgcaaccgtcccgaccttgtggatgaactgcgcgaagatttccgcattcctgacaatcccgctttggcgcaacgttggcaatatatggccaacacgctcggcagtgccgccgcgcaagccgttatacagacggcggatttccaagcggcgcaagcctttgttgccggtcttgcctcgccgcaagacacggcgggcggcgtaaaagtcggcgaagccttttaa

SEQ ID NO: 41660 - DNA, 2157 bp, Neisseria meningitidis
atgtcagttttccgcatcaatatgaccgccgccacggttttggcagcactttcgtcttcggtttttgccgcacaaacggcggatttggaaaccgtccatattaagggtcagcgttcgtacaacgcgattgccaccgagaaaaacggcgattacagctcgtttgccgccaccgtcggcacaaaaatccctgcttctttgcgcgaaattccgcaatccgtcagtatcatcaccaaccagcaggtcaaagaccgcgatgttgacaccttcgaccaactggcacgcaaaacgcccggactgcgcgtgttgagcaacgacgacggacgctcttcggtttatgcgcgtggttacgaatacagcgaatacaacatcgacggcctgcctgcgcagatgcagagtatcaacggcacgctgcccaatctgtttgccttcgaccgcgtggaagtaatgcgcgggccgagcggcttgttcgacagcagcggcgagatgggcggcatcgtaaatctggtgcgtaaacgcccgaccaaagcgttccaaggtcatgctgcggcgggattcggtacgcacaaacaatataaagccgaagccgacgtttcaggcagtctgaacgccgacggcagcgtgcgcggccgcgtgatggcgcagaccgtcggcgcgtctccgcgtccagccgagaaaaacaaccggcacgaaaccttctacgcggcggcggattgggacatcaaccccgatacggttttgggcgcgggctatctttaccagcaacgccacctcgcgccgtataacggcttgcctgccgatgcagacggcaaattaccgtccctgccgcaacacgcatttgtcggcgcggattggaataaatttaaaatgcacagccacgacgtgttcgccgatttgaaacattacttcggcaacggcggctacggcaaagtcggtatgcgctattccgaccgcgatgccgactccaactatgcctttgccggcagcaagctgggcatgaaaaccccggcaggccgcccgggctgcaatacggctgacgacaaagcctgcgcggtgggtttgggtacagaaatcaaacaaaaagccctcgcgtttgacgccagctacagcaggcctttccgcttgggcaatacggccaacgaatttgtcatcggcgccgattacaaccgcttccgcagcaccaacgaacaaggccgtactactttatatgcacgcggcggcctggctttaaacgagttccgcagcataccgcaggttgatttgattgccaacgcgcgcaaaggcgtgcgcggttacagccataccgtcgctaccgaaaacctcgacgaattcggcatttacggcaaatccaccttccatcctgccgacgggctgtcgctcatcggcggcggacgtttgggacactataaaatcgagtcgggcgacggcaaaaccctgcacaaagcctcaagaaccaagttcaccggctacgcaggcgcagtttacgatatagacggcagcaacagcctgtacgcttcagcctcccagctctacacgccgcaaaccaacctcgatgccgacggcaagctgctcaaaccgcgccaaggcaaccagtttgaagtcggctacaaaggcagccacatggacgaccgcctcaatactcgcgtctccctctaccgtctgaaagacaaaaacgccgccgcaccgctgaacccgaaagaccgcaacacccgttacgccgcattgggcgagcgcgtgatggaaggtgttgagaccgaaatcagcggcgtggttacaccgaaatggcaaatccatgcaggttacagctatctgcacagccaaatcaaaaccgccgccaactcgcgcgacgacggcatcttcctactgatgcccaaacacagcgcgaacctgtggacgacttaccaagttacgcccgagctgaccatcggcggcggcgtgaacgcgatgagcggcattacttcatctgcagggatgcatgcaggcggttatgccacgttcgatgcgatggcggcataccgcttcacgcccaagctgaagctgcaaattaacgccgacaacatcttcaaccgccattactacgcccgcgtcggcggcacgaatacctttaacattcccggttcggagcgcagcctgacggcaaacctgcgttacagtttttaa

SEQ ID NO: 41661 - DNA, 984 bp, Neisseria meningitidis
atgaaacactttctttcccttttcacttccatattgatgtctgccctgattgccgtgtggttcagccaaaaccccatcaacgcctactggcagcagacctaccaccgcaacagtccgctcgaaccgcttgccgcctacggatggtggcggagcggtgcggcgttgcaagaaaacgcctacgccttttcagacggcatcaaaacattcctgtccggcgaaacgccgccgacggctcaagacggcggctcggcagatatgccgtctgaagccgccacatccgaagccgtccctcaaaccggtgaaacagaatggaaacaagacaccgacaccgccgccgtccgaaccggggacaaagtctttttcgccggcgattcgctgatgcagggcgttgcccccttcgtgcaaaaaagcctgaaacaacaatacggcatcgaatccgtcaacctcagcaaacaaagcacagggctgtcctacccctcattcttcgactggccgaaaacgattgaagaaaccctgcaaaaacatcccgaaatcagcgtgctcgccgtcttcctcggcccgaacgacccgtgggatttccccgtcggcaaacgctacctcaaattcgcttccgacgaatgggcgcaagaatacctgaaacgcgtcgaccgcatccttgaagccgcacacacgcaccgcgtccaagtcgtctggctcggcatcccctacatgaaaaaagccaagctcgacgggcagatgcgctacctcgacaaactgctttcggaacatttgaaaggcaaaatcatcctgattcccaccgcgcacaccctgagcggcgggaaagaccgctacacggactccgtcaacgtcaacggcaaacccgtccgctaccgcagcaaggacggcatacactttaccgccgaaggacaaaaactgctggcggcaaaaataatggaaaaaatcgtttttgaaccaagtacgcaaccatcaagtacacagccatga

SEQ ID NO: 41662 - DNA, 1887 bp, Neisseria meningitidis
atgccgtctgaagccgtttttcaaataattgatatgaatacagaaaaccgttctccggaacaattcgatatcccgctcttcctcaaaaacctgcccaagctgccgggcgtgtaccgtttttttgacgaaggcggcaaagtcttatacgtcggcaaagcggtcaacctcaagcggcgcgtgtccggctatttccaaaaaaacgaccattcgccgcgcatcgcattgatggtaaaacaggttcatcatatcgaaaccaccatcacgcgttccgaagccgaagccctgattctcgaaaacaacctcatcaaagccctgtcgcccaaatacaatattcttttccgcgacgacaaaagctatccttatctgatgctcagcggccatcaatatccgcaaatggcgtattaccgcggcacgctgaaaaagcccaaccaatacttcggcccgtatcccaacagcaacgccgtgcgcgacagcatccaagtcctgcaaaaagtctttatgctgcgtacctgcgaagacagcgtgttcgaacaccgcgaccgcccttgcctgctgtaccaaatcaaacgctgtaccgcgccctgcgtcggacacatcagcgaagaagactaccgcgacagcgtgcgtcaagccgccacttttctcaacggcaaaaccgacgaactgacccgcaccctgcaacacaaaatgcaaactgccgccgcgaatctgcaatttgaagaagccgcccgctaccgcgaccaaatccaagcactcggcattatgcagagcaaccagttcatcgacagcaaaaacccgaacaaccccaacgatatcgatttgctctcgctggcggtttcagacggcatcgtctgcgtacactgggtcagcatacgcggtgggcggcacgtcggcgacaaaagctttttccccgacaccaaaaacgatcccgatccaaacggacaagattacgccgaagccttcgtcgcccaacattatttgggcaaaagcaaacccgacatcattattagcaacttttccgttcccgatgcgctgaaagaggctttggaaggcgaacacggcaagcagatgcaatttgtcaccaaaaccataggcgaacgcaaagtctggttgaaaatggcggaacaaaacgcacaaatggcgattgcacaacgccgcctgcaacaaagcagccagcaacaccgcatcgacgaactcgccaaaatcctcggtatggattcagacggcctcaaccgcctcgaatgtttcgacatcagccacacacaaggcgaagccactattgcgtcctgcgttgtgtacgatgagcaaaacatccagccttcgcaataccgccgctacaacatcacgaccgccaaacccggcgacgactacgccgctatgcgcgaagtgttgacgcgccgttacggcaaaatgcaggaggccgaagccaacggcgagaccgtcaaatggccggatgccgtgttaattgacggcggcaaagggcaaatcggcgtagccgtatcggtatgggaagaactcgggctgcacattcctttggtcggtatcgccaaaggcccggagcgcaaagccggtatggaggagctcatactgccttttaccggcgaagtcttccgcctgcccccgcacagccccgccctgcaccttctgcaaaccgtgcgcgacgaatcacaccgctttgccattacaggccaccgtaaaaaacgcgacaaagcacgcgttacctcgtccctcagcgacatccccggcgtgggcagcaaacgccgccaagccctactcacccgcttcggcggcctgcgcggcgtgattgccgccagccgcgaggacttggaaaaagtggaaggcatcagcaaggcattggcggaaaccatttataatcatctgcattag

SEQ ID NO: 41663 - DNA, 369 bp, Neisseria meningitidis
ttgaataatattcctgttgaaatccgtttgttgaaaaaccgtaccgtgttggttttgacttatggggacgaacctaaaaatctgcctgccgaatttttacgcgtctattcgccgagtgcggaagtgcgcggacacggtgtgggacaggatgttttgcagaccggtaaggcagatgtgcaaattacggatttgcagcctgtcggacagtacgcgctgaaaatcagtttttcggacgggcacgacagcggtctttacgattgggcgtatctgcacagactggcatacggatacgatgcgatgtggcaggaatatttggacaaattggcggcggcgggtgcttcccgttttgaaaagcaatcagattgttaa

SEQ ID NO: 41664 - DNA, 2082 bp, Neisseria meningitidis
atgaaatcactcaaaaccttcctcatttggggcatagtggtactggtcggcttagcatcctttaccactctggctctcagccgaggcgaacaggtcagcgcggtatggatggttaccgccgccatatccgtttactgcatcgcctaccgtttttacagcctctacatcgccaaccgcgtaatgcggctcgatcctaaccgcctgactccggcagaacgccacaacgacggcttggactacgttccgacgcacaagggcgtattgttcggacaccactttgccgcgattgccggcgcgggccccttggtcggcccggttttggcggcgcaaatgggttacctgcccggtactttgtggattatcttcggcgtggtgtttgccggcgcggtacaggatatgatggtcttgttcgtctctatgcgccgcgacggtaagtctttgggcgatattgtgaaacaggaactcggcactgtccccggcgtgattgcctccatcggtattttgatgattatggtcatcattatggcggtgttggcgttgattgtcgtaaaagcattggttcacagcccttggggtacgtttaccatcgccgccactatgccgattgccctgtttatgggtatttacacgcgctatatccgtccgggcaaaatcggcgagatttccatcgtcggctttattttgctgatgctggcggtaatttacggcgaagatgtggcgaaaagttccatcggacattggttcgaccttgacggcatccagctcacttgggcgattatgatttacggctttgtcgcctccgtattgcccgtatggctgctgctcactccgcgcgactatctctccaccttcctgaaaatcggtacgattgcggccttggctttgggcatcgtcatcgtcaatcccactttgcaaatgcctgccgtaacccactttatcgacggttccggcccggtattctcaggcgcattgttcccgttcctcttcatcaccatcgcctgcggtgcggtttcgggcttccacgcgctgatttcctccggcaccacgccgaaaatgctggaaaacgaaacccacgtccgtatgattggttacggcggtatgttgatggaaagtttcgtagccattatggcacttgccgccgccgcatcgcttgatcccggcgtgtacttcgccatgaacagccctgccgccctgatcggtacggatgccaataccgccgccgaagtgattaccaccaagctgcaattccctgtcgatgctgcaaccctgttgcacaccgctaaggaagtgggcgaaaacaccatcctttcccgtgcaggcggtgcgcccaccctcgcagtcggtatggcgcacattatgagccgcctgattccgggcgaggcgatgatggcgttctggtatcacttcgccctattgtttgaagccttgttcatcctgaccgccgtcgatgccggtacgcgcgtcgcacgttttatgattcaagacttgggcagcatcttctacaaacctttcggcaacaccgactccatccccgccaacctgattgcgaccttcttcgccgtggcattgtggggctactttctctacaccggcgtaaccgacccgctgggcggcatcaactcgctctggcctttgttcggcatcgccaaccaaatgctggcaggcgtagccttgattatgtgcgccgtggtgctgattaagatgaaacgcgaccgttatgtctgggtggtactcgttcccgccgtcggcgtactgttcgtaacctgctacgccggcctgcaaaaactgttccacagcgacccgcgcatcagcttccttgcccacgccggcaaatacagcgacgcattggctaaaaacgaagtccttgcgcctgccaaagacatcggcgaaatggcgcaaatcatcttcaacgacaagattaatgccggtctgaccatcctcttcttgtcggttgtcgtgattgtcgccgcgtacggtttgcgtaccgccctcaaagcacgcaaagtcggctggccgaccgccaaagaaatcccggcggtgtaccgcgacggcaagcagccggaggcacaaagtgaagcataa

SEQ ID NO: 41665 - DNA, 891 bp, Neisseria meningitidis
atgtttcccgttttccatctttcaggcgaaagccgccgccggatgcttcaggcggcatcgcgttttccctatgttttcaaagcccgtgcggaagattcgcacaaagggactttcggcacgctcgccgtagtcggcggatcggcagggatgagcggcgcgcccgtattggcggcatcggcggcgatgtatctcggctgcggcaaggtgtgggcgggtttcaatcaggatgcgcttccgtttgccgtcattgccggtttccccgaaattatgttggacacggcagacggtttgaccaagcgtcaagatataaacgcctgggttgtcggttgcggcttgggtacaggtagggcggcggtcagaacgcttgccggaattttggcggaacacacggacaagcccgtccttttggatgcggacgcgctgaacatattatcaaccgatgccgaaacccgaaatctggcgcgcgggtgtaaaaacctgattttaacgccacaccccgccgaagccgcgcgcctgcttggaacgacggttgcacaggttcaggcggatcggacggcggcagtgaggaagataggggcaattttcggcgcaaccgtggttttaaaggggcacaaaacattggttgcctcacccgatacggaaatctatgtcaacgaaagcggcaacgcgggattggcaacggcgggcagtggcgacgtattgggcggcatcatcggcagtctgctcgcacagggcgtgccggtttttgaagccgcctgcgcgggcgcgtggctgcacggcgcggcggcggatgtcataaaagaatcggcaggcattgcggcggggctgttggcgggcgaaatcgccccggcggcaaggtggctgcgcaaccggataactgaaagtatgtaa

SEQ ID NO: 41666 - DNA, 1371 bp, Neisseria meningitidis
atgatcaaccccatcgcctcgctttcccctttagatggccgttatgcccaatccgttgaagcattgcgcccgattttttcagagtacggcctgatgaaggcgcgcgtcaaagtcgaattaaactggctcaaagccctggccgccgagccgaagattgtcgaagtgccgcccttcagtgccgaaacgcttgccgaaatcgacaaagtcatcgaaaacttttcattggaagacgcagccgctgtcaaagccatcgaagccaccaccaatcacgatgtcaaagccatcgaatattggctgaaaaaacgttttgccgaagtgccggaagtcgccgccgtgagcgagttcatccacttcgcctgcaccagcgaagacatcaacaacctgtcccacgctttaatgctgcaagaagcgcgtgaggctgttttgctgccgaagctggccgaaatcatcgaaaaactgaccgctatggcgcacgaccttgccgccgtcccgatgatgagccgcacccacggccagcccgccacgccgaccactttgggcaaagaaaccgccaatgtcgtgtaccgcctgcaacgccagtttaaaaacctgcaagcgcaagagttcctcggcaaaatcaacggcgcggtcggcaactacaacgcccatatggtcgcctatcctgatgtagattgggaaacccactgccgcaacttcgttgaaatcagcctcggcctgaccttcaacccctacaccattcaaatcgagccgcacgactatatggcggagtttttccaaaccctcagccgcatcaacacgattctcatcgactttaaccgcgacgtttggggttatatttcattgggttacttcaaacaaaaagtcaaagcgggcgaagtcggttcttccaccatgccgcacaaagtcaaccccatcgactttgaaaactccgaaggcaacctcggcatgtctaacgccgtattgggctttttgtccgaaaaactgccgatttcccgctggcagcgcgacctgaccgacagcaccgtcttacgcaatatgggcgtaggcgtgggctatgccgtgttgggtttcgccgcccacctgcgcggtctgaacaagctggaacccaaccctgccgcgcttgccgccgatttggatgccacttgggaactgctcgccgagccgattcaaaccgtgatgcgccgttacggtgtcgccgatccttacgaaaaactgaaagacctgacgcgcggcaaaggcggcattacgcccgaagtgctgaaagtctttatcggatcgctggaaatccctaccgaagccaaagcaaaattgcttgagctgacccccgcactgtatgtgggcaaggctgaagcgttggcgaaacggatttga

SEQ ID NO: 41667 - DNA, 264 bp, Neisseria meningitidis; identical to SEQ ID NO: 36383

SEQ ID NO: 41668 - DNA, 2286 bp, Neisseria meningitidis
atgtgtaaaccgaattatggcggcattgtcttgttgcccttacttttggcatcttgtatcggcggcaatttcggcgtgcagcctgttgtcgaatcaacgccgaccgcgtaccccgtcactttcaagtctaaggacgttcccacttcgccccctgccgagccttcggtagaaaccacgccggtcaatcaacctgccgttggtgcggcaatgcggctgccaaggcggaatattgcttcctataaacaagacggtacggaaattcccgacaagcatcaggcagaggagcatctgccgcttaaagagaaggatatcctgtttttagacggtacgctgaaagaacaggctgacaaacttaaaaagaaaatcaacgaacggtattctgatgtgagggttatcacatcgaaaaaagaagaagaaaaatatcaatatcaatttgtccgtgcgggctatgtgtttaccagggcggaaggaaaggataatgaaaaagaaaagacttctgatggtaaggagtttgttaaccgatttagttatgacggttttgtatattattccggagaacgtccttcccaatctttaccgagcgcgggaacggtgcaatattccggtaactggcaatatatgaccgatgccaaacgtcatcggacaggtaaggcggtttccagtacggatttgggttataccacatattatggtaatgaaattggggcaacttcttatgaggctagggatgccgacgacagggaaaagcatcctgccgaatatacggttgattttgataacaaaaccctgaatggcaagctgattaaaaatcagtatgtgcaaaataaaagtaatccaaatgagcccaaaaaaccgctgaccatttacgacattaccgcaacattggacggcaaccgctttaccggcagtgccaaagttagcaccgaggtgaagacgcaacacgctgataaagaatatttgtttttccatgacaatgccgatcagcggcttgagggcggttttttcggcgataacggagaagagcttgccggacggtttatcagcaacgacaacagcgtattcggcgtattcgcaggcaaacaaaaaacagacgcatcaaacgcatcagatacaaaacctgccctgccgtctggaaaacacaccaaaatcttggattctctgaaaatttccgttgacgaggcaagtggtgaaaatccccgtgagtttgccatttccactatgcccgattttggtcatcccgacaaacttcttgtcgaagggcgtgaaattcctttggtaaaccaagaacaaatcatcaatcttgccgacggcaggaaaatgaccgtccgtgcttgttgcgattttctgacctatgtgaaactcggacggataaaaaccgaccgccccgccgccaaaccaaaggcacaggacgaagattccgaagatgaaattggtgaaagcgaagaaaacgaagacgaaatcagcgatgaagaaggcacggaagatgaagtcgtagaagatgaaggcagcgaagaagacgaagtttccgaaggtgataacggtgaaaacgaagaagaaatcgccgaagaagaaaccgaagaagaagttgatgaagccgaagaggagaaagttgaagaacccgaagaagaattgccgacagaagaaggcaacggcggttcaggcagcatcctgcccgctccggaagcccctaaaggcagggacatcgaccttttcctgaaaggtatccgcacggcagaaacgaatattccacaaactggaaaagcacactataccggcacttgggaagcgcgtatcggcacacccattcaatgggacaatcaggcggataaagaagcggcaaaagcaaaatttaccgttgatttcggcgggaaatcgatttctggaacgctgacggaggaaaacggtgtagaacctgctttccatattgaagacggcaagattgatggcaacggtttccacgcgacagcacacactcgggataccggcatcaatctttcgggaactggttcgactaatcctcaacgtttcaaagccagtaatcttcgtgtagaaggaggattttacggcccgcaggcggaggaattgggcggtattattttcaataatgatgggaaatctcttggtataactgaaggtactgaaaataaagttgatgttgatgctgaagttgatgctgaagttgatgctgaagttgatgttgatgttgaacagttaaaacctgaagctaaaccccaattcggcgtggtattcggtgcgaagaaagataataaagaggtggaaaaatga

SEQ ID NO: 41669 - DNA, 534 bp, Neisseria meningitidis
gtggatgcagttatcgttacccatacccacgaagaccattggggcgaaaccgccgcacgttccattccgaaaaacctgcccgtatatgtgcagcaccaagccgacgcggcaaaaatccgcagccaaggatttactgatgtacgcgtgttgaacggcagcactgtcttcaacggcgtaaccatcagcaaaaccggcggcgtacatggtacagaagccatgtatgccaacccgcagctagccgaaatcttaggtgatgcaatgggtgtagtattccaaagcagcggacacaaaaccgcttatattatgggtgatactgtgtggacggcagatgtaaacaaagcattgaaccgctacaaacccgattatctgattatgaacacgggctacgcgctgatttcaggcattaccgtacacatggataccgtgaatcataccgccgtcagccgcaccgatatgcgtaaatttatacgcggtcaaggcattgaaagccgtgtgaacgttgcggaagacggagaaatcctgaaactggattga

SEQ ID NO: 41670 - DNA, 963 bp, Neisseria meningitidis
atgcagtatgccaaaatttccggcacgggcagctatcttcctgccaaccgcgtcagcaatgacgaccttgcccaaaaggtagatacctcggacgagtggattaccgcgcgcacgggcatcaagttccgccatattgcagccgaaaatgagaaaaccagcgatcttgccgccgaagcagcccgccgcgcgctggatgcagccagattagacagcggcgaaatcgatttgattatcgtggcgacggcaacgccggatatgcagtttccttctaccgccaccatcgtgcagcaaaaattgggcatcaccaacggctgtcccgcgtttgacgtacaggcggtgtgcgccggctttatgtacgcgctgaccacggcaaacgcctacattaaaagtggcatggcgaaaaacgcgctggtcatcggcgcggaaaccttcagccgcatcgtcgattggaacgaccgcacaacctgcgtattgttcggcgacggcgcgggcgcggtggttttaagcgcgtcggacacgccgggcatcatccacagcaaactcaaggccgacggcaattatctgaaactcttaaacgtccccgggcaaatcgcctgcggcaaagtttccggttcgccgtacatttcgatggacggtcccggcgtgttcaagtttgccgtcaaaatgctgtccaaaatcgccgatgacgttatcgaagaagccggttataccgccgctcaaatcgactggatcgtgccgcatcaggcaaaccgccgcattatcgaatcgaccgcgaaacatttaggtttgagtatggacaaagtcgtcctgaccgtccaagaccacggcaacacatccgccgcatcgattccgctggctttggatacgggcatccgcagcggacaaatcaaacgcggtcaaaacctgctgctcgaaggcatcggcggcggtttcgcgtggggcgcggtgctgttgcaatattga

SEQ ID NO: 41671 - DNA, 1470 bp, Neisseria meningitidis
atggaaaaacataatgggacttatcgggatttgcaccgtccagcttcggaatttgcgacgcgggacgaatatttggaacatgaattgcagattatgcaaccaaaacgctggcggcccaacctgccctttcgcgattaccgcttcgagtgggaggatttgattcctgcgatggcgggaacgattggaaaagtggtgatggtgggggcggtggcggcggcgtttgccgcacctttggggctgcctgacagctttgtactggaaaatgtgcgctatgagcttttaatcgccgccgcgtttatcttattggtatcgggcttttttctgcccggcgccaacctgcccggtacgcacgggccgctgattccgatgattcccatcgttgtgtcggcaggcgggcatcctttggcgttcggcatttcgattgcggttttaggtctgctgatggctttatttcgcggcggcagtattatggcgaagctgacaagcaacggcgtatgcggcggattattactctatttgggctttatcggcacgacggggcaggtaaaaaaattgttttcgtgggcaggcggttttaatatgccctacatcgcttttaccgtcattattgtaacgattgtgatgtacgctttgttggagcattggaaaaaacgctggttagccgtgcctttgggatgcttgattgccggtgtggcggcatttgcattgggtgcgccgtttgagtttcacaccgcccccggcctgcctccaatgagtcctgcttattggtggggtgaaaacagcggctggcatctggggttgccgacggcagaaagttttttggttgtctttccatttgcggtattggctgttgcaatgtggtcgcccgattttttaggacatcaagtgttccaaaaaatcagctatccggaaaaaaccgataaggtattgatgaatatagacgacaccatgacaagttgttctgtccgtcaagcagtgggttctattttagggggtgcaaattttacctcttcttggggaacttatatcgtaccggcatcgattgccaaacgccccattccgggcggtgcggttttaacggcggttttatgtattatcgccgggttatggggctatccgatggacttggcgatttggcagccggtattgagcgtagccttggtcgtaggcgtatacttaccgcttttggaagcgggcatggaaatgacgcgcaaaggcaaaaccacccaatccgccgccatcgtggtgttctcttccgccttggtcaatccggttttcggctgggcgttgacgatgctgttggataatttgggcttaatcggctgcaaagagcgcagcgcgcaattaggtttcgccggacgcgtgttgatacccgcagtaggtttcttgatcttgtgtgtggcgatgggtgcggtcgggatgctgcccggtatcccgccgtttttggaacacttcaaatctttgggctag

SEQ ID NO: 41672 - DNA, 486 bp, Neisseria meningitidis
atgtttgtgaacgagaaagatccttatgcggctctgtttgcgggactggtgtttttgacgctgccgtttgcgttggcggtgcatgatgccttggcatttgtgttcggacggacggggctgctggtgtcggtgtcggacggcggattcggctggcgaggaggctgggacggcgtggtgtggtttgtgtatggcgtgtttgcgtttttgaacctggttgtgtcggcgggtctgacgaaactggcgtacaaaaagatgatgcggcggcattcgcgttacgcgctgtttctgtcgggcgtggcggcttgcgcggctgctgcggtcgcgtggattttcgagctgttgttgggcagtgccgccttgggcgggctgcgcggggaggcggtgtcggaatatgcgtttgccgtgtggctggtgtctatgctgacgctgcccaaacgcctgacgcgcgcgccggtgcagccggtggtgtttcacaggaaaaaatag

SEQ ID NO: 41673 - DNA, 987 bp, Neisseria meningitidis
gtgagtggagcagaaagttaccggcatatcacggtcttgctgaatgaggcggtggatgcgcttgccgtgcgcgaagacggtgtctatgtggacggtacgttcggcaggggagggcattcccggctgattttgtcgcgtttgggcgatgcggggcggttgattgttttcgacaaagaccctcaggcgattgctgtggcagaagagctggcgcgttcggacaagcgggtcggtgtcgtgcatggcggttttgcttcgtttcaggcggcattggacggtttgggtatcggcaaggtggacggtgcgctgtttgatttggggatttcgtctccgcaaatcgatgacggcagccgcggtttcagctttcgtttcgatgcccctttggatatgcgtatggatacgacgcgcggtatgtctgccgcagagtggatagcggttgcgtcggaacaggatttgcacgaggtaatcaagaattatggtgaagagcggtttagccgccagattgcgcgcgccattgttgcgcaacgggcggaaagtccaatcgatacaacccgcaagctggcgcagatcgtggcacaaaacgtccgtactcgcgagcgggggcaggatcctgcgacgcgcaccttccaggcggtccgcatctttattaaccgcgagcttgaagaagtaggggcagtattgccgcaggtcatgtgtcgtctgaaagagggcggacgtttggcggtcattgctttccattcgttggaagaccgcattgtgaagcagtttgtcaaaaaatattcgcaacacgcgcccctgccgcgttgggcggcggtcagggaagcggatttgcccgagctgcccctgaaaatcgtgggcagggcattaaagccgggtgaggcggaaattgccgccaatccgagggcgagaagtgcggttttgcgtgtggcggagcggactgccggttcgataccggaacaatcacagagaaaaacgtctgaatggcaatga

SEQ ID NO: 41674 - DNA, 2118 bp, Neisseria meningitidis
atgcgccgttttctaccgattgcagccatatgcgccgtcgtcctgttgtacggactgacggcggcaaccggcagcaccagttcgctggcggattatttctggtggattgttgcgttcagcgcaatgctgctgctggtgttgtccgccgttttggcacgttatgtcatattgctgttgaaagacaggcgcgacggcgtattcggttcgcagattgccaaacgcctttccgggatgtttacgctggttgccgtactgcccggcgtgtttctgttcggcgtttccgcgcagtttatcaacggcacgattaattcgtggttcggcaacgatacccacgaggcgcttgaacgcagcctcaatttgagcaagtccgcattgaatctggcggcagacaatgccctcagcaatgccgtccccatccagatagacctcatcagcaccgcctccctatccggcaatatgggcagggtgctggaacattatgccggcagctttacacagttatccctttacaatgcggcaagcggtaaaattgaaaaaagcatcaatccgcacaagctcgatcagccgtttccggataaggcgcgttgggaaaaaatccaacaggcgggttcggtcagggatttggaaagcataggcggcgtattgtacgcgcagggctggctgtcggcgggtacgcacaacggacgcgattacgccttgtttttccgccagccggttcccaaaggcgtggcagaggatgccgtcttaatcgaaaaggcaagggcgaaatatgctgagttgagttacagcaaaaaaggtttgcagacctttttcctggcaaccctgctgattgcctcgctgctgtcgatttttcttgcactggtcatggcactgtatttcgcccgccgtttcgtcgaacccgtcctatcgcttgccgagggggcgaaggcggtggcgcaaggcgatttcagccagacgcgccccgtgttgcgcaacgacgagttcggacgcttgaccaagttgttcaaccacatgaccgagcagctttccatcgccaaagaagcagacgagcgcaaccgccggcgcgaggaagccgccagacattatctcgaatgcgtgctggaggggctgaccacgggcgtggtggtgtttgacgaacaaggctgtctgaaaaccttcaacaaagcggcggaacagattttggggatgccgcttacccccctgtggggcagcagccggcacggttggcacggcgtttcggcgcagcagtccctgcttgccgaagtgtttgccgccatcggcgcggcggcaggtacggacaaaccggtccatgtgaaatatgccgcgccggacgatgccaaaatcctgctgggcaaggcaaccgtcctgcccgaagacaacggcaacggcgtggtaatggtgattgacgacatcaccgttttgatacacgcgcaaaaagaagccgcgtggggcgaagtggccaaacggctggcacacgaaatccgcaatccgctcacgcccatccagctttccgccgaacggctggcgtggaaattgggcgggaagctggatgagcaggatgcgcaaatcctgacgcgttcgaccgacaccatcgtcaaacaggtggcggcattgaaggaaatggtcgaagcattccgcaattatgcgcgttccccttcgctcaaattggaaaatcaggatttgaacgccttaatcggcgatgtgttggcattgtatgaagccggtccgtgccggtttgcggcggagcttgccggcgaaccgctgatggtggcggcggatacgaccgccatgcggcaggtgctgcacaatattttcaaaaatgccgccgaagcggcggaagaagccgatgtacccgaagtcagggtaaaatcggaagcggggcaggacggtcggattgtcctgacggtttgcgacaacggcaaagggttcggcagggaaatgctgcacaacgccttcgagccgtatgtaacggacaaaccggcgggaacgggattgggtctgcccgtggtgaaaaaaatcattgaagaacacggcggccgcatcagcctgagcaatcaggatgcgggtggtgcgtgtgtcagaatcatcttgccaaaaacggtaaaaacttatgcgtag

SEQ ID NO: 41675 - DNA, 981 bp, Neisseria meningitidis
atgcaagaaaacccgaccgtgtggctgttcgacctcgacaacacgctgcacaatgccgatgccggcatcttcacactcatcaaccgcgccatgacacgctatatggcacgccgcctcaaactctccgaatctgccgcgtccgacctgcgtcaagactattggcaccgctacggcgcaacgctcgccggactgcaaatccaccatcccgaaatcgacatcgccgaatttttgcgcgaaagccatccgatcgatgcaatcctgaccaggctgcacggcatggcggatacggaaaacaccctatgccgtctgaacgggcgcaaggcggttttttccaacggcccgtcgttttacgtccgtgccgttgtcggcgcactcggtttggaaaaccgtttcgacgcactgttcggcacggatgatttcgggctgctgtacaaacccaatccgcaagcgtatctcaatgtctgccgccttttggacgtaccgcccgaatgctgcattatggtggacgacagcgcggacaacctgcatcaggcaaaagcattgggcatgaaaaccgtccggttcggtgcaaaagtgcacgacctgccctttatcgatgcttccgtaagcgatatggcgcaactggctcggtatgcagaaactttgtcagaacaccgccaaaatcattacaatacccgcacaccccccccgaaaatacgaaagaatgttatgcgtaaaaccttccttatcctgatgactgccgccgcccttttgtcgggctgcgcgtgggaaacttatcaagacggcaacggcaagaccgccgtccgtcaaaaatatcccgccggcacgcccgtttattaccaagacggcagctactcgaaaaatatgaactacaaccaataccgtcccgaacgccatgccgtgttacccaaccaaaccggcaacaacgccgacgaagagcatcgccaacactggcaaaagcccaaatttcaaaaccgataa

SEQ ID NO: 41676 - DNA, 762 bp, Neisseria meningitidis
atgaccgaattcgtcgtattgattccggcgcggctggattcgtcgcgcctgcccggaaaagccttggcggacatccacggcaaaccgatggtcgtgcgcgttgccgaacaggcggcaaaaagtaaagctgtgcgcgtcgtcgttgccaccgaccatcccgatattcagacggcctgtcaggcgcacggcgtcgaagtcgtcatgacttcaaaccggcacgaaagcggcacgacgcgccttgccgaagcctctgccgcgctgaagctgccgccgcatctggtggttgtcaacgtacagggcgacgagccgctgattgcacctgaactcatcgaccgcaccgccgaagtactcgtcgaaaacaacgtccaaatggcgaccgccgcccacgaattgcacgatttcgacgaattgatgaatcccaatgccgtcaaagttgtcctcgacaaaaaccgcaacgccatctacttcagccgcgccccgattccctatccgcgcgatgcgatgcgtgcaggaaaacgcgaaatgccgtttgaaaccgccgtcctgcgccatatcggcatctacgcctaccgcgtcggcttcctgcaacgctacaccgaaatgagcgtttcgccgctggaaaccattgaatcgctggagcaactgcgcgtcctgtggcacggctacccgattgccgtcgaaaccgccaaagaagctcctgccgccggcgtagatacgcaggaggatttggacaggattcgcgctgtatttcagactatataa

SEQ ID NO: 41677 - DNA, 654 bp, Neisseria meningitidis
atgaagataacgcactgcaaattaaagaaaaaagtacagaaagaactgctccgtttttttgtactcgaagttaccgcccgttctgccgccgatattttgggtatccatcccaattcggcagcactgttctaccgtaaaatccgcacggttatcaaccatcatttggtcttggctgccgatgaggtttttgagggccctgtcgagcaggacgaaagcgatttcggcggacggcgtaaaggcagacgtggtcgcggtgcggcaggaaaagtggttgttttcggcattctgaaacgcaacggacgggtctataccgttgtcgtaaacaatgccaagtctgaaacgttactccctgtcatcaagaagaaaatcatgccggacagtattgtttataccgatagtctgagcagctgcgacaagttggacgtgagcggttttatccattaccgcatcaaccattccaaggaatttgcagaccgtcagaaccacattaacggcattgagaacttttggaatcaggcaaaacgcgtcttgcgaaaatacaacggaatcgatcgtaaatctttcccgctgttcttgaaagaatgcgaatttcgatttaacttcggcacaccgtctcaacagcttaaaatcctgcgggattggtgtgggatttag

SEQ ID NO: 41678 - DNA, 1686 bp, Neisseria meningitidis
atgtctatggaaaattttgctcagctgttggaagaaagctttaccctgcaagaaatgaacccgggtgaggtgattaccgctgaagtagtggcaatcgaccaaaacttcgttaccgtaaacgcaggtctgaaatcagaatccctgattgatgtagctgaattcaaaaacgctcaaggcgaaattgaagttaaagtcggcgacttcgttaccgttaccatcgaatccgtcgaaaacggcttcggcgaaaccaaactgtcccgcgaaaaagccaaacgcgctgccgattggattgccctggaagaagccatggaaaacggcaacatcctgtccggcatcatcaacggcaaagtcaaaggcggcctgaccgttatgattagcagcatccgcgcattcctgccgggttctttggtcgacgtacgtcctgtaaaagacacttctcacttcgaaggcaaagagatcgaattcaaagtgatcaaactggacaaaaaacgcaacaacgtcgttgtttcccgccgcgccgttctggaagccactttgggtgaagaacgcaaagccctgctggaaaacctgcaagaaggctccgtcatcaaaggcatcgttaaaaacattaccgattacggtgcattcgttgacttgggcggcatcgacggtctgttgcacatcaccgatttggcatggcggcgcgtgaaacacccgagcgaagtcttggaagtcggtcaggaagttgaagccaaagtattgaaattcgaccaagaaaaacaacgcgtttccttgggtatgaaacaactgggcgaagatccttggagcggtctgacccgccgttatcctcaaggcacccgcctgttcggcaaagtatccaacctgaccgactacggcgcattcgtcgaaatcgaacaaggcatcgaaggtttggtacacgtctccgaaatggactggaccaacaaaaacgtacacccgagcaaagtcgtacaactgggcgacgaagtcgaagtcatgattttggaaatcgacgaaggtcgccgccgtatctctttaggtatgaaacaatgccaagccaatccttgggaagaatttgccgccaaccacaacaaaggcgacaaaatctccggcgcggttaaatccattaccgatttcggcgtattcgtcggcctgcccggcggcatcgacggtttggttcacctgtccgacctgtcctggaccgaatccggcgaagaagccgtacgcaaatacaaaaaaggcgaagaagtcgaagccgtcgtattggcaatcgacgtggaaaaagaacgcatctccttgggtatcaaacaactggaaggcgatccgttcggcaacttcatcagcgtgaacgacaaaggttctttggttaaaggttccgtgaaatctgttgacgccaaaggtgctgttatcgccctgtctgacgaagtagaaggctacctgcctgcttccgaatttgcagccgaccgcgttgaagatttgaccaccaaactgaaagaaggcgacgaagttgaagccgtcatcgttaccgttgaccgcaaaaaccgcagcatcaaactttccgttaaagccaaagatgccaaagaaagccgcgaagcactgagctccgtcaatgccgccgccaatgcgaatgccggcaccaccagcttgggcgacctgctgaaagccaaactctccggcgaacaagaataa

SEQ ID NO: 41679 - DNA, 348 bp, Neisseria meningitidis
atgaatcgaacaaaaacgtgtaaggagtgcggagagattaagccgataacggcgtttccgaaaaacggctttgacagaaaaaccgggctgcaaaaatacgcgccccgatgccgccgatgccacaacgtctatcagcaagatttgctgtacaagcgccgtgaaaaagaatttgagcaaaagcaggcagtcatggcggcattgatggacgccgagcgcgaaaaagaggaggcagctaaggcgcgaagcatcgcacaaagcctcgtgttggcgaaagcagcctgtccgatactgcacatcggcttgtggactgagccgttatttatccctaaagggatgttacagatttaa

SEQ ID NO: 41680 - DNA, 927 bp, Neisseria meningitidis
atgagcaccttcttccggcaaaccgcgcaagccatgattgccaaacacatcgaccgcttcccactattgaagttggatcaggtaattgattggcagccgatcgaacactacctgaaccgtcaaagaacccgttacctccgagaccaccgcggccgtcccgcctatcccctgttgtccatgttcaaagccgtcctgctcggacaatggcacagcctctccgatcccgaactcgaacacagcctcatcacccgcatcgacttcaacctgttttgccgctttgacgaactgagcatccccgattacagtactttatgccgttaccgcaattggctggcgcaagacgacaccctgtccgaattgctggaactgattaactgccaactgaccgaaaaaggcctaaaagtagagaaagcatccgccgccgtcgttgacgccaccattattcagaccgccggcagcaaacagcgtcaggccatagaagtcgataacaaaggacaagtcagcggccaaaccacaccgagtaaagacagcgatgcccgttggacaaagaaaaacggcctctacaaactcggttacaaacaacatacccgcaccgatgcggaaggctatatcgagaaactgcacattacccccgccaatgcccatgagtgcaaacacctgccgccgttgttggaaggactgcccaaaggtacgaccgtctatgccgacaaaggctatgacagtgcggaaaaccggcaacatctggaagagcgtcagttgttagacggcattatgcgcaaagcctgccgcaaccgtccgctgacggaaacgcaaaccaaacataaccgatatttgtcgaagatccgttatgtggtcgaacaaagcttcggtacgctgcaccgcaaattccgctatgcgcgggcagcctatttcggactgattaagtga

SEQ ID NO: 41681 - DNA, 165 bp, Neisseria meningitidis
atggcatattttggcggctttgttcgcgctttgttcgatcttggcgtgtttgaacgcggcggcgtgaaaggaaggggggaaatggttttcccgcttttggcggcggtgtcggaggtgctgtgcctgatgtgcggcggcatattttcggtgaaattgattttatag

SEQ ID NO: 41682 - DNA, 594 bp, Neisseria meningitidis
atgtctgaattattaaactatgttgcttcctgccgcctgccgaccgaatggggcgtatttacgatgcacggctttgaagaggcaaacgggcaggaacacgtcgcgctgaccgtcggtgatttttcagacggcaatccggttctgacgcgcatccactccgaatgcctgacgggcgatgcgctgttctcgagaaaatgcgactgcggacctcaacttgaagcggccatgagggcggtacagacagaggggcgcggcatcatcgtctatctgcgtcaggaaggacgcggcatcgggctgattaacaaaatccgcgcctatcatctgcaagaccaaggtatggatacggttgaagccaatttggcactcgggctgcccgtcgatgcccgcgatttccgtttggcgcaatctatctacgaatatctgggcatccgctcggtcaaactgctgaccaacaaccccgaaaaaatccaaaccctgaaagatgcggggattaacgtggtcgaacgcatccccctgcacgtcggggaaaaccttgaaaacaaacgctacctccaaaccaaagcagacaagctgggacatctgatgtcggaataa

SEQ ID NO: 41683 - DNA, 663 bp, Neisseria meningitidis
atggattcccaaaaatttaccgaagcatccaaacggcggttgagcgaattgttggatgccaaaagcgaacaaggcaacacgatgcgttgcgacgaggttcaaggttttatgacggcgctgttgagcgggccggacaaattgacaccgctcgactggctgcccgaagtgttgggcgacgaatcgcaatttaccgccgccgaacgttccgaaatcgaacggctggttttggcaatggcgatggaaacaaccgccgcgatgtcggataaaaaactgcccgatttgtggctgtatgaaaacgaagacggcggcagcgatttttacacatggtgcaatgcttatctttacggtttggatattgtgccgaccgattggtttgaagccgtcgatgatgaagcgtttgaagagttgttttatcccatcatggcattgggcggtatttacgacgaagaggaaaacggcgctatccgtctgcaattcacagaaggcgagctggcggaactggaatccgagttgccttatgcattggcggatatctaccgctactggcaggcagtcatcaacaaaccgcaaaccgtccgcagggaaggcgaaaaaacaggcaggaacgatccctgtccgtgcggcagcggcagaaaatacaaggcgtgttgcggtaagaattga

SEQ ID NO: 41684 - DNA, 1065 bp, Neisseria meningitidis
atgaaagcagcacgtttttacgataaaggcgacatccgcatcgaagacatccccgaaccgaccgtcgcccccggcactgtcggcatcaatgtcgcctggtgcggcatctgcggtactgacctgcacgaattcatggaaggcccgattttcattccgccttgcggtcatccgcacccgatttccggcgagtccgcacccgtaacgatgggacacgagttctccggcgtggtctatgccgtcggcgaaggcgtggacgacatcaaagtcggccaacacgtcgtggtcgaaccctacatcatccgcgatgacgtaccgaccggagaaggcagcaactaccacctctccaaagacatgaactttatcggcttgggcggctgcggcggcggtctgtccgaaaaaatcgccgtcaaacgtcgttgggtgcatccgatttccgacaaaatcccgttggatcaagccgctttgatcgaaccgctgtctgtcggacaccacgcctatgtacgcagcggcgcgaaagcaggcgacgtcgcattggttggcggtgcaggtccgatcggtttgctgttggctgccgtactgaaagccaaaggcatcaaagtcatcattaccgagttgagtaaagcacgcaaagacaaagcgcgcgaatccggcgttgccgactacatcctcgacccgtccgaagtcgatgttgtcgaagaagtgaaaaaactgaccaacggcgaaggcgtggacgtggcattcgaatgtaccagcgtgaacaaagtgttggatactttggtcgaagcctgcaaacctgccgccaacttggttatcgtatccatctggagccaccctgcaaccgtcaacgtccacagcgtcgtgatgaaagaactggatgtgcgcggcacgattgcctactgcaacgaccacgcggaaaccatcaaactggttgaagaaggcaaaatcaacctcgagcctttcatcacccagcgcatcaagctggacgaactggtttccgaaggcttcgagcgtctgatccacaacaacgaatccgccgttaaaattattgtgagtccaaacctgtaa

SEQ ID NO: 41685 - DNA, 582 bp, Neisseria meningitidis
atggaagaaaaaaacgactacaccgacgcggcatccgacaaccgcaacgggcaggaaattgaagtcggaattgccggcgcaggcgaccggatacttgccgcgctgctgaaccaattgtttacctttttggttttgttggtgccgtttgccggactgattgctttcgccatcaagaatgaaggcaggattggcggcagtgaggaaatattcgggctgcttttgggcatgacttccttttgggtaggactggcgggcattttggtttataccgtcgttcaaatctactatatgagtcgggacgggcagtcattgggtaagaaaatcatgagaatccgggtgttgaaaaccgacggccgcaatccgggttttgtcggcacggttttggtacgcgaaatcgcatggtcggttttggttgccattattgccgccgttatcggtcttgcagtaggtgacaacggagaaaacgccatcaacctgctggcattccttgccaactttgtcctgctctttatggtcaaacgcgaccgccgcacgctttacgacatactggcggatacggttgtcgtcaagctgcccaaataa

SEQ ID NO: 41686 - DNA, 378 bp, Neisseria meningitidis
atgttctacgccgcacctatctcgaaacactggcagctcgcgcccgaaggctcgggcgtggttcagggcgaggacgacatcgaccaatgtatccgcaatatcctgtccacccgcaaaggcgcggacgttacccgtcctgatttcggttccgaccattacaaatggctagacacccccgaagatgtgtttatccccaatatcgtgcgttcgaccatgttggcaatacagacgtgggagaagcgggcagtggttgaggacattattttcgacggtgtcgcaccgcatctgacgatgacggtttactggcgcatagcggatgaagtagcaggcgaggtttatacgacagacatcagattggagcaggcgacatggatttga

SEQ ID NO: 41687 - DNA, 1242 bp, Neisseria meningitidis
atgcccaccaaaaccccttcactgttcggcggcgcgatgattatcgccggcacggtcatcggcgcaggtatgctcgccaacccgaccgccacatccggcgtatggtttaccggctcgctggccgtgttgctgtacacctggttttctatgctttccagcggcctgatgattttggaagtcaacacccactatccccacggcgcaagtttcgacacgatggtcaaagacctgctcggacggagctggaacatcatcaacggcatcgccgtcgccttcgttttatacctgcttacttacgcttatatcttcgtcggcggcgacctgaccgccaaaggcatcggcaacgccttgggcggcaatgtttcactcaccgtcggacaactcttcttcttcggcatcctcgccttttgcgtgtgggcatccgcacgcttggtcgaccgcttcaccagcgtcctcatcggcggcatggtattaacctttatttgggcaaccggcggcctgattgccgatgccaaaatgcctgttttgtttgacacccaagcccctgccggcacaaactactggatttacgccgccaccgccctgcccgtctgtctcgcttccttcggcttccacggcaacgtctccagcctgctcaaatactttaaaggcgacgcgcccaaagtggctaaatccatctggatgggcacactgattgcgctggtgatttacgtcctctggcaaaccgccatccaaggcaacctgccgcgcaacgagttcgcccccgtgattgccgccgaagggcaagtctccgtcctcatcgaaaccctgtccaaattcgcccaaaccggcaatatggacaaaatattggccctgttttcctatatggcgatcgccacctcgtttttaggcgtaacgctcggactcttcgactacatcgccgacatcttcaaatggaacgacagcgtgtccggccgcaccaaaaccgccgcgctgaccttcctgccgcctctaatttcctgcctgctcttccccaccagctttgttaccgccatcggctacgtcggcctggcggcaaccgtctggacaggcatcatccccgccatgctgctctaccgttcgcgcaaaaaattcggcgcaggcaaaacctataaagtttacggcggcttgtggctgatggtttgggtcttccttttcggcatcatcaacatcgccgcacaggtattgagccaaatggaactcgtccccgtatttaaaggataa

SEQ ID NO: 41688 - DNA, 135 bp, Neisseria meningitidis
atgagggtcagcagatacgcatcggaaaccggcgatattgccctgttcgagcgagcggaaaaagaaattgccaattatcaaatgatccagaaacgctatgcaactgatggaaataacatcaataaaggaggataa

SEQ ID NO: 41689 - DNA, 1677 bp, Neisseria meningitidis
atgagcttcaaaaccgatgccgaaatcgcccaatcctccaccatgcgcccgattggcgaaattgccgccaagctgggtctgaacgccgacaacattgagccttacggtcattacaaggcgaaaatcaatcctgccgaagcgttcaaactgccgcaaaaacagggcaggctgattttggttaccgccatcaacccgactccggcgggcgaaggcaaaaccaccgtaaccatcggtttggcggacgcgttgcgccacatcggcaaagatgccgtgattgccctgcgcgaaccttctctggggccggtgttcggcgtgaaaggcggcgcggcaggcggcggctatgcccaagttttgccgatggaagacatcaacctgcacttcaccagcgactttcacgccatcggtgcggcgaataacctgctcgctgccatgctcgacaaccatatctaccaaggcaacgagttgaacatcgaccccaaacgcgtgctgtggcggcgcgtggtcgatatgaacgaccgccagttgcgcaacatcatcgacggcatgggtaaacctgttgacggtgtgatgcgccccgacggtttcgacattaccgttgcctccgaagtgatggcggtattctgtctcgccaaagacatcggcgatttgaaagagcgtttgggcaacatcctcgtcgcctacgccaaagacggcagccccgtttatgccaaagatttgaaggcacacggcgcgatggcggcattgcttaaagatgcgattaagcccaacttggtgcaaaccatcgaaggcacgcccgccttcgtacacggcggcccgttcgccaacatcgcccacggctgcaactccgtaaccgcaacccgtttggcgaaacatcttgccgattatgccgtaaccgaagcaggcttcggcgcagatttgggcgcggaaaaattctgcgacatcaaatgccgtctggcggatttgaaacctgatgcggctgttgtcgtcgccactgtccgcgctttgaaatacaacggcggcgtggaacgcgccaacctcggcgaagaaaacctcgaagccttggcaaaaggcctgcctaatctcttgaaacacatttccaacctgaaaaacgtattcggactgcccgtcgtcgtcgcgctcaaccgcttcgtgtccgactccgatgccgagttggcgatgattgaaaaagcctgtgccgaacacggcgttgaagtttccctgaccgaagtgtggggcaaaggtggtgcgggcggcgcggatttggcgcgcaaagtcgtcaacgccattgaaagtcaaaccaataacttcggtttcgcctacgatgtcgagttgggcatcaaagacaaaatccgtgtgattgcccaaaaagtgtacggcgcggaagatgttgatttcagcgcggaagcgtctgccgaaatcgcctcgctggaaaaactgggcttggacaaaatgccgatttgcatggcgaaaacccaatattctttgagcgacaacgccaaactgttgggctgccccgaaggcttccgcatcgccgtgcgcggcatcaccgtttccgccggcgcgggcttcatcgtcgcgctgtgcggcaatatgatgaagatgccgggtctgccgaaagtgccggccgccgagaaaatcgatgtggacgaacacggcgtgattcacggcttgttctga

SEQ ID NO: 41690 - DNA, 735 bp, Neisseria meningitidis
atgacgacacgccaaatcatcctcgataccgaaaccaccggcctgtatgccgacggcggcgaccgcttggtcgagtttgccggtctggaaatggtcaaccgccaaatgaccgacaaaaacctgcacctctatgtccaccccgagcgcgatatgcccgaagaggcggcgagggtgcacggtctgacgatagaggttttggaagggaaaaacgcgccgccgtttgcagaggtcggcaggcagattgccgatttcctgcgcggtgcggaactgattatccacaatgccaaattcgacgtgggcttcctcaatatggagttccgccggatggggttgccgactgtcgaggaactcggctgtaccgttaccgataccctggcgatggcgcgcgaaatgttccctgggcagaaagccagcctggatgccctgtgcaaccgtttttccgtcgaccgcagcaagcgcgtcctgcacggcgcattgatcgactgcgaacttttgggcgaagtttatttagcgatgacgcggcggcagttcgacctgatgggggaggccgaggaggaagagccggcagccaaacctgttgcatctgccgaaatgaaactcggtgccaaactgaaagtgattaaggcggatgaagcagaactggcggcgcacgggcaatatttggacggcttgggcgaagcctgtatctggcgcaaggaagccgtgccgtctgaaaacggcgggacggacgcatga

SEQ ID NO: 41691 - DNA, 1170 bp, Neisseria meningitidis
atgccgcaaattaaaattcccgccgtttactaccgtggcggtacatcaaaaggcgtgtttttcaaacgttccgacctgcccgaggcggcgcgggaagcgggaagcgcacgcgacaaaatcctcttgcgcgtactcggcagcccggatccctacggcaagcagatagacggtttgggcaacgccagctcgtccaccagcaaggcggtgattttggacaagtccgaacgcgccgatcacgatgtcgattaccttttcgggcaagtttccatcgacaaaccttttgtcgattggagtggcaactgcggcaacctcaccgctgccgtgggcgcattctccatcgaacagggcttggtcgataaaggcaagattccttcagacggcatctgcacggtcaaaatctggcagaaaaacatcggcaaaaccattattgcccatgtaccgatgcaaaacggcgcagttttggaaacaggcgattttgagctcgacggcgtaacgttcccggcagccgaagtacaaatcgaatttcttgatccagccgacggtgaaggcagtatgttcccaaccggcaatttggtcgatgaaattgatgtgccgaatataggccgtttgaaagccacgctcatcaacgcgggcattccgaccgttttcctgaatgccgccgacttgggctacacgggcaaagagttgcaagacgacatcaacaacgatgccgcggctttggaaaaattcgagaaaatccgcgcttacggtgcgctgaaaatgggtctgatcagcgacgtatccgaagctgccgcccgcgcgcacacgccgaaagtcgccttcgtcgcgcccgccgccgattacaccgcctccagtggcaaaaccgtgaacgccgccgacatcgatttgctggtacgagccctgagcatgggcaaactgcaccacgcgatgatgggtaccgcctctgttgccattgcgaccgccgccgccgtgcccggtacgctggtcaaccttgccgcaggcggcggaacgcgtaaagaagtgcgcttcgggcatccttctggcacattgcgcgtcggtgcagccgccgaatgtcaggacggacaatggacggccaccaaagcggtcatgagccgtagcgcacgcgtgatgatggaaggttgggtcagggtgcctgaggattgtttttaa

SEQ ID NO: 41692 - DNA, 1350 bp, Neisseria meningitidis
atgaaattaccggtgatgtcgcccgaacattcggcgcaacttcaggcgtttgaggcaaaaatcctgtccaatcacgccaaaatcgaggcgtggttccgcacgcagtggagcgtacaccgcccgccgttttacggttcggtcgatatacgcaatgccggttacaaaatttcgtctatcgatatgaatttgttccccggcggcttcaataatctgaatcccaactttatcccgctggcggcggttgccgcgcaagatgcggtgcaacgcgcctgcgaaacggcgaaatccgtattgattattcccgaaaaccacacgcgcaatacgttttacctgcaaaacatttacgccctcggcgagattttgcgttcggcagggtatgaagtgcgcttgggcagcctgaatccggaagtaaccgaaccgaccgaatttgaaactgcattgggcgacaaaatcctgttggaacctttattgcgtacccgcgaccgcgtccatcttgcagacggcttttcgccttgcgtggttttgttgaacaacgatttgtctgccggcattcccgacatcctcaaaggcatcagccaaaccgttttgccgccgttgcacggcggttggacgacgcgccgcaaaacaaatcatttcggcgcgtacaaccaagttaccgccgaatttgccaagttaatcggcatcgacgaatggcaaattaacccttattttgaaaaaatcggcggtttggacttccaagggcgtgaaggcgaagacgcgttggcggaagcggtagaacgtgtgctggcgaaaattcaagccaaatacgacgaatcgggcattaccgacaaacctttcgtcatcgtcaaagccgatgccggcacttacggcatgggcgtgatgagcgtcaaatccgccgacgaagtgcgcggattgaaccgtaaaaaccgcaataaaatggcgaaagtcaaagaaggcttggaagtcagcgaagtgattgtccaagaagggatttatacttatgaaaccttaaacggcgcggtgtgcgaacccgtcgtgtatatgatggaccgcttcgtcatcggcggctttttccgcgtacacgaagggcgcggtgcggacgaaaacctcaacgccggcggtatggtgtttgttccgctgtctaacagcattcctaccggtaacggcgataattcccaagaagcgcccgaagcctgcaagcgcgtattcgaacaatgggactcgctgggtatgccgcgctctgaaaaagactgcgacgtggacaacgaacacaaccgcctctacgtttacggcgtaatggcacgcctgtcgcttctggcggcgtccatcgagttggaagaaacggcgtaa

SEQ ID NO: 41693 - DNA, 264 bp, Neisseria meningitidis; identical to SEQ ID NO: 37542

SEQ ID NO: 41694 - DNA, 927 bp, Neisseria meningitidis
atgagcaccttcttccggcaaaccgcccaagccatgattgccaaacacatcgaccgtttcccgctattgaaattggaccgggtgattgattggcagccgatcgaacaatacctgaaccgtcaaaaaacccgttaccttagagaccaccgcggccgtcccgcctatcccctgttgtccatgttcaaagccgtcctgctcggacaatggcacagcctctccgatcccgaactcgaacacagcctcatcacccgcatcgacttcaacctgttttgccgctttgacgaactgagcatccccgattacagtactttatgccgttaccgcaattggctggcgcaagacgacaccctgtccgaattgctggaactgattaactgccaactgaccgaaaaaggcctaaaagtagagaaagcatccgccgccgtcgttgacgccaccattattcagaccgccggcagcaaacagcgtcaggccatagaagtcgataacaaaggacaagtcagcggccaaaccacaccgagtaaagacagcgatgcccgttggacaaagaaaaacggcctctacaaactcggttacaaacaacatacccgcaccgatgcggaaggctatatcgagaaactgcacattacccccgccaatgcccatgagtgcaaacacctgccgccgttgttggaaggactgcccaaaggtacgaccgtctatgccgacaaaggctatgacagtgcggaaaaccggcaacatctggaagagcgtcagttgttagacggcattatgcgcaaagcctgccgcaaccgtccgctgacggaaacgcaaaccaaacataaccgatatttgtcgaagatccgttatgtggtcgaacaaagcttcggtacgctgcaccgcaaattccgctatgcgcgggcagcctatttcggactgattaagtga

SEQ ID NO: 41695 - DNA, 1287 bp, Neisseria meningitidis
atgatttacatcgtactgttcctcgccgccgtcctcgccgttgtcgcctacaatatgtatcaggaaaaccaataccgcaaaaaagtgcgcgaccagttcggacactccgacaaagatgccctgctcaacagcaaaaccagccatgtccgcgacggcaaaccgtccggcgggtcagtcatgatgccgaaaccccaaccggcggtcaaaaaaacggcaaaaccccaagaccccgccatgcgcaacctgcaagaacaggatgccgtctacatcgccaagcagaaacaggcaaaagcatcaccgttcaaaaccgaaatcgaaaccgccttggaagaaagcggcattatcggcaactccgcccacaccgtttccgaaccccaaaccggacattccgcaccgaaacctgccgacgcgccggcaaaacctgcacccgttccgcaaacacctgcaaaaccgctgattacgctcaaagaactgtcaaaagtcgaattaccctggtttgacgtgcgcttcgacttcatctcctatatcgcgctgaccgaagccaaagaactgcacgcactgccgcgcctttccaaccgctgccgctaccagattgtcggctgcaccatggacgaccatttccagattgccgaacccatcccgggcatccgctatcaggcatttatcgtgggtattcaggcagtcagccgcaacggacttgcctcgcaggaagaactctccgcattcaaccgccaggtggacgcattcgcacaaagcatgggcggtcagacgctgcacaccgaccttgccgcctttatcgaagtggcttccgcactggacgcattctgcgcgcgcgtcgaccagaccatcgccatccatttggtttccccgaccagcatcagcggcgtagaactgcgttccgccgtaacgggcgtgggtttcgttttggaagacgacggcgcgttccactataccgacacgtcgggctcaaccatgttctccatctgctcgctcaacaacgagccgtttaccaatgcccttttggacaaccagtcctacaaaggcttcagtatgctgctcgacatcccgcactctccggcaggcgaaaaaaccttcgacgatttgtttatggatttggcggtacgcctgtccggccagttgaacctgaatctggtcaacgacaaaatggaagaagtttcgacccaatggctcaaagacgtgcgcacttatgtattggctcgtcagtccgagatgctcaaagtcggtatcgaaccgggcggcaaaaccgcattgcgcctgttctcctaa

SEQ ID NO: 41696 - DNA, 477 bp, Neisseria meningitidis
atgctggcagtctgccaatccggcagcgcacctaaaaacgcgcacacggcatccgccgacacaccggccggagaatcatgcaaagtcatccggggcgacaccgcaggaagcggcaaaaacatcatttaccgttgcagcaacggtcaggcggcaataaatgcagccattgcagacggcgtattggaatccgagattcccgtcagcttcggcggcggcggcgtaccggttgcaaacggcaggaatctggttacacggcaagcagcaaacggcgttggcaaatccgactcagaggcctgcgaacgcgccctaatcaatgccgcccgcaaattccaacagaccgcaggcaaactcggcggacgcagtattaccggcttccacagctacttcgacaagcagccgctgcaaggcggacaatacgactgtcaggcaggctcgttccatgtccgcgtggtcatgcgcgccaacgtcgtccgttaa

SEQ ID NO: 41697 - DNA, 615 bp, Neisseria meningitidis
atgaaaacctcgaacttttccaagagaacatccgcaatgaaaacttttgccctgatactggccgacggtcaggcgagccgtatgggaggcgaggacaaggggcttgctcttttggggggtaaggcactgatagaccatgtcatcgacagggtcaggccgcaggtcagccatatcgccatcagcaccaaccggaatttggaagaatatgctcgaagaagtccgcatatttttcccgatgcgcggcagtggcagcatttcggcccgctttcggcattgtgtaccgcagccaacgatttgcagttggcgactgctgactggcttttggttgtgccgtgcgatatgccgtatctgccggacgatttggtggcgaggtttgaaaccgtgtcgaaacgcacaccgttgtgcaatgcgtattatgtggaaacgccgataacgatgcactacaacattatgtatatccgcccgcagattctgcaaagcgcgattccctatctgttttcgggtatgaaaacattaagaagctggttgcagcagcaaagggcgcggtcggtcagattcgagtttgacgggcattttgccgacttgaacacgcaaatcgatttgcaggagggataa

SEQ ID NO: 41698 - DNA, 3204 bp, Neisseria meningitidis
atggctaaattttttatcgaccgccctatttttgcgtgggttatttcgattttcattattgcggcgggtattttcggcatcaaaagcctgcctgtttcgcaatatccgtccgtcgccgccccgaccattactttgcacgccacttatccgggtgcgtccgcgcaggtaatggaagacagcgtgctttccgtgatcgagcggaatatgaacggcgtggaaggtttggattatctgtccacttccgccgattcgagcggcagcggcagcgtgagcctgacctttacgcccgataccgacgagaatctggcgcaggtggaagtgcagaacaagctttccgaagtattgagcacgctgccggcaaccgtccagcaatacggcgtaaccgtatccaaggcgcgttccaatttcctgatgattgtgatgctttcgtcggatgtgcagtcaaccgaagagatgaacgactacgcgcagcgtaatatcgttcccgagttgcagcgtatcgaaggcgtggggcaggtacgcctgttcggcgcgcaacgcgcgatgcggatttgggttgatcctaagaaactgcaaaactacaatttgtcgtttgccgatatcggcagtgcgctgtccgcccagaacgtccagatttcagcgggttctatcggttcgcttcccgccgttcgcggacagacggttacggctaccgtaacggcgcaagggcagttgggtacggcagaagaattcggcaacgtcatcctccgcgccaataccgacggttctaatgtttacctgaaggatgtggcaagggtcggactgggtatggaagactattcttcctcaacccgtctgaacggtgtaaataccactggtatggcggtgatgctgtccaacagcggcaatgcgatggcgacggcaaaggcggttaaagaacgcatggcgacgttggaaaaatactttcctcagggtatgagctggaaaaccccttacgatacttccaaattcgtcgaaatttcgattgaaaaagtgattcacactttaatcgaagcgatggtgctggtgtttgtcgtaatgtatctcttcctgcaaaacatccgttatacgctgattccgaccattgtcgtaccgatttcgctgttgggcggtttcgctttcatctcttatatgggcatgtcgattaacgtactgaccatgtttgcgatggttttggtcatcggcatcgtggtcgatgacgcgattgtggtggttgaaaacgtcgagcgcattatggcgggtgaaggcttgccgcccaaagaagcgaccaaaaaagcgatgggtcagatttcgggcgcggtcatcggtattaccgccgttctgatttccgtgttcgtaccgttggcgatgttcagcggggcgacgggcaatatttacaaacagtttgccctgacgatggcgtcatcaatcgcattttccgccttccttgcgctgacccttacccctgctttgtgtgccacaatgttgaagacaatcccgaaagggcatcacgaagagaaaaaaggtttcttcggctggtttaacaagaaattcaacagttggacgcacggttacgaaggccgggttgccaaagtgctgcgtaagactttccgcatgatggttgtctatatcggcttggcggttgtgggcgtgttcctgtttatgcgcctgccgacttcattcctgccgaccgaagaccaaggcttcgtcatggtcagcgtgcaactgcctgcaggagcgacccaagagcgcaccaatgcgactttggcgcaagttacccaactggcgaaaagcattcctgaaatagaaaacatcattaccgtttccggcttcagcttttcgggcagcggtcagaatatggcgatgggttttgccatattgaaagattggaacgagcgtaccgcgcccggcagcgatgccgttgcgattgccggcaagctgacgggtatgatgatggggacgcttaaagacggttttggcatcgccgtcgtcccgcctccgattctggagttgggcaacggttcgggcctgagcatcaacctgcaagaccgcaataataccggccataccgcattgctggcgaagcgcaacgagttgattcagaaaatgcgtgccagcggtttgtttgaccccagcaccgtccgtgccggcggtttggaagactcgccgcagttgaaaatcgacatcaaccgtgccgcggcggcggcgcaaggcatttcgtttgccgacatccgcaccgcattggcaagcgcgctgagttcgtcttatgtcagcgacttcccgaaccaaggccgtctgcaacgcgtgatggtgcaggccgacgaggatgcccgtatgcagcctgccgatattttgaacctgaccgtgccgaacaaatccggcgtcgccgtaccgctttccaccattgctactgtttcttgggaaaacggtacggaacagagcgtacgcttcaacggttatccttcgatgaagctgtccgcttcgcctgcaaccggcgtttccaccgggcaggctatggcggcggttcaaaaaatggttgacgaattgggcggcggttacagcttcgaatggggcggacagtcgcgcgaagaggcaaaaggcggctcgcaaaccctgattttgtacggtttggcggttgcagccgtatttttggtacttgccgcgctttatgaaagctggtcgattccgctggcggtcatccttgtgattccgttgggtttgatcggtgcggctgcgggcgtaaccgggcgcaacctgtttgaaggactgttgggcagcgttccctcgttcgccaacgacatctactttcaagtcggtttcgttaccgtgatgggtttgagtgcgaaaaatgcgattttgattatcgaatttgccaaagaccttcaagcgcaagggaaaagcgcggttgaagccgctttggaagcagcccgcctgcgtttccgtccgattatcatgacctcgtttgcctttattttgggcgtggttcccctgtatattgccggcggtgcaagttctgccagccagcgcgccattggtacaaccgtattctgggggatgctcatcggcacgctcttgtccgtgttccttgttccgcttttctatgtggtggtgcgcaaattcttcaaagaaaccgcgcacgaacacgaaatggcagtaaaacacgccgccgaagcgggcatcaccggttcggacgacagccaacattaa

SEQ ID NO: 41699 - DNA, 510 bp, Neisseria meningitidis; identical to SEQ ID NO: 39512

SEQ ID NO: 41700 - DNA, 876 bp, Neisseria meningitidis
atgttacaaggtagcctggttgccctgattaccccgatgaatcaagacggcagcatccattacgaacaactccgcgatttgatcgactggcacattgaaaacggcacggacggcatcgtcgccgtcggcacgacaggcgaatccgccaccctctccgtcgaagaacacaccgccgtcatcgaagccgtcgtcaaacacgttgccaaacgcgtccccgtcatcgccggcacaggggcaaacaacaccgtcgaagccatcgccctttcccaagccgccgaaaaagccggggcggactacaccctctccgtcgtcccctattacaacaaaccttcgcaagaaggcatgtaccgccatttcaaagccgttgccgaagccgccgcgattccgatgatactctacaacgttcccggccgtaccgtcgtcagcatgactaacgacaccatcctgcgccttgccgaaatccccaacatcgtcggcgttaaagaagccagcggcaacgtcggcagcaacatcgaactcatcaaccgcgcccccgaaggcttcgtcgtcctgtccggcgacgaccacaccgccctaccgttcatgctctgcggcggacacggcgtgattaccgtagccgccaacgccgcgcccaagctctttgccgatatgtgccgcgccgcgcttcaaggcgatatcgcccttgcacgcgaactcaacgaccggctgattccgatttacgacaccatgttctgcgaacccagccccgccgcaccgaaatgggcggtatccgccctgggcagatgcgaaccgcacgtccgcctgccgctcgttccgctgacggaaggcggacaggcaaaagtccgcgccgccctgaaagcctcaggacaactttaa

SEQ ID NO: 41701 - DNA, 429 bp, Neisseria meningitidis
atggccattctgaaacttgacgaacacctctatatttctccgcaactgaccaaagccgatgcggaacaaatcgcgcaactgggcatcaaaaccgtcatctgcaaccgccccgaccgcgaagaagaatcgcaacccgacttcgcccaaatcaaacagtggctggaacaagcaggcgttactggattccatcaccaacccgttaccgcacgcgacatccaaaaacacgatgtcgaaaccttccgccaactcatcggacaagccgaatatcccgtccttgcctattgccggaccggtacgcgctgctccctcctgtggggcttccgccgggcggcagaaggtatgccggttgacgaaatcatccgccgcgcccaagcggcaggcgtaaatttggaaaacttcagagagcggctggacaacgcccgcgtctga

SEQ ID NO: 41702 - DNA, 804 bp, Neisseria meningitidis
atgaaaaaaattcttttaacggtttcattaggtttggcactgagtgcctgtgccactcaaggtacggtcgataaagatgctcagattacccaagattggagtgtggagaagctctatgccgaagcccaggacgaattgaacagcagcaattatacgcgggctgtcaagttatacgaaatcttggaatcgcgcttccccaccagccgccatgcccggcaatcccaactggataccgcatacgcctattataaagacgatgaaaaagacaaggctctggcggcaatcgaacgcttccgccgcctccatccgcagcatccgaatatggattacgcgctgtatctgcgcggcttggtgctgttcaacgaagaccagtccttcttgaacaaactggcctcgcaagactggtccgaccgcgacccgaaagccaaccgcgaagcgtatcaggcctttgcggaactcgtccaacgcttcccgaacagcaaatacgccgccgatgcaaccgcacgcatggtcaaactggtcgatgcactgggcggcaatgaaatgtcggtggcgcgttactacatgaaacgcggcgcatatatcgccgccgccaaccgcgcccaaaaaattatcggcagctatcaaaatacacgctatgtcgaagaatcactcgccatattggaacttgcctaccaaaaactcggcaaaccgcagcttgccgccgatacgcgccgcgtgttggaaaccaacttcccgaaaagcccgtttttgacgcacgcctggcagcccgacgatatgccctggtggcgttactggcattaa

SEQ ID NO: 41703 - DNA, 525 bp, Neisseria meningitidis
gtgtttggcaatcatggcttgggcggtttgccggaagaaggtgctcatggaaaatcccctaaatgtcatggtgggaatttagggaatttagggaattttggggaattttgcaaaggtctcggaaaatatgttaaggaagttacagtcgcaaacggcgtcgttaccgccacaatgctttcaagcggcgtaaacaaagaaatccaaggcaaaaaactctccctgtgggccaagcgtcaagacggttcggtaaaatggttctgcggacagccggttgagcgcgacaaagccgacaaagccgacgacggcgttaccgccgccaacgacaagcagatcgacaccaagcacctgccgtcaacctgctgcgacgcttcatctgccgtttgcatagaaacaccacgcgccgacttcaaacacttccaaaaaatcagccgtcaccgagtattacctgaatcacggcatatggcccggcgacaacaattctgccggcgtggcatcttcttcaacaatcaaaggaaaatatgttaa

SEQ ID NO: 41704 - DNA, 1212 bp, Neisseria meningitidis
atgaaccaactgaaacttgccgtttccggcgcgcagattttatttgtggcattcggcgcaatggtgctggttcccctgctgaccggtctgaatccggctcttgcgcttttgggcgcaggcttgggaacgctgctgttccaaatcacaaccaaacgcaaagtgccgatttttcttggttcttcgtttgcctttatcgcaccgattatctactccgtcggcgaatgggggctgccttccaccatgttcggactgtttgccgccggctttatgtattttgtgtttgccgcgctgatccgttggcgcggactggcagcggtacacaaactgctgcctccggtcgtcatcggccccgtcatcatggtcatcggtctgtctgttgccgtggcggcaagcagcatggcaatgggtcaggcggacggcaaacaggtcatcgactataccgattcgctgattctttccggctttacctttgccgttaccgccatcgtatcggttttcggcagcaggatgatgaagctgattcccatcttgatcggtgtcgcttcgggttatgttttggcactgctgatgggactggtggacacggcaagcattgcacacgcgccctggttcgccgttccccattttgaaacgcctcagatcaactggcaggctgcactgtttatgctgcccgttgccgtcgcccccgccatcgaacacatcggcggcatcatggcaatcggcaatgtgacggggaaagactatacgaaagacccgggcttggacaaaacccttgcgggcgacggtttgggcgtgtgcgttgccggtctgatcggcggcccgccggttacgacctacggcgaagtaacgggtgcggtgatgattaccaaaaacagtaaccctgtcatcatgacttgggcggcggtttttgccgtctgcatggcgtttttcggcaaattcaatgcgtttttggcttccattccgatgcccgtgatgggtggcattatgctgctgctgttcggcacgattgcttctttgggcgtgaaaacgctgattgatgccaaagtcgatttgatgctgccgaaaaacctggtcatcgtcagctcggtactgaccacgggcatcggcggcatgacgctcaaattgggcagcttcagctttgccggcgtgggcttgtgcgccgtacttgccattgtgttgaacagcctgctgcccgatccgaaagaatcctga

SEQ ID NO: 41705 - DNA, 3963 bp, Neisseria meningitidis
atgtctgtcgttttgcccttgcgcggcgttaccgccctttccgatttccgtgtcgaaaaactcttgcaaaaagccgccgcactcggactgcccgaagtcaaattaagcagcgaattttggtatttcgccggcagcgagaaagcattggatgccgcgactgtcgaaaaactgcaagccttgttggcggcgcaaagcgttgaacaaacgccaaaagcgcgcgagggcttgcatttgtttttggtaacgccccgtttgggtacgatttcgccgtgggcttccaaggcgaccaatatcgcggaaaactgcggtttggcaggcatcgagcgcatcgagcgcggcatggcggtgtggctggaaggtgcgcttaccgatgaacagaaacggcaatgggcggcgttgctgcacgaccgcatgaccgaatcggtgctgcccgattttcagacggcatccaaattattccaccatctcgaatccgaaaccttttccaccgttgatgttttaggcggcggtaaagaggctttggtcaaagccaataccgaaatgggtttggcactctccgccgacgaaatcgattatctggttgaaaactatcaggctttgcagcgcaatccgtccgatgtggaactgatgatgttcgcgcaggcaaacagcgaacactgccgccacaaaatcttcaacgccgatttcatcctcaacggcgaaaaacaaccgaaatccctgttcggcatgatacgcgacacgcacaacgcgcatcccgaaggtacggtcgtcgcctataaagacaattcgtccgtgatcgaaggcgcgaaaatcgagcgtttctatccgaatgcggcggaaaaccaaggctaccgtttccacgaggaagacacgcatatcatcatgaaagtggaaacgcacaaccacccgaccgccatcgcgccgtttgcaggcgcggcaacgggcgcgggcggcgaaatccgcgacgaaggcgcaacgggcaaaggttcgcgtccgaaagcaggcttgaccggctttaccgtgtccaacctcaacatccccggcctcaaacagccgtgggaacaagattacggcaagccggaacatatttcctcgccgctggacatcatgatcgaaggtccgatcggcggcgcggcgttcaacaacgaattcggccgccccaacctcttgggctacttccgcacttttgaagagaagtttgacggtcaggttcgcggctaccacaaaccgattatgattgccggcggcttgggcagcattcaggcgcagcagacgcataaagacgaaatccccgaaggcgcgttgctgatccaactgggcggcccgggcatgcttatcggcttgggcggcggcgcggcttcttcgatggataccggcacgaacgacgcgtctttagacttcaattccgtacaacgcggcaaccccgaaatcgaacgccgcgcgcaggaagtcatcgaccgctgctggcagctcggcggcaaaaacccgattatctccatccacgacgtgggcgcgggcggtttgtccaacgccttccccgaactcgtcaacgatgccggacgcggcgcggtattcaagctgcgcgaagtgccgttggaagaacacggtttaacgcctttgcaaatctggtgtaacgaatcgcaagagcgttatgtgttgtcgattttggaaaaagatttggacaccttccgcgccatctgcgaacgcgaacgctgcccgtttgccgtggtcggcacggcgaccgacgacggccatttgaaagtgcgcgacgatttgttcgccaacaaccccgtcgatttgccgctgaacgtcttgctcggcaaaccgcccaaaaccacgcgtaccgacaaaacggttacgccgtccaaaaaaccgtttcacgccgacgatatcgacatcaccgaagccgcctaccgcgttttgcgcctgcctgccgtagccgccaaaaacttcctgattaccatcggcgaccgcagcgtcggcggcatgacccaccgcgaccaaatggtcggcaaataccaaacccccgtagccgactgcgccgttaccatgatgggcttcaatacctatcgcggcgaagcaatgtctatgggcgaaaaaccgaccgttgccctgtttgacgcgcccgcctcgggcagaatgtgcgtcggcgaagccatcaccaacatcgcggcggtcaacatcggcgacatcggcaacatcaaactttccgccaactggatggcggcgtgcggcaatgagggcgaagacgaaaaactctactgcaccgtcgaagcggtctccaaagcctgtcaggcattggatttgagcattcccgtaggcaaagacagcctgtcgatgaaaaccgtgtggcaggacggtgaagagaaaaaatccgttgtttcgccgttgagcctgattatctccgcgtttgcgccggtggaagacgtacgcaagactgttacgcccgaattgaaaaacgttgaagacagcgtattgctgtttgtcgatttgggcttcggcaaagcgcgtatgggcggctcggcgttcggtcaggcttacaacaacatgaccggcgatgcgcctgatttggacgatacaggccgtctgaaagcgttttacaacgtggttcaacagcttgtcgccgaagacaaacttttggcgtatcacgaccgcagcgacggcggcttgtttgccgttttggtagaaatggcgtttgcggggcggtgcggcttggatatagatttaaatttattgcttgcacaaacatttattaccaaccataccgctctgtctcaatcattgcggactgaagaggtaaaagcgttggctgaatggcaagaaaccattgcccgcacattatttaatgaagagttgggtgctgttatccaagttagaaaacaagatgttgccgatattatcaatttattctatcaacaacagctgcatcataatgtctttgaaatcggtacgttaactgatgagaacacgttaatcatccgcgacgggcaaacgcaccttatttctgacaacctaatcaaactgcaacaaacctggcaagaaaccagccatcaaatccaacgcctgcgcgacaaccctgcctgcgccgacagcgagttcgcactgattggcgacaacgaccgcagcgcattgtttgccgacgtgaaattcgacgtgaacgaagacatcgccgcgccgtttatcaacagcggcgcgaaacccaaaatcgccatcctgcgcgaacagggcgtaaacgggcaaatcgaaatggccgccgcctttacccgcgccggtttcgatgcttacgacgtgcatatgtccgacctgatggcaggccgcttccgccttgccgacttcaaaatgctggcggcgtgcggcggcttcagctacggcgacgtactcggcgcgggcgaaggctgggcgaaatcgattctgttccaccctgctctgcgcgaccagtttgccgcattcttcgccgacccggacacgctgacattgggcgtgtgcaacggctgccaaatggtcagcaaccttgccgaaatcatccccggcacggcaggctggccgaagttcaaacgcaacctgagcgaacagtttgaagcgcgcctgagcatggttcatgtccccaaatccgcgtcgctgattctgaacgaaatgcaaggctccagcctgcccgtcgtcgtcagccacggcgaaggccgcgccgacttcgcgcttcacggcggcaatatttccgccgatttgggcatcgcgctgcaatatgtggacggtcaaaaccaggttacccaaacctatccgctcaaccccaacggctcgccgcaaggcatcgccggcattaccaacgccgacggccgcgtgaccatcatgatgccccaccccgaacgcgtgtaccgcgccgcacaaatgagctggaaaccggaaggctggacggaactgtccggctggtaccgcctctttgccggcgcacgtaaagccttgggctaa

SEQ ID NO: 41706 - DNA, 1527 bp, Neisseria meningitidis
atgaatcccatgtacattacttttgcaatctatctggttgcagtccttctcatcgggcttgccgcctatttttctacgcgcaatttcgacgattatattttgggcgggcgcagcctaggcccgtttgttaccgcgatgtcggcaggcgcgtccgatatgtccggctggctgctgatgggtctgccgggcgcgatttatttgagcggtttgaatgaggcttggattgccatcggcctcttggtcggcgcgtatttcaactggctcttggtggcgggccgcctgcgcgtgcataccgaatacgccaacaatgcgctgacgctgccggattatttcttccaccgcttcggcgcgggcggacacttgatgaaagtggtttccgcactgattatcctgttcttcttcacgatttattgcgcctcgggcattgtggcgggcgcaaccctgttccaaagcctgtttgaaggtatgacttacaatcaggcaatgtggctgggcgcgggcgcgaccatcgcctataccttcttgggcggtttcttggcggtcagctggacggatacgctgcaggcttctttgatgattttcgccctgattttaacgccggtgatggtctatctgggcttgggcggcgcggaacagatgtctgccgcgattcaaagcgtcgccgcaggcacgggcaaagaatacggcagcctgtttgccggtacgaccgtcatcggcatcatttccaccgccgcatggggcttgggctatttcggacagccgcacattttggcgcgctttatggcggccgaaagcgcgaaatcgctggtatccgcacgccgcatcggcatgacttggatggcgttgtgccttgcgggcgcggtggcggtcggttatttcggcattgcgtatttcggtgcaaatcccgacaaagtttcttctatgagcggcaaccacgaacgcatcttcatcgcgctttccaccctgctgttcaacccttggatcgccggcatcattttgagcgcgattttggcggcggtgatgtccaccctgtcctgccagcttttggtttgctccagcgcgattaccgaagacttctacaaaggctttttgcgtaaaaacgcgcaacagtcggaactggtatgggtcggccgcctgatggtcttggcgattgccgtgatttccatcctgattgcttccgatccgaacagcaaagtattgggactggtgtcttatgcgtgggcaggtttcggtgcggcgttcggcccgattgtgattctgtccgtattgtggaaacgcatcactgcctacggcgcgttgtcgggtatggttgcaggtgccttaaccgtagtcgtatgggcggaatggataaaaaaaccggctcaagcagcaggcgaaagcggcttgttgacgatgtacgaaatcgtcccgggctttattgtttgcttaatcattgccgtgttggtttccctgttcaacaaagaaccttcgcgcgaaatccaagaacgctttgaaaaagccgacgcagattaccgcgccgcccgataa

SEQ ID NO: 41707 - DNA, 339 bp, Neisseria meningitidis; identical to SEQ ID NO: 37943

SEQ ID NO: 41708 - DNA, 966 bp, Neisseria meningitidis
atgttacgtttgactgctttagccgtatgcaccgccctcgctttgggcgcgtgttcgccgcaaaattccgactctgccccacaagccaaagaacaggcggtttccgccgcacaaaccgaaggcgcgtccctgaccgtcaaaaccgcgcgcggcgatgttcaaataccgcaaaaccccgaacgtatcgccgtttacgatttgggtatgctcgacaccttgagcaaactgggcgtgaaaaccggtttgtccgtcgataaaaaccgcctgccgtatttagaggaatatttcaaaacgacaaaacctgccggaactttgttcgagccggattacgaaaccttaaatgcctacaagccgcagctcatcatcatcggcagccgcgccgccaaggcgtttgacaaattgaatgaaatcgcgccgaccatcgaaatgaccgccgataccgccaacctcaaagaaagtgccaaagagcgtatcgacgcgctggcgcaaatcttcggcaaacaggcggaagccgacaagctgaaggcggaaatcgacgcgtcttttgaagccgcgaaaactgccgcgcaaggcaaaggcaaaggtttggtgattttggtcaacggcggcaagatgtcggctttcggcccgtcttcacgactgggcggctggctgcacaaagacatcggcgttcccgctgtcgatgaatcaattaaagaaggcagccacggtcagcctatcagctttgaatacctgaaagagaaaaatcccgactggctgttcgtccttgaccgcagcgcggccatcggcgaagagggtcaggcggcgaaagacgtgttggataatccgctggttgccgaaacaaccgcctggaaaaaaggacaggtcgtttacctcgttcccgaaacttatttggcggccggcggcgcgcaagagctgctgaatgcaagcaaacaggttgccgacgcttttaacgcggcaaaataa

SEQ ID NO: 41709 - DNA, 912 bp, Neisseria meningitidis
atggacaccctgttcagcctcaaggttttccgccaagtcgtccaaagcggcggcttcacccgcgccgccgacgcgctcggcatctccaccgcaatggcaagcaaacacgtcagccacttggaaaacaccgtccaagccaaactcctgcaccgcaacagccgcaacctcagcctgaccggagccggggaagaatactaccggcaatgcagttacgcgctcgacacgctcgacgatgccgcgcaaaaagccgccggagggacggaaaaaccgcaggggctgctgcgcgtaacgatgccgctgtggtttgccggcagccagatatgcaactggctggcggaataccgcgaacgttatcccgaagtggcattagaactgattttggacaaccgccacgtcgatttgattgccgaaggcgtggatttggcgttgcgcgtttcccaaaccctgtccccgtcgctgattgcgcgcccactggcggaaatcgaatttgccctgctcgcctcgcccgatttcctgaggcgcaacggcgtgccggaaacgccggaagaagtggcggggctgcccgccgtcctgccgacctacaccaaccagcagaaactcgacctcacccgcaaatcggacggcaaaaaataccggcttgaactgacccccgtcatccgtaccgacaacacgctgatgatgcgcgaaatgattaaggcgggcgcgtgcatcggttatcagccgctttgggcggcggaacacgatttgcgctgcggctcgctggtgaggctgctgcccgaatataccgtcccgaccgaccgcctgaatgccgtttatgcggacagggcgttcttaagcgcgaaagtccgcagcttcatcgattttctgaacgaaaaaatcgccagcaggaaaggctgccgaaatgccgtctga

SEQ ID NO: 41710 - DNA, 1038 bp, Neisseria meningitidis
atgccgtttctcaaccataggcgacaactggacatattgatgaagattgcgatttacggtacgaaaagttatgaccgcgaacattttacccgcgccaaccggcatttcggcttcgagctggagttttttgattttatgctggatgtgaaaacggcgaaaatggcggaaggtgcggaggcggtctgtatttttgtaaacgacgacggcagccggcccgtgttggaaaaattggcgcaaattggcgtgaaaactgtggcgttgcgttgtgccggcttcaataatgtggatttaaaggcggctgaagagttgggcttgaaagtcgtgcgcgtgcctgcctattcgcccgaatcggttgcggaacatacggtcggtctgatgctgacgttgaaccgccgtatccacaaagcctatcagcgtacccgcgatgcgaatttttcgctggaaggtctgaccggtttcaatatgtacggcaaaacggcgggcgttatcggcacggggaaaatcggtattgcaaccatgcggattttaaagggtttcggcatgaacctgctggcttacgatccgttttgcaaccccgaagcggaaaaaatcggcggcaggtatgtggagttgaacgagctgtatgcccagtcggacatcatcacgctgcattgcccctccacgccggaaaaccactatatgctgaacgaagcggcgttcgacaaaatgaaagacggcgtgatgattatcaacaccagccggggcgggctgattgacagtgccgccgcgattgaggcgttgaaacgccggaaaatcggcgcattgggtatggacgtgtacgagaacgaacgcgaattgttttttgaagacaaatccaacgatgtgattaccgacgacgtgttccgccgcctgtcgtcttgtcataacgtgctgtttaccggacatcaggcgtttttgacggaagaggcgttgggtaatatttcggaagttacgctgtccaatatccgcgaggtcggacagaccagcgattgcggcaatgcggttcgtgccgacggctga

SEQ ID NO: 41711 - DNA, 2292 bp, Neisseria meningitidis
atgcttgcacccgaattggaacagattttgcagcagctttaccgcgaggcgcgtaaggctcattatgaatttatcagcctcgagcatctgcttttggtactcatcgaagaagatgcctccgtgccgaacgtcttaaaactctgcggcgcggatttgaaagtggtgtccgaacagctcgccgccagcgttgccgaaaacacccccctgattcccgaacaccttttagacacggtcgaaacacggcccacgctcggcttccaacgcgtgatgcaacgggcgatggtgcatacccagtctgccggaaaagccgcagtcgaaccgttggacgttttagtcgcgctgatgagcgaaaccgacagccacaccgtctatttcctcaagctgcaatcggttacgcgttttgaagttttgcgctgtattgcccacggctctcccgatgaagatgaagacgatggcaactattcttcagacggcatggacgacgataatgagaaccgcaccaaaccgggcaaaaaccctttatcggcgtacaccgtcaacctcaacgccgaagtcaaagccggccgtatcgaccctttgattggtcgcaaacacgaaatggaacggctggtgcaaatcctatgccgccgccgcaaaaacaatccgcttttggtcggcgaagcaggcgtgggcaaaaccgcgctggcggaaggtttggcacatcaaatcgtcaacggcggcattccagacgcgcttaaagatgccgaagtgtacgcgctggatatgggctcgctgttggcgggcacgaaataccgtggcgactttgaagcgcgggtcaaatccgtcttgaaacagctcgaaaaaatcccgcacgccattttgtttatcgacgaaatccacaccatcatcggcgcaggcagcaccagcggcggcaccatggacgcgtccaacctgctcaaacccgcgctggcaaaaggttcgctgcgctgcatcggcgcaaccacctacgacgaataccgcaccattttcgacaaagaccatgccttaagccgccgcttccaaaaaatcgacgtggtcgaacccaccgtttccgaaaccgtacaaatcctgcgcggcttgaagccgatgtttgaagccttccaccaagtccgctatacgcaaggcgcactcgaagccgccgccgaactctcctcacgctacatcaacgagcgtttcctgcccgacaaagccatcgacgtgatggacgaagcaggcgcggcgcaacggattctgcccaaatccaaacagaaaaaagtcatcggcaaagcgcaaatcgaaaccgtcatcgccaaagtcgcgcggattccagaaaaaaccgtgtcgcacgacgacaaacaggtgctgcaattcctcggccgcgatttgaaaaacatggtttacggtcaggaaaatgccatcgacgcgctggttgccgccgtcaaaatgtcgcgttcgggcttgggactgcccgacaaaccgataggcagcttcctcttctccggcccgaccggcgtgggcaaaaccgaagccgccaaacagcttgcctactcgatgggcgtaccgctgcaacgctttgatatgtccgaatacatggaacgccacgccgtatcacgactcatcggcgcgccgccgggctacgtcggctttgaacaaggcggccttttgaccgaagccgtcaacaaacagccgcattgcgtgttgctcttggacgaaatcgaaaaagcccaccccgacattttcaacgtcctcctgcaagttatggacgcaggcaaactgaccgacaacaacggcaagagtgccgatttccgcaacgtcattctgattatgaccaccaacgcgggcgcggaaagcctcagccgccccagcctcggctttaccgccaagcgcgaacgcggcgacgaaatgcaggcaatcaacaagctcttcacgcccgagttccgcaaccgcttggacgcgattatcccgtttgcacccttgtccgaacccatcatcgtcaaagtcgtggacaaattcctgctccagctcgaacaccagctcctcgacaaaaaagtcgaagccgaattcacgccggcattgcacaaatatctggcggaaaaaggttttgacccgcaaatgggcgcgcgcccgatgcaccgcctgattcaggaaaaaatccgcaaaccgctcgccgacgaactcctgttcggcaaacttaccgacggcggcttcgtgcggatagactgggatgcggcaaaagaagaagccgtgttgaagtttaagaaaagcaaggtcaaaataaaaaccgcctccgcataa

SEQ ID NO: 41712 - DNA, 1194 bp, Neisseria meningitidis
atgtctaatcaaaaaaaccgcagaaatgccttaatcggcgctgcattcctgatggcgacttccgccatcggcccgggctttctgacccaaaccgccaccttcacccaagcactggcggcaagtttcggctttgtgattctgctctcgattctgctcgacatcggggcgcagctcaatatttggcggattgtcgccgtttccgaaaaacaggcgcaggatattgccaatcaggtcttgcccggcgcaggctatttcttggctgtgctgattgtgatgggcggtttggcgttcaatattggcaacgtcggcggcgcaggcttgggtctgaacctgctgaccggactgtcgccggaaaccggtgccgtgatcagcggcgtgattgccatcggtgtgtttctgtttaaagaagcaggcaaagtgatggacaaattcgcccaagtgatgggtttcgtaatgattgcgctgacggtttatgtggcatggcaggcgaatccgccgctggcagatgccgccgtgcatacctttatgccggaaaaactcgatgcaatggcgattgttacactggtgggcggcacggtcggcggctacatcaccttcgccggtgcgcaccgtctgctggacgcaggcatcaaaggcaaatcggcgttgccggaagtgagccaaagctcggtgcgggcgatcctgattgcctcgattatgcggattgtattgtttttggcggttttgggcgtggtcagccaaggcgtacagctcaatcccgacaaccctgcttccacaccgtttgaatatgcggcgggatacatcggcctgctgattttcggcgtggtgatttgggcggcttcgattacttcggtgattggtgcggcttatacttcggtgtcgttcttctccggtctcagcccgtctatcgaacgcaataaaaacaaatggattattgcctttatcgccgtgtccaccgccgtattttccaccatcggcaaaccggcgcaggtgctggtgttcgtaggcgcattaaacggcctgattttaccgatttccctcggtctgattctgattgccgcctacaaaaccaaaattgtcggcgactacaaacacccgctgtggctcaccgtttccggcgtgattgtggtcggtttgatggcagtactcagcgccatcaccatcagcaaatatatcggcggcttgttcggctga

SEQ ID NO: 41713 - DNA, 1419 bp, Neisseria meningitidis
atgtctattaaaaacgccgtaaaattgattgaagaaagcgaagcccgctttgtcgatttgcgctttaccgataccaaaggcaagcagcaccactttaccgtgcctgcgcgcatcgtgttggaagaccccgaagagtggtttgaaaacggtcaggcgtttgacggttcgtctatcggcggctggaaaggcattcaggcttccgatatgcagttgcgccccgatgcgtctacagccttcgtcgatcctttttatgatgatgcgactgttgtgttgacttgcgacgttatcgatcccgccgacggtcagggttacgaccgcgacccgcgctccatcgcacgccgcgccgaggcctatttgaaatcttccggcatcggcgacacggcatacttcggccccgagcctgaattcttcgtcttcgacggcgtagaatttgaaaccgacatgcacaaaacccgttacgaaatcacttccgaaagcggcgcatgggcaagcggcctgcacatggacggtcaaaacaccggccaccgccctgccgtcaaaggcggttacgcgcccgttgctccgattgacgcgggacaagacctgcgctccgcgatggtaaacattttggaagaactcggcatcgaagtcgaagtccaccacagtgaagtcggtaccggcagccaaatggaaatcggcacgcgtttcgccaccttggtcaaacgcgccgaccaaacccaagacatgaaatatgtgattcaaaacgttgcccacaacttcggcaaaacagccacctttatgcccaaaccgattatgggcgacaacggcagcggtatgcacgttcaccaatccatttggaaagacggtcaaaacctgttcgcaggcgacggctatgccggcttgagcgacaccgcgctctactacatcggcggcatcatcaaacacgccaaagccttgaacgcgattaccaatccgtccaccaactcctacaaacgcctcgtgccgcactttgaagcgccgaccaaactggcatactccgccaaaaaccgttccgcttccatccgcattccgtctgtaaacagcagcaaggctcgccgcatcgaagcgcgtttccccgatccgaccgccaacccgtacttggcgttcgccgccctgctgatggctggtttggacggcattcaaaacaaaatccatccgggcgatcctgccgataaaaacctgtacgacctgccgccggaagaagacgcgctcgtcccgaccgtttgcgcttctttagaagaagccctcgccgcgctcaaagctgaccacgaattcctcctgcgcggcggcgtgttcagcaaagactggatcgacagctacatcgctttcaaagaagaagacgtacgccgcatccgcatggcacctcacccgctggaatttgaaatgtattacagcctgtaa

SEQ ID NO: 41714 - DNA, 1410 bp, Neisseria meningitidis
atgacagcacaaaccctctacgacaaactttggaacagccacgtcgtccgcgaagaagaagacggcaccgtcctgctctacatcgaccgccatttggtgcacgaagttaccagccctcaggcatttgaaggcttgaaaatggcggggcgcaagctgtggcgcatcgacagcgtcgtctccaccgccgaccacaacaccccgaccggcgattgggacaaaggcatccaagacccgatttccaagctgcaagtcgatactttggacaaaaacattaaagagtttggcgcactcgcctattttccgtttatggacaaaggtcagggcatcgtacacgttatgggccccgaacaaggcgcgaccctgcccggtatgaccgtcgtctgcggcgactcgcacacttccacccacggcgcattcggcgcactggcacacggcatcggcacttccgaagtcgagcacaccatggcaacccagtgtattaccgcgaaaaaatccaaatccatgctgattgccgttgacggcaaattaaaagcgggcgttaccgccaaagacgtggcactttacatcatcgggcaaatcggcacggcaggcggtacaggctacgccatcgagtttggcggcgaagccatccgcagcctttctatggaaggccgcatgactttatgcaatatggcgattgaggcaggcgcgcgctcaggcatggttgccgtcgaccaaaccaccatcgactatgtaaaagataaacccttcgcacctaaaggcgaagcatgggacaaagccgtcgagtactggcgcacgctggtgtctgacgaaggtgcggtattcgacaaagaataccgtttcaacgccgaagacatcgaaccgcaagtcacttggggtacctcgcctgaaatggttttagacatcagcagcaaagtgccgaatcctgccgaagaaaccgatccggtcaaacgcagcggtatggaacgcgcccttgaatacatgggcttggaagccggtacgccattaaacgaaatccccgtcgacatcgtattcatcggctcttgcaccaacagccgcatcgaagacttgcgcgaagccgccgccatcgccaaagaccgcaaaaaagccgccaacgtacagcgcgtgttaatcgtccccggctccggtttggttaaagaacaagccgaaaaagaaggcttggacaaaattttcatcgaagccggttttgaatggcgcgaaccgggctgttcgatgtgtctcgccatgaacgccgaccgcctgaccccggggcaacgctgcgcctccacctccaaccgcaattttgaaggccgtcaaggcaacggcggacgtacccacctcgtcagccccgctatggcagccgccgccgccgttaccggccgctttaccgacatccgcatgatggcgtaa

SEQ ID NO: 41715 - DNA, 267 bp, Neisseria meningitidis
atggcacgcatggtattctgcgtcaagctcaacaaagaagccgaaggcatgaaatttccgccgcttcccaacgaattgggcaagcgcatttttgaaaacgtatcgcaagaagcgtgggcggcgtggacgcgccaccaaacgatgctgattaacgaaaaccgtttaagcctcgccgatccgtgcgcgcgcgaatacctggctcagcagatggagcagtatttcttcggcgacggcgcggatgccgttcagggatacgttccgcaataa

SEQ ID NO: 41716 - DNA, 810 bp, Neisseria meningitidis
atgcccgatttttcgatgtccaatttggccgttgccttttccatcacattggctgccggtttgtttaccgtattaggcagtggcttggtgatgttttccaaaacgcccaatccgcgtgtgttgtcgtttggtttggcgtttgctggcggtgcgatggtatatgtttccctgacggagattttcagtaagtccagcgaggcgttcgctgaaatttatgataaagaccacgcgtttgcggcggcgaccatggcatttttggcagggatgggcggcattgcgctgattgaccgtctggtgccgaacccgcatgaaactttagacgcgcaagacccgtcgtttcaagaaagcaaacgccgccatatcgcgcgagtcggcatgatggcggcgtttgcgattactgcgcacaatttccccgaaggcttggcgacgttttttgccacattggaaaatccagcagtcgggatgcctttggccttggcgattgccatccataatattccggagggcatttccatcgccgcgccggtttattttgccacccgcagccgtaagaaaacggtgtgggcgtgtctgctatccggcttggccgagccgttgggggcggctttgggctatttggttttgcagccgtttttgtcgcctgccgtgtttggttcggtattcggcgtgatagccggtgtgatggtgtttttggcgttggacgagctgctgccggctgccaaacgctattcagacggccatgaaaccgtttacggcctgacaatgggcatggcggtgattgccgtcagcctggtattgttccatttttaa

SEQ ID NO: 41717 - DNA, 459 bp, Neisseria meningitidis
atgccgatggcaaaaccgctcaaataccccgtctccgcactggtcgtcctttatagcggggacggcggcatcctgctcatcgaacgcacgcatccgaaagggttttggcagtcggtaaccggcagcctcgaaccgggcgaaaccgtcgcccaaacggcaaagcgcgaagtttgggaagaaaccggcatcctgctagcggacgagcagctccaagaccgacacgacagcacggtttacgaaatctaccaccactggcggcaccgctatccaaaaggcgtgtttgaaaaccgcgaacacctcttctctgccgaaatcccgcgtgatacgcccatcgccctgcaacccgaagaacacgtctcctacggctggttcggcttggaagaagcggcggaaaaagtgttttccccgtccaacaggcgcgcgattctggaactgggcaggtttttgggcaaacggtaa

SEQ ID NO: 41718 - DNA, 660 bp, Neisseria meningitidis
atgaccccgcccaaactcatcatcttcgactgggacggcacgcttgccgacacgacccaacccatcatcgacaccatgcgccgcagcttcgccgaatgcggttttccgccgcccgaagcggagcgcgtccgcagcctgatcggctacagcctgcccgaaatcatccgcaccctgctcgaaatgccgtctgaaaccgccgttgccgacatcgcgcgcacttattccgcgcattacctcaatcccaacaaccgcaatatgacgctctttcccgatgccctgccctgtctggacaagctcaaagcacaaggatactggcttgccgtcgccacgggcaaagggcgggcgggtttggacaacgccatcagccaaaccgccaccggcagctattggctcgccaccgcctgcgtgggggaatatccctccaaaccctcgcccgaaatggtattcggactttgcggcgaactgggactcgacccgaaagaagcattggtcgtcggcgatacggcgcacgacctgcatatggcggcaaacgcaggcgcggcggcagtcggcgtggccaccggcgcacattcgcgcgaacagctccttggcgcaccgcatctcgccgtattggacggtttgtccgaactgcccggttttcttgcacagcattacgcctga

SEQ ID NO: 41719 - DNA, 351 bp, Neisseria meningitidis
atggaagccttcaaaaccctaatttggattgttaatataatttccgctttggccgtcatcgtgttagtattgctccaacacggcaaaggcgcggatgccggcgcgactttcggatcgggaagcggcagcgcgcaaggcgtattcggctctgccggcaacgctaacttcctcagccgctcgaccgccgttgcagcaacatttttctttgcaacctgcatggctatggtgtatattcacacccacacgacaaaacacggtttggacttcagcaacgtacaacaaactcagcaagcacccaaacccgtaagcaataccgaaccttctgcccctgttcctcagcagcagaaataa

SEQ ID NO: 41720 - DNA, 1008 bp, Neisseria meningitidis
atgagcaccttcttccggcaaaccgcccaagccatgattgccagacacatcgaccgcttcccactattgaagttggaccaggtgattgattggcaaccgatcgaacaatacctgaaccgtcaaagaacccgttacctccgagaccaccgcggccgtcccgcctatcccctgttgtccatgttcaaagccgtcctgctcggacaatggcacagcctctccgatcccgaactcgaacacagcctcatcacccgcatcgatttcaacctgttttgccgttttgacgaactgagcatccctgattacagcaccttatgccgctaccgcaattggctggcgcaagacgacaccctgtccgaattgctcaaactgatcaaccgacaactgaccgaaaaaggcctaaaagtagagaaagcatccgccgctgtcgttgacgccaccattattcagaccgccggcagcaaacagcgtcaggccatagaagtcgatgaagaaggacaaatcagcggccaaaccacaccgagtaaggacagcgatgcccgttggataaagaaaaacggcctctacaaactcggttacaaacaacatacccgtaccgatgcggaaggctatatcgagaaactgcacattacccccgccaatgcccatgagtgcaaacacctgccgccgttgttggaaggggtacctagaggtacgaccgtctatgccgacaaaggctacgacagtgcagaaaaccggcaacatctggaagaacatcagttgcaggacggcattatgcgcaaagcctgccgcaaccgcccgctgtcggaagtgcaaaccaaacgcaaccgatatttgtcgaagacccgttatgtggttgaacagagcttcggtacgctgcaccgtaaattccgctacgctcgggcagcctatttcggactgattaaagtgagtgcgcaaagccatctgaaggcgatgtgtttgaacctgttgaaagccgccaacaggctaagtgtgcctgtttgcgcctaa

SEQ ID NO: 41721 - DNA, 258 bp, Neisseria meningitidis
atggtattgttattaattgtaaataaatattggaaggtaaatgatatgaaaaatgaaattcaaaaaatcatggacaaatataatccatggcatgaagatgattttgagtcgtatgaagacattgccaaagatgtatcgctgatgacagataaaacgttcattgaacattatttgttagaagtttattcagaagaaaacggacattttgaccaagagaatatccatgcgatgataggggaaattaaaaatgcaatttag

SEQ ID NO: 41722 - DNA, 459 bp, Neisseria meningitidis; identical to SEQ ID NO: 38813

SEQ ID NO: 41723 - DNA, 1008 bp, Neisseria meningitidis
atgagcaccttcttccagcaaaccgcacaagccatgattgccaaacacatcgaccgtttcccgctattgaagttggaccaggtgattgattggcagccgatcgaacaatacctgaaccgtcaaaaaacccgttaccttagagaccaccgcggccgtcccgcctaccctctgctgtccatgttcaaagccgtcctgctcggacaatggcacagcctctccgatcccgaactcgaacacagcctcatcacccgcatcgatttcaacctgttttgccgttttgacgaactgagcatccctgattacagcaccttatgccgctaccgcaattggctggcgcaagacgacaccctgtccgaattgctcaaactgatcaaccgacaactgaccgaaaaaggcctaaaagtagagaaagcatccgccgccgtcgttgacgccaccattattcagaccgccggcagcaaacagcgtcaggccatagaagtcgatgaagaaggacaaatcagcggccaaaccacaccgagtaaggacaaagatgcccgttggataaagaaaaacggcctctacaaactcggttacaaacaacatacccgtaccgatgcggaaggctatatcgagaaactgcacattacccccgccaatgcccatgagtgcaaacacctgtcgccgttgttggaaggtctgcccaaaggtacgaccgtctatgccgataaaggctacgacagtgcggaaaaccggcaacatctggaagagcgtcagttgttggacggcattatgcgcaaagcctgccgcaaccgcccgctgtcggaaacgcaaaccaaacgtaaccggtatttgtcgaagacccgttatgtggtcgaacaaagcttcggtacgctgcaccgcaaattccgctatgcgcgggcagcctatttcggactgattaaagtgagtgcgcaaagccatctgaaggcgatgtgtttgaacctgttgaaagcggccaacaggctaagtgcgcccgctgccgcctaa

SEQ ID NO: 41724 - DNA, 714 bp, Neisseria meningitidis
atgaagatcaaattaccgctttttatcatttggctgtccgtatccgccgcctgttcttccgtttcacctgttccggcaggcagccaaaccgaaatgccgacacaggaaaatgcttcagacggcattccctatcccgttcccactctacaagaccgtttggacgatttggaaaacaggattatccgcctgtcgaacgaagtggaaaccttaaacggcaaagtcaaagcactggaacacgcaaaaacacacccttccggtagggcatacgtccaaaaactcgacgaccgcaagttgaaagagcattacctcaataccgaaggcggcagcgcatccgcacataccgtcgaaaccgcacaaaacctctacaatcaggcactcaaacactataaaagcggcaggttttctgccgcagccgccctgttgaaaggcgcggacggcggagatggcggtagcatcgcgcaacgcagtatgtacctgttgctgcaaagcagggcgcgtatgggcaactgcgaatccgtcatcgaaatcggagggcgttacgccaaccgtttcaaagacagcccaaccgcgcccgaagccatgttcaaaatcggcgaatgccaatacaggttgcagcagaaagacattgcaagggcaacttggcgcagcctgatacaggcttacccgagcagcccggcggcaaaacgcgccgccgcagccgtacgcaaacgatag

SEQ ID NO: 41725 - DNA, 246 bp, Neisseria meningitidis
atgctcaaatccatcgaactcaattcacacatccgcaaccggcttgctgaatatctgaaaagccgcggtttggattttcagacggcaatgcaggaagaagaaggcaacaaagaaatcgccgccatcgtccacagcggtttgcccactctggtccgcaaactgtattccgaacaaaaaatgcagaagtttttttgggaaaagcgggatttgattgccgactacatcagccaccggatgcagggatag

SEQ ID NO: 41726 - DNA, 1452 bp, Neisseria meningitidis
gtgaattatttccccattttcgccaacctcgccggccgccccgtattggtcgtaggcggcggcgcagtcgccgcacgcaaaatcagcctgctgctgaaggcgggcgcagaggtcagggttgccgcaaaacacctgaatgccgaactctccgcgttggcggcggaaaacaaaatcctgtggcttgccgaagaatttcgtgccgaacacatccgcacggttttcctcatcattgcggcaagcagcgaccaagccctcaaccggcgcgttttccatcttgccgaaagctgccaaaagccggtcaacgtggtggatgaccgcgaccattgcagcttcatcttcccatcggttatcgaccgcaacccggttcagattgccgtttccagctccggcagcgcgcccgtcctcgcccgactgctgcgtgaaaggctggaagccctgctgccgccgtctttgggcgatatggcggaaatttcaggaaggtggcgcgatgccgtcaagggcaaactgaaatccgttaccgaacgccgccgcttttgggaaaagcagtttaacggacgtttcgccaccctcgtcaaaaaccggcaaaacacccttgccgaacgggaattggcaggccaattggaacaaagtcgtcaaaatgatcaaggcggctccgtctcgctggtcggcgcgggtcccggcgatgcggggctgctgacgctcaaagggctgcaggaaatccagcaggcagacgtggtgctttacgacgcgctggtttcagacggcatactgtccctcgtccgccgcgatgcggaacggatttttgtcggcaagcgcgcccggggcggccgcaccccgcaagaggacaccaatgcgcttatggtcaggctggcccgcgaaggcaggcgcgtggtgcgtttgaaaggcggagaccctttcgtgttcggacgcggcggcgaagaattggaaaccttggcacgccatcagattccgttttcggtcgtccccggcattaccgccgccgtcggcgcgaccgcctatgccggcatcccgctcacgcaccgcgattatgcccaaagtgcggttttcgtaaccggccaccgcaaggcggatgcgcccgacatcgaatggcagacccttgcccgcagccgccagaccttggtgatttatatgggtgcgctcaaagccgccctgattgccgaacggctgcaacagcacggacgctcgcccgacacgccggcagccgttatcagccaaggcacgctgccggctcaaaaaaccgcaaccggcacgctcgccaaccttgccgaactcgccgaaaccgcgccgaatccggcattgattgtcataggcgaagtggtggggctgcacgaaaaactcgcctggttcggtgaaaacggcgaaggagaaaaccgggtcgggcaggcgtatcccgcattgggcggactgaatgccggacaacgggcggcataa

SEQ ID NO: 41727 - DNA, 1257 bp, Neisseria meningitidis
atgaacgccgcacaactcgaccataccgccaaagttttggctgaaacgctgactttcaaacagccttccgatgccgtcctctccgcctatttccgcgaacacaaaaagctcggccgccaagaccgccacgaaatcgccgaaaccgcctttgccgcgctgcgccactatcaaaaaatcagtaccgccctgcgctgtccgcacgcgcagccgcgcaaagccgcactcgccgcactggttctcggcagaagtaccaacatcagccaaatcaaagacctgcttgatgaagaagaaacagcgttcctcggcaatttgaaagcccgtaaaaccgagttttcagacggcctgaataccgccgcagaattgccgcaatggctggtggaacaactgcaacagcattggggcgaagaagaaatcctcgccttcggccgcagcatcaaccaacctgccccactcgacatccgcgtcaataccttgaaaggcaaacgcgataaagtgctgccattgttgcaagccgaaagtgccgatgcagaggcaacgccttattcgccttggggcatccgcctgaaaaacaaaatcgcgcttaacaaacacgaactgtttttggacggcacactggaagtccaagacgaaggcagccagctgcttgccttattggtgggcgcaaaacgcggcgaaatcattgtcgatttctgtgccggcgccggcggtaaaaccttggctatcggcgcgcaaatggcgaacaaaggcagaatctacgccttcgacattgccgaaaaacgccttgccaacctcaaaccgcgcatgacccgtgccggactgaccaacatccaccctgaacgcatcagcagcgaacacgatacccgtattgcccgactggcaggaaaagcagaccgtgtgttggtggacgcgccctgctccggcttaggcacactgcgccgcaatcccgacctcaaataccgccaatccgccgagaccgtcgccaaacttttggaacagcaacacagcatcctcgatgccgcctccaaactggtgaaaccacaaggccgtttggtttacgccacctgtagcgtgttgccggaagaaaacgagctgcaagtcgaacgtttcctgtccgaacatcccgaatttgaacccgtcaactgcgccgaactgctgcaaagcctgaagattgatttggataccggaaaatacctgcgcctcaactctggagaacaccaaaccgacggcttctttgccgctgtattgcaacgcaaataa

SEQ ID NO: 41728 - DNA, 1008 bp, Neisseria meningitidis
atgagcaccttcttccagcaaaccgcacaagccatgattgccaaacacatcgaccgtttcccgctattgaagttggaccaggtgattgattggcagccgatcgaacaatacctgaaccgtcaaaaaacccgttaccttagagaccaccgcggccgtcccgcctaccctctgctgtccatgttcaaagccgtcctgctcggacaatggcacagcctctccgatcccgaactcgaacacagcctcatcacccgcatcgatttcaacctgttttgccgttttgacgaactgagcatccctgattacagcaccttatgccgctaccgcaattggctggcgcaagacgacaccctgtccgaattgctcaaactgatcaaccgacaactgaccgaaaaaggcctaaaagtagagaaagcatccgccgccgtcgttgacgccaccattattcagaccgccggcagcaaacagcgtcaggccatagaagtcgatgaagaaggacaaatcagcggccaaaccacaccgagtaaggacaaagatgcccgttggataaagaaaaacggcctctacaaactcggttacaaacaacatacccgtaccgatgcggaaggctatatcgagaaactgcacattacccccgccaatgcccatgagtgcaaacacctgtcgccgttgttggaaggtctgcccaaaggtacgaccgtctatgccgataaaggctacgacagtgcggaaaaccggcaacatctggaagagcgtcagttgttggacggcattatgcgcaaagcctgccgcaaccgcccgctgtcggaaacgcaaaccaaacgtaaccggtatttgtcgaagacccgttatgtggtcgaacaaagcttcggtacgctgcaccgtaaattccgctacgcccgggcagcctatttcggactgattaaagtgagtgcgcaaagccatctgaaggcgatgtgtttgaacctgttgaaagccgccaacaggctaagtgcgcccgctgccgcctaa

SEQ ID NO: 41729 - DNA, 1518 bp, Neisseria meningitidis
atgttgtatttcagatacggctttttggttgtttggtgtgcggcaggtgtttctgccgcctatggggcggatgcgcccgcgattttggatgacaaggcattgttgcaggtgcagcggtcggtgtcggataagtgggcggaatcggattggaaagttgaaaatgatgccccgcgcgtggttgacggggattttttgttggcgcatccgaaaatgttggaacatagtttgcgcgacgcgctcaacggcaatcaggcggatttgatcgcttcgttggcggatttgtatgccaagctgccggattatgacgcggttttgtacggcagggcgcgggctttgctggcgaaattagcgggaaggccggcggaggcggtggcgcggtatcgggaactgcacggggaaaatgcggcagacgagcggattttgctggatttggcggcggcggagtttgacgatttccgactgaagtcggcagaaaggcattttgcggaggcggcaaaattggatttgccggcgccggttttggaaaatgtggggcgttttcggaaaaaaacggaggggctgacgggctggcgtttttcgggcggcatcagcccggcggtcaatagaaatgccaataatgccgcgccgcagtattgccggcaaaacggaggccggcagatatgcagtgtcagccgggcggagcgggcggcagggttgaattatgaaatcgaggcggaaaaactgacggcgttggcagataatcattatttgttgttccgttccaatatcggcggcacgagctattatttcagtaaaaaatcagcttatgatgacgggttcggcagggcgtatttgggttggcagtataaaaatgcgcggcagacggcggggattttgccgttttatcaggtgcagttgtcgggcagcgacggctttgatgcgaaaacaaaacgggtaaacaaccgccgcctgccgccgtatatgctggcgcacggagtcggcgtgcagctgtcccatacttaccgcccaaacccgggatggcaattttcggtcgcgctggaacattaccgccaacgctaccgcgaacaggatagggcggaatacaataacggccggcaggacgggttttatgtttcgttggcaaaacgtttgggtgaatcggcaactgtgttcggcggctggcagtttgtgcggtttgtgccgaaacgcgaaacggtgggcggcgcggtcaataatgccgcctaccagcgcaacggtgtttatgccggttgggcgcaggagtggcggcagttgggcggtttgaacagtcgggtttccgcgtcttatgcccgccgcaactataagggcgttgcggctttctcgacagaggcgcaacgcaaccgcgaatggaatgtctcgctggctttgagccacgacaagttgtcgtacaaaggtatcgtgccggcgttaaattatcgtttcggcaggacggaaagtaatgtgccgtatgcgaaacgccgcaacagcgaggtgtttgtgtcggcggattggcggttttga

SEQ ID NO: 41730 - DNA, 282 bp, Neisseria meningitidis
atgattcacgaagaaatctccgccatgcctatgggctatgaaaccttaatcggcgatatgggcagcgcactgtcaggcggacaaaaacaacgcatcgtattggcgcgggccttatattgcgaaccgaaaatcctatttttagatgcagcgaccagccatttggatattgccaatgaaaaagcagtcaatgcaaacttgaatggcttgtctatcataaaaattatggcggcacacagaaaggaaacggtggaatcagcagataggaaaatgtctttaggataa

SEQ ID NO: 41731 - DNA, 1311 bp, Neisseria meningitidis
gtgctgactttagatgcgtttgagcaatgcttgaaggattgttttcctcaaggtctgaatggaaaaaaaacagcggtggcattaagcggcggcttggattccgtcgttttgctgcatctgcttgtccgcgccgggaaaaaaggcagttttattccggatgcattgcatatccatcacggcttgagtccccgtgccgacgattgggcagatttctgccaaaactattgcgatatgctcggggtggggctggaaacggttaaggtctgcgtggaaaaaaacggtttgggcatcgaggcggcggcaaggcaaaagcgttatgccgcgtttgccgaaaaaggctttgacgttttggcgttggcgcaccacagggacgatcaaatcgaaacttttatgctggcggtcgcgcgcggcggcggtttgcgcgctttggcggctatgcccgccgtccgcccttttggggaaaaaggcatcatctggcggcccttgctgcctttttcgcgccaagatatatgggattatgcccaaaaacacggtttgccgaatatcgaggatgaaagcaataccgatacggcttatttgcgaaaccgcttccggcaccgtattttgcccgaactttcggcgcagattccccatttcgggcggcatgtactgaacaatgtccgcgctttgcaggaagatttggctttgttggacgaaatcatcggtcaggactgccgttgggtctgtgaggaaggcagtttcgatacggtgcgttggcaggcgttttccccacgccggaaaacccatattttgcggtattttttgaaggaaaacggcatccccatgccgaatcagaacgcacttgccgacattgaccgggttttgacggaggcaaaaaccggacgttggaacttgcaaggctttgaattgcatcattatgcaggcaggctgtttgtgttccgactggaaaaaacggataaactgcggtttttgaaagacaggcagataagcggaaatttaagggaaatattgacggggcagggatttgttttaaaacgtcatccgtttgggcttcctgagcatcttttggagcaggacggaattttgaggacggtagcggcatcggatacgttggctgtcggcggcatccataaggatgtgaaaaaaatccttcaggggaaacgggttttgcctgtcctgcgcccaatttggccgcttgttgccgacagcggaaaccgtccattggcgttggcaaactgttgtgcggatttccaatactcggtttcagacggcattttgcccgtccatcctgactttcccattttattttga

SEQ ID NO: 41732 - DNA, 3216 bp, Neisseria meningitidis
atgcccaaacgtaccgacctaaaatccatccttatcatcggcgccggccctatcgttatcggtcaggcctgcgaatttgactattcgggcgcacaggcctgcaaagccttgcgtgaagaaggctataaagtcattttggtgaattccaaccccgccacgattatgaccgaccctgaaatggcggatgttacctacatcgagccgattatgtggcagacggtggagaagattatcgccaaagagcggcccgatgcgattctgcccacgatgggcggccagaccgcgctgaactgtgcgctggatttggcgcgcaacggcgtgctggcgaaatacaacgtcgagttaatcggcgcgacagaagacgcgattgacaaggcggaagaccgtggccgctttaaagaagcgatggaaaaaatcggtttgtcttgcccgaaatcttttgtctgccacacgatgaacgaagccttggcggcgcaagaacaggtcggcttcccgacgctgattcgtccgtctttcacgatgggcggttcgggcggcggcattgcctacaataaagacgagtttttggcgatttgcgaacgcggtttcgatgcgtcgcccacgcatgagctgctgattgagcagtccgtgctcggctggaaagagtacgagatggaggtggtgcgcgataagaacgacaactgcatcatcatctgctcgattgaaaacttcgacccgatgggcgtgcataccggcgactccatcactgttgcgcctgcacaaacattgacggacaaagaataccaaatcatgcgcaacgcttcgttggcggtattgcgcgaaatcggcgtggatacgggcggctcgaacgtgcagtttgcggtgaaccctgaaaacggcgagatgattgtgattgagatgaacccgcgcgtgagccgttcttccgcgttggcttccaaggcgacgggcttcccgattgcgaaagtggcggcgaagctggctgtcggctttacgctggacgagttgcgcaacgacatcaccggcggccgcacgcccgcgtcgttcgagccttccatcgactatgtggtaaccaaaatcccgcgtttcgcgtttgaaaaattccctgccgcagacgaccgcctgaccacgcagatgaaatccgtgggcgaagtgatggcgatgggccgcacgattcaggaaagcttccaaaaagccctgcgcggcttggaaaccggcttgtgcggcttcaatccgagaagctccgacaaagcggaaatccgccgcgaactggcaaaccccggccccgaacgtatgctgtttgtggcagacgcgttccgcgcgggcttcacgctggaagaaatccacgaaatctgcgccatcgacccttggttcctggcgcaaatcgaagacttgatgaaggaagaaaaagcggtttcagacggcattttgagtgatttggatttcgccgccctacgccgtctgaaacgcaaaggcttctccgacaaacgcatcgcgcagcttttgggcgtaaaagaaaaagaagtgcgcgaacaccgctacgcgctgaagctgcatccggtttacaaacgcgttgacacctgcgccgccgagttcgccaccgaaaccgcctacctctattccacttacgaagaggaatgcgaagcgcgtccttccgaccgcaaaaaagtgatgattctcggcggcggcccgaaccgcatcggtcagggcatcgagtttgactactgctgcgttcacgccgcgctcgccctgcgcgaatccggttttgaaacgattatggtcaactgcaaccccgaaaccgtgtccaccgacttcgacaccagcgaccgcctgtatttcgagccgctgacgctggaagacgtgttggaaatcgtccgcaccgaaaacccgtggggcgtgattgtgcattacggcggccaaaccccgctcaaactcgccaacgcgctggttgaaaacggcgtaaacatcatcggcacatccgccgacagcatcgacgccgccgaagaccgcgaacgcttccaaaaagtgttgaacgacttaggtctgcgccaaccgcccaaccgcatcgcccacaacgaagaagaagccctcgtcaaagccgaagaaatcggttatccgctggtcgtgcgcccgtcttacgtcctcggcggacgcgcgatgcagattgttcactctgccgagcagttgcaaaaatatatgcgcgaagccgtgcaggtttccgaagacagccccgtgctgctcgacttcttcctgaacaacgcgattgaaatcgatgtggactgcgtttcagacggcaaagatgtggttatcggcggcatcatgcagcacgtcgaacaggcgggcatccactccggcgactccggctgctcgctgccgccctactcgctcagcgaagaaatccaagacgaaatccgccgccaaaccaaagcgatggcgtacgcgctgggcgtggtcggactgatgaacgtgcagtttgccgtgcaggacggcgtggtgttcgtattggaagtgaacccgcgcgccagccgtaccgtccccttcgtctccaaagccaccggcgtgccgctcgccaaagtcggcgcacgctgtatggcaggcatttccctgaaagaacaaggcgtggaaaaagaagttgtccccgatttctatgccgttaaagaagccgtgttcccattcatcaaattcccgggtgtggatacgattttgggaccggaaatgcgctccaccggcgaagtcatgggcgtgggcgcaagtttcggcgaagcctactacaaagcccaactcggcgcgggcgaacgcctcaacccgaccggcaaaatcttcctctccgtgcgcgaagaagacaaagaacgcgtcattaaaaccgctaaaaacttccaagttttaggctacggcatctgcgccacacgcggcacggcgcaatacctgaccgaacaggggctgattgtacaaaccatcaataaagtccccgaaggccgcccgcacatcggcgacgcgctgaaaaatggtgaaatcgcactggtcgtgaataccgtttccagcgatccgcaatccgtgtccgacagccacatcatccgccaaagcgcattgcagcaacgcgtgccgcaatacaccactactgccggcggcgaagcgatgagcgaaggtgcgaaaagccgcgaccatctgggcgtgtacagcgtccaagagctgcacggtcgtttgaaaaaccgcagctga

SEQ ID NO: 41733 - DNA, 2637 bp, Neisseria meningitidis
atgactatgcaagaacaatatcaacccgccgccatcgagcctgcggcgcagaaaaaatgggacgacgcccgtattttcaacgtctccgaagacgcttccaaacccaaatattattgcctctccatgttcccctatcccagcggcaagctgcatatggggcatgtgcgcaactacaccatcggcgatgtattgagccgcttcaaacttttaaacggcttcaacgtcatgcagcctatgggttgggacgcgttcggcatgccggcggaaaacgcggcgatgaaaaacaacgtcgcccctgccgcttggacgtacgataacatcgaatacatgaaaacccagctcaaaagcctgggttttgcgattgactgggaacgcgaagtcgctacctgcaaacccgaatactaccgttgggaacaatggctgtttaccaagctgtttgaaaaaggcatcgtctatcgcaaaaacggcacggtaaactgggacccggttgaccaaaccgtccttgctaacgagcaagtcatcgacggacgcggctggcgttccggcgcgttgatcgaaaaacgcgaaatcccgatgtattacttcaaaatcacggattacgccgaagagctgctcaacgacttggacaaactggaacactggccggaacaagtcaaaaccatgcagcgcaactggatcggcaaatctcgcggcatgaccgtgcgctttgctgtttcagacgacagcaaacaaggcttggaaggcgattacgcgaacttcctgcaagtttacaccacccgtcccgacacgctgatgggcgcgacttatgttgcagttgccgccgagcatccgctggcaaccgccgcagccgccgacaaacccgaattgcaggcatttatcgccgaatgcaaagcgggctccgttgccgaagccgatatggcgacgatggagaaaaaaggcgtgccgaccggccgctacgtcgtcaacccgctcaacggcgacaagctggaagtgtggattgccaactatgtattgtggggctacggcgacggcgcagtgatggctgttccggcgcatgacgaacgcgattttgagttcgccaccaaatacaatctgccgaaaaaacaagtcattgccgtcggcgacaacgcatttgacgaaaaccaatggcaagaatggtacggcgacaaagaaaacggcgtattggtcaacagcggcgacttggacggcttggattttcagacggcatttgatgccgttgccgccaagctgcaaaaccaaggcgcgggcgaaccgaaaacccaataccgcctgcgcgactggggcatttcgcgccaacgctactggggctgcccgattcccatcgtccattgcgaacaatgcggcgacgtccccgtccctgccgaccaattgccggtcgttttgcctgaaaacgtcgtacccgacggcatgggttcgccgctggcaaaaatgcccgagttttacgaaactgcctgcccatgctgcggcggcgcggcaaaacgcgaaaccgacaccatggacaccttcatggaatcgagctggtatttcttccgctatatgtcgccaaaattttcagacggcatggtcgatcctgccgccgcgaaatactggggcgcggtcgaccaatacatcggcggcatcgaacacgcgattttgcacctcttgtacgcgcgtttcttcaccaaactgatgcgcgacgaaggtctagtcaatgttgacgaaccgtttgaacgcctgctgacgcaaggcatggtcgtttgcgaaacctactaccgcgaaaacgacaaaggcggcaaagattggatcaaccccgccgatgtcgagctgacgttcgacgacaaaggccgccccatttccgccgtcctcaaagccgacgggctgcccgtcgtcatcagcggcacggaaaaaatgtccaagtccaaaaacaacggcgtcgatccgcaagagctgattaacgcctacggcgcggacaccgcccgcctgttcatgatgttcgccgcaccgcccgaacagtccctcgaatggagcgacagcggcgtcgaaggcgcgcaccgcttcctgcgtcgcttgtggcgtaccgtttacgaatacctgaaacaaggcgaagcagtcaaagcatttgcaggcagccaagacggtttgtctaaagaactcaaagacctgcgccacaaactgcattccaccatcgccaaagtcagcgacgactacggccgccgccaacagttcaacaccgccatcgccgccgtgatggaattgctcaaccaatacgacaaaaccgacaccggcggcgaacaaggccgcgccgtcgcccaagaagtattggaaaccgccgtacgcctgctgtggcccatcgtgccgcacatctgcgaaaccctgtggagcgaattgaacggtgcgaaactgtgggaagcaggctggccgacagtcgacgaagccgccttggtcaaatccgaaatcgaagtcatggttcaagtcaacggcaaactgcgcggtaaaatcaccgtcgccgccgacgcatccaaagccgacctcgaagccgccgcactcgccaccgaaggcgcggtgaaattcatggaaggcaaaccggcgaagaaaatcatcgtcgtacccggacgcttggtgaatatcgtcgtctaa

SEQ ID NO: 41734 - DNA, 936 bp, Neisseria meningitidis
atgaacccgaaaaaacttgttatcgccagccgcgaaagcctgcttgctatgtggcaggcaaagcatatccaaggccgtctgaaggctctgtatcccgattgcgaagtcgagattttgggcatgaccacgcgcggcgatcagattttggacaaaactttgtcaaaagtcggcggtaaaggcttgtttgtcaaagagttggaacaggctttatatgacgggcgcgccgatttggcggtgcattcgattaaggacgtgccgatggatttgcctgaaggtttcgcgcttgccgccatcggcgaacgcgccaatccgtttgacgcgtttgtgtccaaccaatacgcgcgtttggaagaaatgcccaaaggcgctgtcgtcggtacatccagcctgcgccgcgaagcccagttgcgcgcgcgctatccgcatttgcttatcaaacctttgcgcggcaatgtgcaaacccgtttgtccaaactcgataacggcgaatacgacgcaattattttggccgccgccggtttgcagcgtctgaaattggacggacgcatccgcatgattttgtcggaatccgacagcctgcctgccgccggacaaggcgcattgggtatcgaaattgccgcgcaccgcgaagatttgtatgaggttttaaaaccgctaaaccacgataccacacacgcctgcgttacggccgaacgagctttggcgcgcgctttgggcggaagctgccaagtgccgctggccgcatattgcacggaagaaaacggcttgctgaccttgcgcggactggtcggacaccccgacggttcggttgtgttgcaggcggacgcgcaagcctctgccgaatatgccgacgcgctcggacgcgctgtcgctaagaaattggcggacgacggtgcgcgggaattgattggagcagtattgaatacggaaaattga

SEQ ID NO: 41735 - DNA, 786 bp, Neisseria meningitidis
gtgaaacacatcagttcgaccaataatgaacacatccggcacctgcaccgcctgttgtcgcaaggaaagttcagacggcaatacgcccaaaccgttttggagggcgtgcacctgcttcaggttttcctgcaatccggcagaaaaccggtcggggtatatattcccgaagctaaaatgccgtctgaagaagtccgtaaattgacagcagttttgccggaagacaggattttttccgtttcagacggcatattgaaaaaaatcagtagcttgagttgtgcagacgatatacttgcactgattgatatcccattgggcggaaccttgccggacaaaggcgactgtgtggttttggacggcgtgcaagatccgggcaatgtcggcaccgtcttacggagtgcggcggcggcaggggtaggtacggtcgttttgggcaggggttgcgcggacgcgtggtcgcccaaggtattgcgcgcggggatgggcgcgcatttcttgtcgggcatttatccgcaggcggatttggaaatatggttggcgcgctataaaggccgtgtgtttgccaccgccttgcgcgaggaaaagcaggcggttttgtacggcgaagatttgtgcggaccgacagcctgggtgtttggcaacgaaggcgcgggggtcggtaaagcggttttggacagggcggacaagtatgtcaggattccgatgcacgatgcaaccgagtctttaaatgtcgcgatggcggcgacaatctgcctgtttgaacagatgcggcagcggtcggcgtattga

SEQ ID NO: 41736 - DNA, 1332 bp, Neisseria meningitidis
atgccgtctgaaaatacacctgataaagtaaacataatgattcgtcctgattttcaagaatatctgccttcttattattttagttcggttaatcctcatactgtttatccgaaacttcaatgccgtctgaaaaccgatacctgtatcatcggcggcggattgagtggtttgtgcactgcattgcccttggcggagcagggacatgaaacggttgtgttggaagccgcgcgtatcggcttcggcgcgtccggcaggagcggcggtcaggttatcagcgactacgcctgcggtatggaggaaattgaaaaacaggttggtttggagcgggcgcaatggttttggcaacagtctttgcaggcggtcgaactggtggacgaacgcgtccgcaaacatgccgtcgattgtgattggcagcgcggttatgccacggttgccgtccgtccgcagcattgggaagagttgcagcagtggcatgaacacgcccaacggcattacggtgcgagtcattatcaactttgggataaagccgagttgaaacagcagcttgacagcgatatgtaccaaggggcacaattcgaccccttatccggacacctgcatccgctcaattacactttgggcatcgctcgtgccgctgccgaagccggtgcgcagattttcgagcaatccccgatgacgcgcatcgaaccgcatcaaaacggttggctggtttacacgcccgaaggcagcgtcgaatgcaaaaatctggtgtacgccgtcaatacctatgccggtttgagtccgatatttaagcctttggaacgcaaggcgattgccgtcagcacctttattattgccaccgaacccttgggggcgcgcgcaaaagggcttatccgcaacaatatggcagtatgcgacaaccgccatattttggactattaccgcctcagtgcggacggcagattgcttttcggcggtaaagaccatgaatttatcgacgatcccgcgcgtatgaccgaacttgtccgccaagatatgcttaaagtttttccgcagcttgccgatgttagaatcgaatattcgtggggcggggagtgcgacattaccgccaaccttgtcccgcatttcggacgtttggccgcgaatgttttttatgcgcaaggttattccggacacgggatggcgataacaggcattgcaggtctggcggttgccgaagcaattttaggggacgaatgccgtctgaagccgtttgagcggttgcgccagccgaatattatcctgcaaccgtttttgcgcaaactcggttctttcctcggctcgaaatattatcagtggaaagacagccgttaa

SEQ ID NO: 41737 - DNA, 441 bp, Neisseria meningitidis
atggatgtgaaatatgaatttaccctgccttcgagcagcggtgcggattttcattcggcagaacatctgcctttggtcgtgtatttttatccgaaagacagtacgccgggctgtacgacggaaggcttggatttcaatgcgcgtttggaacagtttgaggcattgggttataccgtggtcggtatttcccgcgacggcgtaaaggcgcatcagaatttttgcgccaagcagggtttccggttcgagctgttgagcgacaaggatgaaacagtgtgccgcctgtttgatgtcatcaaattgaagaaactgtacgggaaagagtcgttaggtatcgagcgcagtacgttcgtcttgaataaggatggagaaatcgcccatgaatggcggaaagtcaaagtggcgggtcacgcgcaggaagtattggaaacgctttcccgataa

SEQ ID NO: 41738 - DNA, 684 bp, Neisseria meningitidis
atgtggctggtcggtgcggcgcggcggattgccgatacgcgcacgtttacgcggatttataccgaaatcgccgtgccggtcgtgttggaacagcggcagcagcaagtcccgcattcggcggtaactgcgcgggttgccctgtcgcgtgagtttgtcagcttttttgaagaacacctgccgattgccgcgacatccgtcgtatccatattcggcgcgtgcatcatgctgctggtgctggaattttgggtcggcgtgtcggcggtgggcatacttgcgttgtttttatggcttttgccacgttttgccgccatcagcgaaaacctgtatttccgcctgaagaacagcttggaacgcgacaaccactttatccgaaaaggcgaccggcggcagctgtaccgccattacggactgcttgcgcgcctgcgtgtgctgatttccaaccgcgaagccttcggctatctctgcgtcggcacggcgatgggtattttgttcggctttgcttttgtgatgatgacgctcaaaggctacagcagcgcgggacatgtctattcggtcggcacttatctgtggatgtttgccatgagtttggacgacgtaccgcgattggtcgaacaatattccaatttgaaagacatcggacaacggatagagtggtcggaacggaacatcaaagccggaacttga

SEQ ID NO: 41739 - DNA, 1248 bp, Neisseria meningitidis
atgttttctctagaggcttggataggcttgaggtatctcagggcgaaaaagcgcaacggctttatgtcgtttatcacgatggtttcgattgccggaatcgccttgggcgtaaccgcgctgattgtcgtcttgtcggttatgaacggctttcagaaagaaatacgcgggcagctcctgaatgtcgcgccgcacgccgaaatcggctatatcgacaatacggatacggattggcgcaacctgcttcgatttaccgaaaaccgcaaaggtattttggctgccgcgccctatgtttccaatcaggcattgctggccaatgcgggcgaaatcaggggcgtgcagatgcgcggcattttgccgtctgaagaacgcaaagtggtggaatacggcgacaaaatgccggcaggcaaatttgaagatctgattccgggcgagtttgacattatcctcggtgtcggcttggcggaggctttgggggcggaagtcggcaataaagttaccgtcatcacgccggagggcaacgttacccctgccggagtcgtaccgaggttgaaacagtttaccgtggtcggtctggttaagacgggtgtttacgaggttgacaattcattggcgatgacgcatatccaagacgcgcgcgtactgtaccgcttggataaggaagttgcggggctgcggctgaaactcgccgacccgcaaaacgcccccgccttgacggcaacactgattccggaggcgcaaagggacgcggtttgggtgcgcgattggacgttcagcaaccgcagctattttgaggcggtcgagttggaaaaacggatgatgttcatcatcctgacgctgattatcgccgtggcggcgttcaaccttgtctcttccttggtgatggcggttacggaaaagcaggcggacattgcgattttgcggactttgggtctttcccctgccggcgtgatgaagatttttatggtgcagggtgcgttttcaggctttttcggcacgctggcgggtgtggtctgcggcgtgcttttgggttggaacgtcggcagagtcgtggcgttttttgaaaacctgctcggtgtccacctcatcaattcgcaggtttattttatcgactacctgcccagcgatgttgatatgggcgacgttgccctgattgcctgcatttccttgggactgtctttcgtggcgacgctctacccgagctggcgcgcgtcaaaaacccaaccggcggaggctttgcgttatgagtga

SEQ ID NO: 41740 - DNA, 924 bp, Neisseria meningitidis
atggaaaaccaaaggccgctcctaggcttcgcgttggcacttttggcggcgatgacgtggggaacgctgccgattgccgtgcggcaggtattgaagtttgtcgatgcgccgacgctggtgtgggtgcgttttaccgtggcggcggcggtattgtttgttttgctggcactgggcgggcggctgccgaagcggcgggatttttcttggtgctcattcaggctgctgctgctcggcgtggcgggcatttcggcaaactttgtgctgattgcccaagggctgcattatatttcgccgaccacgacgcaggttttgtggcagatttcgccgtttacgatgattgttgtcggtgtgttggtgtttaaagaccggatgactgccgctcagaaaatcggcttggttttgctgcttgccggtttgcttatgttttttaacgataaattcggcgagttgtcgggtttgggcgcgtatgcgaagggcgtgttgctgtgtgcggcaggcagtatggcatgggtgtgttatgccgtggcgcaaaagctgctgtcggcgcaattcgggccgcaacagattctgctgttgatttatgcggcaagtgccgccgtgttcctgccgtttgccgaaccggcacacatcggaagtttggacggtacgttggcgtgggtttgttttgcgtattgctgcttgaatacgttaatcggttacggctcgttcggcgaggcgttgaaacattgggaggcttccaaagtcagcgcggtaacaaccttgctccccgtgtttaccgtaatattttctttgctcgggcattatgtgatgcctgatacttttgccgcgccggatatgaacggtttgggttatgttggcgcactggtcgtggtcgggggtgcggttacggcggcggtgggggacaggctgttcaaacgccgctag

SEQ ID NO: 41741 - DNA, 702 bp, Neisseria meningitidis; identical to SEQ ID NO: 38000

SEQ ID NO: 41742 - DNA, 963 bp, Neisseria meningitidis
atgcctagtatctctgtccgccgactgtttgacgacaaccaatacaaactgcaacttgcctgggccgccggcaattcgggtgcggacaaccgtatcggcgtagaggcggacaagcccgtcctcgccttggtcggacacctgaatttcatccatcccaaccaaatccaagtggtcggtttggcagagtcggaatatctgaaccgtctcgaatcgggggaaacgggttatcagttcggcgacctgttcgacatttctatgtctttggttattgtggcaaacggcttgccggtttccccggggttgcgcgactattgccataaaaacgatattccactgctgacttccaaactcgaaagcccctatctgatggacgtgttgcggatttacctgcaacgcaccctggcggcatcgtccgtcaaacacggcgtatttctcgatgtgtttgaaatcggcgtgctgattaccggacattctggcttgggcaagagcgaattggcgttggaactgatttcgcgcggccacagcctgattgccgacgatgcggtcgagctgttccgcatcggtccggaaacattggaagggcgttgttcgcctatgctgcgtgattttttggaagtgcgcggcttggggatactcaatatccgccatattttcggcgaaacttccatccgccccaaaaaaatcctgcaactcattatcaatttggtcgaggcagacgacgagtatatgaagcagctcgaccggttgagtatccgcaccgaaaccgaatccatcctcaacgtcaacgtccgttcggttacgctgcccgtcgccgtcggacgcaacctcgccgttttggttgaggcggcggtgcgcaattacattttgcagttgcgtggcaaagacagtacgcgcgaatttttggaacgccatcagacgcagcttaaagaaaacgaacagaatcatgaaaatcgtcctgattag

SEQ ID NO: 41743 - DNA, 966 bp, Neisseria meningitidis
atgagctacacgcaactgacccaaggcgaacgataccacatccaatacctgtcccgccactgcaccgttaccgaaatcgccaaacagcttaaccgccacaaaagcaccatcagccgcgaaatcagacggcaccgcacccaagggcagcaatacagcgccgaaaaagcccagcggcaaagccggactatcaaacagcgtaagcgacaaccctataagctcgattcgcagctgattcagcacatcgacacccttatccgccgcaaactcagtcccgaacaagtatgcgcctacctgtgcaaacaccaccagatcacgctccaccacagcaccatttaccgctaccttcgccaagacaaaagcaacggcagcacgttgtggcaacatctcagaatatgcagcaaaccctaccgcaaacgctacggcagcacatggaccagaggcaaagtacccaaccgtgtcggcatagaaaaccgacccgctatcgtcgaccagaaatcccgtatcggcgattgggaagccgacaccattgtcggtaaaggacagaaaagcgcattattgaccttggtcgaacgcgttacccgctacaccatcatctgcaaattggatagcctcaaagccgaagacactgcccgggcagctgttagggcattaaaggcacataaagacagggtgcacaccattaccatggataacggcaaagagttctaccaacacaccaaaataaccaaagcattgaaagcggagacttatttttgtcgcccttaccattcttgggagaaagggctgaatgagaacaccaacggactcatccggcaatacttccccaaacaaaccgatttccgtaacatcagtgatcgggagatacgcagggttcaagatgagttgaaccaccgaccaagaaaaacacttggctacgaaacgccaagtgttttattcttgaatctgttccaaccactaatacactag

SEQ ID NO: 41744 - DNA, 717 bp, Neisseria meningitidis
atggcttcaagcaacgtaaacaacgaaatcaaagacaaaaaactctccctgtgggccaagcgtcaagacggttcggtaaaatggttctgcggacagccggttacgcgcaccgccgccgacagcgacgacgtcgccgccgccaacggcaagaccgccgacaacatcaacaccaagcacctgccgtcaacctgccgcgatgcgtcatctgccgtttgcacaaaaacacccgagtattacccgaatcacggcgaatggccatccgacaatagtgccgccggcgtggcatcttcttcaacaatcaaaggaaaatatgttaaggaagttacagtcgcaaacggcgtcgttaccgccacaatggcttcaagcaacgtaaacaacgaaatcaaaggcaaaaaactctccctgtgggccaagcgtcaagacggttcggtaaaatggttctgcggacagccggttacgcgcgacaaagccgccaccgacgacggcgttaccgccgccaccgacgccaacggcaagatcgacaccaagcacctgccgtcaacctgccgcgacgcttcatctgccgtttgcacaaaaacaccacgcgccgatttcaaacactttcaaaaaatcagccgttaccgagtattacctgaatcacggcaaatggcagaaaaacttcgtcattcccgcgcaggcgggaatctaggtttgtcggtgcggaaacttatcgggtaa

SEQ ID NO: 41745 - DNA, 516 bp, Neisseria meningitidis
atgagcgcaatcaatgcaatctacaatgccaacgtctatatcgacggcaacagcctgttgggtaacgcatccgagttcaaactgcccgagtttgagtttgggcaggacgaccataccggtttgggtatggttggcaccatcaaactgccaaacggcgtcgaagccctggaaggcgaagttacttggaacagcttttatcccgaggtggccaagaaggcatccaacccattcaaggccgtgcaactgatggtgcgcggcaacctgcaaacctttaatgcagcaggtttggcagaagaagtccccatcgtaactacggtaacggcgatgttttcaaaaaacgccttgggcggttacaagccgaaggaaaaagcggaatttggctcaacctaccagacaacagaagtccaccaagtcgtcggcgggcgcgaagtactgtactacaacgcgttcaaaaatatctaccgcgtggacggtcaggacgttttgaaccaaatgcgtaaaaacattggtgcttaa

SEQ ID NO: 41746 - DNA, 339 bp, Neisseria meningitidis
atgaaaaaaatcgaggcgattgtcaaaccgttcaaactcgacgacgtgcgcgaggcgttgacggaaatcggcattacgggtatgaccgtcagcgaggtcaaagggttcggcaggcagaaggggcatacggagatttaccggggcgcggaatacgctgtcgatttcctgcccaaggtcaaaatcgagctggtgttggcggatgatgctgtggaacgcgcgattgacgtgattgtcgaggtggcgcgttcgggaaaaatcggcgacggcaagatttttgtgctgccggtcgaggaggcaatccgtatccgcacgggcgaacgtgcggacgcggcggtttga

SEQ ID NO: 41747 - DNA, 786 bp, Neisseria meningitidis
atgaatccgtttttgaatacagcctttaaagccgcccgccgtgccggtcagatgatgatacgcgccgcaggcaacctcgatgccgtcaaaaccgacagcaaagcattcaacgattttgtttccgatgttgaccgcaattccgaaatcatcctggttgaggctttgaaagaagcctatccgcaccacaaaatcacttgcgaagaaggcggctcccacggcaaagccaccgccgagtacgaatggattatcgatccgctcgacggcacaaccaacttcctccacggccatccccaatacgccatctctatggcactcctgcacaaaggcgtgttgcaagaagctttggtgtacgcacctgagcgcaacgacgtatatatggcttcccgcggcaaaggcgcgttgctcaacgaccgccgtatccgcgtttccaaccgcattgaattgaaccgctgcctgatcggtaccggcttccctgttgtcgatcaaagcatgatggacaagtatctggcgattttgaaagatttcttggccaaaaccgccggcggccgtcgtgaaggcgcggcttctttggatttgtgcgccgttgcggccggtcgtttggacggttttttcgagtttaacctcaaaccttgggatattgccgccggtgcattgattgttcaggaagcgggcggtatcgtaaccgatatgacgggtgaagacggctggctggaaagcggcgatattgtggctgccaatcccaaagtgctggcgcaaatgttgaaaatcatttccgcacacgtttaa

SEQ ID NO: 41748 - DNA, 960 bp, Neisseria meningitidis
atgaaacctgtttttttggattttgaacaacccatagccgaactgaccaacaaaatcgatgagctgcgtttcgtccaagacgagtctgccgtcgatatttcggacgaaatacaccgtttgcagaaaaaaagcaacgatttgaccaagtctattttcagtaaacttacacccgcccaaatttcacaggtttcccggcatccgcagcgtccctatactttggattacattgaggcactgtttaccgattttgaagaactgcacggcgaccgccactttgccgacgattatgcgattgtcggcggattggcgcgtttcaacggacaaagcgtgatggtcgtcgggcatcagaaagggcgcgacaccaaagaaaaaatccgccgcaacttcggtatgccccgtcctgaaggctaccgcaaagccctgcgcctgatgaagacggcagaaaaattcggcttgcccgtcatgacctttatcgatacgccgggcgcgtatcctggcatcggcgcggaagaacgcgggcagtcggaagccatcggcaaaaacctgtacgaactgacgcgcctgcgcgttcctgttttgtgtaccgtcatcggcgaaggcggttcaggcggtgcgttggcggtcgccgtaggcgattacgtcaatatgctgcaatactcgacctattccgttatttcccccgaaggctgcgcgtctattttgtggaaaaccgccgaaaaggcggcggatgcggctcaggctttgggcattactgctgaccgcctgcaaaagctggacttggtcgataccgtcatcaaagaaccattgggcggcgcgcatcgggatttcgggcaaaccatgaaaaacgtaaaagccgttttggaaaaacaactgcacgaagcgcaaagcatcccgcttgccgatttgctttcgcgccgtttcgaccgcattatggcttacggcaaattttcggaacaataa

SEQ ID NO: 41749 - DNA, 864 bp, Neisseria meningitidis
atgagtgagattggtttggtaaagatctattctggaaaagtgcgcgatttatatgaaatcgacgataaacgtatgctgatggtcgcttccgaccgcctgtctgcattcgatgtgattttggacgacccgattccgagtaaaggggagattctgacgcagatttccaatttttggtttaaaaaactggtgcatattatgcccaaccattttaccggcgataccgtgtacgatgttttgcctgagaacgaagccaaagttttagaaaaacgcgccgttgtggctaaaaagctcactccggtgaaagttgaggcgattgtgcgcggttatctggcaggcagcggttggaaagattatcaaaaaaccggctcggtttgcggtattcggctgcccgaaggtatgagggaagcgcaacaactgcccgaagtgatttttacgccctcaaccaaagccgcagtcggcgatcacgatgaaaacatcagctttgaagaatgcggacgcattatcggcaaagaattggcggaagaagtgcgcgccaaggcggttcggctttacaccgaagcggcggaatatgccaaatcgcgcggtattattatttgcgataccaaatttgaattcggtttggatgaaaacggtacgctgacgctgatggatgaggtattgactcccgattcgagccgtttttggcctgccgaccaatacaaagtcggcaccaatccgccgtcttttgacaaacaattcgtccgcgactggctggaacaaagcggttggaacaaaaaagcccctgcgccgaaagtgcctgccgatgtgattcagaaaactgtcgagaagtatcgggaagcattgactttgctgactcaggattga

SEQ ID NO: 41750 - DNA, 534 bp, Neisseria meningitidis
atggcagagttcgcaacgattgccagaccttatgcaaaggcattgttcggtctggctcaggaaaaaaaccaaattgagtcttggttgggcggactggaaaaacttgcggcggttgttcaggaagggaaggtggcttcattgattgaccgtcctgaaacgaatgcttcagaaaaagcagatatcctcatcgatttggtcggtttgaaagacaaggagttgaaaaactttgttatcgtcttggccgggcagaaacgtttgtcgatattgccggaagtatatgctcaatatcaagacttgaccttatcattcaaccatatcaaatctgccgtcatttacagtgcctatccgttgaccgacaaacaggtcggcgagttggcgcaaatgctgaataagcgtttcgacagcgagctgaaaatctctgtcgaaatcgaaccggagctgattggcggcataaaagttgaagtgggtgatcaggttttggatttgtctgtacaaggcaaattgagtgccttgtacacgactatgacgaattag

SEQ ID NO: 41751 - DNA, 465 bp, Neisseria meningitidis
atgtttaccatcgttttataccagccggaaatcccgccgaacacgggcaacatcatccgcctgtgcgccaataccggcgcggatttgcaccttgtcaaaccgctcggcttcccattggattccgccaaaatgaaacgcgccgggctcgactaccacgaattcgccagcctgacggtgtacgaaaacttcgacgactgcctcaaggcactcgcaggcaggcgcattttcgccctgaccaccaaaggcacggtgcgccccgatgaaaccgcgtttcaaaaaggcgacgttttactgttcgggccggaaacgcgcggactgcctgccgacatcctcgacagcctgcccgccgcgcaaaaaatccgcctgcccatgcagcccggctgccggagtatgaacctttctaataccgttgccgtgattctctttgaagcgtggcggcaacacggttacgcaggcggcgtttga

SEQ ID NO: 41752 - DNA, 195 bp, Neisseria meningitidis; identical to SEQ ID NO: 39661

SEQ ID NO: 41753 - DNA, 276 bp, Neisseria meningitidis
atgaacgcgtcaaattggagcctttacctgatattgtgtgaaaacagcgcgttctattgcggcatcagcccgaatccgcaacagcggcttgccgcccacacaaccggtaaaggcgcgaaatatacccgcgtattcaaaccggtggcgatgcgtatcgttgcaggcgggatggataaaggaacggcactcaggcaggaaatcgccgtcaaaaaactgaccgccgcacaaaaacggcaattgtgggagcaggcagaaaaaatgccgtctgaaacctga

SEQ ID NO: 41754 - DNA, 450 bp, Neisseria meningitidis
atggacgtacaactccccatcgaagccaaagacatccaaaaactcatcccccaccgctatccgtttctccagctcgaccgcatcaccgccttcgagccgatgaaaaccctgaccgcgattaaaaacgtcagcataaacgagccgcagttccaaggacattttcccgacctgcccgtgatgcccggcgtactcatcatcgaagcgatggcgcaggcgtgcggcacgttggcgattttgagcgaaggcggacgcaaagaaaacgaattcttcttcttcgccggcatagacgaagcccgtttcaaacgccaagtcatccctggcgaccaactcgtctttgaagtcgagctgctgaccagtcggcgcggcatcggcaaattcaacgccgttgccaaagtagatgggcaagttgccgtcgaagccatcatcatgtgtgccaaacgcgtggtttga

SEQ ID NO: 41755 - DNA, 348 bp, Neisseria meningitidis; identical to SEQ ID NO: 38212

SEQ ID NO: 41756 - DNA, 933 bp, Neisseria meningitidis
atgtatgagataaaacagccttttcatagcggatacttgcaggtgtctgaaattcatcaaatttattgggaagagtcgggcaatcccgacggtgtgccggtcatttttttacatggcgggccgggcgcgggggcttcgcctgaatgtcggggttttttcaatcccgatgtgttccgcatcgtcatcatcgaccagcgcggttgcggacgttcgcgcccgtatgcttgtgcggaagacaatacgacttgggatttggtggcggatattgaaaaagttcgtgaaatgctgggtatcgggaaatggctggtgttcggcggttcgtggggcagtactttgtcgctggcttatgcccaaacccatccggaacgggtaaagggattggtgttgcgcgggatatttttgtgcagaccgtctgaaacggtgtggctgaacgaggcgggcggtgtgagccggatttatccggaacaatggcaaaaatttgtcgcgccgattgctgaaaatcggcggaaccggctgattgaggcgtatcacggattgctgtttcatcaagatgaagaagtgtgcctgtctgccgcgaaggcttgggcggattgggaaagctatctgatccgtttcgagccggaggatgtggatgaagatgcttatgcctcactggcgattgcgcgtttggaaaaccattattttgtcaacggcggctggttgcagggcgataaggcgattttgaacaatatcggcaaaatacggcatatcccgaccgttatcgtgcaggggcggtatgatttgtgtacgccgatgcagagtgcgtgggcgctgtcgaaagcctttcccgaagcggaattgagggtggttcaggcagggcatcgtgcgttcgatccgcctttggtggatgcgttggttcaggcagttgaggatattttgccccatttgttgtaa

SEQ ID NO: 41757 - DNA, 228 bp, Neisseria meningitidis
atggaaacttgggttcaaaactacacggcaatcggcggcagcctgtatctgactgccgccgccgcactcttacccatcgtctttttctttgccgcgctgaccgtcctgaagctgaaaggctatcaggcggggctttatacgctgctgattgcgcttgccgttgccgtattcggcttcgggatgccggcgagtatggcggtttcttccctgccgccgcagccgcactga

SEQ ID NO: 41758 - DNA, 396 bp, Neisseria meningitidis
atggataaaaacctgcttgaagccgtcaaatttgacgaaaaaggtttggtttgcgccatcgcccaagatgccgaaaccaaacgtgttttaatggtagcgtggatgaacgccgaagccctgcaaaaaaccgtcgaaaccggctttgcccactattacagccgttcgcgccaaaaacaatggatgaagggcgaagagtcgggacacacgcaaaaagtccgcgaactgcgcctcgactgcgacggcgacgccattgtgatgctcatcgcccaaaacggcggcatcgcctgccacaccgggcgagaaagctgcttttacaaagtctggcgcggcggcgcgtgggaaaccgccgatgccgtcctgaaagacgaaaaagagatttacggcagcacgcactga

SEQ ID NO: 41759 - DNA, 621 bp, Neisseria meningitidis; identical to SEQ ID NO: 37371

SEQ ID NO: 41760 - DNA, 2781 bp, Neisseria meningitidis
atggcgaataataaaactttgtttgaagtaattgaaaaccgcaaacaaatttatttggaagacggcgatagcgacaaattttccattcccaaattcattaccaataatttgaaatttcccttgtttgattggcaaaaatcggctttagaaaactttgtgatttttgaccgcgcttcaaaattaaaggatttccctgacatcaaaaaccgccctacccatttgctgttcaatatggcaacaggtgctggcaaaacgatgatgatggcggcgttgattttgtattattttgaaaaaggttatcggcattttctgttttttgtgaatcaaaacaatatcgtggataaaacggaaaataattttattgacccggcgcacgcaaaatttttatttaccgagaagattttgcagggcgatacggtaattcccattcgcaaagtggaaatgtttagcccacattcagacggcattgaaattaaatttaccagtattcaaaaactgtataacgatatccacaccgaacgggaaaaccaaaccacattggcggatttacacaaattgaaccttgtgatgctgggcgatgaagcacaccatttaaacgcacaaaccaaaggcaaaaaacaaggcgaattagatttagaaaaggaaattaacgaccgcactagcaatgccgagattgaacgcaaaggctgggagcatatggttttggaattgttactcaataaaaatggcaatcccagccaaaatgtgctgttggaatttaccgccacgctgcctgaaaatgctgacgtgcaacaaaaatacgcggataaaatcatcacaaaatttggcttaaaagagtttttgcaaaagggttataccaaagaaatcaatttggtatccagtacgctgggcaagaaagagcgagtattgcacgctttattatttgcttggtatcgccatcaaatcgcgttgaaatacggcattgccaatttcaagcctgtgatgttgtttagaagtaagacgattgatgaatcaaaagcggattattcggcatttttaaattgggcagaaaatgtacaagcggatgattttgagtttttagatacgttttcaggcagcctgaataatagcgacaacgccaacgaacaaggcaaaacccgaaccgaacaagccctaaaatttatgcaggaaaatggctttgagtttgcacatttggcaaattgggtgaaacaaaattatcaaaaacataatgtgattattaccaactccgaaaccaacaaaaacaaaactgaaaaaaccgacagcgaaaccgaaaaattgctaaacaatttggaagcggctgataatccaatccgtgccatttttacggtagatagattaaccgaaggttgggacgttctgaatttgtttgatattgtgcgtttgtatgaagggcaaaatggcggtggttcaaataaaaaatcaggcaaaacggctgccgctaccgtatcggaaaagcagttgattggtcgtggcgtgcgttattttccatttgcgtttgaaggtaaacagccgaataaacgcaaatttgacaacgacatgcaacacgaattgcgtatcttggaagaattgttttattacacgcacgatgagcaatcccgctatatttcagaactgaaaaatgagttgcgaaaagacggttatttgcctgaaaaagacgatgataaggtgttggcaacatttaaactcaaatctgaatttgccgataataaggattttagagaattgttaatttgggcgaataaaaaaatccccaacccaaacgccaaaagcaataatgcagacagcctaaaagccaatccacaaacgctttcattccaagttcacggtaatcaactgttgcaggaaacgcaatttacagccgatgaaaatgatgaaacagcccgacaaatcggcacacaaaataattttactcaaaccataaaaatgagtgaaatggagcggcacattttcaataaagcattacatatcaaagggaaaaatagtcaatctttattccatttcaaccgtttgcaaagcaagctcgacattcaaaatcgcaatgaattgcaaaataacttgttgaaagactggcaaattgaatttttaggattagggcaagacaaacaggttcgcttggacgataaacttgcaggctgcctgaaaatcttggaaatggttgaaaaacatctgaatgaaagtgatatgccgtttatcggtacaaaagaatttacacctaaaaaattatgggaaattttcggcacgccaaaacaaaaatgggtcaaaaaagatgatgtaaaaacgactattgccacacaaaatgattggtatgtgatggataattttgctggaacgagtttggaagaagcgttaattcaatttatttcagcgcgtttgggcgatttgaaatctcaatatgacgttcatttaatccgcaatggagaagtatttaaattgaataactttgccgatggtgaaggatttatgccggactttattttattgctgaaagataaacaaaaatcttcttccaatggcgtgaaggactttttgcattaccaaattttcattgagcccaaaggtgagcatttagtggaaactgatggatggaaagaagaatttttagaagccatcactgtggaatatgggatggataagatcctgcaaaaagatacaccgcattatcgtttgatcggtttaccgttttttactgatcatcagaaaaatggacaatttacggagtcattccctttaggtgcggcatcgcttgaaaaaatagagtag

SEQ ID NO: 41761 - DNA, 3486 bp, Neisseria meningitidis
atgcgcctgacccatatcaaactctccggcttcaaatcttttaccgacccgaccacaattcatgtgccggggcagcttgtcgcggttatcgggcccaacggctgcggcaagtcgaatgtgattgacgcggtgcgctgggtgttgggcgaggcttcggcgaagcagcttcgcggcgagagtatgcaggacgtgatttttaacggtgcggcaacgcgccgtcctgcgccaagagcttcggtggagctggtgtttgacaacagcgaccacagtttgcagggcgcgtgggggcagtatgccgaggtgagcatcaagcggcagctgacgcggcagggcgaatcgacttatttcatcaacaatcagaccgtgcgccgccgcgatattactgatttgtttctgggtacgggcgtgggcgcgcgcggttatgccgttatcgagcaggggatgatttcgcgcatcatcgaagcgcggccggaggagttgcgcgcttatatcgaggaggcggcgggtgtgtccaaatataaggaacgccgcaaggagacggaaggctgtctgaaagacacgcgcgagcatttgcagcgtttgggcgatttgcagaacgaattggcgcgtcaggtggaaaagctggagaaacaggcggaaaccgccgaacgctataaatccctgaccgcgcagttgaatcaacaacaggatttgctcgattacgcccaatggcagcaatcgcttgccgccgccgacaaagcgaccgcgcagcatcagtctttgcaggcgcagcaggacgaaaccgccgcgcaggttcaggcgttaaacgacgaagtacacgccttgcagaccgccgaacagtcgcagcagcaggcggtacacgaactgggcaacaaacgcggcgtgttgcgcgagcagattgcccgtttggaagaacaaatccgccatcagcaaaacctgcatcaacgcatcgaacgcgacaagcaggcggcgcaggcgcagttacaacgcattcatcaagagcagcagcaaatccgcgtgcagcttgaagaaaacgagttgcaggtcgaagaaaaacaaaccgagctggcggaatgggcgatgcaggttgccgaacacgaagagcgtctgcccgaattggaagaagcccaagccacgctcaatgccgccttccaaacccagcaggacgaggcaaaccgcatccgccgcgaactggcgttgaagcagcagcagcttgcccatgccgaacaaaccgttgccaagcacgaagagcgcaaaggtcgtctgaaacaggaaaaccaagccctgaacctgcccgacgaagccgaaaccgccgccgcgcaggaagccgccgccttgttgcaaagccagcaagagcattacgaagaacaaatcatcgccgccgaagaagctctacacgccgcccgcgaggcgtttcagacggcatcaaaccgcttccaaagcctgaagcagcaacatatcaccttgcaggcgcagcagcaggcgttgtcgcaaatcctgtcgcaacagcaggaagccgccgatttctggcaggtaaccggccacgccgccgcgccgcaactgtggcaacacatcaccgcgcccgccgagtggcaacacgccttgtccgtcatccttgccgaacgcctgcacgcccgcgccgtgccgcaaggtttcgttccccccgaacctttgccgcaggggcaggcggcgtggctttcagacggcctctccggtggcatcaaaaaatcgctgcccgtacaggcattgctgaaccaaatccaagcgcagccgccgtttcagacggcattgcaccactggctcgacggcgtattgtgtgcgcccgatttgagttacgccctcgctcatcaaagcgatttgggcgcgcatcaaatctggcttacgcccgaaggccatcaggtcgataaagtcagcgtcctgctctatgccaagcccgcgcaggaaagcctgattgcccaaaaagcgcgcctcgacggcatcgcatccgaactggacaacctagcccccgaactctccgctgacgaagccgcgttcaaacaggcagaagccgccgtgcgctcgtccgaagtgcaacataaaaacctgatgcagcagcaacagcagcacacgcgccaatacagccaagcgcagcaacgcgccgccgaactcttggcgcgcaccaaccaagggcaaatccgccgcgaacacatcgagcgcgaactggcgcagttggcggaagaacagaccgtgttgcaacacgcgtccgacgggctttcagacgacattgctactttgcaggaagccgccgccgaactcgaacaccagcagcaaaccaccgcgcacagccgccaagagcagcaaggccgtctgaaacaggcgcagcttgccctgctggaagccaaccgccaatacgggcttgccgaagtcgccgtccacaagctcaaccagcaaaaacaaaattaccggcagcaaattgcccaacttgaacagcaaaccctcgactggcaggaacgccagcaagagcttgcccttgcctatgaaaccgagttccaaaacgacgagcagcacataaaactcgacgagttgaccgaagccgtacaaactttggatgaagagtacatcgccgtgcaggagaaactcgcgcagattcaggcgcagggcaggggacaatacgcccgcgtacaaaccctgcaaacccagttgccacagcttcaggcagccacccaaaccgccctgttgcagcagcaggaagccctgatcaacgccaaacgctaccatcaaaacctgaccgaacgtgccgccgatttggacgcgctcgaagcgttggcgaaagaatcgccgaaagtattgaacaccagcatcggcagcctcacccggcaaatcgaagcccttggcgccgtcaaccttgccgccctgcaagaactcgaagaagcgcgcgaacgcgacggctactaccgcagccagagcgaagacgtgcaggcagccattactcttttggaagaagccatcgcccaaatcgacgacaaaaccaaagcgcgtttcaaagaaaccttcgatgccgtcaacagcaaagtccaaaccttcttcccgaccctgttcggcggcggcgaagccaccctcaaaatgataggcgacgacctactgaccgccggtgtgtccattatggcgcgtccgcccggcaagaaaaacagcaccatccacctcctctccggcggcgaaaaagccctcaccgccatgagcctcgtgttcgctctgttcagcctcaaccccgctccgttctgccttttggacgaagtcgatgccccgctggacgacgccaacacctcgcgcttctgcaacctggtcaaagaaatgtcggcgcaaacccagttcctctacatctcccacaaccgcctgacgatggaaatggcagagcagctcgtcggcgtaacgatgcaggaaaaaggcgtatcgcgcgtcgtcgccgtggacatcaaacaagcgttggaaatggcggaagccgtttga

SEQ ID NO: 41762 - DNA, 567 bp, Neisseria meningitidis
atggctaagaaaatcagtattttggtgggcagcctgcgccgtgcttcttttgcgcgcaaagtggcattgaatgcggcggagatgttccccgaaggctggcaggcggaaatcgtcgaaatcggacatctgccgctttacaatttcgattatgacgaccctgcggtggaagatgtgccgctgcccgaaagctacacggttttccgcgaaacgattaaggcttcggacggcattttgttcgttacgtccgaaaataaccgcaccattcccgcctgtttgaaaaatgcggtggacatcggctcgaaaccgaatgccgacgtggcgtggaaaaacaaaccggccggcatcatcagccattccgtcggcaagatgggcggttacagttcgcaaaaaaacctgcgccttgcgctgtcttatttcgatatgcccgtaaccggacagccggaagtgtttttgggcaattcgccgacactgtttgatgaaaacggcaaattgatcgactcggcaagggattttgttcagtcatatattaatcagtttgtcggtttgattgaaagaaatgccaaataa

SEQ ID NO: 41763 - DNA, 954 bp, Neisseria meningitidis
atgggttttctgattggtttgagccgcaacctgacgcggtttacggctttggtcattttgcttgcgtcggcggttgcgtttatcggaccggcttcgtttgcgtgggttaagggcgatgttcaggtcttggtgctgggcatcattatgctgggtatggggatgactttgggcagggaggactaccggattttggcgcagcgtcctttggatgtgtttatcggtgcggcggcgcaatataccgtgatgccgttgctcgccatcggtattgccaagctgttcaacctttcgccggggctgactttggggctggtgttggtggggacgtgtccgggcggcgtgtcgtccaacattatgagtttccttgccaaaggcgatgtggcgttttcagtcggtatgacgacggtgtctacggtgctggctccggccgttacgcctttgtggatgacctgcctggtcggtcagacggtggatatggacggttgggggatgttccggtttatgctgctggtcacgcttttgccggtggtgctgggttcggcggcaaatatcttgctgcacggaaaacattggtttgaaaatgtccgtgccgttatgccgggcgtggcggtattggcatttgcctgcattgtcggcggcgtggcttcggttcacggacaccgttttgccgaatcggcgttggtaatggtgttggcgattgcggtacacaatatcgccggctatgtgtcaggctattacgccgccgcgctgtttggtatggatacggcaaaaaaacgcaccttggcaatcgaagtcggcgtgcagaatgccggtttggcaacaggattgagcgcgaaatttttcccaggcaaccccgaatcggcggttgcggcggcggtcgcctgcgtgtggcattcggtttcggggacggtattgggcaacttgttcgctctgtgggacaagcgtcgggacgcttag

SEQ ID NO: 41764 - DNA, 852 bp, Neisseria meningitidis
atgaccttactcggaataaagctcaaacagacccagcagctcaaccagcggctgcaacaatctttgcgcgtattgcagatgtcgggtatcgaacttgaacgcgaggtcgaaaactggctgtcggacaaccccctgctcgaacgcaaagacacggatgaattttccgatgccgagttcagccattacactgcgcctgcccgtcaaatcggcggagacgaaggcgaagatatgctgtccaacatcgccggcgagcaggatttcaagcaatacctgcacgcgcaagtatgcgaacacccgctttccgaccaagaatccgcctgtgtccacatcctcatcgatttccttgacgagcaaggttatctgaccgacagcatcgaagacatcctcgaccatacgcccttagagtggatgttggatgaagcaatgctgaaacaagccctgactgcattgcaaaaattcgacccggcaggcgtggccgccgccgatttgaacgaatcgctgatactgcagatagaaagattgggcgaatgtgctgccaaacccgccgccctgcatatcgtccgaaacgccctcgacagcattgacggcaaccgcagccaaaccctcgcacgaataaaaaaacacctgccccaaaccgacagcggcacactcgaagccgcactcgacctcattgcttcgctcaatccctttcccgccgccggttttgcctcgtccacacccacgccgtattctgacgaggcactcgccaacctgctggctttccgcggcatggaggtttctcgccgcaccattgccaaatacagagaatcccttgagattccggcagcacacaaacgcaaaaccgcagaataa

SEQ ID NO: 41765 - DNA, 630 bp, Neisseria meningitidis
ttggtcaaaacggcagacggctacaaagccattgcccatattcaagccggagaccgcgtcctttccaaggacgaggcaagcgggaaaacagaatacaaacccgttaccgcccgatacggcaatccgtaccaggaaaccgtttacattgaagtttcagacggcatcggcaacagccaaacccttgtttccaataaaatccacccgttttacagtcaaggaaaatggatacaggcagatcgtctgaaaaaaggcgacaccctgctttccgaaagcggtgcaaaacagacggttcaaaacattaccctcaaacagcagccgctcaaagcctacaatctgaccgttgccgattggcatacttacttcgtcaagggcagtcaggcggaaacggaaggggtttgggttcataatgcgtgtccgcctaaaagaacaggaagctccaagaatgaaaaacatggagatggcggtcgaagtcaaatatcagcagaatcacgaattgctgaattaaaaaataaaattattcccggaatgtccaaaaatgaacgattaaagattgagcgaacaatcagaaatattacaaaaaatgccaatcgaaaagcaaaaggagaagagcatggtcgacgcggtcgttaa

SEQ ID NO: 41766 - DNA, 978 bp, Neisseria meningitidis
atgatttatccgtggcataatgagcaatggcggcagattgcggaacattgggagcgtcgtcccaatgcatggctgtttgccggcaaaaaagatacggggaaaactacatttgcccgctttgcggcgaaggcactgttgtgcgaaacccctgcaccgggctgcaaaccctgtggcgaatgtatgtcctgccatctgtttggacagggaagccatcccgatttttacgaaatcacccccttgtcggacgaacccgaaaacggacgcaaactgttgcagatcaaaatcgatgccgtcagggaaatcatcgataatgtgtacctgacttcggtacggggcggtttgcgcgtgattctgattcatcctgcggaaagtatgaatgtccaagccgccaacagtttgttgaaagtgttggaagagccgccgccacaagtggtctttttgctggtcagccacgcggcggacaaggttttaccgaccattaaaagccgctgccggaagatggttttgcccgcgccttcccatgaagaggcattggcatatctgcgtgaaaggggtgtggcggaacctgaggaacgtctggctttccattccggagcgccgctgtttgatgaggcggacggtgtccgtgcgttgcggattaaactgttggatattttggcagaaccaaggttgttgaagattttggattacgccgcgcttttcgataaggaaaaacttccgctcgccgtatttgtcgggtggatgcagaaatggctggtcgatttgggattgtgcctgcaacacatgaaacccgtctattatcccgcttatgaagacaggctgcttcagacggtatccggtttccgtccgcgcaatgtatttgcggcggaggatatgctcaaacagcttgccccctacgggtttcatactttaaatgtcaaaatgcagatcgagcatctgctcatcaactatttggaattgaagaaagagaacgggtga

SEQ ID NO: 41767 - DNA, 939 bp, Neisseria meningitidis
atggatgcctaccccgaagccgaagccccgccgcaaagcatcgtcgagctggttcccgtattgattgccgttaccgacggcggcctgcgggtattaaccgtcgcccaaggcacactcctgcccaacggcccgctctcccctctgcgcaattccttgcaggcgggcgtgaagctgtgggttgccaagcagacttcgcagcctatgggctatgtggaacagctttacacctttgtcgatacccaccgccgcaacgaacacggcatgcccgtcttgtacgtcagctatttggggctggtgcgcgaggcagccgacagcatcctgcatcccgatgcgaaatggcaggactgctacggctatttcccgtgggaagacttgcgcaccgacggcggacagcgcgacgccgtcgtcagccgactgcgcatttgggcaaactcggcggacacggaggaagtgcgtcaaatgcggctcaagcgcattcatttgtgttggggggtcgaaccggaaaactggtcggaagaatacgttttgcaacgctatgaaatgctgtatgaaagcggcctgatagtggaagccgccgagccgcaggcaaacttcgatttcgcgctcacagggcagcccatgcgccacgaccaccgccgcgtattggcgaccgccctgtcccgcctgcgcgccaaaatcaaataccgccccgtgatttttgagctgatgccgcccgaattcacgctgctgcaactgcaaaacagtgtcgaagccatcagcggaagattgctgcacaagcaaaacttccgccgccagattcagcagcaaaacctcatcgagccgtcggataccggcgtatcgggcagcaaaggccgtcccgcgcagctttgccgcttccgcgacgacgtcctgcccgacaggctgatttcggacatcggactgccgctgggcagccgttag

SEQ ID NO: 41768 - DNA, 990 bp, Neisseria meningitidis
atgaaaaaatccctgattgccctgactttggcagcccttcctgttgcagcaatggctgacgttaccctgtacggcaccatcaaagccggcgtagaaacttcccgctccctagattaccaggacggtcaagtttatagcgttgaaaccggtaccggcatcgttgatttgggttcgaaaatcggcttcaaaggccaagaagacctcggtaacggcctgaaagccatttggcaggttgagcaaaaagcatctatcgccggtactgactccggttggggcaaccgccaatccttcatcggcttgaaaggcggcttcggtaaattgcgcgtcggccgtttgaacagcgtcctgaaagacaccggcgacatcaatccttgggatagcaaaagcgactatttgggtgtaaacaaaattgccgaacccgaggcacgcctcatttccgtacgctacgattctcccgaatttgccggcctcagcggcagcgtacaatacgcgcttaacgacaatgcaggcagacataacagcgaatcttaccacgccggcttcaactacaaaaacggcggcttcttcgtgcaatatggcggtgcctataaaagacatcagaatgtggatgacgtgaagattgagaaataccagattcaccgtttggtcagcggttacgacaatgatgccctatacgcttccgtagccgtacagcaacaagacgcgaaactggttgaagacaattcgcacaactctcaaaccgaagttgccgctaccttggcataccgcttcggcaacgtaacgccccgcgtttcttacgcccacggcttcaaaggctcgtttgatgatgcagacataggcaacgagtacgaccaagtggttgtcggtgcggaatacgacttctccaaacgcacttctgccttggtttctgccggctggttgcaagaaggcaaaggcgcatacaaattcgtatcgactgccggcggtgtcggtctgcgccacaaattctaa

SEQ ID NO: 41769 - DNA, 780 bp, Neisseria meningitidis
atgcatatcatcgattcgcactgccacctcaattttgaaggtttgaaagaacgcctgcccgaagttttgtccaacatggaagcaaacggcgtggggcaggcgctcgccatcagcgtcagcagggaaagttttgccgaagtatccgctatcgccgaagtttatgaacatatttactgcacaataggcgtacatcccgacagcaaggaagccgaagaattttctattgcggaaatggttgctgcagccgcccatccgaaagtggtcggcattggcgagacgggtttggattattactggtgcaaaggcgatttgtcctggcaacacaaacgctttgcagaccacatcgaagcagccaatcaaaccggactgcccgttatcgtccatacgcgtgatgcggcggcggacaccttgtctatcctgaaagaatgccgggttaattcgggcgttatccactgtttttccgaagacatcggttttgcccgtgcagcaatggatttggggctttatatttctttctcgggaatcgttacctttaaaaacgcacccttggttcaggaggcggcgaaatacgttccggacgaccgcattttagtggaaaccgatgcgccgttcctcgcccccgtacccaagcgcggcaggcagaacgaaccggctttcgtgcgttatactgccgaacatatcgccaaattgcggaaccaaaccttggaacaggttgcggcatacacgacggaaaacttttaccggctgtttcaaaaagtacccgatatgcgggtcgtctga

SEQ ID NO: 41770 - DNA, 1170 bp, Neisseria meningitidis
atgagcaaaaaactccatccgcaaacgctcgccatacgcggcggcaaagaacaaaccggataccgcgaacacaatcaggcattgttcctgaccagcagcttcatgtgggacaacgcccaacacgctgccgatttgttttcaaaaaaaatcaaaggcttcacttatacccgtaccgccaacccgaccacagccgcctttgaaaaacgcatcgccgctttggaaggtgcggaacgcgcggtcgccacttcgaccggcatgtccgcgattcaggcggcgtttttcacctttttgcaggcgggcgaccatgtggtttccagccgcagcctgttcggcacgaccgtcggctttatcaataacatcgttaccaaattcggcatcgaagtgagccacgtgtcgccgactgatataaacgaatggaaagccgccgtcaaagccaacaccaaactgctgtttttggaaacgccgtccaatcccttgggagaagtggccgacttggaagccttggcggaattggcgcacggcatcggcgcgcttttggtggtggacaacagcctgctgtcgcccgtcggctcgcagcctttgaaacacggcgcggatatttccgtttcctccgcgaccaaagccatagacggacacgggcgcgtgatgggcggcgtgttggcgggttcggaagagctgatggcgcaggtcgctatgtattgcaactcttgcgggctggcaatgtcgccgtttaatgcgtggcagttgttgagcggcgtggaaaccctgtcgctgcgtatggaaaaacagttcgacaacgccctgaaaatcgcgcaatggctgcaagcgcagccgcaggttcaagccgtgtattacaccggattgcccgaccatccgcaggcggcgcttatccgcaaacagcaaaacggcggtggcatcgtcatcggctttgaagtagccgaccaagaagccgcgtggaaagtcgtggacggcgtggaactcttttcccgaaccgccaacctcggcgacgtgcgctcgaccatcacccatccgtggacaaccacgcacggcaggatgcagcccgaagaaaaactcgccgccaacatccgccccggattggtgcgcctgtcggtcggtttggaatatgttggcgatttgattgacgatttgaaacaggcactcgcgcgctga

SEQ ID NO: 41771 - DNA, 1848 bp, Neisseria meningitidis
atgcacgacacccgtaccatgatgatcaaaccgaccgccctgctcctgccggctttatttttctttccgcacgcatacgcgcctgccgccgacctttccgaaaacaaggcggcgggtttcgcattgttcaaaaacaaaagccccgacaccgaatcagtcaaattaaaacccaaattccccgtccgcatcgacacgcaggacagtgaaatcaaagatatggtcgaagaacacctgccgctcatcacgcagcagcaggaagaagtattggacaaggaacagacaggcttcctcgccgaagaagcaccggacaacgttaaaacgatgctccgcagcaaaggctatttcagcagcaaggtcagcctgacggaaaaagacggagcttatacggtacacatcacaccgggcccgcgcaccaaaatcgccaacgtcggcgtcgccatcctcggcgacatcctttcagacggcaacctcgccgaatactaccgcaacgcgctggaaaactggcagcagccggtaggcagcgatttcaatcaggacagttgggaaaacagcaaaacttccgtcctcggcgcggtaacgcgcaaaggctacccgcttgccaagctcggcaacacccgggcggccgtcaaccccgataccgccaccgccgatttgaacgtcgtcgtggacagcggccgccccatcgccttcggcgactttgaaatcaccggcacacagcgttatcccgaacaaatcgtctccggccttgcgcgtttccaaccgggcacgccctacgacctcgacctgctgctcgacttccaacaggcgctcgaacaaaacgggcattattccggcgcgtccgtacaagccgacttcgaccgcctccaaggcgaccgcgtccccgtcaaagtcagcgtaaccgaggtcaaacgccacaaactcgaaaccggcatccgcctcgattcggaatacggtttgggcggcaaaatcgcctacgactattacaacctcttcaacaaaggctatatcggctcggtcgtctgggatatggacaaatatgaaaccacgcttgccgtcggcatcagccagccgcgcaactatcggggcaactactggacaagcaacgtctcctacaaccgttcgaccacccaaaacctcgaaaaacgcgccttctccggcggcatctggtatgtgcgcgaccgcgcgggcatcgatgccaggctgggggcggagtttctcgcagaaggccggaaaatccctggctctgatgtcgatttgggcaacagccacgccacgatgctgaccgcctcttggaaacgccagctgctcaacaacgtgctgcatcccgaaaacggccattacctcgacggcaaaatcgggacgactttgggcacattcctgtcctccaccgcgctgatccgcacctctgcccgcgcaggttatttcttcacgcccgaaaacaagaaactcggcacgttcatcatacgcggacaagcgggttacaccgttgcccgcgacaatgccgatgtcccctcggggctgatgttccgcagcggcggcgcgtcttccgtgcgcggttacgaactcgacagcatcgggcttgccggcccgaacggatcggtcctgcccgaacgcgccctcttggtgggcagcctggaataccaactgccgtttacgcgcaccctgtccggcgcggtgttccacgatatgggcgatgccgccgccaatttcaaacgtatgaagctgaaacacggttcgggactgggcgtgcgctggttcagcccgctcgcgccgttttccttcgacatcgcctacgggcacagcgacaagaaaatccgctggcacatcagcttgggaacgcgcttctaa

SEQ ID NO: 41772 - DNA, 537 bp, Neisseria meningitidis
atgtcggcaaccgtccgtatcttgggcatcgacccgggcagccgcgtaacgggtttcggtgtcatcgatgtcagggggcgcgatcatttttacgttgcctcaggctgcatcaaaacgcctgccgatgcgcctctggcagacaggattgccgtaatcgtccggcacatcggcgaagtcgttgccgtttacaagccgcagcaggcggcggtggaacaggtgttcgtcaacgtcaatcctgcatcgacgctgatgctgggtcaggctaggggcgcggcattggcggcattggtcagccataagctgcccgtttcggaatacacggccttgcaggtcaaacaggcggtagtcggcaaaggcaaggcggcgaaagaacaggtgcagcatatggtggtgcagatgctggggctttcgggaacgccgcaggcggatgcggcggacggtcttgccgtcgcgctgacccacgccttacgcaaccacgggcttgccgccaaactcaatccttcggggatgcaggtcaagcgcggcaggtttcaatag

SEQ ID NO: 41773 - DNA, 627 bp, Neisseria meningitidis; identical to SEQ ID NO: 37626

SEQ ID NO: 41774 - DNA, 273 bp, Neisseria meningitidis
atggcaagtaaaaaagcaggcggcagcacccgcaacggtcgcgattcagaagccaaacgcttgggcgttaaagcctacggcaacgagctgattcccgcaggttccatcatcgtacgccaacgcggtaccaaattccacgcaggcgacaacgtaggtatgggcaaagaccacactttgttcgccaaagttgacggttatgtcgaattcaaaaccaaaggcgcgctgaaccgtaaaactgtcagcatccgtccttacaccggttctgaagaataa

SEQ ID NO: 41775 - DNA, 213 bp, Neisseria meningitidis; identical to SEQ ID NO: 36410

SEQ ID NO: 41776 - DNA, 774 bp, Neisseria meningitidis; identical to SEQ ID NO: 39194

SEQ ID NO: 41777 - DNA, 1677 bp, Neisseria meningitidis
atgtcccaacaatacgtctattctatgctgcgcgtgagcaaggttgtgccgccgcagaaaaccatcattaaagatatttccctttctttcttccccggcgcgaaaatcggcctgctcggtttgaacggcgcgggcaagtccaccgttttgcggattatggcgggtgtggataaggaatttgagggcgaagccgtgccgatgggcggcattaaaatcggctacctgccgcaagagcctgagcttgatcctgaaaaaaccgtgcgcgaggaagtggaaagcggtttgggcgaagtggctgccgcgcagaaacgtttggaagaagtgtatgccgagtacgccaatcctgatgcggattttgacgcgctggcggaagaacagggccgcttggaagcgattattgcggcaggttcgtccacgggcggcggtgcggaacacgaattggaaatcgccgccgatgcgctgcgcctgccggaatgggatgccaaaatcggcaatctgtccggcggtgaaaaacgccgtgtggctttgtgcaaactcttgttgagcaaacccgatatgcttttgctggacgagccgaccaaccacttggatgcggaatcggtcgaatggctggagcaatttttggtgcgcttccccggtacagtcgttgccgtaacacacgaccgctacttcctcgacaatgccgccgaatggattttggaactcgaccgcggacacggtattccgtggaaaggcaattactcgtcttggctggagcagaaagaaaaacgcttggaaaacgaggcgaaatccgaagccgcgcgtgtgaaggcgatgaagcaggaattggaatgggtgcgccaaaatgccaaaggccgtcaagccaagtccaaagcgcgtttggcgcgtttcgaggaaatgagcaactacgaataccaaaaacgcaacgaaactcaggaaattttcattcccgttgccgagcgtttgggtaacgaagtgattgaatttgtgaatgtttccaaatcgttcggcgataaagtgctgattgacgatttgagcttcaaagtgcctgctggcgcgattgtcggcatcatcggcccgaacggcgcgggtaaatcgacgctgtttaaaatgatttcgggcaaagagcagcccgattccggcgaagtaaaaatcgggcaaaccgtgaaaatgagcctgattgaccaaagccgcgaaggtttgcaaaacgacaaaaccgtgttcgacaacattgccgaaggccgcgatattttgcaggttggtcagtttgaaattcccgcccgccaatatttggggcgtttcaacttcaaaggcagcgaccaaagcaaaattgcaggtcaattgtctggcggcgaacgcggtcgtctgcacttggcaaaaaccttgttgagcggcggcaatgtattgctgctggatgaaccgtctaacgaccttgacgtggaaaccctgcgcgcgttggaagacgcattgttggaatttgccggcagcgtgatggtgatttcgcacgaccgttggttcctcgaccgtattgctacgcatatcttggcttgcgaaggcgactccaaatgggtgttctttgacggcaactatcaggaatacgaagccgacaagaaacgccgactcggcgaagaaggcacgaaaccgaaacgcatcaaatacaaaccggtaacgcgttaa

SEQ ID NO: 41778 - DNA, 1050 bp, Neisseria meningitidis
atgccgaggggttttgttttgcctgtttcctgtttcctgtttcctgccgcctccattttttgccggattttccttcctgccgcaatatcggaacggcagaccgccgtctgtttgcggttgcaaattcaggcagtttggctacaatcttccgcattgtcttcaagaaagccgactatgccgaccgtccgttttaccgaatccgtcagcaaacacgaccttgatgccctgttcgagtgggcaaaagcaagttacggtgcaaaaagttgctggaaaacgctgtatctgaaccgtctgcctttgggcaatctgtcgccggaatgggcggagcgcgtcaaaaaagactgggaggcaggctgctcggagtcttcagacggcattttcctgaatgcggacggctggccagatatgggcagacgcttgcagcacctcacccgcacatggaacaaggcggggctgcttcacggatggcgcaacgagtgtttcgacctgaccgacggcggcggcaatatcttgttctcacttgaacgcgccgctttccgcccgttcggactactcagccgcgccgtccatctcaacggtctgaccgaatcggacggccgatggcatttctggataggcaggcgcagtccgcacaaggcagtcgatcccggcaaactcgacaatactgccgccggcggtgtttccggcggcgaaatgccgtctgaagccgtgtgtcgcgaaagcagcgaagaagccggtttggataaaacgctgttcccgtttatccgtccggtatcgcgactgcacagcctgcgccccgtcagccggggtgtgcacaatgaaatcctgtatgtattcgatgccgtcctgcccgaaactttcctgcctgaaaatcaggatggcgaggtggcgggttttgagaaaatggacatcggcagcctggttgccgccatgttgtcggaaaacatgatgcacgacgcgcaactggttacgctggacgcgttttgccgttacggtctgattgatgccgcccatccgctgtccgagtggctggacggcatacgtttatag

SEQ ID NO: 41779 - DNA, 966 bp, Neisseria meningitidis
atgaaccttaataaactgaaaaacaaactgttccgccgtccggggcagcgtgcggtgattgccgtaccgtatatttggcttttggtgctgtttctgattccgttcgccatcgtgctgaaaatcagctttgccgaacaagaaatcgccattccgccgtttacgccgctgaccagcatcgacgaagatttaggtcgtctgaatatcgccatcagttatcaaaactatgccgatattttccaaaatttttggcatacccttaacccgttcggcgacagtgaaaacagcaatatctatctgatgacctactggtcttcaatcaaaaccgcattgatgacgacagtgatttgcctgttggtcggttatccgaccgcctatgcgatttctcgtgccaatccttctgtccgcaatggtttgctgcttgccattatgctgcccttttggacatcgttcctgttgcgcgtctatgcgtggatgggtctgctcgggcataacggtattgtaaacaacctgttgattaaaatgggtattatcagcgagcctttggatttgttctacaatgccttttcgctcaatttggtgatggtttacgcctatctgccgtttatgattctgccgctatacacgcaactggtgaaactcgacaaccgcctgcttgaagcggcttccgatttgggcgcggggccggtcaaatcgttcttgacgattaccctgcctttgtcgaaaaccggcattattgcaggctccatgctggttttcgtccctgctgtcggcgagttcgtcattcccgagctggtcggcggttcggaaaacctgatgattggtaaagtcttgtggcaggcgttcttcgatcaaaacaactggccgctggcttccgccgtcgccgtcgtgatggtcgcgctgctggtcgtgccgattgccctgtttcagcattatgaaaaccgcgaattggaagaaggagccaaataa

SEQ ID NO: 41780 - DNA, 1674 bp, Neisseria meningitidis
atgcttctaacactttctttgcgtgattttgtcattgttgaaaatctgaatctggattttcaaagcggctttaccgtattgaccggagaaaccggcgcgggcaagtccattactttggatgcgattggtctgctgttgggcgataaagccgattacagccaagtccgcagcggcgcaaaagaagcgcagttgtcggcgttgtttgatatttcccatttgcctgttttaaaagcagaattgtatgaacaggggcttttaaacgacggagaagaagaactcagtatccgccgcattatcgatgccaaaggcaaaagccgcagctttatcaacaatcaggccgctaccttggcgcaactcaaatccgtcggtagccagcttatcgacatccacgggcaaaacgcccatcattcgcttaatcaggaagccgcccagcgcgaattgttggacgcatttgcgggcagcagggagcaggcggaaaccgtcaggcagctttatcaaaattgggccaatgcgaaaaaagccctccaagaggcgcaggaacacgccgatgccgtcattatcgagcgggagcgtctggaatggcagtttaacgaactgaatcagttggacattaaacaaggcgaatgggaagccctcagccaaagccacgacagccttgcccattctgccgagctgttgcaggctgccgaagaagtcggaagcaagattgacggcgacaacggcatccaacgccatatctatcaatgtcaaaagctattggccaatctgcaaaacatcgagccgcgctttgccgagagcctgaatatgttggcaagcatcgaagccgaattgggcgaaatcagtgccaatatgcgcgatgtggcaggtcgcagcgacatcaatcccaatgaattggcggcacaggaacagcgtatgggcgaactgatggggatggcgcgaaaataccggatcgaacccgaagagttgcctgccaagttggcagaaatcgaagaacgcctgcaaagcctgcaagctgccgccgatttggacgcgctcgagcataatgttgcccacaattttgccgaatatcaggaagctgcccacatcctttctgccatgcgccatcaggcggcagagcgtttgagcggcgaaacgaccgagcatatgcaacaccttgccatgaaaggtgcacgtttcgacatcgtcctgttgccttcgtcgccgacggcacacggtttggagcaggttcaatttcaagttgccgccaacaaaggcaatccgccccgtccgctgaataaagttgcctccggcggcgaattggcgcgtatcagccttgccttacaggttgttgccagccaatatacccaagttcccaccctgatttttgatgaggtcgataccggtattggagggggagtggctgaaatggtcggcaaggcattacgtgcgttgggcagaaaacatcaggtgcttgccgttacccatcttccgcaagtcgcatcctgcggcgaaaaccactggcgggtgcgcaagcacagcgagggagagcaaaccgtcagcgaaatcagtatattggatgaaatccaacggatcgaagaggttgcccgtatgttgggcggagaagtcattaccgatacgacgcggcaacatgcggcagaattgctgcaacttgcgtcgaaaaatagtttattttaa

SEQ ID NO: 41781 - DNA, 756 bp, Neisseria meningitidis
atgaagtttgcccggttactctttctctgtgcggcactcgccggcactcaagcggcggctgccgaaatggttcaaatcgaaggcggcagctaccgcccgctttatctgaaaaaagataccggcctgattaaagtcaaaccgttcaaactggataaatatcccgttaccaatgccgagtttgccgaatttgtcaacagccacccccaatggcaaaaaggcaggatcggttccaaacaggcagaacccgcttacctgaagcattggatgaaaaacggcagccgcagctatgcgccgaaggcgggcgaattaaaacaaccggtaaccaatgtttcctggtttgccgccaacgcctattgcgccgcacaaggcaaacgcctgccgaccattgacgaatgggaatttgccggacttgcttccgccacgcagaaaaacggctcaaacgaacccggctacaaccgcactattctcgattggtatgccgacggcggacggaaaggcctgcacgatgtcggcaaaggccgcccgaactactggggcgtttatgatatgcacggtctgatttgggaatggacggaagatttcaacagcagcctgctttcttccggcaatgccaacgcgcaaatgttttgcagcggcgcgtctatcgggtcgagcgactcgtccaactatgccgccttcctccgctacggcatccgcaccagcctgcaatccaaatatgtcttgcacaacttgggcttccgttgcacaagccgataa

SEQ ID NO: 41782 - DNA, 480 bp, Neisseria meningitidis
atgccggaaagtattttcaaacagatttcccttgatattttgaaactgcatcgggattctgtttattcgctgcttgccacttccggctgcaactgtcaggtgcatgaggcggcgtatgtcaacatcgacggcaaatattatatttcgctttcatgcgagccagaggtgggggaagtcaaaacaggcattttgctgattgaggatgaaagccgcaaccttcgtttgagctgggtcggcagtgcgcgggaacttgaccgcaaggataatgcctacaaacgcgccctgtccgccttgtccagaaagctggggcggtgtaaggacaggctgcatacggcggttcaaccgtttttgttggagctggtgccggagaaaggcagattttctgtcggcgatgaagaagtttggatttctcgaaacgatttagtgagggctttatatcctgtcggatacagtatgcggcaggcaatgttgcagatttaa

SEQ ID NO: 41783 - DNA, 942 bp, Neisseria meningitidis; identical to SEQ ID NO: 41242

SEQ ID NO: 41784 - DNA, 1485 bp, Neisseria meningitidis; identical to SEQ ID NO: 38944

SEQ ID NO: 41785 - DNA, 1131 bp, Neisseria meningitidis
atgaccaaacatctgccactcgccgtcctgactgctttgctgcttgcagcgtgcggcggttcggacaaaccgcctgccgaaaaaccggcgccggcggaaaaccgaaacgtattgaaaatttacaactggtcggaatacgtcgatccggaaaccgttgccgattttgaaaagaaaaacggcatcaaggttacttatgatgtgtacgacagcgatgaaacgctggaaagcaaggtgctgaccggaaaatccggttacgacattgtcgcgccgtccaatgcgtttgtgggcaggcagattaaggcaggtgcgtatcagaaaatcgataagtcgctgattcccaattataaacacctcaaccccgaaatgatgaggctgatggacggggtcgatcccggccacgaatacgccgtgccgttttattgggggacaaataccttcgccatcaataccgaacgcgtgaaaaaggctttgggtacggacaagctgccggacaaccagtgggatttggtgttcgaccccgaatacacgtccaaactcaagcaatgcggcatcagctatttggacagcgcggcggaaatctatcctatggtgttgaactatttgggtaaaaacccgaacagcagcaatacggaagacatcagggaggcaaccgccctactcaagaaaaaccgccccaatatcaaacgctttacttcgtccggctttatcgatgatttggcgcgcggcgatacctgcgtaacaatcggtttcggcggcgatttgaacatcgccaaacgccgtgccgaagaagcgggcggcaaggaaaaaatccgcgtgatgatgcccaaagagggcgtggggatttgggtggattctttcgtgattccgaaagatgcgaaaaacgtcgccaacgcgcacaaatacatcaacgacttcctcgacccggaagtgtcggcgaaaaacggcaatttcgttacttacgcgccttcgagcaagcctgcgcgtgagctgatggaagacgaatttaaaaacgacaatacgattttcccaaccgaggaggatttgaaaaacagctttattatggttcccatccggccggcggcattgaagtttatggtgcgccagtggcaggatgtgaaggcggggaaataa

SEQ ID NO: 41786 - DNA, 1233 bp, Neisseria meningitidis
atgggcttgaaacattttctggaaaaaatcgaaccgcacttcctgccgggcggcaaacatgaaaaatggtatgccctctacgaagcggcggcgacgattttctacacatccggtgcggtaacgcgcaaagcggcacacgtccgcgacgcgctcgactccaagcgcatgatgattttggtgtggctggctttgtttcccgccatgttttacggcatgtacaacgtcggcgcacaggcattcggtgccttaacgcccgatttgctgcaacaaagcatcgccaacgactggcattacgcctttgccgacgctttgggcatcaatatgtcgtctgaagcgggcgtgttgggcaaaatgctgttcggcgcgatttacttcctgccgatttacgcgaccgtatttgccgtcggcggtttctgggaagtcttgttcgccaccgtgcgcaaacacgaaatcaacgaaggtttctttgttacctcgattctgtttgccttaattgttccgcccacgctgccgctgtggcaggcggctttgggtatttctttcggcgttgtggttgcgaaagaagtattcggcggtacgggtaaaaactttatgaaccctgcgctggcaggccgcgccttcctgttcttcgcctaccccgccaacttgagcggcgatgcggtttggacggcggttgacggctattccggcgcaaccgcgctggcgcaatgggcggcacacggtgcagacggcctgaaaaacgccgtaaccggtcaaaccatcacttggatggacgcgtttatcggcaaactgcccggctccatcggcgaagtctccactttggcactcttaatcggcggcgcgtttatcgtgtttgcccgcatcgcttcttggcgcattattgccggcgtgatgatcggtatgattgcgatgtcttcgctgttcaacttcatcggttcggacaccaacgccatgtttgctatgccttggtactggcatttggtcgtcggcggcttcgccatcggtatgctgtttatggcgaccgaccctgtttccgcttcctttaccaatgtcggcaaatggtggtacggtgcgctgatcggtgtgatgtgcgtgttaatccgcgtggtcaatccggcttaccccgaaggcatgatgttggcgattctgtttgccaacctgtttgccccgattttcgactatttcgtcgcacaagcgaacatcaaacgcagaaaggcgcgcagcaatggctaa

SEQ ID NO: 41787 - DNA, 363 bp, Neisseria meningitidis
atggatatccgatatttcggcacaacgccccgctattccgaagccgtcggcgcaaacggcttgattttcctctccggcatggttcccgaaaacggtgaaacggctgccgaacagactgccgacgtgcttgtccaaatcgaccgctggctggcggaatgcggctcggacaaggcgcacgttttggatgcggtcatctatctgcgcgatatgggcgactatgcggaaatgaacggcgtgtgggacgcttgggttgccgccggcagaacgcccgcccgcgcctgcgtggaagcgcggctcgcccgtccggagtggcgtgtcgaaatcaaaataaccgccgtgaagaaagacgcggcaactgcataa

SEQ ID NO: 41788 - DNA, 582 bp, Neisseria meningitidis
atgaaaataagatggcggtacggaattgcgttcccattgatattggcggttgccttgggcggtctgtcggcatggttgggtcgtatcagcgaagtcgaaatcgaggaagtcaggctcaatcccgacgaaccgcaatacacaatggacggcttggatggcaggcggtttgacgaacagggatacttgaaagaacatttgagttcgaagggcgcgaaacagtttcccgaaagcagcgacattcatttcgactcaccgcatctcgtgttcttccaagaaggcaggttgttgtacgaagtcggcagcgatgaagccgtttaccataccgaaaacaaacaggttctttttaaaaacaacgttgtgctgaccaaaaccgccgacggcaaacggcaggcgggtaaagttgaagccgaaaagctgcacgtcgataccgaatctcaatatgcccaaaccgatacgcctgtcagtttccaatatggtgcatcgcacggtcaggcgggcggcatgacttacgaccacaaaacaggcatgttgaacttctcatctaaagtgaaagccacgatttatgatacaaaagatatgtaa

SEQ ID NO: 41789 - DNA, 717 bp, Neisseria meningitidis
ttggtcgaatgccgtctgaaaataatttcagacggcatttttatttggggagaaagtgaagtggcttcagtatttttagaaggagaagcagtcgaggtcggcaatattttctgtatcggcaggaactatgccgcacatattgaagagttaaaaaacgaaataccttccgaacctgtggtgtttatgaagccgtcaggcagcattttgaacagcggcggtacaatcttgctgcccgagtttagtagggatgtgcagtttgagtgcgaactcgtgctgctggtcggtaaggattcagacggcacgggcgagggtaaagatattttgggatgtgtcgcaggatatggtgtagggctggaccttacggcacgggatatccaatgccgtctgaaggaaaaagggctgccctggctgaaggcaaaagggttcaggcattccgcgtgcgtgtcggattttgcggcggcaggcagaatcggcaatcccgagaatgtgttgttttcattaaaacaaaacggcgtattgaaacagcgcggggataccggtttgatgatttacccgattcgggaaattttacacaaactggcggcagattacggtttggggaaaggggatttggtgtttaccggaacgccctccggcgtgggcgcaatcggtgcgggggacaatttggcattggagctggacggcttggtgcgcgcctctttcacggtagggtgttaa

SEQ ID NO: 41790 - DNA, 276 bp, Neisseria meningitidis
atgaccgaacaaaaaaacaaaacatccctcatcgaatttccctgcaccttcccattgaaagtaatgggcgcggtgcatcccgagttcgagcaggcggtattggacaccgtccgccttcacgcccccgacacgcaggcgcaccacatcaccacgcgtccgagcagcaaaggcaactatactggcgccaccgtacaggtaaaggttgaaaaccaagaacaattggacaacatctaccgtgcgctgacttcgcacgaactggtcaaagtggtactttga

SEQ ID NO: 41791 - DNA, 915 bp, Neisseria meningitidis
atggttcaaaatgggcatttgtgtaaacggttttcgcaaagtaccgtcatggtagcctatcggcggaatatgccgcaaggtcggcaggaaaaaggagaagaaatggacaaaatcagagttgccgccgtgcagatggtgtcgggcgtgtcgccggaaaccaacgtcgccgccatgaaacgcctggtcgcacgggcggcggagcagggtgcggattgggtgctgctgcccgaatattgggtgctgatgggcgcaaacgataccgacaaactcgcgcttgccgagcctttgggcggcggacgctttcagacggcattgagcgaaacggcgaaagaatgcggcgtggtgctgttcggcggaaccgtgccgctgcaaagccccgaggcgggcaaggtcatgaatactttattggtgtacgggcgcgacggcaaacggacggggctgtaccacaaaatgcacctcttcggcttttccggtttgggcgaacgctatgccgaagccgataccatccgcgcgggcggggatgtgccgcacttgtcggcagaaggcgtgtcggtggcggcgggcatttgttacgatgtccgctttcccgaatttttccgccgccagctgccgtttgacgtattgatgctgcccgctgcgtttacgcacacgacgggcaaggcgcattgggagctgctgctgcgcgcgcgtgccgtcgaaaaccaatgttacgtcgtggcggcggcacagggcggtttgcacgaaaacggacggcgcacgttcggacacagcatgattgtcgatccgtggggcgacgtgttggacgtattgcccgaaggcgaaggcgttgttacggcagacatcgatgccaaccgcctgaacagcgtccgcaaccgcctgcccgccttgaaataccgggttttggatgccgtctga

SEQ ID NO: 41792 - DNA, 450 bp, Neisseria meningitidis
gtggacgaagttttcaaaactgaatcggcaggctatttgatgaaccacattgcccgccaatttgctattttattgggcgaaggtttaaagcctttgggcatcgcccccgcgcaatttccgatattgctggaactgtggcaaaaagacggtttgagccagcaggaattggtggaacgcgccgatttgaagcaggcaacgattgccaacaccttggcacggatggagcgcgacggactgattacgcgcgaaccgaatcccgacgatgcgcgcagccgcctgattatgctgacggagcaagctcgcgccttgcagcagcagtccacggaaattgcccaagccatcaaccaaacggctttgtcggatttgtcggcaaacgaacaaaagttgtttttggaaatggcggcaaaaattgtggcgcgacagcaagagatgattacgggcgagaagtga

SEQ ID NO: 41793 - DNA, 321 bp, Neisseria meningitidis
atgaatttccaagactatctcgccacatttccttcaatcgaccatctgggcggtttggacgttcaggatgccgacggcaaaacggttcaccacattcccgccgttcagggtaagctcggttcgctcaagctgtacaatgctttggcagaacgttttgacggaaaattggacaaagaagcggcagaacagggtttgatatggtttgccgaacacgttgccgacgcgcgcgcccatcccggcaagcatcccaatatcgacctgcttgaaaaagttgtgcaaagcggcgaaaccttgctgctcaagccgcttgccgcgcaataa

SEQ ID NO: 41794 - DNA, 1299 bp, Neisseria meningitidis
atggctaaaaatgttgtagtaatcggcgcacagtggggcgacgagggtaaaggtaaaatcgttgactggctggcggaagaagccggcggcgtggtgcgcttccaaggcggccacaatgcgggccataccttggttgtcggcggcaaaaaaaccattttgcgcctgattccgagcggcatcctgcatgaaagtttggactgcttcatcggttcgggcgttgtcgtctcccccgaagccctgttgggcgaaatcgacgagttgaacgcggcaggcgtgaaaaacgtcgaaggccgtctgaaaatcgcgccgacctgcccgctgatcctgccttaccacatcgcgctcgaccaagcccgcgaagcatcgcgcggcaaaggcaaaatcggcacgaccggccgcggcatcggccctgcctacgaagacaaagtggcacgccgcgccattcgcgccgccgatttgctgcatcctgaaaaactgcgtgaaaaactggatgccgtccttgcctattacaatgtccaactgcaacatctgcacaatgccgagccggttaaagcggaagacgtgatggcggttatcgaaaaagtcgcgccgcgcattgcgccgatgattaccgacgtgtcccgcgtgttgaacgagaaaaacaaaaacggcgaaaaactgctgtttgaaggcgcgcaaggtgcgttgttggacatcgactacggcacttatcccttcgttacctcgtccaactgtctggcgggagccgcttccgcaggcgcgggcgtaggtcctcaaatgctggattatgttttgggcatcgtcaaagcctataccacgcgcgtcggttcgggcccgttcccgaccgaattgttcgacgaagtcggcgcaggtttggcagaacgcggacacgaattcggttcggtaaccggacgcgcacgccgctgcggctggtttgatgccgccgccctgaaacgctccatccaaatcaacggcatttccggtatgtgtattaccaaactcgatgtaatggacggcgttgaaaccatcaatatctgcgtcggctacgaattgcccgacggcggcaaaaccaacatcctgccttgcggctctgatgcggtagaagcctgcaagccgatttacgaaaccatgcccggctggcgtgaatccactttcggcgtgaaggactacggcgcattgcccgaaaacgccaaagcatatttgaaacggattgaagaagtctgcggcgcgccggtcgccatcgtctccaccggtcccgaccgagaagaaacgattgtgctgcatcatccgttcgcataa

SEQ ID NO: 41795 - DNA, 1404 bp, Neisseria meningitidis
atggatactacattgaaaaccaccttgacttctgttgcagcagccttcgcattatccgcctgcaccatgattccccaatacgagcagcccaaagtcgaagttgccgaaacgttcaaaaacgataccgccgacagcggcatccgtgcggtcgatttgggttggcatgactattttgccgacccgcgcctgcaaaagctgatcgacatcgcactcgagcgcaataccagtttgcgtaccgccgtattgaacagcgaaatctaccgcaaacaatacatgattgagcgcaacaacctcctgcccacgcttgccgccaatgcgaacgactcgcgccaaggcagcttgagcggcggcaatgtaagcagcagctacaaagtcggactgggtgcggcatcttacgaactcgatctgttcgggcgtgtacgcagcagcagcgaggcggcactgcaaggctatttcgccagcaccgccaaccgcgatgcggcacatttgagcctgattgccaccgttgccaaagcctatttcaacgaacgttatgccgaagaagcgatgtctttggcgcaacgtgttttgaaaacgcgcgaggaaacctacaagctgtccgaattacgttacaaggcaggcgtgatttccgccgtcgccctacgtcagcaggaagccctaatcgaatctgccaaagccgattatgcccatgccgcgcgcagccgcgaacaggcgcgcaatgccttggcaaccctgattaaccaaccgatacccgacgacctgcccgccggtttgccgttggacaagcagttttttgttgagaagctgccggccggtttgagttccgaagtattgctcgaccgtcccgatatccgtgctgccgaacacgcgctcaaacaggcaaacgccaatatcggtgcggcacgcgccgcctttttcccatccatccgcctgaccggaagcgtcgatacgcattctgccgaattgggcgggctgttcaaaagcggcaccggcgtttggttgttcgcaccttccattaccctgccgatttttacctggggtacgaacaaggcgaacctcgatgtggcaaaactgcgccaacaggcacaaatcgttgcctatgaatccgccgtccaatccgcatttcaagacgtggcaaacgcattgaccgcgcgcgagcagttggataaagcctatgacgctttaagcaaacaaagccgcgcctctaaagaagccttgcgtttggtcggtctgcgttacaaacacggcgtatccggcgcgctcgacttgctcgatgcggaacgcagcagctattcggcggaaggtgcggctttgtcggcacaactgacccgcgccgaaaaccttgccgatttgtacaaggcactcggcggcggattgaaacgggatacccaaaccgacaaataa

SEQ ID NO: 41796 - DNA, 363 bp, Neisseria meningitidis
ttggactaccgcttcggaaggcagtaccgcttgttaaaaacggatgatttttcatccgtttttgcattcagaaaccgccgcagccgcgacctgctgcaagtttcgcgttcaaacggcaacgggctggaccatccccgcatcggtctggtggtcggcaaaaaaaccgccaaacgcgccaacgaacgaaattatatgaagcgcgtcatccgcgactggttcagattgaacaaaaaccggctgccgccgcaggatttcgtcgtgcgcgtccgccgtaaattcgacagggctaccgcaaaacaggcaagggcggaactggcacaactcatgttcggcaaccccgcaaccggatgcaggaaacaggca

SEQ ID NO: 41797 - DNA, 156 bp, Neisseria meningitidis
atgcgcgataaaatcaaactggaatccagtgcaggtactggtcacttctacaccactaccaaaaacaaacgcactatgcccggcaaactggaaattaaaaaattcgatccggttgcccgcaaacacgtagtgtacaaagaaaccaaactgaaataa

SEQ ID NO: 41798 - DNA, 441 bp, Neisseria meningitidis
atgcctacccaatcaaaacatgcgtctatcaatatcagtctgatacaggcaagggaagccctgatgacccaattcaggcctattctgaatcaggcgaatattaccgatcagcaatggcggattatccgtcttttggcggaaaacggcacgctggactttcaagatttggcgaatcaggcgtgtattctgcgccccagcctgaccggtatcctgacccgccttgaaaaagcgggtttggttgtccgcctgaaaccttccaacgaccaacgccgcgtttttctgaagctgactgccgagggcgagaagctgtatgaggaaatcggcgaagaagtggacgagcgttacgacgctatcgaggaagtgctgggccgcgagaaaatgctgctgcttaaagacctgttggcagaacttgccaaaatcgaggatgcgttgaactcgtaa

SEQ ID NO: 41799 - DNA, 996 bp, Neisseria meningitidis
gtgaacctgaaaaaccgccattttctgaaacttttagacttcacgccagaagaaatcaccgcctacctcaaccttgccgccgaattgaaagccgccaaaaaagcagggcgcgagattcagcggatgaaagggaaaaacatcgccctgatttttgaaaaaacctctactcggacgcgctgcgcgtttgaagtcgccgcgcgcgatcaaggcgcgggagtgacttatttagagccgtccgccagccaaatcgggcataaggaaagcatcaaagacaccgcccgcgtgttgggcaggatgtacgacggcatcgaatatcgcggcttcgctcaggaaactgtcgaagaattgacgaaatacgcgggcgtacccgtgttcaacgggctgaccaacgagttccatcccacacaaatgcttgccgacgcactgactatgcgcgaacacagcggcaaacctttgaaccaaaccgcgtttgcctacgtcggcgacgcgcgttacaacatgggcaattccctgctgattttaggggcaaaattggggatggacgtgcgtatcggcgcaccgcaaagcctgtggccgtctgaaggcattattgccgccgcacacgccgccgccaaagaaaccggcgcaaaaattaccctgaccgaaaacgcgcatgaagccgtgaagaatgttgattttattcataccgatgtgtgggtcagcatgggcgagccgaaagaagtctggcaggaacgcatcgatttgctgaaagattaccgcgttacgcccgaactgatggcggcatcgggcaatccgcaagtcaaattcatgcactgcctgcccgccttccacaaccgcgaaaccaaagtcggcaaatggatttacgaaaccttcgggctgaacggtgtggaagttacagaagaaatattcgaaagccccgccagcatcgtgttcgatcaggcggaaaaccgtatgcacacgattaaagcggtaatggtcgcggctctgggcgactga

SEQ ID NO: 41800 - DNA, 2226 bp, Neisseria meningitidis
atgactcaaaaatccaccattgtttatacccataccgacgaagcccccgcgctggcgacccaatcgctgctgccgattgtgcaggcttttgcccgccacgccgatattgatgtcaaaactgccgacatttccctgtccggccgtattttggcggcattccccgaatatctgaccgaggcgcagcgcgtacccgacgcgcttgccgaattgggcgaactggtgaaacagcccgatgcaaacgtaatcaaactgccgaacatcagcgcgtccgtacctcaactgaccgccgcgattaaagaattgcagtctaaaggctttgccgttcccgactatcctgccgacccgcaaaccgatgaagaaaaagccgtacgcgaacgctacgaccgcatcaaaggcagcgcggtcaaccctgtcctgcgtgaaggcaactccgaccgccgcgcccccaaagcggtgaaaaactttgccaaaaaaaatccgcacagcatgggcgcgtggacaaaagactccaaaacccacgttgccaccatgcaaagcggcgactttttccataacgaacaatccgttaccgtacccgatgcaacttccgtatccatcgtgtttaccgacaaacaaggcaacaaaaaagagctgcgcgcgcccgtcgccctgaaagcgggcgaaatcaccgacgcgaccgtgatgagcaaaaaagccctgctcgccttccttgccgaacaagtgcaagacgcgaaagcaaaaggtgtattgttctcgctgcacatgaaagccaccatgatgaaagtgtccgacccgattatcttcggacatgccgtcaaagtattcttcgcgcctgtatttgaaaaattcggcgacaaactggctgccgcaggtgtcaacgtcaacaacggcttcggcaacctgcttgccaatttggacaaactggatgcggacacccgcgctgccgttgaagctgaaatcgctgccgtttacgccgccaaccctgatttggctatggttgattccgacaaaggcattaccaacctgcacgttcccagcgatgtcatcgtcgatgcttctatgcctgcgatgattcgtaactccggccgcatgtgggacaaaaacggcaaagcgcaagacaccaaagccgtgattcccgacagcagctacgctggcgtttaccaagcaaccatcgatttctgccgcgaacacggcgcgtttgacccgacatccatgggtaccgttcctaacgtcggtctgatggcgcaggcagccgaagaatacggttcgcacaataaaactttcgaaatcgaagccgacggtcaggttcaagtcattgatgcggaaggaaaagtcctgatgcagcacgacgttgaagcaggcgacatctggcgtatgtgccaaaccaaagacgctccggtcaaagactgggtgcaactcgccgtcaaccgcgcccgcctgagcaacacgcctgccgtgttctggctcgatgaaaaccgtccgcacgacaagagcctgctcgccaaggttaaagcctaccttgccgaactggataccaatggcctcgacatccgcgtcctcgctcctgaagaagccgccaagttcagcttgggtcgtctgaaaaacggcgaagacaccatctccgtaaccggtaatgtcttgcgcgactacctgaccgacttgttcccaattttggaactcggcacaagcgcgaaaatgctgtctatcgttccattaatgaacggcggcggtatgtttgaaaccggcgcgggcggttctgcaccgaaacacgttcaacagttcctcgaagaaaaccacctgcgttgggactctttgggcgaattcctcgcactcgccgtatcgtttgaacatttggcgcaaaaaaccggcaatgccaaagcccaagtcctcgctgacactttggatgccgccaccgaaaaactgctgttgaacggcaaatcgcctaaacgtaaagccggcgaactcgacaaccggggcagccatttctaccttaccctctactgggcgcaagaattggcggagcaagacaaagatgccgaactgaaagccgcatttacgccattggcagccgctttgaccgccgacgaagcgaaaatcgttgccgagctttccgccgtacaaggcaaagcggccgacatcggcggctactacgccgccaatcctgaaaaagcggcacaagcgatgcgtccaagcgcaacctttaatcaggcactaaacgccttataa

SEQ ID NO: 41801 - DNA, 285 bp, Neisseria meningitidis
atgaatatccgaactgcttttgcttttgctttgtgcgccatcgccttatccgccgctgcggctgcctacgccaaagaaatcaaaatcgatgccaacaacacgccttattccgaagccgacgcgcaaaagctggcggcaacggcagtcggtatgggtgttaaggaacctatcagcctgaacggcggcagcggcagcattaccgtgtccggcagcagcgcgacacagtgcgtgttcaaagtcggcaacggaggcgcgttgcagattcaagggctaaactgcaagtaa

SEQ ID NO: 41802 - DNA, 2016 bp, Neisseria meningitidis
atgagtaaatcccgtagatctcccccacttctttcccgtccgtggttcgcttttttcagctccatgcgctttgcagtcgctttgctcagtctgctgggtattgcatcggttatcggtacggtgttgcagcaaaaccagccgcagacggattatttggtcaaattcggatctttttgggcgcagatttttggttttctgggactgtatgacgtctatgcttcggcatggtttgtcgttatcatgatgtttttggtggtttctaccagtttgtgcctgattcgcaatgtgccgccgttctggcgcgaaatgaagtcttttcgggaaaaggttaaagaaaaatctctggcggcgatgcgccattcttcgctgttggatgtaaaaattgcgcccgaggttgccaaacgttatctggaagtacaaggttttcagggaaaaaccattaaccgtgaagacgggtcggttctgattgccgccaaaaaaggcacaatgaacaaatggggctatatctttgcccatgttgctttgattgtcatttgcctgggcgggttgatagacagtaacctgctgttgaaactgggtatgctgaccggtcggattgttccggacaatcaggcggtttatgccaaggatttcaagcccgaaagtattttgggtgcgtccaatctctcatttaggggcaacgtcaatatttccgaggggcagagtgcggatgtggttttcctgaatgccgacaacgggatattggttcaggacttgccttttgaagtcaaactgaaaaaattccatatcgatttttacaatacgggtatgccgcgcgattttgccagtgatattgaagtaacggataaggcaaccggtgagaaactcgagcgcaccatccgcgtgaaccatcctttgaccttgcacggcatcacgatttatcaggcgagttttgccgacggcggttcggatttgacattcaaggcgtggaatttgggtgatgcttcgcgcgagcctgtcgtgttgaaggcaacatccatacaccagtttccgttggaaattggcaaacacaaatatcgtcttgagttcgatcagttcacttctatgaatgtggaggacatgagcgagggcgcggaacgggaaaaaagcctgaaatccacgctgaacgatgtccgcgccgttactcaggaaggtaaaaaatacaccaatatcggcccttccattgtttaccgtatccgtgatgcggcagggcaggcggtcgaatataaaaactatatgctgccggttttgcaggaacaggattatttttggattaccggcacgcgcagcggcttgcagcagcaataccgctggctgcgtatccccttggacaagcagttgaaagcggacacctttatggcattgcgtgagtttttgaaagatggggaagggcgcaaacgtctggttgccgacgcaaccaaaggcgcacctgccgaaatccgcgaacaattcatgctggctgcggaaaacacgctgaacatctttgcacaaaaaggctatttgggattggacgaatttattacgtccaatatcccgaaagagcagcaggataagatgcagggttatttctacgaaatgctttacggcgtgatgaacgctgctttggatgaaaccatacgccggtacggcttgcccgaatggcagcaggatgaagcgcggaaccgtttcctgctgcacagtatggatgcgtacacgggtttgaccgaatatcccgcgcctatgctgctgcaacttgatgggttttccgaggtgcgttcgtcgggtttgcagatgacccgttccccgggtgcgcttttggtctatctcggctcggtgctgttggtattgggtacggtattgatgttttatgtgcgcgaaaaacgggcgtgggtattgttttcagacggcaaaatccgttttgccatgtcttcggcccgcagcgaacgggatttgcagaaggaatttccaaaacacgtcgagagtctgcaacggctcggcaaggacttgaatcatgactga

SEQ ID NO: 41803 - DNA, 1314 bp, Neisseria meningitidis
atgatgaacacgccgcatccgcgcccgaaaatcgccgtcatcggcgcaggctgggcaggactgtccgccgccgtcaccttggcgcggcacgccgacgttaccctgtttgaagccggccggcaggcgggcggcagggcgcgcacactggccggaaataccgacggtttcggttttttggacaacgggcagcacattttgctcggcgcataccggggcgtgttgcgcctgatgaaaaccatcggttcagacccccgtgccgcctttttgcgcgtaccgctgcactggcatatgcacggcggtttgcagttccgcaccctccccctgcccgcgccgctgcatattttgggcggcgtgctgcttgcccggcgcgtaccgtccgcattcaaagccaaactgcttgccgatatgtccgatttgcagaagtccgcacgcctcggacagcccgacacgacagttgcacaatggctgaaacagcggaacgtgccgcgtgccgccgtgatgcagttttggcagccgctggtgtggggtgcgctcaacacgcctttggaaaccgcaagcctgcgcgtgttgtgcaacgttttgtccgacggcgtgctgacgaaaaaatccggcagcgactatctcctacccaagcaggatttgggcgcaatcgtcgccgaacccgccttggcggagcttcaacggctcggcgcggacatccgcctcgaaacgcgcgtatgccgtctgaaccccctcccggacgggaaagtgctcgtcaacggcgaacctttcgatgccgccatacttgccaccgcgccctaccacgccgccgcactcctgcccgaaggcacgcccgaacacgttcagacggcatatcaaaaccttcgctaccacgccatcaccaccgtctatctgcgctacgccgaacccgtccgcctgcccgccccgctgaccggccttgccgacggcacggtgcaatggctgctttgccggggcaggctcggactgcctgaaaacgaagtgtccgccgtcatcagcgtttccgaccgcgtcggcgcgtttgcaaaccgggcgtgggcggacaaagttcacgccgacctcaaacgcatccttccgcatttgggcgaacccgaagccatgcgcgtcatcaccgaaaaacgcgccacaaccgcagccgatgccccgccgccggatttgtcgtggttgcaccggcaccgcatcttccccgccggcgactacctccacccagactaccccgccacgctcgaagccgccgtacaatcaggtttcgcttccgcggaagcctgcctgcaaagcctgaacgatgccgtctga

SEQ ID NO: 41804 - DNA, 1101 bp, Neisseria meningitidis
atgacccgtatcgccatcctcggcggcggcctctcgggaaggctgaccgcgttgcagcttgcagaacaaggttatcagattgcacttttcgataaaggctgccgccggggcgaacacgccgccgcctatgttgccgccgccatgctcgcgcctgcggcggaagcggtcgaagccacgcccgaagtggtcaggctgggcaggcagagcatcccgctttggcgcggcatccgatgccgtctgaacacgcacacgatgatgcaggaaaacggcagcctgattgtgtggcacgggcaggacaagccattatccagcgagttcgtccgccatctcaaacgcggcggcgtagcggatgacgaaatcgtccgttggcgcgccgacgacatcgccgaacgcgaaccgcaactcggcggacgtttttcagacggcatctacctgccgaccgaaggccagctcgacgggcggcaaatattgtctgcacttgccgacgctttggacgaactgaacgtcccttgccattgggaacacgaatgtgcccccgaagacctgcaagcccaatacgactggctgatcgactgccgcggctacggcgcaaaaaccgcttggaaccaacctcccgaatacaccagcaccttgcgtggcatacgcggcgaagtggcgcgggtttacacacccgaaatcacgctcaaccgccccgtgcgcctgctgcacccgcgttatccgctctacatcgccccgaaagaaaaccacgtcttcgtcatcggcgcgacccaaatcgaaagcgaaagccaagcccccgccagcgtgcgttcagggttggaactcttgtccgcactctatgccgtccaccccgccttcggcgaagccgacatcctcgaaatcgccaccggcctgcgccccacgctcaaccaccacaaccccgaaatccgctacagccgcaaacgccgcctcatcgaaatcaacggccttttccgccacggtttcatgatctcccccgccgtaaccgccgccgccgtcagattggcagtggcactgtttgacggaaaagacgcgcccgaacgtgatgaagaaagcggtttggcgtatatccgaagacaagattaa

SEQ ID NO: 41805 - DNA, 411 bp, Neisseria meningitidis
atgcctgtctatttccgcaccccaagcaggaaacgcctgcacaaaatgaaccgtcgccagcataaaaagctgcatttgggcgagtttcaaacattgattttcggcgttcaaggcagtttgcatcaagctgcggacgatgccgaagcgttcggccgctttatggacgagctgattgcgtatcttgtggtaaacggcttggaaatggcgggtgggggcgattgcggcgatttttcgtgcctgtttcaaaaatccggcgcccgaagcttgggagaaatcgagaaaaaagccattatctcttggctggcaggtcgcgaagatgtcgccactttgtacgccaccccgctggttgacggtttttacggggatgacggctgggaaaattacagcgaaacctataaacaggcagattaa

SEQ ID NO: 41806 - DNA, 999 bp, Neisseria meningitidis
gtggcggcacatatcggacacattgatacggacgcgcctttgaaacccctgtacgtcatccacggcgaggaagaactgttgcgtatcgaggcattggacgcattgagggcggcggcgaagaaacaaggttaccttaatcgggaagtttatacggcagacaatgccttcgattggaacgaactgttgcaaaccgcaggcagtgcgggtctgtttgccgatttgaagctgttggaactgcatatccccaacggaaaacccggcaaaaccggcggcgaggcgttgcaggattttgccgcccgcctgccggaagatacggtaacgctggttttgctgcccaaactggagaaaacccagctccagtccaaatggtttgccgcattggcggcaaagggggaagtgtgggaagccaaaccggtcggcgcggcggctttgccccaatggatacgcggacggctggacaaaatcggtttgggtatcggggcagacgcattggcactgtttgccgagcgcgtggaaggcaatctgttggcggcgcgtcaggaaatcgacaagctcgggctgctgtatccgaaagggcataccgtcaatatcgatgaggcgcaaaccgccgttgccaacgtcgcccgcttcgacgcgttccaactggcaggcgcgtggatgaagggcgatgtcctgcgcgtatgcaggcttttggacggattgcgggaagagggcgaagaaccggtgctgttgctgtgggcggttgccgaagacgtgcggacgctgatccggcttgctgccgccctgaagcaggggcagagtgtccaatccgtacgcaacagtctcagactttggggtgaaaagcagacgctcgcaccgcttgcagtcaagcggatttccgtcgtccgcctgcttgacgcgctcaaaacctgcgcccaaatcgaccgaatcatcaaaggtgcggaagacggcgacgcatggacggtattcaaacggcttgtcgtgtcgctggcggaataa

SEQ ID NO: 41807 - DNA, 1353 bp, Neisseria meningitidis
atgaaagatattcgaacggttggcagtgtctgctcaggtattgaagcagcatctattgcttggcaaaatttagggtttgagtttaagtggttttcagaaattttgaaatttccatcagatattttacgaaataaatatcctcatattgataatttaggagacatgaattatatccctgaattattaaaacataatagtatatcctctcccgatttaatctgcggaggaacaccatgtcaagcattctcattggcaggctggaaaaatggattagacgatgaacgcggaaatcttactttgaaatttatcgacattattaatgaaaatgacaatctccgattaaaagaaggaaaaaatcgtacagttgtattttgggaaaatgttgaaggagttttaactgataaaacaaatgcttttggatgttttatctctacattagcaggacttgataaggttatagaaaataaaaaatggggtactgctggtttattgaggggtaaaacaagaaatgttgcgtggcgtgttttagatgctaaatattttggattacctcaacaacgtagaagattatatgttgtcgctggtggaaaagataccaatcctgaaaatattttattggagctacatgatcataaaaataataatattgatggggtttcctttcctaagagtgaattaattttttataaagacaatgtaaaatttgaaatatttagagaatttacagattgtttgtattctgcttacggaacaaaatggaatggaaatgctgcagcttacaatggttctctttttattgcacaagatgataaattacgtagattatctcctttggaatgtgaaagattaatgggatttcccgataactacaccttaattgatggcgccaaaaagacaaatagatatcaagcgataggcaattcttgggctattcctgttataaagtggattggtaagcgtattaagaagccagaatgctatgatttaaataatcacataaattcaatgttattgaaacaagaaaattctgattttgaatattatgactttagcaatgggattattcatttgtctgactcattcgccataaactgttccgaaattcctgaagaggtgaatttcgggcatatgtatcatatcgtctcaaaagaagcatctgatgatatttttatttcaccaacaggttgttatggaattattcgcagaaaaaatgaaagaaatattaaaataaacccaaggctagaaaaaattttactagatatttcctctcaagaaacattagcggaaattgagaaaaaatcactagtacaaaaacgcggtaaatacagtgagaatagacagtttaatttataa

SEQ ID NO: 41808 - DNA, 2559 bp, Neisseria meningitidis
atgcctgcaaacctgtcttcagcactggaaaccttcaaacagcagcgcgatgccgccgaagcgcattatttgaaagccaaccgcgtgtcggtatttttcagagaatacacggcggcagtcgaaaccttactggcggcattgtgggcagagtattttcaaaacagcgcgttatgcctgatggcggtaggcggcttcggacgcggcgaactgtatccctgttcggatgtggatttggcggttgtctcccctgccccgctttcagacggcattcaggaacagattgcccggtttgtccaaaccctgtgggactgcaaactgatgccgtctgtaaaaagcggcagcgttgatgaactatgtgaaagcgtgcgcaatgatattacgggggacacagcgtttttagaggctaggtttttgtttggcaaccgccaaacggcggataaactagcggaaaaaatgaacgcgcagcgcaatgtggcggcgtttgtcgaggcaaaactggtggagatggaacaccgccacgccaaatcgcaaggttcgggggcagtattggagccgaatatcaaaagctgtccgggcggtctgcgcgatatccacaccctgctttggatagcgaaggcgcaaggcttggcgaccgacctgcccgacctgctcaaacagcggattttgacgcgtgccgaagccggtatgctttcgcacggctaccgccgcctcgcccacatccgcatccatctgcatttaaacgccaagcgcgccgaagaccgcctgctgttcgatttgcagccgcaagtcgccgaaagcatgggttatgaaggcttgaacctccgccgccaaagcgaagaactgatgcgcgtgttttaccgcgcgattaaaaccgtcaaacaactgggcggcatcctcacgcctatgctgcaaagccgcgtttcctccaccccgttgcgcgttaccctgcggattgacgacgactacatccaagtcaacaaccaaatcgccgcgcggcacaccgatatttttttcagacggcccgaacacattttcaaaatcgtcgaaatcatgcagcagcgcaacgacattaccgcgctcgaaccgcaaaccctgcgcgcatggtggggcgcgacgcgcaaaatcaaccgcagcttctaccaaaattctgaaaaccgccaccgcttcgccggctttttccgcaacggcaacggactgacccaaaccctgcgcttcctcaacctctacggcgtattgggacgctacctgcccgcgtgggaaaaaatcgtcggcctgctccagcacgacctgttccacatctatcccgtggacgaccacatcctcgccgtcgtccgcaacgtccgccgccttgccttggatatgcacagccacgagctgccctacgcctctgcactgatgcagtcctttgaaaaacaagacatcctctaccttgccgcctttttccatgacatcgccaaaggacgcggcggcgaccatgccatacaaggcatctcagacgcgcgccaatttgccgccgaccacttcctgaccgaagaagaaagcgacctgcttgcctggctggtcgaaaaccatcttcttatgtccatcgtcgcccaaaaagaagacatccaagaccccgacgtactcgatgccttctgcaaacgcgtccaaacccacgaacgcctcagcgcgctctaccttctgaccatttccgacatacgcggtaccaatcccaagctgtggaacgcatggcgcgccagcctgctggaaagcctcttccatgccgccggacgctacctcgcaggcaacggtggcaacccgcacgccctcttcggccgccgccaacaagaagccgccgacttgctcacccgcgccgccgtccccgaaaaacagcagaaaaagctttggaacgcgctcggttccgcctacttcgcccgccaccagtcccgcgaaatcctgtggcacgccgccaacctagtccacgactttgaaacccccatcgtccgcagccgcatcctgcccaaaagcgacagctttcaagtcatggttttcatgcccaacggcccgcgcctgtttgcccgcctctgccgcattttcagccgccacggcttcgatatcctcgccgcccgcgcctttatcaccgaacacgactacatcctcgacaccttcatcgtgcaaattccctcacaacacgcccccgaagactaccccgacattcaaagcgcgcttgaagccgaactcaacagctttatccacggacacaccgttgccgaaacctcaaaccacagccgccgcatcagccgccgcagccgctacatgccgatcgcgccaagcatcaccattacccccgaagaagactaccccgactggtactccgtcgaaattaccgccgtcaaccgccccttcctgctcgccgatatggcggaagtctttttcgcccacaacgtcagcctgcgctacgccaaaatctccacgctggacgaacgcgccgaagacagttttaccgtttttagcctagacctgaaaaacccaaaaatccagtcctcattgaagcaggctttgctggaacagttgacataa

SEQ ID NO: 41809 - DNA, 216 bp, Neisseria meningitidis
gtgttgtggacgatggttgaagcggacgatgccgcattaaccggacaggtacggtttaatatcagttggccgcaacatatcctcaaccgtgtcgatgcctgcactgccgccgtcatgaaacccgagcggttttttggcgaaagccgctttaaaggcgatgcagccttaactttcagcccgattttttcgggcttttttattgccgatgccgtctga

SEQ ID NO: 41810 - DNA, 762 bp, Neisseria meningitidis
atgtgtgcccttaaccctttcaaggaaatcaaaatgtctcaaattactatgcgtcagatgattgaagccggcgttcacttcggccaccaaacccgtttctggaacccgaaaatggctcaatacattttcggtgcgcgcaacaaaatccatatcgtcaacctggaaaaaaccctgccgatgttccaagacgcgcaagaagccgtacgtcgtttggttgccaacaaaggtacagtattgttcgtaggtaccaaacgccaagcccgcgacatcatccgcgaagaagcgacccgcgccggtatgcctttcgtcgattaccgctggttgggcggtatgctgaccaactacaaaaccgttaagcaatccatcaaacgcctggaagaaaaaaccgcagccttggaaaatgctgccgaaagcggtttcagcaaaaaagaaattctggaaatgcaacgcgatgttgaaaaactggaacgttctttgggcggtatcaaaaacatgaaaggcctgcccgacgcgattttcgttatcgataccggctaccaaaaaggtactctggtcgaggctgaaaaactgggcatccccgttatcgccgtagtcgataccaacaacagccctgacggcgtgaaatacgtcatccccggcaacgacgactccgccaaagccatccgcctgtactgccgcggcatcgctgacgcagttttggaaggcaaaaaccaagcgctgcaagaaaccgtagccgctgcccaagaagccgctgccgagtaa

SEQ ID NO: 41811 - DNA, 747 bp, Neisseria meningitidis
atggattttcgttttgacattatttacgaataccgctggatgtttctttacggcgcactgacgaccttggggctgacggtcgtggcgacggcgggcggttcggtattgggtctgttgttggcgttggcgcgcctgattcacttggaaaaagccggtgcgccgatgcgcgtgctggcgtgggcgttgcgtaaggtttcgctgctgtatgttacgctgttccggggtacgccgctgtttgtgcagattgtgatttgggcgtatgtgtggtttccgtttttcgtccatccttcagacggcattttggtcagcggcgaggcggcaatcgcgctgcgtcgcggatacgggccgctgattgccggttctttggcactgatcgccaactcgggggcgtatatctgtgagattttccgcgcgggcatccagtctatagacaaaggacagatggaggcggcgcgttctttggggctgacctatccgcaggcgatgcgctatgtgattctgccgcaggcattgcgccgtatgctgccgcctttggcgagcgagttcatcacgctcttgaaagacagctcgctgctgtcggtcattgctgtggcggagttggcgtatgttcagaatacgattacgggccggtattcggtttatgaagaaccgctttacaccgtcgccctgatttatctgttgatgacgactttcttaggctggatattcctgcgtttggaaaaacgttacaatccgcaacaccgctga

SEQ ID NO: 41812 - DNA, 228 bp, Neisseria meningitidis
atgaaaaactggaagcaatttacatttttcgtaatattagtaatagcttgttatcaattgctatattttttatcagatatgtttcttctcgactacattaacaaatatagttggaatttgaattttattcagggtactttgaattttttttcaatatatctgccatatgtttttgttagccgaatttttaggaatactaaccaagaaaaggagtataaaaatgattga

SEQ ID NO: 41813 - DNA, 171 bp, Neisseria meningitidis
atgatgtttgccaaacattatcaattcatcgcactcggcatcatgctgcttctttatatgttgattctctatacgaccgatttttccaatctgacgtattggatgctgttttttatctgttttattacaggaaaaatattagctcgtttgttagagaaaagctttaaataa

SEQ ID NO: 41814 - DNA, 363 bp, Neisseria meningitidis
atggctcgtattgcaggggtaaatatccctaataacgcacacatcgtaattggtcttcaggctatttacggtattggtgctactcgtgctaaattgatttgtgaggctgcaaatattgcgcctgatactaaagcaaaagatttggacgagactcaattagatgctttgcgtgaccaagttgccaagtatgaagtagaaggtgatttgcgtcgtgaagtaactatgagtatcaagcgattgatggacatgggctgctatcgtggcttccgtcatcgtcgcggcttaccatgccgcggtcaacgcactcgtacaaatgcgcgtacccgcaaaggtccgcgtaaagcgattgctggtaagaaataa

SEQ ID NO: 41815 - DNA, 519 bp, Neisseria meningitidis; identical to SEQ ID NO: 36779

SEQ ID NO: 41816 - DNA, 510 bp, Neisseria meningitidis; identical to SEQ ID NO: 36800

SEQ ID NO: 41817 - DNA, 1749 bp, Neisseria meningitidis
atgattcattataaaataaccccgtcccctctcgaccacgagtggcacatcctgctgacattcacacaagatgatgatcttcctatagaaataagcctgccaaactgggttccgggcagctatctgattcgggatttttcccgccacatcacttctatccatgcatcctgtaacggcacgtccatgccgctcgaacaaattgccaaaaaccgctggcatgccgccgccgtacgcggcgagtggcaaatccgctacaccgtatatgcattcgatttgtcggttcgaggttctttcctgacgacagaacgcggtttttttgacggatcgtgcctgtttttgaaagtcgaaggaacggaaacgctgccgcaccgcttggaattgacgggtattccgtccgaaaggcgtattgccacaacgctgccggaaacagggaggtttgtctttcaggcggcatcttatgccgaattgattgaccgacctgtcgagatgggcttgattgaatttttagattttgaggcggcaggcattccgcacacaattgccttaagcggcatatatcccgatttcgaccgcaacaggctggtttcggatatcaaaaaaatctgcgaaacagaactggcggtgttttcctcccctgccccgtttcaaaaatatttgttcctgctccacgtcggcgaccatatttacggcggtttggaacacaccgacagcaccgccctgctcgccgaccgccacagccttccgccgtacggtatgaccgatgccgacgatacctacaccacattgctcggacttttctcccacgaatattttcacgcgtggaacgtcaaatccatcaaacctgccgcgttcgtcccttatgacctcgacaaagaaaactataccgaacaactatgggcattcgaaggtattacatcctattacgacgatttgtttttggcacgcagccgcaccatctcgcccgaatcttatttaaacctgctggcacaaggcattacgcgcgtacaacaaacccgcggccgtttgaggcagaccttggcggaatcgagttttaccgcgtggaacaaattttacaaaccggatgaaaacagccccaacgccatcgtcagctactaccagaaaggcgcgcttgccgcattgtgccttgatctgataatacgcaaccgaagcaacggcagacattctctcgatacgttaatggacaaactctatcgggagtggagggacacacactcgggtattccggaaaaacactggcaaatccgctgtcaggaaattaccggcttggatttggaagattttttccaaaaagcgttatacagtaccgaagatttgccgcttgccgaatgcctggcaaccgcaggcgtgggactgaccttcctgccgcttccccgacaacacggcggcggatacgcagaacacatctgccccgtcccgtcggcaggcgattttggcgcacgtttcaaacaaaacaccgaccacatcgtcctgacccatgtcttcaacggcggcagcgcggaatctgcggcactgtgcccgcaagacaaaatcattgctttagacggttatgcctgcaccgactttaccgcacaatgggcccgataccacgtcaatgcaaaaatcaatatccacttcttccgtgccggcatattgcgtcaaaccgtcttgacggttcaggcagcggcagcggatactgccatcctacatatcacagactggaacctgttggacaactggttgttcggttaa

SEQ ID NO: 41818 - DNA, 918 bp, Neisseria meningitidis
atgtctgtctataccagtgtttccgatgatgaaatgcgcggcttcctgagcggttacgatttgggggaatttgtttccctgcagggcatcgcgcaggggattaccaacagcaattattttctgacgacgacttcgggacgttatgtgctgaccgtgtttgaagtgttgaaacaggaagagctgccgttttttctggagcttaaccggcatttgagtatgaagggcgtggcggttgccgcgccggttgcgcgcaaagacggccggcttgattccgttttggcgggcaagccggcttgtttggttgcctgcctgaaaggttcggataccgcgctgccgacggctgagcagtgtttccataccggcgcgatgttggcgaaaatgcaccttgccgccgccgatttccctttggaaatggaaaacccgcgttacgatgcgtggtggacggaggcgtgcgcccggctgctgcccgtcctgtcgcaagacgatgccgcactgctgtgttccgaaatcgatgcgttgaaggacaatctcggcaatcatctgccttcgggcatcatccatgccgatctgtttaaagacaatgtgttgcttgacggcggtcaggtatcgggcttcatcgatttctattacgcctgccggggcaattttatgtatgacttggcgattgcggtcaacgattgggcaaggacggcggacaataagttggatgaggcgttgaaaaaggcgtttatcggcggttatgagggcgtgcgccccttgagtgccgaagaaaaggcgtatttcccgaccgcccaacgtgccggctgcatccgtttttgggtgtcgcgcctgttggactttcattttccgcaggcgggcgagatgacgtttatcaaagacccgaacgcgttccgcaacctgctgttgagtttgggttga

SEQ ID NO: 41819 - DNA, 1866 bp, Neisseria meningitidis
atgatagaaaaactgactttcggactgtttaaaaaagaagacgcgcgcagctttatgcgcctgatggcgtacgtccgcccctacaaaatccgcatcgttgccgccctgattgccattttcggcgttgccgccaccgaaagctaccttgccgccttcatcgcccccctgattaaccacggcttttccgcacctgccgcgccgcccgagctgtctgccgccgccggcatcatttccaccctgcaaaactggcgcgaacagtttacctatatggtttgggggacggaaaacaaaatctggaccgtccccctcttcctcatcatcctcgtcgtcatccgtggcatctgccgctttaccagcacctatctgatgacttgggtctccgtgatgaccatcagcaaaatccgcaaagatatgtttgccaaaatgctgaccctttcctcccgctaccatcaggaaacgccgtccggcaccgtactgatgaatatgctcaacctgaccgaacagtcggtcagtaacgccagcgacatcttcaccgtcctcacgcgcgacacgatgatcgttaccggcctgaccatcgtcctgctttacctcaactggcagctcagcctcatcgttgtcctgatgttccccctgctctccctgctctcgcgctactaccgcgaccgtctgaagcacgtcatttccgactcgcaaaaaagcataggcacgatgaacaacgtgattgccgaaacccatcagggacaccgcgtcgtcaagctgttcaacgggcaggcgcaggcggcaaaccggtttgacgcggtcaaccgcaccatcgtccgcctcagcaaaaaaatcacgcaggcaacggcggcacattccccgttcagcgaactgattgcctcgattgccctcgccgttgtcatcttcatcgccctgtggcaaagccaaaacggctacaccaccatcggcgaatttatggcattcatcgtcgcgatgctgcaaatgtacgcacccatcaaaagccttgccaacatcagcatccctatgcagacgatgttcctcgccgccgacggcgtatgtgcatttctcgacaccccgcccgaacaggacaaaggcacgctcgcgccgcagcgtgtcgaagggcgtatcagcttccgcaacgtcgatgtcgaataccgttcggacggcatcaaagccctcgacaacttcaacctcgacatcagacaaggcgaacgcgtcgccctggtcggacgttccggcagcggcaaatccaccgtcgtcaacctgctgccccgctttgtcgaaccgtctgccggcaacatctgcatagacggtatcgacatcgccgacatcaaactcgactgcctgcgcgcccaattcgccctcgtctcccaagacgtattcctgtttgacgacaccctgtttgaaaacgtccgatacagccgtcccgacgcaggcgaagccgaagtcctatccgccctccaagccgccaacctgcaaagcctgatcgacgcatcaccgctcggactgcaccagcccatcggatcgaacggcagcaacttatccggcggacagcggcaacgcgtcgccattgcccgcgccattttgaaagacgcgccgatattattattggacgaagccaccagcgcattagacaacgaatccgaacgcctcgtccaacaggcgctcgaacgcctgatggaaaaccgcaccggcatcatcgtcgcccaccgcctgaccaccatcgaaggggccgaccgcatcatcgtaatggacgacggcaaaatcatcgaacaaggcacacacgaacaactgatgtcccaaaacggctactacacaatgttacgcaatatctcaaacaaagatgccgccgtccggacggcataa

SEQ ID NO: 41820 - DNA, 1002 bp, Neisseria meningitidis
atgcagtttccttaccgcaatgttccggcttcgcgtatgcgccgtatgcgcagggacgatttttcacgccgcctgatgcgcgaacacacgctgaccgccgatgatttgatttatccggtgttcgtattggaggggtcggcgcgcgaggaggatgtgccttctatgccgggtgtgaagtgtcaaagtttggacaggctgctgtttacggcggaggaagcgtcaaatttgggaatacccatgctggcactattccctgtcgttacgacaaataagacagaatgtgcgcaggaggcgtataaccctgaaggactggtgccgacagccgtccgagccttgcgcgagaggtttcccgaactgggcattatgacggatgtcgcgctcgatccttatacggtgcacggtcaggacgggctgacggacgaaaacggttatgtgatgaacgatgaaaccgtagaggttttggtcaagcaggctttgtgccacgctgaagcgggcgcacaggtggttgccccttccgatatgatggacgggcgtatcggtgcgattcgcgaggcgttggaggatgccgggcatatccacgcgcggattatggcgtattccgccaaatatgcttcggcgttttacgggccgttccgcgatgcggtgggcagttcgggcaatttgggcaaggcggacaagaaaacctaccagatggatccggcaaataccgatgaggcgctgaatgaagtggcgctcgatattcgggaaggtgcggatatggtgatggtgaagcccggtttaccgtatttggacgttgtccgccgcgtgaaggacgagttcggcgtaccgacttatgcctatcaggtttcgggagaatacgcgatgttgcaggcagcgattgccaacggctggctggacggcggcaaagtggttttggaaagcctgctggcattcaaacgtgcgggtgcggacgggattttgacctattacgctattgaggcggcaaagatgttgaagcgttga

SEQ ID NO: 41821 - DNA, 270 bp, Neisseria meningitidis; identical to SEQ ID NO: 39117

SEQ ID NO: 41822 - DNA, 807 bp, Neisseria meningitidis
atgcaaaaccacgttatcagcttagcttccgccgcagaacgcagggcgcacattgccgataccttcggcaggcacggcatcccgtttcagtttttcgacgcactgatgccgtctgaaaggctggaacaggtaatggcggaactcgtacccggtttgtcggcgcacccctatttgagcggagtggaaaaagcctgctttatgagccacgccgtattgtggaaacaggcattggacgaaggtctgccgtatatcgccgtatttgaagatgatgtcttgctcggcgaaggcgcggagaaattccttgccgaagacgcttggctgcaagaacgctttgaccccgattccgcctttatcgtccgcttggaaacgatgtttatgcacgtcctgacctcgccctccggcgtggcggactactgcgggcgcgccttcccgctgttggaaagcgaacactgggggacggcgggctatatcatttcccgaaaggcgatgcgtttctttttggacaggtttgccgttttgccgtctgaacgcctgaaggcggtggattggatgctcttcagcagttttctcgacaaaggggggatgacggtttgccaactgacccccgccttgtgcgtccaaagcgaaaccctgcccagccaactgaaaaacggcaggcaggaatcgtaccgcaaccgccgctccccgaaggttttgttgaaacgcgctttgggaaaaatcggcagggaaatcgaaagggcgagggaacggaaacgtcagaaaaaattggaaaaacacctcgggcggcacgtcgtcccgtttgaatag

SEQ ID NO: 41823 - DNA, 840 bp, Neisseria meningitidis
atgcaaaaccacgttatcagcttagcttccgccgcagaacgcagggcgcacattgccgataccttcggcaggcacggcatcccgtttcagtttttcgacgcactgatgccgtctgaaaggctggaacaggtaatggcggaactcgtacccggtttgtcggcgcacccctatttgagcggagtggaaaaagcctgctttatgagccacgccgtattgtggaaacaggcattggacgaaggtctgccgtatatcgccgtatttgaagatgatgtcttgctcggcgaaggcgcggagaaattccttgccgaagacgcttggctgcaagaacgctttgaccccgattccgcctttatcgtccgcttggaaacgatgtttatgcacgtcctgacctcgccctccggcgtggcggactactgcgggcgcgccttcccgctgttggaaagcgaacactgggggacggcgggctatatcatttcccgaaaagcgatgcggtttttcctgcaacatttcgtaatgttgcagccggaacagataaaacctatcgacttaatgatgttcagtgattttttcgataaggaggggatgcctgtttatcaggtcagtccggccttgtgcgcccaagagctgcattatgccaagtttcacgaccaaaacagcgcattgggcagcctgatcgaacacgaccgcctcctgaaccgcaaacagcaaaggcgcgattcccccgccaacacattcaaacaccgcctgatccgcgccttgaccaaaatcagcagggaaagggaaaaacgtcggcaaaggcgcgaacagttaatcggcaagatcattgtgcctttccaataa

SEQ ID NO: 41824 - DNA, 1515 bp, Neisseria meningitidis
atgactacctccaaatgccctgtaacccatctgaccatgaacaacggcgcgcctgttgccgacaatcaaaacagcctgaccgccggtcctcgcggccctctgctggcgcaggatttgtggctgaatgaaaaactcgccgacttcgtgcgcgaagtcatccccgaacgccgtatgcacgccaaaggttcgggcgcgttcggtacgtttaccgtaacgcacgacatcaccaaatacacccgcgccaaaatcttcagcgaagtcggcaaaaaaaccgagatgttcgcccgtttcaccaccgtggcaggcgaacgcggcgcagccgatgcagaacgcgacatccgcggttttgcgttgaagttctataccgaagaaggcaactgggatgtggtcggcaacaacacgcccgtgttcttcctgcgcgacccgcgtaagttccccgacctgaacaaagccgtcaaacgcgacccgcgcaccaatatgcgctctgccacaaacaactgggacttctggacgctgctgcccgaagcactgcaccaagttaccatcgtgatgagcgaccgcggcatccccgccggctaccgccatatgcacggcttcggttcgcatacctacagcttctggaacgaagcaggcgagcgtttttgggtgaaattccatttccgcacccaacaaggcattaaaaacctgaccaacgaagaagccgccaaaatcatcgccgacgaccgcgaaagccatcagcgcgacttatacgaagccatcgaacgcggcgagtttccgaaatggacgatgtacatccaagtcatgcctgaagcagacgcggaaaaagtaccttatcatccgtttgacttgaccaaagtttggccgaaaaaagactatccgctgattgaagtgggcgaattcgagttgaaccgcaatcccgaaaacttcttcgccgatgtggaacaatccgccttcgcaccgagcaacctcgttcccggtatcggcgcgagcccagataaaatgttgcaagcccgtttgttcaattacgccgacgcgcaacgctaccgcttgggcgtgaacttccgccaaatccctgtcaaccgtccgcgttgccctgttcacagcaaccagcgcgacggacaaggacgcgccgacggcaactacggcagcctgccgcactacgaacccaatagcttcggccaatggcagcaacaacccgacttcgccgaaccgcctttgaaaatcaacggcgacgcggcgcactgggactaccgccaagacgatgacgactatttcagccaaccgcgcgccctgttcaacctgatgaacgacgcgcagaaacaggcattgttcggcaacaccgccgccgcaatgggcgacgcgcccgacttcatcaaataccgccatatccgcaactgctaccgttgcgatccggcatacggcgaaggcgtggcaaaagccctcggactgactgtcgaagacgcacaagccgcccgcgcgaccgaccccgcactgggtcaggctggtttgctgtaa

SEQ ID NO: 41825 - DNA, 1224 bp, Neisseria meningitidis
gtgggacgcagaaaactttggtttgccctggcagcagcaggcgttatcggcggtttggtcggcattgtgctgacggaactgatgcacttcatacagcatacggcatacggttatggcgcggacggtgcgtacatctcgttccgcgaaggtgtggcccgtgcttcggaagggcggcgtttaggcgtattgattctgtgcggtatgttggcaggcggcggctggtggttgctcaaacgtttcggtaagccgcaaatcgaaatcaaagccgccttgaagcagccgttgcaggggctgccgtttctgacgacggttttccatgttctgctgcaaatcataacggtcggactcggttcaccgctcggacgggaagtcgccccgcgtgaaatgactgccgcgttcgcttttgccggcggcaggcggttgggtttggatgaagacgaaatgcggctgctgattgcttgcgcttcgggtgcgggtttggcggccgtgtataacgtgccgctcgcctccacactttttatcctcgaagccatgctgggcgtgtggacgcagcaagccgtcgccgccgcattgctgacttccgtcatcgccaccgccgtcgcgcgcatcggcttaggcgacgtgcagcaatatcatccggctaaccttaccgtcagcacctcattactttggttttccgccgtcatcggcccgatactgggcgcaaccgccgtctttttccagcgcacagcccaaaagtttccctttatcaagcgcgacaatattagaatcattctcttggcagtctgcatgtttgcgctcatcggcgtgatttccgtttggtttcccgaagttttgggcaacggcaaagcaggcaaccaactgacttttagtggtttgaccggttggcaatacgctttggaacttgccgccgtcaaatggccggtcgtcttgatggcgctggcggcaggcgcatacggcggactgattacgccgtcgatgatgcttggcagcaccgtttcttttgctgccgccgccgcgtggaacagtgttttccctgcaatgccgtctgaaagcgcggcagtcgtcggagcggcggtgtttctcggcgtatcgctcaaaatgccgctgaccgccattgtgttcgtattagaactgacctacgcgccgctgtccctgctgctgcctttgtgcatcggcatggcgggggcattgggaacatcgggaaaaatgggcttcaaatga

SEQ ID NO: 41826 - DNA, 1221 bp, Neisseria meningitidis
atgaccctattttgcgaacaagtcccctacccccgccttgccgaagcattcggcacgccgctttatgtgtacagccaatccgcgctgaccgaagcatttgaacactaccaaactgcctttgccgctttgaacccgcttgtctgctatgccgtcaaagccaatggcaatctgagcatcatcaaacacttcgcctcgttgggcagcggtttcgacattgtgtccggcggtgagttggcgcgtgttttggcggcaggcggcgatgcagcgaaaacgattttttccggtgtgggtaagagtgaagcagaaattgagtttgccctgaatgcaggcgtgaaatgcttcaatatggaaagcattcccgaaatcgaccgcattcaaaaggttgccgcgcgtttgggcaaaaccgcgtccgtctccctgcgcgtcaaccccgatgtcgatgccaaaacccatccctacatctccacaggtctgaaagccaacaaattcggcatcgcctacgccgacgcgctcgaagcctaccgccatgccgcacaacagcccaatttgaaaatcatcggcatcgactgccacatcggctcccaactaaccgacttaagcccgctggtcgaagcctgcgaacgcattttgattttggttgacgcgcttgccgccgaaggcattgttttggaacatttggacttaggcggcggcgtcggcattgtttaccaaaacgaaaaagtgcctgatttgggcgcgtatgcccaagcggttcaaaaactgatcggcacacgccgtctgaaactcattcttgagcccggccgcagcttggtcggcaacgcaggcgcgttgttgacgcgtgtcgaattcgtcaaatacggcgaagagaaaaactttgtgatggtcgatgcggcgatgaacgatttaatgcgccccgccctatatgatgcctatcatcacatcgaagcggttgaaaccaaagacattgagcctctgacggccaatatcgtcggcccgatttgtgaaaccggcgacttcctcggcaaagaccgcaccatcgcctgcgaagaaggcgatttgctgcttatccgcagcgcgggcgcatacggggccagtatggcgagcaattacaacgcgcgcaaccgtgcggcggaagttttggtagacggcaacgaataccgactcatccgcctgcgcgaaaccttggaacagcaaatggcaaacgaactcgcctgcctgtaa

SEQ ID NO: 41827 - DNA, 1548 bp, Neisseria meningitidis; identical to SEQ ID NO: 38578

SEQ ID NO: 41828 - DNA, 498 bp, Neisseria meningitidis
atgaaaaagaacatattggaattttgggtcggactgttcgtcctgattggcgcggcggcggtcggctttctcgctttccgcgtggcgggcggtgcggcgttcggcggttcggacaaaacttacgccgtttatgccgatttcggcgacatcggcggtttgaaggtcaatgcccccgtcaaatccgcaggcgtattggtcgggcgcgtcggcgctatcgggcttgacccgaaatcctatcaggcgagggtgcgcctcgatttggacggcaagtatcagttcagcagcgacgtttccgcgcaaatcctgacttcgggacttttgggcgaacagtacatcgggctgcagcagggcggcgacacggaaaaccttgctgccggcgacaccatctccgtaaccagttctgcaatggttctggaaaacctgatcggcaaattcatgacgagttttgccgagaaaaacgcggcgggcggcgacgatgcggcaaaagccaccgaataa

SEQ ID NO: 41829 - DNA, 729 bp, Neisseria meningitidis
atgaccaaacagctgaaattaagcgcattattcgttgcattgctcgcttccggcactgctgttgcgggcgaggcgtccgttcagggttacaccgtaagcggccagtcgaacgaaatcgtacgcaacaactatggcgaatgctggaaaaacgcctactttgataaagcaagccaaggtcgcgtagaatgcggcgatgcggttgctgcccccgaacccgagccagaacccgaacccgtacccgcgcctgtcgtcgttgtggagcaggctccgcaatatgttgatgaaaccatttccctgtctgccaaaaccctgttcggtttcgataaggattcattgcgcgccgaagctcaagacaacctgaaagtattggcgcaacgcctgagtcgaaccaatgtccaatctgtccgcgtcgaaggccataccgactttatgggttctgacaaatacaatcaggccctgtccgaacgccgcgcatacgtagtggcaaacaacctggtcagcaacggcgtacctgtttctagaatttctgctgtcggcttgggcgaatctcaagcgcaaatgactcaagtttgtgaagccgaagttgccaaactgggtgcgaaagtctctaaagccaaaaaacgtgaggctctgattgcatgtatcgaacctgaccgccgtgtggatgtgaaaatccgcagcatcgtaacccgtcaggttgtgccggcacacaatcatcaccaacactaa

SEQ ID NO: 41830 - DNA, 477 bp, Neisseria meningitidis
atgcaaaaaatccccctgaccgtacgcggtgcggaattgctgaaacaggaattgcagcagctcaaaagcgtggcgcgtcccgaagtgatcgaagcgattgccgaagcccgttcgcacggcgatttgtctgaaaacgccgaatacgaagccgccaaagaacgccaaggctttatcgagggccgcatttccgagctggaacacaaactttccgttgcccacatcatcaatccgaccgaaatccacgccgaaggcaaaatcgtgttcggtacgacggttacgctggaagatttggaaacggaagaacacgttacctatcaaattgtcggcgaagacgaagccgacatcaaacagggcaaaatctatgtcggctcacccatcgcccgcgccttaatcggcaaggaagagggggatacggcggaagtccaagccccgggcggcgtgcgcgaatacgacattatcgaagtccgatatatttga

SEQ ID NO: 41831 - DNA, 135 bp, Neisseria meningitidis
atgccgtctgaaaggattttccggtcaatcttgcgattggtcggggtttcatcggaaacggtgaaacaaaagtttgccggcgtagagttgagctacgcgggcaaagccgcaggcgaaagcctgtattgtttgtga

SEQ ID NO: 41832 - DNA, 534 bp, Neisseria meningitidis
atgtcgaaaaaatggtatgttgtacaggcgtattcggggtttgagaagaatgtccaacgaatattggaagagcgcattgcccgtgaggagatgggagattatttcggacaaattctggtgcctgtagagaaagttgttgatatccgcaatggtcgtaagactattagtgaaagaaagtcatatcctggttatgtgctagttgagatggaaatgacagatgactcttggcatcttgtaaaaagcaccccccgtgtttccggttttattggagggagggctaatagacctacgccgattagtcagagagaggctgaaattattttacagcaggttcagaccggcatagagaagccgaaaccaaaagttgaatttgaggtcggtcaacaggttcgtgtaaatgaagggccgtttgcggattttaacggggtggttgaggaggtcaattatgaacggaataagttacgtgtgtctgttcagatatttggtagagaaacacccgttgagctggagttcagccaggttgaaaagattaac

SEQ ID NO: 41833 - DNA, 417 bp, Neisseria meningitidis
atgctgcagccaactagactgaaataccgtaagcaacaaaagggtcgcaataccggcatcgctactcgcggtaataaggtaagtttcggtgagttcggcttgaaagccgtaggtcgtggtcgtttgactgcccgtcaaatcgaagctgctcgtcgtgcaatgacccgtcatatcaaacgtggtggtcgtatttggattcgtgtattccctgataaaccgattactgaaaagcctattcaagtccgtatgggtggcggtaaaggtaacgtggaatattacattgccgaaattaaaccaggtaaagtgttgtatgaaatggatggcgttccagaggaactggctcgtgaagcattcgagttggctgctgccaaattgcctattcctacaacctttgtagtaagacaggtgggtcaataa

SEQ ID NO: 41834 - DNA, 501 bp, Neisseria meningitidis
atggcggatttgcagaaaacttttcaaacttcgttccgtgatgcgatggcatcttgtgcggcaggcgttcatgtcatcacgacagacggtgcggcagggcgttacggcattacaatgacggcggttacaccggttacggacgagccgccgaccgtgatgctgtgcatcaaccggagtgcgcgaatcattccgatcctgtcggaaaacggcagcctctgcatcaatacgctggcggacgaacatcaggatgttgccgaacattttgccgggctgaccgggctgtcgcccgaagagcggtttgcctatcatatttggcattacggtaaaaccggacaacctgaaatagaaggcgcgttggcgcatctgcacgggcatattgtcggccaacatgaaatcggcacacattttgtgttttacgtcaggctcgacgaaattaaaaattgcgtgggcaaacgtcccgcgctgctgtatttcagacggcagtttagatttttagactga

SEQ ID NO: 41835 - DNA, 642 bp, Neisseria meningitidis
atgtcaatacctattaatttcaataatttaaagtatttgcttaatgatatgagaaacaaaaatagaataattgaagcatttccttttaattataatcaaaggcaatacgccgttattttgactaggtataaacctgatgaacctagaccagatgattatgcacaagcaaaattagagttttttaatttgaatagtgaaaattcaatatttgcgtatgctgatttttatgaagttcattttaaaagtgctactgattttattaatttttttaaaattaatgttcaggctggtgctgcgaaaatcagagaaatttttcagagttttagtaatctttttgcagatttcattccaacacaaactaaaaaagatttagacataatttataaaaagattgtagctactcgtttagaacctaattctcctaacactatttattgctatgatgtccgtagaaatgggaaagataaggctggcaagcctaatcgcaggagcgtggaaaatagtgaaaaagcaaaaattttgcgcccagagctatacgaaaaatttaaagccgatagtaattacagttttttcttttcagataatccaagcgatgaaaaaacagatgcagaaataattagagaagttaccaatcgtcaataa

SEQ ID NO: 41836 - DNA, 864 bp, Neisseria meningitidis; identical to SEQ ID NO: 39125

SEQ ID NO: 41837 - DNA, 960 bp, Neisseria meningitidis
atgagcaccttcttccggcaaaccgcccaagccatgattgccaaacacatcgaccgtttcccgctattgaagttggaccaggtgattgattggcagccgatcgaacaatacctgaaccgtcaaaaaacccgttaccttagagaccaccgcggccgtcccgcctatcccctgttgtccatgttcaaagccgtcctgctcggacaatggcacagcctctccgatcccgaactcgaacacagcctcattacccgcatcgatttcaacctgttttgccgctttgacgaactgagcatccccgattacagtactttatgccgttaccgcaactggctggcgcaagacgacaccctgtccgaattgctcaaactgattaaccgccaactgaccgaaaaaggcctaaaaatagagaaagcatccgccgctgtcgttgacgccaccattattcagaccgccggcagcaaacagcgtcaggctatagaagttgacgaagaaggacaaatcagcggccaaaccacaccgagtaaggacagcgatgcccgttggatcaagaaaaacggcctctacaaactcggttacaaacaacatacccgtaccgatgcggaaggctatatcgagaaactgcacatcacccccgccaatgcccatgagtgcaaacacctgtcgcctttgctggaagggatagccgaaggtacgaccgtctatgccgacaaaggctacgacagtgcggaaaaccggcaacatctggaagaacatcagttgttggacggcattatgcgcaaagcctgccgcaaccgcccgctgtcggaagtgcaaaccaaacgcaaccgatatttgtcgaagacccgttatgtggttgaacagagcttcggtacgctgcaccgtaaattccgctacgctcgggcagcctatttcggactgatttgcgcccgctgccgcctaaaaggcagcccggatgcctga

SEQ ID NO: 41838 - DNA, 312 bp, Neisseria meningitidis
atggcaaaccaaaaaatccgtatccgcctgaaagcttatgattacgccttgattgaccgttctgctcaagaaatcgttgaaactgcaaaacgtaccggtgcagttgtaaaaggcccgattcctttgccgaccaaaatcgagcgtttcaacattttgcgttctccgcacgtgaacaaaacttcccgtgagcaattggaaatccgcacccacttgcgcctgatggacatcgtggattggaccgataaaactaccgatgcgctgatgaagctagatttgccggccggtgttgatgtagaaatcaaagtccaataa

SEQ ID NO: 41839 - DNA, 1692 bp, Neisseria meningitidis
atgataaaatgcccgtcaataccgattaacgggcattttacaaaaatcagttggttgattttaaacaaatattttttacgacaaaaaatatttccgcccattttgccaacaaaacccaaaccggaggcggacagatacgctcccatccggacgcttaacacccccataaccatgcagctgatcgactattcacattcatttttctcggttgtgccaccctttttggcactggcacttgccgtcattacccgccgcgtactgctgtctttaggcatcggtattctggtcggcgttgcctttttggtcggcggcaaccccgtcgacggtctgacacacctgaaagacatggtcgtcggcttggcttggtcagacggcgattggtcgctgggcaaaccaaaaatcttggttttcctgatacttttgggtatttttacttccctgctgacctactccggcagcaatcaggcgtttgccgactgggcaaaacggcacattaaaaaccggcgcggcgcgaaaatgctgaccgcctgcctcgtgttcgtaacctttatcgacgactatttccacagtctcgccgtcggtgcgattgcccgccccgttaccgacaagtttaaagtttcccgcgccaaactcgcctacatcctcgactccactgccgcgcctatgtgcgtgctgatgcccgtttcaagctggggcgcgtcgattatcgccacgcttgccggactgctcgttacctacaaaatcaccgaatacacgccgatggggacgtttgtcgccatgagcctgatgaactattacgcactgtttgccctgattatggtgttcgtcgtcgcatggttctccttcgacatcggctcgatggcacgtttcgaacaagccgctttgaacgaaacccatgatgaaaccgccgtttcagacggcagccggggcagggtttacgcattgattattcccgttttggccttaatcgcctccaccgtatccgccatgatctacaccggcgcgcaggcaagcgaaaccttcagcattttgggggcatttgaaaataccgacgtaaacacttcgctggtcttcggtggcacttgcggcgtccttgccgtcgttctctgcacgctcggcacgattaaaaccgccgactatcccaaagccgtttggcagggtgcgaaatctatgttcggcgcaatcgccattttaatcctcgcttggctcatcagtacggttgtcggcgaaatgcacaccggcgattacctctccacactggttgcgggcaacatccatcccggcttcctgcccgtcatcctcttcctgctcgccagcgtgatggcgtttgccacaggcacaagctgggggacgttcggcattatgctgccgattgccgccgccatggcggtcaaagtcgatcccgcgctgattatcccgtgtatgtccgcagtaatggcgggggcggtatgcggcgaccactgttcgcccatctccgacacgaccatcctgtcgtccacaggcgcgcgctgcaaccacatcgaccacgttacctcgcaactgccttacgccttaaccgttgccgccgccgccgcatcgggctacctcgcattgggtctgacaaaatccgcgctgttgggctttggcacgacaggcattgtattggcggtgctgatttttctgttgaaagataaaaaactcgccaacgcctga

SEQ ID NO: 41840 - DNA, 792 bp, Neisseria meningitidis
atggcaagacatccctaccgccgcctccgtcctgcaaaatcctgctttcccgaagtcggcatttccgaagaaggcaatatccgttcgcttcacttgggcagcgacaccgttcaaagctcgatgaacctcgaccgcccgtccgagctggtactctcttacagccgcgcgatgatgggatggctgctgtttaccgacgcgcttccgcagcatatcacccaaatcggcttgggcggcggttcgtttgcacgctggatagatacctacctgcccgatacacgtcaaactgctgtagatatcaacccgcaggttatcgccattgcccgcaacctgtttgagttgcctttcgagggcgagaaatttgaaattattgaagcagacggtgcggaatatatcaaagtcttccgccacaacaccgatatcatcttggtggacgggttcgacggcgaacaaatcatcgatacgctggttgaagaaccgttcttccgagactgccgaaacgcactctcttcagacggcatattcgtaaccaactggtggagcggcgacaaacgctaccaacgcttcatcgaacggttgttgagcgtttttgaagggcgcgtattggaacttcctgccaaaagtcacggcaatgtcgcggtaatggctttccaaagcagccccaaagagcaaaacatagacaaactcaaaaaacgtgccgacaaactgagcaacgcttacggattggacttccaccgcatgctcgccgacctgaaagcatccaaccccaacaacggcaaacatttctacctttaa

SEQ ID NO: 41841 - DNA, 750 bp, Neisseria meningitidis; identical to SEQ ID NO: 36547

SEQ ID NO: 41842 - DNA, 666 bp, Neisseria meningitidis
atgatgatgcacgcttctgtccaaagccgtttcgcaccgatactttatgttttgattttctttgccggttttttgaccgcgcaaatttggttcaatcagaaagcctatactgaagagctgcctccgcttctgtccgcattgtccgccgtcgcgctggtgtggctggcgtgggcgttcgtgtcggcgcgttcaagggctaaggcggaaaagttctaccgcgaaaaaatgatacagaacgaaagcatacaccccgtcctgcacgcttctttgcaacacttggaacacaagccgcaaatgctcgccctgctggtcaaaaaccacggcaaagggatggcggaacaggtcaggttcaaggcggaagtgctgcccgacgacgaagacgcgcgcacgattgccgccgagttggcaaaaatggatatgtttgcattggggacggacgcggtcgcctcgggcgaaacctatggacgcgtgttcgccgatattttcgagttgtcggcggctttggaagggcgcgcgttcaaaggaatgttgaaactgacggcggaatataaaaacatcttcggcgatgcctgccgttcggaaacggcgttggatttgggcgcgctcaatcaggcgttgcaggagatttcaaaaacatcggaaaagtccaaacggatattttattga

SEQ ID NO: 41843 - DNA, 291 bp, Neisseria meningitidis; identical to SEQ ID NO: 40521

SEQ ID NO: 41844 - DNA, 1056 bp, Neisseria meningitidis
atgattacacttgccgtagatgccatgggcggcgaccaaggacttgccgttaccgtacccggcgcaaccgcattcctccaagcacaccccgatgtccgcctgattatgaccggcgacgaaacgcaactgcgccaagccctgaccgcggcaggcgcaccgatggaacgcatcgacatctgccacaccgcacaaatcgtcggcatggacgaagcgccgcaatccgccctgaaaaacaaaaaagactcctccatgcgcgtcgccgtcaaccaagttaaagaaggcaaagcccaagccgccgtatccgcaggcaacacgggtgcgctcatggcaaccgcacgtttcgtcctcaaaaccattcccggcatcgaacgccccgccatcgccaaattccttccttccgacaccgaccacgttacccttgcactcgaccttggcgcgaacgtcgactgcacgcccgaacagctcgcccaatttgccgttatcggcagcgaactcgtccacgcactccatcctcaaaaaggacagccgcgcgtcgggctggtcaacgtcggcacggaagacatcaaaggtacggacaccgtcaaacaaacctacaaactgctgcaaaacagcaaactcaactttatcggcaacatcgaaagcaacagcatcctgtacggcgaagcagatgtcgtcgtcgccgacggctttgtcggcaacgtcatgctcaaaaccatcgaaggcgcggtcaaattcatgagcggagccatccgccgcgaattccaaagcaacctgttcaacaaacttgccgccgttgccgccctgcccgccctcaaagggctgaaaaacaaactcgatccgcgcaaattcaacggggccatcctgctcgggctgcgcggcatcgtcatcaaaagccacggcggcacagacgaaaccggtttccgctacgcactcgaagaagcctaccacgaagccaagtccgccggcctttccaaaatcgaacaaggcgttgccgaacaactcgccgcactcgaaactgccaaagccgtccaaaacgaaaatgtcggcggtctgtaa

SEQ ID NO: 41845 - DNA, 531 bp, Neisseria meningitidis; identical to SEQ ID NO: 38478

SEQ ID NO: 41846 - DNA, 696 bp, Neisseria meningitidis; identical to SEQ ID NO: 38171

SEQ ID NO: 41847 - DNA, 483 bp, Neisseria meningitidis
atgaacctgctgacactgttacgccccgccaccgtgcaagactgcaaagacatcttcaaagtccacctgcactccgtccaatacacctgcatcctcagctacaacgaacacgccctaaaagtatgggaaggcttgttaaacacagaaagctacctgccgaccatttccgatcccgacaaagcactttgggttgccgaatacaaaggcaacatacagggatttttccaaatcgactgccaagaagcacaactcgatgcactttacgtccaccccctgttccacaacctcggactgggcactgccctacttcatcaggcggaaaccatcgcccacaaatccggtttgagctttctgaaactctacgcatcgctcaactcagtcccgttttaccttctcaaccgctacgaatcgctcggttcggcagtattgcagcttgaccccagcatcaaaatcaaatgcgaactgatgcggaaacacctctga

SEQ ID NO: 41848 - DNA, 1647 bp, Neisseria meningitidis
atgaaacaccttcacgacttacccgcatggtcgaaattgtggaaccactttgacgacagcaaaacattgcatatgcgcgaaatgttcgagcaagacccgcagcgtgcggaacgctactggctgcaagtcggcggactgacgctggactactccaaaaaccgcatcaacgacgaaaccatgtcgcttttgttcgagcttgcccgagaagcaggcgtgccggagcggatgcggcagatgttccacggcgaaaaaatcaataccaccgaaaaccgcgccgtcctgcatgtcgcccttcgcaaccgcaccaattcgccgattgtggttgacggtgaagatgtgatgcccaaagtcaaccgcgttttgcaacgtatgggcgaatttgcacacgaagtccgcagcggaagctggctgggctataccaaccaagtcattaccgacgttgtcaacatcggcatcggcggatcggatttgggtccgctgatgatgtgtaccgcgctcaaacctttcggtcatccgcgcctcaatatgcacttcgtctccaacgtggacggctcgcaactgcgcgacgtattgtccaaagtccaccccgaaaccacgttgttcatcatcgcctccaaaacatttaccacgcaggaaacgctgaccaacgcgctgaccgcgcgcgaatggtttttgaatcatgcgggcgacgaagaagccgttgccaaacacttcgccgccgtttccaccaatcaaaaagccgtcgccgaattcggcatcgacaccgccaatatgtttgaattttgggattgggtcggcggtcggtacagcctgtggtccgccatcggattgccgattatgctgtatctcggcgaagaaaacttcatcgaaatgctcaacggcgcgcacctgatggaccaacacttcatcaacacaccgctcgagcgcaacctgcccgtcattctcgccctcatcggcatctggtatatcaactactacggcggcggcagccacgtcatcgcgccttacgaccaacatttgcaccgcctgcccaaattcatccagcagctcgatatggaaagcaacggcaaacaggttacgttggacggcaaagcagtcggacacgaaacctcgccgattatctggggcgaaacgggcattaacggccagcacgccttcttccaactgctgcaccaaggcacgcacattacccccatcgacctgattgcctcgcttgaaaaacgcagcaacctgcccggacaccacgaaatcctgcttgccaacgtcttcgcccaagcagaagcctttatgcgcggcaaaacccccgacgaagtccgcgccgaactcaaagcgcagggtatggatgaggcgcgcatcgaagagctggtcccgcacaaaaccttctccggcaaccgcccgaccaacctcattctcatggacaaggtcaacccgcgcaatatgggcagcctgattgccatgtacgaacacaaaaccttcgtacaaggcatcatttggggcatcaacagcttcgaccagtggggcgtggaactcggcaaacaactggctaaaaccattttgggcgaactgaccggcgaaaccgagccgcaaaagcacgacagttcgaccgaacgcctgatcaacctctacctgcagaccaaccgcaaataa

SEQ ID NO: 41849 - DNA, 534 bp, Neisseria meningitidis
atgtcacgtgtcgcaaaaaacccagtgactgttcccgctggtgtagaagtaaaatttggaacagaggcattagttattaagggtaagaacggtgaattgtcttttcctttgcattctgatgtagccattgaatttaatgatggcaaattgacttttgttgcaaataacagcagtaaacaagcaaatgcaatgtctggtactgctcgcgcattagtcagcaatatggttaaaggtgtttcagaaggttttgagaaaagattgcaattgataggtgtgggttatcgtgctcaagcacaaggtaaaatcttgaatctgtctttgggtttttctcatccgatcgtatatgaaatgcctgaaggtgtctccgttcaaactcctagccaaacagagattgttttaaccggctcggataaacaagttgttggtcaagttgctgctgagattcgtgcgttccgtgctcctgagccttataaaggtaaaggtgttcgctatgtaggcgaagtagtggtaatgaaagaagccaagaaaaaataa

SEQ ID NO: 41850 - DNA, 351 bp, Neisseria meningitidis
atggctttgcgcactcactttgtcatttccaatgttccaagtacacctaatctgctaagaggaagacagcttgaaggaaaacttattttagaagttcctgctcaggtcaatccaattccacaatctgtattaagggcggcacaagaagaaaatgttatcattagagatacaacaggaaggatttacaataggtggtggtttagtattaggtggttgtgcaggtgcacatcttgcaagaaaagaatcattgatactaacagggaaaacaggggcaggtgcgtcagcaattgcaaatgcaagcattggatatcaatggactgtcaatttgtcagagccaaaagaaggagctaa

SEQ ID NO: 41851 - DNA, 891 bp, Neisseria meningitidis
atgaacagcccttttcacaacatcggcatcgtaacccgccccaacacgcccgacatccaagacaccgcacacacgctgattacctttttgaagcagcacggctttaccgtctatctcgacgaagtcggcataaaggaaggctgcatctatacccaagacaccgtcggctgccatatcgtcaacaagaccgaactggggcaatactgcgacctggtcgccgttttaggcggagacggcacctttctctccgtcgcccgcgaaatcgccctgcgcgccgttccgattatcggcatcaaccaagggcatttgggcttcctgacccaaattccccgcgaatatatgacggacaagctattgcccgttttagaagggaaataccttgccgaagagcgcatcctgattgaggccgcactcatccgcgaaggcaaaaccgccgaacgcgccatcgccctcaacgatgccgtcctctcccgtggcggtgccggacagatgattgagtttgaagtcttcgtcaatcgggaattcgtctatacccagcgttcggacgggctgattgtctccacccccaccggatcgaccgcctattcgcttgccgccggcggccccatcatgcaggcaggattgcacgccttcacgctcgtccccatctgcccgcaatccatgaccaaccgccccatcgccattccagacacgtccgaaatcgaaatcctcgttacccaaggcggcgacgcgcgcgtccatttcgacggtcaaacccatatcgacgtgcaaaacctcgaccgcatcaccatccgccgctaccgaaaccccttacgcatcctacatccgaccgactaccaatatttcaaaaccctgcgccaaaaactgcactggggcgaacaattggtctga

SEQ ID NO: 41852 - DNA, 615 bp, Neisseria meningitidis
atgtcttttgataactatcttgtccctaccgttatcgagcagagcggtcgcggtgagcgtgcattcgatatctattctcggcttttgaaagagcgcatcgtattcttggtcggcccggtaaccgacgagtccgccaatctggtggttgcccaactgttgtttttggaaagtgagaatccggataaggatattttcttctatattaactcgccaggcggttcggtaacggccggtatgtcgatttacgacaccatgaattttatcaagcccgatgtatcgactttgtgcttggggcaggcagcaagtatgggcgcgttcttattgtcggcaggcgaaaaaggcaaacgtttcgccctgcccaacagccggattatgattcaccagcctttaatcagcggcggcttgggcggtcaggcatccgatattgaaattcacgcacgcgaactgttgaaaatcaaagaaaaactcaaccgcctgatggcgaaacattgcggccgcgatttggcagatttggagcgcgacaccgaccgtgataatttcatgtccgccgaagaggctaaagaatatggtctgattgatcaaatcttggagaaccgtgcttctttgcagctttaa

SEQ ID NO: 41853 - DNA, 720 bp, Neisseria meningitidis
ttgactttaacccgaaaaacccttttccttctcaccgccgcattcggcacacactcccttcagacggcatccgccgacgcagtggtcaaggcagaaaaactgcacgcctccgccaaccgcagctacaaagtcgccggaaaacgctacacgccgaaaaaccaagtcgccgaattcacgcaaaccggcaacgcctcgtggtacggcggcaggtttcacgggcgcaaaacttccggcggagaacgatacgatatgaacgcctttaccgccgcccacaaaaccctgcccatccccagctatgtgcgcgtaaccaataccaaaaacggcaaaagcgtcatcgtccgcgtcaacgaccgcggtcccttccacggcaaccgcatcatcgacgtatccaaagccgccgcgcaaaaattgggctttgtcaaccaagggacggcacacgtcaaaatcgaacaaatcgtcccgggccaatccgcaccggttgccgaaaacaaagacatctttatcgacttgaaatctttcggtacggaacacgaagcacaagcctatctgaaccaagccgcccaaaacttcgccgcttcggcatcaagcccgaacctcgccattgaaaaacgccgttacgaatacgtcgtcaaaatgggcccgtttgcctcgcaggaacgcgccgccgaggccgaagctcaggcacgcggtatgattcagacggtattgaccgccggttga

SEQ ID NO: 41854 - DNA, 421 bp, Neisseria meningitidis
tgaaagagcatcggctgcaggacggcattatgcgcaaagcctgccgcaaccgtccgctgacggaaaatcaaaccaagcgtaactgatatttgtcgaagacccgttatagtggattaaatttaaatcaggacaaggcgacgaagccgcagacagtacaaatagtacggaaccgattcacttggtgcttcagcaccttagagaatcgttctctttgagctaaggcgaggcaacgccgtactggtttaaatttaatccactatatgtggtcgaacagagcttcggtacgctgcaccgcaaattccgctacgcccgggcagcctatttcggactgattaaagtgagtgcgcaaagccatctgaaggcgatgtgtttgaacctgttgaaagccgccaacaggctaagtgcgcccgctgccgcctaa

SEQ ID NO: 41855 - DNA, 936 bp, Neisseria meningitidis
atggaactctttaaaatcaaacgcgatattccgtttatgagctacggcaaactgacgacctttatttcgttggttacctttattgccgccgtattctttttggttaccagaggtctgaatttctctgtcgaatttaccggcggtacggtaatggaagtccaatatcagcagggtgcggatgtcaataagatgcgcgaacgcctcgatacgctgaaaataggtgatgtacaggttcaggcattgggtacgaacaaacacatcatgatccgcctgccgaacaaagaaggtgttacttccgcacagttgtccaatcaggttatggatttgctgaaaaaagacagtcccgacgttaccttgcgccaagtcgaatttatcggcccgcaagtcggtgaggaattggtaagtaatggattgatggctttaggttttgtcgttatcggcatcattatttacctgtcgatgcgttttgaatggcgttttgccgtatctgccattatcgccaatatgcacgacatcgtgattattctcggctgctttgccttcttccaatgggaattttcgctgaccgtcttggcgggtatccttgccgtattgggctattctgtgaacgaatccgtcgtcgtcttcgaccgtatccgtgaaaacttccgcaagccggcgatgcgcggacatgccgtgccggaagtcatcgacaacgcgattaccgcaacgatgagccgcaccatcattacccacggttcgaccgaggcgatggtcgtatccatgctggtgttcggcggtgcggccttgcacggcttttctatggcgttgaccattggcatcgtgttcggcatttattcttccgtattggttgccagcccgcttctgctaatgttcggtttgagccgcgacaatatcggtaaagaaccgaagaagaaagaagaaatcgtggtttga

SEQ ID NO: 41856 - DNA, 372 bp, Neisseria meningitidis; identical to SEQ ID NO: 39755

SEQ ID NO: 41857 - DNA, 633 bp, Neisseria meningitidis
atggagaatacaaaccgtgtgccggagcaggcacgttatgatgccgaacgcaggcaggcagacgaagcattggcgggcgtgtttccggcagtcagtatcttcggcagcgcgcgcacgccgcagaatcatgcggattatgcgttcgcctgccgtctggcgcggcggctgtcggattcgggcattgccgtcatttcgggcggcgggccggggattatggaggcggcaaacaagggcgcgtttgcagggaagtcggtttcggtggggctgaacatcgttttgccgcacgagcagaaaccgaatccgtatcaggacatcgccttgcggttttcccgttttgccgaacgcaaggcggtgtttttccgctattcccaagcatatgtcgtgatgccgggcggcttcgggacgctggacgaattgtttgaaatcctgaccttggtgcagacgggcaaagtgccgccgcgtccgattgttttggtcggaaaggcgttttggtcgggcttggcggagtggataaacgcgcagcttttggcgcgcggtctgatttccgaaggggcggtctctttgtttgccatatcggacgatgaagacgaaatcgttgcgtatctgtcggaacacgggcttcagacggcatag

SEQ ID NO: 41858 - DNA, 567 bp, Neisseria meningitidis
atgtccgccttcctccccatcatcaaccgcctgattctgcaaagcccggacagccgctcggaacttgccgcctttgcaggcaaaacactgaccctgaacattgccgggctgaaactggcgggacgcatcacggaagacggtttgctctcggcgggaaacggctttgcagacaccgaaatcaccttccgcaacagcgcggtacagaaaatcctccaaggcggcgaacccggggcgggcgacatcgggctcgaaggcgacctcatcctcggcatcgcggtactgtccctgctcggcagcctgcgttcccgcgcatcggacgaattggcacggattttcggcacgcaggcagacatcggcagccgtgccgccgacatcggacacggcatcaaacaaatcggcaggaacatcgccgaacaaatcggcggattttcccgcgaatccgagtccgcaaacatcggcaacgaagcccttgccgactgcctcgacgaaataagcagactgcgcgacggcgtggaacgcctcaacgaacgcctcgaccggctcgaacgcgacatttggatagactaa

SEQ ID NO: 41859 - DNA, 534 bp, Neisseria meningitidis; identical to SEQ ID NO: 39473

SEQ ID NO: 41860 - DNA, 1272 bp, Neisseria meningitidis
atgttccaatggctttatgatgtattgtggctgcttgcgccgatatggatacggcgttatttggacaaacgctccggaagtgccccggcatatcgggcgcatcgggacgagcgtttcggcaagccgtatccgaatcccgttaccggagcggtttggatacacgccgtttcggtcggagaaacgcgtgccgcccagcccttgatacgcgagttgcggcagcgttttcccgatgcgccgctgctgatgacgcagatgaccccgacgggacgggaaaccgcgcaagttctgtttcccgatgcgcaatgccgctatcttccgtatgacaaaaaaacgtgggtacggcagtttttgcgcgaacaccgcccgatgttcggcattttgatggaaaccgaaatctggcccaatctgatgaaagaatgccggaaatcgggcgttccgctgtttttggcgaatgcgcggctgtcggaaaaatcgctaaacggttatctgaaggtccgccgcctgatccgtcctgccgccgcttcgctgacgggttgtctagcgcagacggaggcggatgcggcgcggttggcgaaattgggcgcggcatccgtgcaggtgtgcggcaataccaaatacgacatcataccgtcggaacagatgaaaacgctggcggggcagtttgaaaaacgcatcggaggccggccggttgccgtgtgcggcagcacgcgcgtttatcggggcgaagacgaggcggaaaaactgctggcggcgtggcaacaatatcgcggcgatgcgctgctggtcgtcgtgccgcgccatcccgagcattttcagacggtatttgaaacggcaaaacgcttcgggtttaaggttcagcggcgcagcgacggtttgccggtcgaacctgatacgcaggtgtggataggcgacagtatgggcgagctgtatgcgtattacttgtgcgccgatgtcgcttttgtcggcggcagtctggtcgattcgggctgtcagaacattatcgaaccgctttcctgcggcgttccgacgatattcggcttttcaacctacaatttttccgaagcctgccggcacgccttggcatcgggtgcggcggttcaagtcgaatcggcggatgcgtggcgtgaagccgttgaaaaaaccttatcgtccgaggggggcggaatgcagatgcaggcgcgcgtggacggctttatcgcacaacatcgcggagcgggcgcgagaatcgccgaggcggtacgggaagcggtatgcggacatcggggacgatag

SEQ ID NO: 41861 - DNA, 1446 bp, Neisseria meningitidis
atgagtacacaaacaaattttgatttggtgttgttcggtgcgaccggcgatttggcgatgcgcaagctgttgccctgtctgtaccaggcgcatgttgccggtctgcttcatcccgaagggcgtattttgggggtcagccgcagcgagttggataccgaaggttttctggcgaaggtggaaaccagttccaaaatccatgtgaaagaaaatttttccgatgaggcttgggcatcgtttgtcgaacgtttcgcatatctcaaagtcgatgttacgcagccggacgattttgccgctttgggcgatttggtcaaagcgcgcaaagaaaccgacaatgtcgtcatctatctttccaccgcgccgaaattcttcgcgcaaacatgtgaaaaccttgccaaaatcggtttgaacgccgacaacgtgcgtgtggttttggaaaaaccgttgggtacggatttggcttcttcccagcaaatcaataccgatgttgcgcgttatttcaaagaagggcaaatttaccgcatcgaccactaccttggcaaagaaagcctgcaaaacctgcttgcgctgcgttttgccaatgtaatgttcgagccgctgtggaacaataaatacatcgaaagcgtgcagttgaccatcgccgaacagctcggtgtggaagagcgcggcgagttttacgacattaccggcgcgttgcgcgatatggtgcaaaaccatttgatgcagatgctgtgcatgactgcgatggaagcccccgccagcttggatgccgatgcggtgcgcgatgaaaaagtcaaagtcatcaagtcattgaagccgctgaccgtcgagtctgtcaatgaaaacgtcgtgcgcggacaatataccgccgccaaaggcatgaacggctatcttgaagaaatcaacgttccgcaagacagctttaccgaaacctacgtcgccattaaagccgaaatcgaaaacgaacgctggaagggcgttcccttctacctgcgtaccggcaaacgcatggcgggcaaagtggcggaaatcgttttgaacttcaaagatttgaacagccatatttttgaaggcagccgcaccgcgcccaaccggctcgttatcgagttgcaaccgcatgaatccgtgcgtctctatacgcagatgaaaaccccgggtgcaggaaataaggtcgaaaccgtgccgctggcaaccgacttgggcaaagcattggaaggccgccgcgccgaggcttacgagcgcctgctgttggatgtgattaacggcaaactcgctttgttcaaccgccgcgacgaactcgaagccgcatgggaatatgtgatgccgattttggaaaactgggcaaataacaccacgccgccgcacggttacggcgcacactcgtgggggcctgaagccgcgcgcgaactgttggcgcacgacggacacaagtggcacgaagagcagtaa

SEQ ID NO: 41862 - DNA, 768 bp, Neisseria meningitidis
atgtcttcaaataaagcttcattttttacacgtctgcgccgcttgtgccgcttgacggtctggctattcaaaaccggcaaaaacctgcgcggtattgacggcggctgtcccgagtcgcgcaatcgggcggtaatcgaattgggcaagggcgctttggtggctttggatatcggattggaggtgggcaggcccgcacccgaacatccgaacggtgtcttggttgccgccaaccacgtgtcctggctggatattttcgcgatgagcgcggtttatccgagcagctttatcgccaagcaggaaatcaaaagctggccggtattgggcaagatggggcagaacgcgggaacggtgttcatcaaccgcaattcgcggcgcgacatcgaaccgattaaccgcgccgtctacgaaaccttgcaacgcggtcaaaacgtcagttttttccccgaagcgcggacttcctccggactggggctcctgccgttcaaagccgcgctgttccaatccgccattgatgcgggggcaaaggttttggcggtcgcgctgcgttattatgacgaaacgggaaaaaggacggctcgtccctcatatgccgatgtcggtttgccgacctgcctgtggcgcattgtgtccatgaaaaaactgaccatcaaagtcgattttgtttgcgtggcggatgcggcggaaagcgaagaccgttatgctttaaaagataaaatcgaagaaagcatccgtgccgttgtcgccggtgatgcggacgttgccgtctga

SEQ ID NO: 41863 - DNA, 1785 bp, Neisseria meningitidis
atgagcttagttgaattgaaagtgcccgacattggcggacacgaaaatgtagatattatcgcggttgaagtgaacgtgggtgacaccatcgccgttgacgacaccctgattaccttggaaaccgacaaagcgacgatggacgtgcctgccgaagttgcgggcgtggtcaaagaagtaaaagtcaaagtcggcgacaaaatctccgaaggcggcttgattgtcgtcgttgaagctgaaggcacggcagccgctcctaaagccgaagcggctgccgccccggcgcaagaagcccctaaagctgccgctcctgctccgcaagccgcgcaattcggcggttctgccgatgccgagtacgacgtggtcgtattgggtggcggtcccggcggttactccgctgcatttgccgctgccgatgaaggcttgaaagtcgccatcgtcgaacgttacaaaactttgggcggcgtttgcctgaacgtcggctgtatcccttccaaagccttgttgcacaatgccgccgttatcgacgaagtgcgccacttggctgccaacggtatcaaataccctgagcctgaactcgatatcgacatgctgcgcgcctacaaagacggcgtggtttcccgtctgaccggcggtttggcaggcatggctaaaggccgcaaagtagatattatccaaggtgacggccaattcttagatccgcaccacttggaagtttctctgacgaccagcgaagtgtacgaacaagcgactcctaccggtgagaaaaaaatcgttgcctttaaaaactgtatcattgcagcaggcagccgcgtaaccaaattgccttttatccctgaagatcctcgaattttcgactccagcggcgctttggctctgaaagaagtaccgggcaaactgctgatcatcggcggcggtattatcggtcttgaaatgggtacggtttacagcactctgggttctcgcttggatgtggttgaaatgatggacggcctgatgcaaggcgcagaccgcgatttggtaaaagtatggcaaaaacaaaacgaataccgttttgacaacattatggtcaacaccaaaaccgttgcagtcgagccgaaagaagacggcgtttacgttacctttgaaggtgcaaatgcgcctaaagagccgcaacgttacgatgccgtattggttgccgccggtcgtgcgcctaacggcaaactcatcagcgcagaaaaagccggtgttgccgttaccgatcgcggcttcatcgaagtggacaaacaaatgcgtaccaacgtgccgcacatctacgccatcggcgacatcgtcggtcaaccgatgttggcacacaaagccgttcacgaaggccacgttgctgctgaaaactgcgccggccacaaagcctacttcgacgcgcgcgtgattccgggcgttgcctacacttcccccgaagtggcgtgggtgggcgaaaccgagttgtccgccaaagcatccggccgcaaaatcaccaaagccaacttcccgtgggcggcttccggccgtgcgattgccaacggttgcgacaacggctttaccaagctgattttcgatgccgaaaccggccgcatcatcggcggcggcattgtcggtccgaacggtggcgacatgatcggcgaagtctgccttgccatcgaaatgggctgcgacgcggcagacatcggcaaaaccatccacccgcacccgaccttgggcgaatccatcggtatggcggcggaagtggcattgggtacttgtaccgacctgcctccgcaaaagaaaaaataa

SEQ ID NO: 41864 - DNA, 2106 bp, Neisseria meningitidis
atggctcgtaagaccccgatcagcctgtaccgtaacatcggtatttccgcccatatcgatgcgggtaaaaccacgacgacagaacgtattttgttctataccggtttgacccacaagctgggcgaagtgcatgacggtgcggctactaccgactacatggaacaagagcaagagcgcggtattactattacctccgctgccgttacttcctactggtccggtatggcgaaacaattccccgagcaccgcttcaacatcatcgacaccccgggacacgttgactttaccgtagaggtagagcgttctatgcgtgtattggacggcgcggtaatggtttactgcgcggtgggcggtgttcaaccccaatctgaaaccgtatggcggcaagccaacaaataccaagtgccgcgcttggcgtttgtcaataaaatggaccgtcagggtgccaacttcttccgtgttgtcgagcaaatgaaaacccgtttgcgcgccaatcccgtacctatcgtcattccggttggtgcggaagacaacttcagcggtgtggttgatctgttgaaaatgaaatccatcatttggaatgaagccgataaaggtacaacctttacctatggcgatattcctgccgaattggtcgaaactgccgaagaatggcgtcaaaatatgattgaagccgcagccgaagccagcgaagaactgatggacaaatacttaggcggcgacgagctgaccgaagaagaaatcgtaggcgcgttgcgtcaacgtactttggcaggcgaaattcagcctatgctgtgtggttctgcatttaaaaacaaaggtgttcaacgtatgttggacgcagttgtagaattgctgccagctcctaccgatattcctccggttcaaggtgttaatcctaacactgaagaagccgacagccgtcaagccagcgatgaagagaaattctctgcattggcattcaaaatgttgaacgacaaatacgtcggtcagctgaccttcatccgcgtttactcaggcgtagtaaaatccggcgataccgtattgaactccgtaaagggcactcgcgaacgtatcggccgtttggtacaaatgactgccgcagaccgtactgaaatcgaagaagtgcgcgccggcgacatcgcagccgctatcggtctgaaagacgttactaccggtgaaaccttgtgtgccgaaagcgcaccgatcatcttggaacgcatggaattccccgaaccggtaatccatattgccgttgagccgaaaaccaaagccgaccaagagaaaatgggtatcgccctgaaccgtctggctaaagaagacccttctttccgtgtccgcacagacgaagaatccggtcaaaccattatttccggtatgggtgagctgcacttggaaattattgttgaccgtatgaagcgcgaattcggtgtggaagcaaatatcggtgcgcctcaagtggcttaccgtgaaactatccgcaaagccgttaaagctgaatacaaacatgcaaaacaatccggtggtaaaggtcaatacggtcacgttgtgattgaaatggaacctatggaaccgggtggtgaaggttacgagtttatcgatgaaattaaaggtggtgtgattcctcgcgaatttattccgtctgtcgataaaggtatccgcgatacgttgcctaacggtatcgttgccggctatcctgtagttgacgtacgtatccgtctggtattcggttcttaccatgatgtcgactcttcccaattggcatttgaattggctgcttctcaagcgtttaaagaaggtatgcgtcaagcatctcctgccttgcttgagccaatcatggcagttgaagtggaaactccggaagaatacatgggcgacgtaatgggcgacttgaaccgccgtcgcggtgttgtattgggtatggatgatgacggtatcggcggtaaaaaagtccgtgccgaagtacctttggcagaaatgttcggttattcgaccgacctgcgttctgcaacccaaggccgcgctacttactctatggagttcaagaaatattctgaagctcctgcccacatagctgctgctgtaactgaagcccgtaaaggctaa

SEQ ID NO: 41865 - DNA, 300 bp, Neisseria meningitidis; identical to SEQ ID NO: 37288

SEQ ID NO: 41866 - DNA, 297 bp, Neisseria meningitidis
atggcttgttgtttaaggtttttaacttcgttgaaacggcaaaccgtcaatcaagcaaccgcgtgcgtgcgtaccgcacacaccctacacgttgattttgaagttccgtgtaattcacaggtagggtgtgtggcgcagccacgcacgcggtgttgggtatgcaggctacggcttgctgctgcagaaactcctgaagaaaaagccaaagacgccgctgaagaggctaaagaagaagcaaaagacgcagcggaagatgccaaagaagctgctgaagacgctaaagaagaagctaaataa

SEQ ID NO: 41867 - DNA, 273 bp, Neisseria meningitidis
gtgaacaattcagtcatcaccgtcatcggtaaagaccgcgtcggcatcgtgtacgatgtttccaaaattttggcggaaaaccgaatcaacatccttaatatcagccaacagctgatggatgatttttttaccatgattatcttggtggatacctcgaaatgccccaaatctcggcaggaggttttggatttgtttgcggaagagagcaaaaaactcgcgcttgatatccgtatgcaaaatgaagaaatcttccaagcgatgcaccgcatttga

SEQ ID NO: 41868 - DNA, 1503 bp, Neisseria meningitidis
atggcaaaagtactcatcgtacccgtatctgccggactggacgcctccgccgccgcacaagcctttgcaaaagcactggacgcagaaattttccaagccgttgacgcaaccgccgaaaccctgctcgcgcaaggcaaaagcgacgactggttcgacgcactggtcggcaaagttgccgcactcgatgccgccaacctcgtcatcgaaggcatcgcgcccgatgccgacaaaatctacctcgcaggcaaaaacgtcgaactggcattgtcccttgacgcggcagccgtcttcgccgtccgttccgacaacgccgatgccgacgaactggcaaatcggctgaaccttgccaaacagttcttcgccgccgcgccgggcgtattggaaggttttgtcgtggacggcgcggcagcctccgttgccgaagcggcagccgaaaaaaccggcctgaccttcttcggttcgagcgacgcgctgaaagacgtatccgtattggcaggccgcgaagcaaaacgcctgtcgccggcgcaattccgctacaacctgatcgacttcgcccgccaagccgacaaacgcatcgtcctgcctgagggcgcagaaccccgcaccgtccaagccgccgccatctgccacgaaaaaggcattgcccgctgcgtcctgcttgccaaacgcgaagaagtcgaagccgttgccaaagaacgcggtatcagcctgcccgactctttggaaatcatcgatcccgcctcattggtcgaacaatacgtcgagccgatgtgcgaactgcgcaaatccaaaggcctgacacccgaagacgcgcgcaagcaactgcaagacaccgtggtactcggtacgatgatgatggcgcaaaatgatgtggacggtttggtatccggtgcggttcacaccaccgccaacaccatccgccccgctttgcaactgattaaaaccgcaccgggcgcaagcctcgtgtccagcgtattctttatgctgctgcccaaccaagtcctcgtcttcggcgactgcgcggttaatccgaacccgaccgcgcaacagcttgccgacatcgccatccagtctgccgattccgcaaaagccttcggcatcgacccgaaagtggcgatgatttcctactccaccgtcaactccggcagcggccccgatgtcgataccgtcatcgaagcaaccaaacttgcccgggaaaaacgcccagacctcgccatcgacggcccgctgcaatatgatgcggcaaccgtgccgggcgtgggcaaatccaaagccccgggcagcccggtggcaggacaggcaaccgttttggtcttccccgacctgaacaccggcaactgcacctataaagccgtccaacgcagtgccaacgtcttaagcgtcggcccgctgctgcaaggcctgcgcaaaccggtcaacgacctgtcgcgcggtgcgctggtggaagacatcgtgtttaccatcgccctgactgccgttcaggcaaaacaaatggaaggctga

SEQ ID NO: 41869 - DNA, 1032 bp, Neisseria meningitidis
atgctgcaaaccgacaacctgaccgccgcgcaaccgcaacgcatcgttgccgcccaaaccgcctccgcacaggaagaactgctcgaacgcgccctccgccccaaaacgctggacgactacatcgggcaagacaaagccaaagaacagcttgccattttcatccaagccgccaaaaaacgcggcgaagcactcgaccacgttttgctcttcggcccgcccggactgggcaaaaccacactggcgcacatcatcgccaaagaattgggcgtaaatttgcgccaaaccagcggccccgtcctcgaacgcgcaggcgacctcgccgcccttttgaccaaccttgatccgcacgacgtattgtttatcgacgaaatccaccgcctcagccctgttgtcgaagaaatcctctatcccgcgctcgaagactaccggctcgacattatgataggcgaaggacccgccgcccgttccgtcaaaatcgacctgccgcccttcacgctcatcggcgcgaccacccgcgccggtatgctgaccaatccgttgcgcgaccgcttcggcatcgtctcccgccttgagttttacgaaaaccgagaccttaccaccatcgtcagccgttcggcacaactgttgcagctcgatatgtccgaagaaggcgcggaagaaatcgccaaacgcagccgcggtacgccgcgcatcgccaaccgcctgttgcgacgcgtgcgcgatttcgccgacgtgaaaaacaacggcacaatcgacggcggcatcgccgatgccgctttaagtatgctggacgtggacgcgcaggggctggacgtgatggacaggaaatttctcgaagccgttttgcacaaattcggcggcggcccggtcggtttggacaatgttgccgccgccatcggcgaatctacagacaccatcgaagacgttatcgaaccctaccttatccaacaaggcttcctgcaacgcaccccgcgcggcaggatggcgaccgaacgcgcctacctgcatttcgggctgcccgtcgaaaaataa

SEQ ID NO: 41870 - DNA, 546 bp, Neisseria meningitidis
ttgaagactgatactgctagaatgaacaatctgattcccgaatatttagccgcctatgcacatagtgacagcctgcaaattgaaggcgggcatcgatgcttttcattatcctgccaaggtagagatactttccacatccgttactatggagagccttttgacggattgattaccgatactgataaggctccggtaaaaattgtggcggtagaagctgtaagcggcgatgaaatcgtattgtttgatggcgcggaacatggctataacgctatgttttgcgacaaatatagtccaaatcaaaagcaaaacagaacgttaactgatttggatgagtatacttaccgggttctgatccatctttattacaatatagactacgaagatgaatatgaagatttcgtcaattctgaaggacaagtccccttaattgatggccgcatcattagttttgactcattaaaacgaaatggctttgatgcaatcagcgttgatctaattgatgaaaaacactctgttcgtgaattattgaatgaagaattaagctga

SEQ ID NO: 41871 - DNA, 1344 bp, Neisseria meningitidis
atgtttcacagtgtcaatgtatttacgggcgaaacgctttaccgctgccccgcccaagattatgcggagtttgaacggcaactggcaggtttgaaaatgcgcggcggggcgttcgcgcaactgggcgtaaccgagcgtgccgcgcgtctgaggcggtttgccgaccgtctggaggcggagaaagagcgttttgcggaaatggtgtgcgaggaagtcggtcgctgcctgcacgaatgccgcgcggaaatcggcaagtctatcgaactgatacgctattacgcccaccttgcccccgaactgcttgcccacaaaaccatcgcgacgcaggcgagtttgagtcaggtaaggtttgagcctttgggtgtggtgtttgccgtcatgccttggaactatcccgtctggcaggtattgcgtttcgccgttcccgctatgtgcgcgggcaacgcgtgcgccgtcaaacccgcgcccagcgtggcgcgcgtcagtcaggcgttgttcgatttggcttcagacggcattcctttggcaggcgcgtggttagatgaggcgggcacgctcaaggcggttgaagataccgatgcaatggcgtttaccggttcgacgcacacagggcgcattcttgcggcacacgcgggcgcaaacctcaagaaaaccgtcttggagctcggcggcagcaacgcctttatcgtgatgcccgatgccgatttggaacgcgccgccgcagaagcctgttattcccgtttccgcgatgcggggcaatcgtgcaacgccgccaaacgcatcatcgtaaccgaagccgcagccgatcgttttatcccgctgtttcttgccgaatgcgccaaattgaaaatgggcgaccccaaacatcccgatactacgcttgcaccgctgcaccgcgaagatttgcgggacagggttcacgggcaggttgaagatgccgtttcaaacggcgcggtatgcctgaccggcggaaaaatcccacaagggcgaggctggttttatcccgcgacggttttagacagggtaaatcctgcctgccgcgtctggtatgaagaagtattcggccccgtcgccctgattttgcgtgcggcaaacgaagatcatgccatcgcccttgccaatgattcaccgttcggactcggcgcctgtatttataccgccgatactgaacgcgcttggcggtttgccgaaaaaatacaggcgggatcggtgtttatcaaccgccataccagcagcgatttgcgcctgcctttcggcggagtcaaagattccggttacgggcgcgaattgtccgaattcgggctgtacgagttcgtcaacgtcaaaacctactggcagaaatga

SEQ ID NO: 41872 - DNA, 771 bp, Neisseria meningitidis
ttggaagctgattcggatacggcacatgacaggactttctcagtcctgtctttttcatcccacatttcccataccatcatgaaacttatcaaatacctgcaatatcaaggcataggaagccgcaagcagtgccaatggctgattgccggcggttatgttttcatcaacggaacctgcatggacgacaccgatgcagacatcgattcctcatccgtcgaaacgttggatattgacggggaagcagtaaccgtcgttcccgaaccctatttctacatcatgctcaacaagcctgaagattacgaaacttcgcacaaacccaagcactaccgcagcgtattcagcctgttccccgacaatatgcggaacatcgatatgcaggcggtcggcaggctggatgcggatacgaccggcgtattgctgattaccaacgacggcaaactgaaccacaacctgacttcgccgagcagaaaaattcccaagctatacgaagtaacgctcaaacaccccacaggagaaacgctctgcgaaaccttgaaaaacggcgtgctgctccacgacgaaaacgaaaccgtttgtgccgccgatgccgttttggaaaacccgaccaccctgctgctgaccattaccgaaggaaaataccaccaagtcaaacgcatgatcgccgccgccggcaaccgcgtgcaacaccttcatcgccggcgattcgcacatctggaaacagaaaacctcaaacccggggaatggaaatttatcgaatgtccaaaattctga

SEQ ID NO: 41873 - DNA, 321 bp, Neisseria meningitidis
atgatgggcaacaaattgactctgcctgccgaactgcctgacgaacaggatttgcgggcggtattggcatacaatatgcggcttttccgcgtgaacaagggttggtcgcaagaagaattggcgcggcaatgcggtttggacaggacttatgtgtcggcagtcgagcgcaaacgctggaacatcgccctgtcgaatatcgaaaaaatggcggcggctttgggcgtggcggcgtatcagttgctgctgccgccgcaggaacggttgaagctgatgaccaattccgccgatacccgacaaatgccgtctgaaagcggtatttga

SEQ ID NO: 41874 - DNA, 1362 bp, Neisseria meningitidis
atgctgaaaaaagttttaatcgccaaccgaggcgaaatcgcattacgcgtactccgtgcctgccgcgaaatgggcattgccaccgtcgccgtgcattccgaggccgacaaagacagcctgcacgtcaaactcgccgacgaatccgtgtgcatcggccctgccgcttccgcgcaaagctaccttaacgtccccgccattatcgccgccgccgaagtaagctgcgcggacgctgtccatccgggctacggtttccttgccgaaaacgccgatttcgccgaacaggtcgagcagtccggctttacctttatcggcccgaaacccgacaccatccgcctgatgggcgacaaagtctccgccaaacacgcgatgatagcggcaggcgtaccctgcgtccccggttctgacggcgcattgcccgacgacggcgaagaaatcctcaaaatcgccgataaagtcggttatcccgtcattatcaaagcctctggcggcggcggcggccgaggtatgcgcgtggtcgagaaaaaagaagacctcctccaatctgtcgaaatgaccaaggcagaagcaggcgcggcattcggcaacccgatggtttacatggaacgctatctgcaacgtccgcgccacgtcgaaatccaagtgattgccgacgaacacggcaacgccatctaccttgccgagcgcgactgttcgctgcaacgccgccaccaaaaagtcatcgaggaagcaccggctccgttcatcactgaaaaagaacgcgccaaaatcggcaacgcctgtgccgacgcctgcaaacgcatcggctatcgcggcgcaggtacgtttgaattcctgtacgaagacggcgaatttttctttatcgagatgaatacgcgcgttcaggttgagcatccggttaccgagctgattaccggcgtggacatcgtgcaggagcaactccgcatcgccgccggcctgcctttgcaatacaaacaaaaggatattcaagtcgaaggccacgcgtttgagtgccgcatcaatgccgaagacccgtacaacttcatccccagcccgggcccgattgaaagctgccacctgcccggtggcttcggtatccgcgtggacagccacatttaccaaggctaccgcatcccaccgtactacgacagcctgatcggcaaaatctgcgtacacggcaaaacgcgtgaacaggcaatggcgaaaatgcgcgtcgcactcgccgagctggcggtaaccggcatcaaaaccaatacgccgctgcaccgcgacctgttcgccgatgcgggtttccaaaaaggcggcgtcagcatccactatttggaacactggctggaagatcgcaaagccaaacaggacaaataa

SEQ ID NO: 41875 - DNA, 1848 bp, Neisseria meningitidis
atgtacctaccctctatgaagcattccctgccgctgctggcggccctggtgcttgccgcgtgttcttcgacacacgcgcccagcagcaagaccctggcagacaatatagaaactgccggtctttcggcaagcgttcccacccgccctgccgaacccgaaggaaaaacgctggcagattacagcagctacccgtccgcactggatgcagtgaaacagaaaaacgatgccgccgtcgccgcctatttggaaaacgccggcgacagtgcgatggcggaaaatgtccgcaacgagtggctgaagtctttgggcgcacgcaaacagtggacgctgtttgcacaggaatacgccaaactcgaaccggcagggcgcgcccaagaagtcgaatgctacgccgattcgagccgcaacggctatacgcgtgccgccgaactggtcaaaaatacgggcaaactgccttcgggctgcaccaaactgttggaacaggcagccgcatccggcttgttggacggcaacaatgcctggaggcgcgttcgcggactgctggccggccgccaaaccacagatgcacgcaaccttgccgccgcattgggcagcccgtttgacggcggtacacaaggttcgcgcgaatatgccctgttgaacgtcatcggcaaagaggcgcgtaaatcgccgaatgccgccgccctgctgtccgaaatggaaagcggtttaagcctcgaacaacgcagtttcgcgtggggcgtattggggcattatcagtcgcaaagcctcaatgtgcctgccgccttggactattacggcaaggttgccgaccgccgccaactgaccgacgaccaaatcgagtggtacgcccgcgccgccttgcgcgcccgacgttgggacgagctggcctccgttatctcgcatatgcccgaaaaactgcaaaaaagcccgacctggctctactggctggcacgcagtcgcgccgcaacgggcaacacgcaagaggcggaaaaactttacaaacaggcagcagcgacgggcaggaatttttatgcggtgctggcgggggaagagttggggcgcaaaatcgatacgcgcaacaatgtgcccgatgccggcaaaaacagcgtcctccgtatggcggaagacggcgcgattaagcgcgcgctggtgctgttccgaaacagccgaaccgccggcgatgcgaaaatgcgccgtcaggctcaggcggaatggcgttttgccacacgcggctttgacgaagacaagctgctgaccgccgcgcaaaccgcgttcgaccacggtttttacgatatggcggtcaacagcgcggaacgtaccgaccgcaaactcaactacacattgcgctatatttcgccgtttaaagacacggtaatccgccacgcgcaaaatgttaatgtcgatccagcgtgggtttacgggctgattcgtcaggaaagccgcttcgttatgggcgcgcaatccggcgtaggcgcgcaggggctgatgcaggttatgcctgccaccgcgcgcgaaatcgccggcaaaatcggtatggatgccgcacaactttacaccgccgacggtaatatccgtatggggacgtggtatatggcggacaccaaacgccgcctgcaaaacaacgaagtcctcgccaccgcaggctataacgccggccccggaagggcgcgccgatggcaggcggatatcccccttgagggtgcggtatatgccgaaaccatcccgttttccgaaacgcgagactatgtcaaaaaagtgatgaccaatgccgcctactacgccagcctcttcggtgcgccgcacatcccgctcaaacagcgtatgggcattgtccccgcacgctga

SEQ ID NO: 41876 - DNA, 726 bp, Neisseria meningitidis
atgccccgattctacctgcccgaaaacctttccgtcggacaaaccgtcgccctgcccgacaacatcgtccgccacctcaacgtcctacgcgtccgccccaacgaaaacatcaccctcttcgacggcaaaggcaaggcacacgccgcacagctgaccgttttggaaaaacgccgcgccgaagccgaaatcctgcacgaagacacaaccgacaacgagtccccgctcaacatcacactgatacaatccatctcctccggcgatcgcatggatttcaccctgcaaaaaagcgtcgaactcggcgtaaccgccatacagcccgtcatcagcgaacgctgcatcgtccgcctcgacggagaacgcgccgccaaacgcctcgcacgctggcaggaaatcgtcatctccgcgtgcgaacaaagcggcagaaacaccgttccccccgtactgcccatcatcggctaccgtgaagcactcgacaaaatgccgtctgaaagcaccaagctgattatgagcatcaaccgcgcccgcaaactcggcgacatccgccacccgtccggcgcaatcgtctttatggtcgggcccgaaggcggctggacagaacaggaagaacaacaggcatttgaagccggctttcaggcggttacactcggcaaacggattttacgcacagaaaccgccccactcgccgccatcgccgcgatgcagacactttggggcgatttcgcataa

SEQ ID NO: 41877 - DNA, 1509 bp, Neisseria meningitidis
atgaccaccacccccgcaaacatcctcgcctccgtcgatttgggttccaacagtttccgcctccagatttgcgaaaacaacaacggacaattaaaagtcatcgattcgttcaaacagatggtgcgcttcgccgccggactggacgaacagaaaaacctgagtgccgcttcccaagaacaggctttggactgtctggcaaaattcggcgaacgcctgcgcggcttccgccctgaacaggtacgcgccgtggcaaccaatacattccgcgtcgccaaaaacatcgcagatttccttcccaaagccgaagcggcactgggtttccccatcgaaatcatcgccgggcgcgaagaggcgcggctgatttataccggcgtgatccacaccctccccccgggcggcggcaaaatgctggttatcgacatcggcggcggttcgacagaatttgtcatcggctcgacgctgaatcccgacattactgaaagcctgcccttgggctgcgtaacctacagcctgcgcttcttccaaaacaaaatcaccgccaaagacttccaatctgccatttccgccgcccgcaacgaaatccagcgcatcagcaaaaatatgaggcgcgaaggttgggatttcgccgtcggcacatcgggttcggcaaaatccatccgcgacgtgcttgccgccgaaatgccccaagaggcggacattacctacaaaggcatgcgcgccctcgccgaacgcatcatcgaagccggttcggtcaaaaaagccaaatttgaaaacctgaaaccggaacgcatcgaagtttttgccggcggacttgccgtgatgatggcggcgtttgaggaaatgaaactcgacaggatgaccgtaaccgaagccgccctgcgcgacggcgtgttttacgatttgatcgggcgcggtttaaacgaagatatgcgcggacaaacggttgccgagttccaacaccgctaccacgtcagcctcaatcaggcgaaacgcaccgccgagaccgcgcaaacctttatggacagcctctgccacgctaaaaacgttacagttcaagagcttgccttgtggcaacagtatctcggacgcgccgccgcgctgcacgaaatcggtttggacatcgcccacaccggctatcacaagcattccgcctacatcctcgaaaacgccgatatgccgggtttctcacgcaaagaacagaccatacttgcccaactggtcatcggtcatcgcggcgatatgaaaaaaatgagcggcatcatcggcaccaacgaaatgttgtggtatgccgttttgtccctgcgccttgctgccctgttctgccgttcgcgccaagacctgtctttcccgaaaaatatgcagttgcgcacggatacggaaagctgcggcttcatcctgcgtattgacagggaatggctggaacgccatcccctgattgccgacgcattggaatatgaaagcgtccaatggcaaaaaatcaatatgccgtttaaagtcgaggtcgtctga

SEQ ID NO: 41878 - DNA, 837 bp, Neisseria meningitidis
atgatagacctgcactgccattccaccgtttccgacggtatgctttcccccgccgaagtcgtgcgcctcgcgcatcaaaacggctgcacgctgctggcgttgaccgaccatgaccacaccggcggcatcgccgaagcgcgtgccgaagccgacaggctcggtttgcgcctgattaacggcgtggaaatctccgtaacgtggcgcgggcgtaccatacacgttgtcggcttagactttgacgaacaagacgaaaacctgcaaaacttgttggcgcaagtgcggcaaggccgtctgaaacgtcttgaagccatcgccgccaagcttgaaaagaaaggcatcggtggcgcatacgacggcgcgctggcgctggcggcaaacaaagaaatggtcagccgcacccacgtcgccgagttcctcatcaaaaacggatacgtcaaaaacaagcagcaggcgttcaccaaatacttgggcgacggcaaatcctgcgccgtccgacacgaatgggcgacgctggaagactgcgtctccgccgtcaacggcgcgggcggcatggcagtcatcgcccatccgatgcgctatgatttgtccgctaccgccaagcgcaatctgtttgaagaatttaaaaacctcggcggcgcgggcatcgaagtccacagcggaaactgttgcaaaaacgaccgcctcaactacgcgcttttggcagaacgcttcggtatgctcgccagcgcgggcagcgacttccaccgtttaaacgacttcagcggcggcatcctcggcgcgtgtcctgaactgccggaaaactgcaggccggtgtgggcgcatttttcccgacattga

SEQ ID NO: 41879 - DNA, 216 bp, Neisseria meningitidis
atgaaaaccctgctccttaccttcggcatcttcctgaccgtcatcatcggtatggcggtcggctatattttctccaaacgcagcatcaaaggcagttgcggcggcattactgccttgggtatgaaaaaaatgtgcgactgcgacataccttgcgacaccctgcaaaagaaactggatgaagaaaaacaggcaggcggcatacgggttgaccgttaa

SEQ ID NO: 41880 - DNA, 234 bp, Neisseria meningitidis
atggaagccatcgtctatctcgaagacaacgaatacatcgccttgtgcgacctcttgaaattggtcggacttgccgaaagcggcggacaggcgaaagcgtttatcgccgaagggctggtgttgcgcaacggcgaaaccgaaacccgtaaaaccgccaaaatacgcggcggcgaagtcatcgagtttgacggtgcgcgcttggaaatcgccgatggatatgaccctgaagcataa

SEQ ID NO: 41881 - DNA, 1335 bp, Neisseria meningitidis
atgccgccacttatatttgccactttcccgatgaagccgtttgccgaaaatatcccccacagccttcgcggcaactgccgcgacgaagccctgccgccgcatacggtagattgcccggaatgcggctgccgcgcggatgtaccccggttggacaggggagaggcggcgttctgtccccgttgcggctataagctcttcagggtaagcaggcatcctttttccgccccgcccgcctatgcggcggcttcgctgattttaatggcgtttgcttacggtatgacgtatatcgaggtcgggataccgggtgcggcatccgtcctttcgctgcccgagatgatgcgcctgatggtgtttcaggattatggttttttggccgaagtgatgtttgtgctgactttcggcgcgccggttctgtttctgctgctgtgcctgtatgtctatgccgcgctgatacggaaacaggcgtatcctgcgctgcgtttggcaacgcgtgtgatggtgcgcttgaggcaggcgatgatggtggatgtgttttttgtttccactttggtggcgtatatcaagctctcgtctgtggcagaggttcgcttcggatcggcgttttatctgatgttcgcgctgtcggttatgctgattcggacttcggtatcggttccccagcattgggtgtattttcaaatcgggcggctgacgggggataatgcggttcagacggcatcagaaggcaaaacctgttgcagccgctgcctgtatttccgcgacagtgccgaatccccctgcggggtgtgcggcgcggaactgtaccgccgacggccgaaaagtctgagtatttcgtcggcgtttctgacggcggcggttattttgtattttcctgccaatatcctgccgattatgatttcgtccaatcctgccgccacggaggtcaataccatccttaacggcatcgcttatatgtgggacgagggcgacaggctgattgcggcggttattttcagcgcgagtattttggtgccggtactgaagattgcggcaatgtcggttttgattgcgtccgcccgcttcgctttgccgacaggcgcaaagaaattgtcgcacctctaccgcatcaccgaagcggtcggccgctggtcgatgattgatatttttgtgattattattttgatgtgttcgttccacacttatgccgcgcgtgtcattccgggcagtgcggcagtctatttctgcctggtcgtgattctgacgatgctgtccgcctattatttcgacccgcgcctgctttgggacaaacgcgcttcagacggcattgctttcaatgaaacggaaaaatatgactga

SEQ ID NO: 41882 - DNA, 1539 bp, Neisseria meningitidis
atgttccattccatcgaaaaatacagaacgcccgcccaagtccttttgggcctgattgcattaaccttcgtcggcttcggggtcagcacggtatcccatccgggtgccgactacatcgtccaagtgggcgacgaaaaaatcagcgaccactccatcaacaacgccatacagaacgaacaggcggacggcggcggcccttcgcgcgacgcggtgttccaatccctgctgcaacgcgcctacctgaaacagggcgcgaagctgatgggcatttcggtttcttccgaacaaatcaagcagattatcgtggatgatcccaatttccacgacgcaaacggcaaattcgaccacgcgcttttaaaccgctacctgtcgcaacgccatatgtctgaagaccagtttgtcgaagaaatccgcgatcagtttgccttgcagaatttggtaaacctcgtccaaaacggcgtattggtcggcgacgcgcaggcggaacagctgatcaggctgacgcaggtcaaccgcaccatccgttcgcacactttcaaccccgacgaattcatcgcccaagtcaaagtgtctgaagccgatttgcagaagttttataacgcaaacaaaaaagactacctgcttcccaaagcggtcaaattggaatatgtcgcattgaatctgaaagactttgcagacaaacagaccgtcagcgaaacagaagtgaaaaatgcgtttgaagagcgcgtggcgcgtttgccggcaaatgaagccaaaccttctttcgagcaggaaaaagccgccgtagaaaacgaattgaaaatgaaaaaggcggttgccgacttcaataaggcaaaagaaaagctgggcgatgacgcgttcaaccatccttcctcgcttgccgaagccgccaaaaacagcggtttgaaagtcgaaacccaagaaacttggctgagtaggcaggacgcgcaaatgtccggtatgcccgaaaatctgatcaatgccgttttcagcgacgacgtattgaagaaaaaacacaattccgaagtgctgaccatcaacagcgaaaccgcgtgggtcgtccgcgccaaagaagtccgcgaagagaaaaccctgccgtttgccgaagccaaagacgcggtacgtcaggcttatatccgtaccgaagccgccaaacttgccgaaaacaaggcaaaagacgtgcttacccaactgaacggcggcaaggctgttgacgtgaaatggtcggaagtgtccgttttgggcgcacagcaggcaaggcagtccatgccgcccgaggcttatgcggaactgctgaaagcaaaaccggcaaacggcaaacccgcctacgtcaggctgatcggtctgccggcatccgtgattgtcgaagtacaggctgtaaccccgccggatgatatcgccgcacagcttccgcttgcaaaacaggctttggcgcaacagcagtctgccaatactttcgacttgttgatacgttatttcaacggcaaaatcaaacagaccaaaggagcgcaatcggtcgacaacggcgacggtcagtaa

SEQ ID NO: 41883 - DNA, 705 bp, Neisseria meningitidis
atgctgtctgaaggcatttcagacggcatttttcgcggggagatgctacaatttgcaccatttttaccgacacagggaaacaggattatgtttacaggcattgttcaaggattgggaaaactgacggcaatccaccgcccgtcggaggcatttcacacttatgtcgtcgagcttccgcaagaggcggcggacaatctgcaacgcggcgcatcggtcgccaataacggctgctgcctgacgattaccgaaatcgaaggaaaccgcgtcagtttcgatttaatggcggaaactttggcaaaaaccaatttggggctgctgaaggaaggcgattgcgtcaacatcgaacgggcggcgcgtttcggagacgaaatcggcggacacgtcatgagcggacacattatggcaaccgtgcctattgtcgaaatcgaacgggacgggttcaaccgcacggtttggttttcgctcccgcatgaactcaaaccctatatcctgaccaaagggttcgtcggcttggacggttgcagcctgaccataggcaaagtcgaagacggccgtttcaatgtccatctgattcccgaaactttggaacggacgctgttcggcagcagaaaggtcggcgacaggatcaacatcgaaatcgatccgaatacgcaggcaatcgtcgacaccgtcgaacggctgatggcgcaaagatatgcaaagtga

SEQ ID NO: 41884 - DNA, 1008 bp, Neisseria meningitidis
atgagcaccttcttccggcaaaccgcccaagccatgattgccagacacatcgaccgcttcccactattgaagttggaccaggtgattgattggcaaccgatcgaacaatacctgaaccgtcaaagaacccgttaccttcgagaccaccgcggccgtcccgcctatcccctgctgtccatgttcaaagccgtcctgctcggacaatggcacagtctctccgatcccgaactcgaacacagcctcattacccgcatcgatttcaacctgttttgccgctttgacgaactgagcatccccgattacagtactttatgccgttaccgcaactggctggcgcaagacgacaccctgtccgaattgctcaaactgattaaccgccaactgaccgaaaaaggcctaaaaatagagaaagcatccgccgctgtcgttgacgccaccattattcagaccgccggcagcaaacagcgccaggccatagaagtcgatgaagaaggacaaatcagcggccaaaccacaccgagtaaggacagcgatgcccattggatcaagaaaaacggcctctacaaactcggttacaaacaacatacccgtaccgatgcggaaggctatatcgagaaactgcacatcacccccgccaatgcccatgagtgcaaacacctgtcgccgttgttggaaggggtacctagaggtacgaccgtctatgccgacaaaggctacgacagtgcagaaaaccggcaacatctggaagaacatcagttgcaggacggcattatgcgcaaagcctgccgcaaccgcccgctgtcggaagtgcaaaccaaacgcaaccgatatttgtcgaagacccgttatgtggttgaacagagcttcggtacgctgcaccgtaaattccgctacgctcgggcagcctatttcggactgattaaagtgagtgcgcaaagccatctgaaggcgatgtgtttgaacctgttgaaagccgccaacaggctaagtgcgcccgctgccgcctaa

SEQ ID NO: 41885 - DNA, 360 bp, Neisseria meningitidis
atgttatataaatgtaaaatcaaaaagttagataacaccattgaagaggcagtattgattgaaataaatggttatgaactacattgttttatatcgtactgcccattcaaaatatttgaaaatcaattttatgaagtggaattatcctatgaaatctttaatgattacatactggataaatcaacttcaaatattgaatttagaaaaatagatgatagtttcaagtatgaaataacggcagaattaaaaaataatcatctaaccctacaaaatatacaatttgaagaagatgagtatttaataaactactcttatcttgataattgtttggttacattaacggttgatagaataagtgtt

SEQ ID NO: 41886 - DNA, 822 bp, Neisseria meningitidis
atgacgtttgacgaatggttgggcttgtcaaaactgcctaaaaatgaagcaagaatgctgctgcaatatgtttcggaatatacgcgcgtgcagttgttgacgcggggcggggaagaaatgccggacgaagtccgacagcgggcggacaggctggcgcaacgccgtctgaacggcgagccggttgcctatattttaggtgtgcgcgaattttatggcagacgctttacagtcaatccgagcgtgctgattccgcgccccgaaaccgaacatttggtcgaagccgtattggcgcgcctgcccgaaaacgggcgcgtgtgggatttggggacgggcagcggcgcggttgccgtaaccgtcgcgctcgaacgccccgatgcgtttgtgcgcgcatccgacatcagcccgcccgcccttgaaacggcgcggaaaaatgcggcggatttgggcgcgcgggtcgaatttgcacacggttcgtggttcgacaccgatatgccgtctgaagggaaatgggacatcatcgtgtccaacccgccctatatcgaaaacggcgataaacatttgttgcaaggcgatttgcggtttgagccgcaaatcgcgctgaccgacttttcagacggcctaagctgcatccgcaccttggcgcaaggcgcgcccgaccgtttggcggaaggcggttttttgttgttggaacacggtttcgatcagggcgcggcggtgcgcggcgtgttggcggagaatggtttttcaggagtggaaaccctgccggacttggcgggtttggacagggttacgctggggaagtatatgaagcatttgaaataa

SEQ ID NO: 41887 - DNA, 303 bp, Neisseria meningitidis
atgaccgcgcaacaccaatccgacacgctcttgcgccgcctgaacaccctgccgccgaaacgttacggcgttttcctattgaacgacgattacaccacgatggaatttgtcgtcgaaatcctgaccgaaatctttatgctcggacaagaacaggcggtagcggtaatgctcttggttcatcacgaaggcaaaggcctgtgcggcacttacacgcgcgatattgcccaaaccaaacaacaacaagtcatgcagcgggcaaaagccgaagggcatccgctgcaatgtattgtcgaggagatttaa

SEQ ID NO: 41888 - DNA, 426 bp, Neisseria meningitidis
atgtatatcggcgcggatgatttgacggctgcgatgggcaaaacggagctggtgcagctgaccagcgacaatgcgcgtgggacagaacccgacgctcaggtcattgatgcggcagtgcgttatgcctgcgatttggtggacggatacctgcgtggcagatatgtgctgccgctgaaggacacgccgacggtgttgcagcctttgtgcatcaacatcgcccgccattttttgcacagccgccgcatcaaccgagctgactttccgaaaccgctggaaactgcctacaacgcaaccattaagacgctggaagccatccgcgacggcaaaatccacatcggcatcgccgcatcggacaagccgccgcaacccgagctgggcgcgtatcacgtccgagcgcgcgacaaaatggatttaggaggctactga

SEQ ID NO: 41889 - DNA, 1170 bp, Neisseria meningitidis
atgagcgaatatctgtttacttccgaatcggtatccgaaggccatccggacaaagttgccgaccaagtatccgatgcgattttggatgccatcttggcgcaagaccccaaagcgcgtgtcgccgcagaaactttggtcaacacaggcttgtgcgtattggcaggcgaaatcaccaccaccgcccaagtggactacatcaaagtcgcacgcgaaaccatcaaacgcatcggctacaactcctccgagctgggctttgacgccaacggctgcgcggtcggcgtgtactacgaccaacaatcccccgacatcgcccaaggcgtaaacgaaggcgaaggtatcgacttgaaccaaggcgcaggcgaccaaggtctgatgttcggctacgcctgcgacgaaaccccgaccctgatgccgtttgccatctattacagccaccgcctgatgcaacgccaaagcgaattgcgcaaagacggccgcctgccgtggctgcgtcctgatgccaaagcccaactgaccgtggtttacgatagcgaatccggcaaagtaaaacgcattgataccgtcgtcctctctacgcaacacgacccggaaatcggttatgaagagttgaaaaacgccgtcattgagcagattatcaagcccgtcctgccgtctgaactgctgaccgacgaaaccaaatacctgatcaacccaaccggccgcttcgtcatcggcggcccgcaaggcgactgcggtttgaccggccgtaaaatcatcgttgatacctacggcggcgcggctccgcacggcggcggcgcgttctccggcaaagacccgtccaaagtggatcgttccgccgcttacgcctgccgctacgttgcgaaaaacatcgtcgccgccggtttggcaacccaatgccaaatccaagtttcctacgccatcggcgttgccgaaccgacttcgatttccatcgacactttcggtacgggcaaaatcagcgaggaaaaactgattgcgctggttcgcgaacatttcgacctgcgccccaaaggcatcgtccaaatgctcgacctcttgcgcccgatttacggaaaatccgccgcttacggacatttcggccgcgaagaacccgagtttacttgggagcgcaccgacaaagcggccgcattgagggcggcagcggggctgtaa

SEQ ID NO: 41890 - DNA, 639 bp, Neisseria meningitidis
atgtttcaaaattttgatttgggcgtgtttctgcttgccgtcctgcccgtgctgctcgccattaccgtcagggaggtggcgcgcggctatacggcgcgctactggggagacaacactgccgaacaatacggcaggctgacactgaaccccctgccccatatcgatttggtcggcacaatcatcgtaccgctgcttactttgatgttcacgcccttcctgttcggctgggcgcgtccgattcctatcgattcgcgcaacttccgcaacccgcgccttgcctggcgttgcgttgccgcgtccggcccgctgtcgaatctggcgatggctgttctgtggggcgtggttttggtgctgactccgtatgtcggtggggcgtatcagatgccgttggctcaaatggcaaactacggtattctgatcaatgcgattctgttcgcgctcaacatcatccccatcctgccttgggacggcggtattttcatcgacaccttcctgtcggcgaaatattcgcaagcgttccgcaaaatcgaaccttatgggacgtggattatcctgctgcttatgctgaccggggttttgggtgcgtttattgcaccgattgtgcggctggtgattgcgtttgtgcagatgttcgtctga

SEQ ID NO: 41891 - DNA, 2178 bp, Neisseria meningitidis
atgacacgcttcaaatattccctgctgtttgccgccctgttgcccgtgtacgcgcaggccgatgtttctgtttcagacgaccccaaaccgcagaaaagcactgaattgccgaccatcaccgttaccgccgaccgcaccgcgagttccaacgacggctacactgtttccggcacgcacaccccgctcgggctgcccatgaccctgcgcgaaatcccacagagcgtcagcgtcatcacatcgcaacaaatgcgcgaccaaaacatcaaaacgctcgaccgcgccctgttgcaggcgaccggcaccagccgccagatttacggctccgaccgcgcgggctacaactacctgttcgcgcgcggcagccgcatcgccaactaccaaatcaacggcatccccgttgccgacgcgctggccgatacgggcaatgccaacaccgccgcctatgagcgcgtagaagtcgtgcgcggcgtggcggggctgctggacggcacgggcgagccttccgccaccgtcaatctggtgcgcaaacgcccgacccgcaagccattgtttgaagtccgcgccgaagcgggcaaccgcaaacatttcgggctgggcgcggacgtatcgggcagcctgaacaccgaaggcacgctgcgcggccgcctggtttccaccttcggacgcggcgactcgtggcggcagcgcgaacgtagccgcgatgccgaactctacggcattttggaatacgacatcgcaccgcaaacccgcgtccacgcaggcatggactaccagcaggcgaaagaaaccgccgacgcgccgctcagctacgccgtgtacgacagccaaggttatgccactgccttcggcccgaaagacaaccccgccacaaattgggcgaacagccgccaccgtgcgctcaacctgttcgccggcatcgaacaccgcttcaaccaagactggaaactcaaagccgaatacgactacacccgcagccgcttccgccagccctacggcgtagcaggcgtgctttccatcgaccacaacaccgccgccaccgacctgattcccggttattggcacgccgacccgcgcacccacagcgccagcgtgtcattgatcggcaaataccgcctgttcggccgcgaacacgatttaatcgcgggtatcaacggttacaaatacgccagcaacaaatacggcgaacgcagcatcatccccaacgccattcccaacgcctacgaattttcccgcacgggcgcctatccgcagccatcatcgtttgcccaaaccatcccgcaatacggcaccaggcggcaaatcggcggctatctcgccacccgtttccgcgccgccgacaacctttcgttgatactcggcggcagatacagccgttaccgcaccggcagctacgacagccgcacacaaggcatgacctatgtgtccgccaaccgtttcaccccctacacaggcatcgtgttcgacctgaccggcaacctgtcgctttacggctcgtacagcagcctgttcgtcccgcaatcgcaaaaagacgaacacggcagctacctgaaacccgtaaccggcaacaatctggaagccggcatcaaaggcgaatggcttgaaggccgtctgaacgcatccgccgccgtgtaccgcgcccgtaaaaacaacctcgccaccgcagcaggacgcgacccgagcggcaacacctactaccgcgccgccaaccaagccaaaacccacggctgggaaatcgaagtcggcggccgcatcacgcccgaatggcagatacaggcaggttacagccaaagcaaaacccgcgaccaagacggcagccgcctgaaccccgacagcgtacccgaacgcagcttcaaactcttcactgcctaccactttgcccccgaagcccccagcggctggaccatcggcgcaggcgtgcgctggcagggcgaaacccacaccgaccctgccacgctccgcatccccaaccccgccgccaaagcccgcgccgccgacaacagccgccaaaaagcctacgccgtcgccgacatcatggcgcgttaccgcttcaatccgcgcgccgaactgtcgctgaacgtggacaacctgttcaacaaacactaccgcacccagcctgaccgccacagttacggcgcactgcggacagtgaacgcggcgtttacctatcggtttaaataa

SEQ ID NO: 41892 - DNA, 1842 bp, Neisseria meningitidis
atgcagacaaattatttgtctgaaacggattcgattatgaaaaaactgatttgcctgttcgccgtatttttgatgttgtgcggacgagctttcgcgctggatgcgaacgatctgctgccgccggaaaaggcattcgtgccggagcttgccgttgccgacgacggtgtgaacgtccgtttcaggattgccgacggatactatatgtatcaggcgaaaatcgtcggcaagaccgatccggcggatttgttgggacagccttctttcagcaagggcgaagagaaggaagacgagtttttcggcaggcagacggtttaccatcacgaggcgcaggttgcctttccttatgcaaaggctgtcggcgaaccgtataaattggttttgacctatcagggctgtgccgaagccggcgtgtgctatccgcccgtggataccgagtttgatatttccggcaacggcacttaccatccgcaaaccgacgaaccggcatccgccaaagaccgctttttgcagccttcctctcaaaacggcagcggggcgctgccgcccccgaagggggatgagggcggcgacagccgtttcaagctgtcttgggatacgctcaacgccaatcttttggcgttttttctcgccggtttgggtctgagttttaccgcctgtatgtatcccctgttgccgattgtttccagtattgtggtcggcgacaaaaaggcgggcaaggcgcgggcgtttgtgctgtccgtcgtttatgttcagggtttggctctgacttatacgctggtcggcattgttgccggactgacgggcgcactgctgaccgtatggttgcagcaggcttgggtggtgttggcggcatcggctttaatggtcgtcttggcactgtctatgttcgggctgttcaacatccagcttcccaacgccgtgcagtcgtattttcagaatcaaagcagcaggctttcaggcggtaaaatcgtttccgtctttattatgggcatattgtccgcgctgattgtcgggccgtgcgtcgccccgccgctggcatttgctttgggctacatcggtcagacgggcgatgcggttttaggcggtttggcactttacactttggcgttgggcaccggcgttccgctgattgccatcggcacgttcggcgggcatatcctgcctaaggcaggcgattggatgaatgccgtcaaatacgctttcggcttcatcctgctagccgtcgccgtttacctcgccacgccgcacttgccctattatctcgtcgtcgcgctgtacacgctgctgatgctggttcctgcctttatgctgctggtcaacggacgcaggcagaaacgccgtccgaaagctgtggcattcgcattgggcggtatattgctgataggcggcgcgtggttcggctggcagggcgcaaacggcaaaacgaccgcgctgcaccatttcctgaccctcaatccaccagccgaagcaggcaaatcttcggaacacggcaaaatgtttgccgatactgccgcgctgaaggcagcgatggatacggcgttgaaagaacatcccgacaaacccgtcgttttggatttttatgccgactggtgcatttcctgcaaagaaatggcggcttacacgctcaatcagccggaagtgcatcaggcagtcgatatggaacgctttttccaaatcgacgtaaccgccaacacgcccgaacatcaggcgttgttgaaagaatacggtctgttcgggccgccgggcgtgtttgtcgtccgctccgacggcagccgcagcgagccgctgctgggttttgtcaaagcagacaagtttatcgagtggtatgaacaaaaccgctga

SEQ ID NO: 41893 - DNA, 990 bp, Neisseria meningitidis
atgaaacagaaaatttttgtcctttataccggcggcaccatcggcatgacgcaaagcagcgaaggcctgcgccccgataccgcgctggtcgggcaggcactcgcgccgttttcaaacggcatggatttcgattggcacgtttgtgggacgctgattgattcttccgccgtccaactgcaaaactggtgcgcttggctggacatcattgccgccgcgctgccgcagtacgacggcgttttggtgctgcacggcacggacacgctcgcctataccgccaatctgttcgccctcgcgctgcagggtttggacaagccaatcgtcctgaccggctcccaatggccgtacaacgccgtgggcagcgacgcgccgcgcaatctggcgactgccgttgccgcattcccactcggattgaagcagacgcttattgcctttgacggcaaactgtatcccgccgtcggcagcagcaaagtcagcaccgaaaccgcctcaggcttcgataatccgcatttcggtgtcatcgccgaatgggatgaaactcaaggctggtacaatcttcgtattccgtcccaagatgcggcggccgtttcagacggcctcaaaatccgctatcctgacccgcaggcaaaaatcgccgtccgcacgcttatccccggctttgccgtccaagaacttgccgacggactcggacagcttcccgcccaagcccttatcctgcaaagctacggacacggcaacacgcccgcagacgaaggtttcatccgcgccgtgcaagatttcacgcagcaaggcaaattgttgctcaacatcagccaagtccgacaaggcagaaccgctgccgtttacgcgcaaggcaacgcgttccgcaactcaggcatcatcaacggcggcaaatgcaacctcgaaaccgccaccgcgcttatgaccctcgccgtatcgcaaggctggggtaaggaagaggtggaaaaagagttggcaagactgaagttatag

SEQ ID NO: 41894 - DNA, 2259 bp, Neisseria meningitidis
atgtacacaagaattatggaaatcagcccttggacgctgcgttcggcaaagctggaaaaagaacacaaacggctgcaagagagcctgaccagtttgggcaacggctatatgggtatgcgcggcagctttgaggaaacctattccgccgacagccacttgggtacctacatcgccggtgtgtggtttcccgacaaaacccgcgtcggctggtggaaaaacggctaccccaaatatttcggcaaagccatcaacgcgctcaatttcagcaaagtcaaaatctttgtcgacggacaagaggtggacttggcgaaaaacgatgttgccggcttctccgtcgaactcgatatgcagcacggcgtgttgcgccgctcgttcaccgtattcggtgtgcgtttcaatgtgtgcaaattcctgtccgtcgcgcaaaaagagctggcggttatctgttgggaagccgtatccgttgacggcaaaacccaccaagtccgcatcgattccatcatcgatgccgacgtgaaaaacgaagactccaactacgaagaaaaattctggcaggtattggacaaaggcgtttcagacagtctctcctacattgccgcccaaaccgttgccaaccctttcggtgtggaacaatttatcgtcaacgccgagcaaactttcgccggcagcttcaaagccctcggcggcagacaaaccgactggcaggtctccaattctttcgaggccgaagtcggcggcacgcccgaaacctttgaaaaacgggttattgttaccaccagccgcgattatcagggcttggaagcagtgaaagccgcaggccgcgccttgtcggaaaaagtcgcaggcgttgcgtttgaaaccttgctggacgcgcacaaagcaggctggctgcaccgttgggaaatcgccgacgtggtcatcgaaggcagcgacgaagcgcagcaaggcatccgtttcaatctgttccaactgttctccacctactacggcgaagacgcgcgtctgaacatcggcccgaaaggctttaccggcgaaaaatacggcggcgcgacctattgggacaccgaagcctacgcagtgccgctctacctcgcactggcggaacccgaagttacccgcaacctgctgcaataccgccgcaaccaactgccgcaggcgcaacacaacgcgcgcgaacagggcttggcgggcgcactctatccgatggtaacgtttacgggcatcgagtgccacaacgaatgggaaatcaccttcgaggaaatccaccgcaacggcgcgattccttacgccatctacaactacaccaactacaccggcgacgaaagctatcttgccaaagaaggcttggaagtcttggtcgaagtgtcccgcttctgggcggaccgcgtccacttctccaaacgcaacggcaaatacatgattcacggcgtaaccggcccgaacgaatacgaaaacaacatcaacaacaactggtacaccaacaccctcgccgcatgggtattggactacacccgcgaagccctggcgaaatacccgcgtccggatttaaacgtgcgtgccgccgagttggaaaaatgggcggacatcagcgcgaatatgtaccgtccgtatgacgaagaactcggcgtattcgtacaacacgacggattcctcgacaaagacatccgccccgtgtccgcgctttcgcccgacgatttgccgctcaaccagaaatggtcgtgggacaaaatcctgcgttcgccctttatcaaacaggcggacgtattgcaaggcatctatttcttcggcgaccgtttcaatatcgacgaaaaacgccgcaacttcgacttctacgaaccgatgaccgtgcatgaaagctcgttgtcgccgtgtatccactctattctcgccgccgaactgggcaaagaagaaaaagccgtggaaatgtaccagcgcaccgcccgcctagacttggacaactacaacaacgacaccgaagacggcctgcacatcacctccatgaccggctcgtggcttgccatcgtccaaggtttcgcccaaatgaaaacctggggcggcacactcagcttcgccccgtttctgccgagcgcgtggacaggctacgccttccacatcaactaccgaggccgtctgattaaagtcgccgtcggcaaagaaaacgtcgtcttcaccctgcttaaaggcgaaccgctcgatttgcaggtgtacggcaaagacatcacgctcgacggcagccataccgccgctttggaaaaataa

SEQ ID NO: 41895 - DNA, 435 bp, Neisseria meningitidis
atgcgccgggcgttgattgcaaaaattaaaattgcccaaaaggagctgggcttggacgacggtacctatcgcgcggtgttggagcgcgtgacgggcaagcggtcgtgtgcggatatggatgtttccgaacttgagtctgttgtcgctgatatgcggtcgcacggatttaagcctaaagcaaaaggtaacccacacggcaaaccgcatctgcgtcggacatcatcagcggcaatgttggacaaagtcgaagccctgctgaccgtcggcggcaaacattggaactatgcacacgcaatggcgcggcggatgtttggtaaggataaggtcgaatatttagacgatacgcagctacataaactggttgctgcgttgcagattgcggaaaacaggaaaacggaaaaagcgggtggggatgatggggttcgaaaaagttga

SEQ ID NO: 41896 - DNA, 510 bp, Neisseria meningitidis
atgaaaaagaaactgctttcgggcatcaaatttgccgttcagacggcattggtgtttttattggtgtcgctgtttttggattgggtacgcaagcccgaagagccggccggcgcggcagggcggcctttgaccctgctgtcggggcagcggctgactttgggacagtttagccgggataaggcggttttggtgtatttttggggaagctggtgcggcgtgtgccgttatcagtcgccgataatcgatgatttggcggcggacggcgttccggtcgtcggcgtggcggtacgttccggcagcgcgtccgaagtggcggcgtatatggcaaagcggggcttgggctttccgacggtcaacgatgaggacgggggtttggcaaggtcttggcggattgtcgcaacgcctgccgtcgttttggtcaaaaatgggaaaatggttcactatacgacgggaatcagcagttattggggcttgcgcgcacgaatttttcaggcggatgttttcggttaa

SEQ ID NO: 41897 - DNA, 1299 bp, Neisseria meningitidis
atgaagtctgtcatccaagacctgcaatcgcgcgaccttatcgcgcaaacgaccgacatcgaagccttagacgctttgttgaacgaacaaaaaatcgccctttactgcggtttcgatccgaccgccgacagcctgcacatcggacacctgctgcccgtattggcattgcgccgtttccaacaggcggggcatacgccgattgctttggtgggcggcgcgaccggtatgatcggcgaccccagcttcaaagccgccgaacgcagcttgaattccgccgaaactgttgccggctgggtagaaagcatccgcaaccaactgacccctttcttaagctttgaaggcggaaacgccgccattatggcgaacaacgccgactggttcggcaaaatgaactgcctcgacttcctgcgcgacatcggcaaacatttctccgtcaacgccatgctgaacaaagaatccgtcaaacagcgcatcgaccgcgacggcgcaggcatttccttcaccgagttcgcctactccctgctgcaaggctacgacttcgccgagttgaacaaacgccacggcgcggttttggaaatcggcggctccgaccaatggggcaacatcaccgccggtatcgacctgacccgccgcctgaatcaaaaacaagtgttcggcctgaccctgcctttggttaccaaatcagacggcaccaaattcggcaaaaccgaaggcggcgcagtatggctgaacgcgaaaaaaacctcgccctatcagttctaccaattctggctgaaagtcgccgatgccgatgtgtataaattcctgaaatactttaccttcctgtccatcgaagaaatcgatgccgtcgaagccaaagaccaggcaagcggcagcaagcccgaagcgcaacgcatcctcgccgaagaaatgacccgcctgattcacggcgaagaagcccttgccgccgcgcagcgcatttccgaaagcctgtttgccgaagaccaaagcagcctgaccgaaagcgacttcgagcagctcgccctcgacggcctgcctgcatttgaagtttcagacggcatcaatgtcgtcgaagccttggtcaaaaccggtttggcatcctccaataaagaagcgcgcggctttgtgaacagcaaagcggttttgctcaacggcaaacctgccgaagccaacaaccccaaccacgccgccgaacgccccgacgatgcctgcctgctgaacggcgaacacaaacgtttcggcaaatacaccatccttcggcgcggcaaacgcaaccacgcgcttttggtttggaaataa

SEQ ID NO: 41898 - DNA, 930 bp, Neisseria meningitidis
atgattcacgtttcggcagtgcaggcaccggcgcatattcaggataccggacgctacggacaccggcgttacggcatcggtcatgccggtgcgatggacacggttgctttggcggcgggtaatattttattgggcaacgacgaaggcacggccgcaatcgaaatcgctttgggcgggataatgctggtgtttgaacgggatacgccgttttgtctcaccggtgccgtgtatcaggcggaattggacggcgaaccggtctattcgtattggcgttataccgcccgcaaagggcagaccttgaaaatggtgcgtgccgtgcagggcatgtacggctatgtgtgcgtggcgggcggatttgatgtgccggaagtgatgggttcgagaagcaccgacctgaaagccggtttcggcggccatcagggcagaatgctgcaaaaaggtgattgtctccccatcggcaaaggtgcgcaggaattgtccaaagtcggcattgccccgataccgtttaccgataccgtccaccttgttccttcgtcggaatatgccgctttcagtgaaaaagggcgtctgaatctggaacgggaaacgtggacgctgcaaagcgatagcaaccgcatgggctaccgcttcgacggacagccgctgaccctgtcgcaacctttggaaatgctgtcccacgctgttcaggcaggaaccgtgcaggtgccgcccggcggcaaaccgattatcctgctggccgatgcgcaaaccaccggcggttatccgaaaatcgctaccgttgccgccgccgatttgggcaggctggcacaggtgcgcttcggcagcaaagtcaaattcaaaataatcggcttgaaagaagccaccgccctgcggcgcaaaaaccaagcctatctgaaccaaatacggagaatcacccatgaagcaggttga

SEQ ID NO: 41899 - DNA, 825 bp, Neisseria meningitidis
atggacggtacgcagtcgaaacccaagtttttcgaacgcctgatctcccgacttgccggcgagcccgactccgccgaagacgtattgaccctgctgcgccaagcgcacgagcaggaagtttttgatgcggatacgcttttaaggttggaaaaagtcctcgatttttccgatttggaagtgcgcgatgccatgattacgcgcagccgtatgaacgttttaaaagaaaacgacagcatcgagcgcatcaccgcctacgttatcgataccgcccattcgcgcttccccgtcatcggcgaagacaaagacgaagttttgggcattttgcacgccaaagacctgctcaaatatatgtttaaccccgagcagttccacctgaaatccgtcttgcgccctgccgttttcgttcccgaaggcaaatctttgaccgcccttttaaaagagttccgcgaacagcgcaaccacatggcgattgttatcgacgaatacggcggcacgtcgggtttggtcacctttgaagacatcatcgagcaaatcgtcggcgaaatcgaagatgagtttgacgaagacgacagtgccgataatatccacgccgtttcttccgaacgctggcgcatccacgcggctaccgaaatcgaagacatcaataccttcttcggcacagaatacagcagcgaagaagccgataccatcggcggcctggtcattcaagagttagggcatctgcccgtacgcggcgaaaaagtccttatcggcggtttgcagttcaccgtcgcccgcgccgacaaccgccgcctgcacacgctgatggcgacccgcgtgaagtaa

SEQ ID NO: 41900 - DNA, 399 bp, Neisseria meningitidis
atgtccgattgctgcaaccgtatccaaccggttttgctttctgttttgcgtatcgtaaccgcctacctgtttttgttgcacggtacgtcgaaaatcttcgccttccccattgaaatgggcagcggttcgcccggcgggctgttgctgcttgccggtattttagaaattgtcggcggcattttgctggtgttgggcctgtttgcgcgccctgccgcgtttgttttgtccggccagatggcggttgcctattttatggcgcacgcttccggaaatgctttgttcccgattgccaacggcggcgagtccgcagtgctgttctgcttcgtattcctctatatcgcggcggcgggcggcggagcatggtcgctggacaggctgtttttcaagcgtaaagcctga

SEQ ID NO: 41901 - DNA, 747 bp, Neisseria meningitidis
atgaacgttttgatttccaacgacgacggctacctctccgaaggcatcgccgttttggcgcgcgttacggcggaatttgccaacgtcagggtggttgcgcccgaacgcgacaggagcggggtcagcaattcgctgacgctggaacgccctttgcagttgaaacaggcgcaaaacgggttctactatgtcaacggcacgccgaccgactgcatccacatcgggcagtctgtattttcggattttcaggccgattttgtcttttcgggcatcaaccggggcgcgaatatgggggacgacacgctttattcggggacggttgcggcggcaaccgaagcctaccttatgggcatacccgctgtggcgttttccttaaacgacgcttccggacgctattgggcgaccgcagaacaggcactgtggacattgttggcgcattttttcaaaaaccccccgcagtcccctattttgtggaacatcaatatccccgccgtcgcgccggaagatgtgcggggcattaaaatcgcccgtttgggcaggaggcaccacggtcagaacgtcatccccgcgcgcaatccgcgcggcgaacagatttattggatagggccggtcggcgaagtttccgatcgggaagagggaacggatttcggtgaatgcggcgcaggtttcattaccgtaacgccgctgcaaatcgacctgaccgcctatccggacatggcggaaacagcggcgttctggcatacggactga

SEQ ID NO: 41902 - DNA, 930 bp, Neisseria meningitidis
atgagaataaccaatcaagttacaaaaaacattattaagagagttattaaatctgaagattatagaatagaaattgttaatttgctcaatgcggaatttttacagttttctattgatttctttaaaaaagttgttaccgctaaattaaattcaaaagatattacaattgattggtataaggaacattttttagcgaaaaattcacctaaaggtgaattaattatttattcaggattaaatgaaaaaacaattacaaatatgtatggaaccgctaaaaaatctgttgttattgatgcatcaatagagcattttgaaacactttatagcagtattcaaatgttagtagaaaatgaacaaaatgaaattgatttaacattaacaattaaattaaaaaatgtaagtgtggatttaagtattagtgaaagtttgattgttatcaatacattagcagttaagcgatcacaattgcgtgggggattatggagtactgcaggtaaaagcgttgaaaaatatttaatgcttacattgtgccaattatatcaagttcccgaagataattatgatgctagtacatttgtaaaagataaatccaaaagtgtagatagagaaattgatttttatttaattaaaaatcaaaatagatatttgtgcgaagtgaagctaatgggtaaaggtaatcctgaaagcgcagatgctattatcgctcgtaatacacaaatttttattgcagatacattatctcagcaaaataaaaatcaatgcgatgaattaaaagttgaatgggttgctttgcgcgagcagcagggttttcttaagtttgagaaaattttgcgaacatttgatattccttttatttcatatcagtatgaggatggcaataagcttgattgtaatttagatgatatattaaatcgtttgttggatgattaa

SEQ ID NO: 41903 - DNA, 1155 bp, Neisseria meningitidis
atgtcctgcgaacacctagtcatgtcatacagcacctttcccaaaaccaaaaacgacgcgctgaatgagccgatgtttttcggtcagcctgtgaatgtcgcccgttatgaccagcagaaatacgaggtatttgaaaaactgattgaaaaacaattgtcgtttttttggcggccggaagaaatcgacgtgtcgcgcgaccgtatcgactacgccaacctgcctgaacacgaaaaacatattttcatcagcaatctgaaatatcaaacactgctcgattccatccaagggcgcagtccgaatgttgccttgctgcctttggtttcgattcccgagttggaaacgtggattgaaacgtggagcttcagcgaaaccatccactcgcgcagctatacccacatcatccgcaatattgtgaatgatccgtcggtcgtgtttgatgatattgtcgaaaacgaatacattaccgcccgcgccgaagacattgcctgctattacgatgacttaatcgaatacacccagtattacaacctgttgggcgaagggatgcataatgtcggcggaaaacccattactgtgtctttgcgcgggttgaagaaaaaactctatctctgcctgatgtgcgtcaacgtgttggaagccatccgtttctacgtttcattcgcctgctcgtttgcttttgccgagcgcgagttgatggaaggcaacgccaaaatcatcaaactgattgcccgcgacgaagccctgcacctgaccggcacgcagcatatgcttaatctgatgcgttctggtgttgatgattctgaaatggcggaaattgccgccgagttgcaggacgaatgtttccaactcttcaaaaaagcggcggaacaggaaaaagaatgggcggcatatttgtttaaggacggttcgatgatcggtttgaacaaagaaatcttatcccaatacgtcgaatatattaccaatctgcgtatgcaggcggtggggttgccggccggatttgaaggcgcaaatcaaaacccgattccgtggattaatgcgtggctgtcgtccgacaacgtacaggtcgcgccgcaggaagtggaaatatcctcttatttgatcggtcagatagattctgaagtgaatacggatgatttgggcgattttgagttgtaa

SEQ ID NO: 41904 - DNA, 699 bp, Neisseria meningitidis
atgaaatccagacacctcgccctcggcgttgccgccctgttcgcccttgccgcgtgcgacagcaaagtccaaaccagcgtccccgccgacagcgcgcctgccgcttcggcagccgccgccccggcagggctggtcgaagggcaaaactataccgtccttgccaatccgattccgcaacagcaggcaggcaaagtcgaagtccttgagtttttcggctatttctgtccgcactgcgcccacctcgaacctgttttaagcaaacacgccaagtcttttaaagacgatatgtacctgcgtaccgaacacgtcgtctggcagaaagaaatgctgacgctggcccgcctcgccgccgccgtcgatatggctgccgccgaaagcaaagatgtggcgaacagccatattttcgatgcgatggtcaaccaaaaaatcaagctgcaaaatccggaagtcctcaaaaaatggctgggcgaacaaaccgcctttgacggcaaaaaagtccttgccgcctacgagtcccccgaaagccaggcgcgcgccgacaaaatgcaggagctgaccgaaaccttccaaatcgacggtacgcccacggttatcgtcggcggtaaatataaagttgaatttgccgactgggagtccggtatgaacaccatcgaccttttggcggacaaagtacgcgaagaacaaaaagccgcgcagtaa

SEQ ID NO: 41905 - DNA, 2838 bp, Neisseria meningitidis
atgaataagaaacacggttttcagcttaccctgaccgccttggccattgcaaccgcttttccggcttatgccgcccaagcgggggcggcggcacctgatgccgcgcagacccaatccctgaaagaggttaccgtccgtgccgccaaagtgggacggcgatcgaaagaggcgaccggtttgggcaaaatcgtcaaaacgtcggaaacgttgaacaaagaacaggtactcggtatccgcgacctgacgcgctacgatccgggcgtggcggttgtcgaacagggcaacggcgcgagcggcggctactcgatacgcggcgtggataaaaaccgtgtggcggtttcggttgacggcgttgcccaaatacaggcgtttaccgtgcagggatcgttgagcggatacggcggacgcggcggcagcggcgcaatcaacgaaatcgaatatgaaaacatcagcacggtggaaatcgacaaaggtgccggttcgtccgatcacggcagcggcgcactcggcggcgcggtcgccttccgcaccaaagaagcggcagacctgatttcagacggcaaaagctgggggatacaggcaaaaaccgcctacggcagtaaaaaccgccaatttatgaagtcgctcggcgcggggttcagcaaagacggttgggaagggctgttaatccgaaccgaacgccaagggcgggaaacgcgcccgcacggcgatattgcggatggggtggcatacggcataaaccgtttggacgcgttccgccagacacacgatattcaaagccaagataaaacagggcaatttttcttagtagagggcgagaatacactcaagcccgtggcaaaattggcgggctacgggatatatttgaaccgccagcttaaccgctgggtaaaagaacgtattgaaaaaaatcagcctttaagtgctgaagaagaagcgatggtgcgggaggcgcaggcgcgccacgaaaacctgtccgcccaagcttacacgggcggcggcaggatattgcccgatccgatggattaccgcagcggctcttggcttgccaagctgggctaccgcttcggcggcaggcattatgtcggcggcgtgtttgaggataccaaacagcgttacgatatccgcgatatgacggaaaaacagtattacggtacggacgaggcggacaagtttagagacaagagcggggtgtacgacggcgacgatttccgcgacggcttgtattttgtgccgaatatagaagagtggaagggcgataaaaagttggtcaggggcataggtttgaaatattcccgcaccaaatttattgatgaacatcaccgccgccgccgtatgggtttgctgtaccgttatgaaaacgaagcgtattctgacaactgggcggataaggcggtgttgtcgtttgacaaacagggcgtggcaaccgacaacaacacgctgaagctgaattgcgccgtgtatcctgctgtggacaaatcctgccgcgcgtcggcggacaaaccgtattcctacgacagcagcgaccgtttccactaccgcgaacagcacaatgttttgaatgcctcgtttgagaagtcgctgaaaaacaaatggacgaaacaccatctgactttgggcttcggttacgatgcttccaacgcgatctcccgccctgaacagctttcccacaatgcggcaaggatttcggaacacacgggggagtacaccgacgacgacaaagacaagtaccgtttgggtaagcccgaagtcgtcgaagggtcggtctgcggctacatcgaaaccctgcgttcccgcaaatgcgtgccaagaaaaatcaatggcagcaatatccatatttctttgaacgaccgtttttcaatcggcaaatattttgatttcagcttgggcggcaggtatgaccggaaaaacttcaccacgtcggaagaactcgtccgcagcgggcggtatgttgaccgttcgtggaacagcggcatcgtgttcaaaccgaaccggcatttttctttgtcttaccgcgcctccagcggcttcagaacgccctcattccaagaacttttcgggatagacatttatcacgattatccgaaaggctggcagcgtcccgccctgaaatcggaaaaggcagccaaccgcgaaatcggtttgcagtggaagggcgatttcggctttttggaaatcagcagcttccgcaaccgttataccgatatgattgccgttgccgatcacaaaaccaaattgccgaatcaggcaggacaattgacagagattgatatacgcgattattacaatgcccaaaatatgtcgctccaaggcgttaatatattgggaaaaatcgactggaacggtgtgtacggcaaactgcccgaaggtttgtacaccacattggcgtacaaccgcatcaaaccgaaatcggtatccaaccggccggacttgtccctccgcagctatgctttggatgcggtacagccgtcgcgttatgttttggggttcggatacgaccagccagaggggaaatggggcgcaaacattatgctgacctattccaaagggaaaaaccctgacgagcttgcttatctggcaggcgatcaaaaacgatattcgacaaaaagagcgtcgtcttcttggtcgacggcagacgtttccgcctatctgaatctgaaaaaacggctgaccttgagggcggctatctacaatatcggcaactaccgctacgttacttgggaatccttgcgccagactgcggaaagcacggcaaaccggcacggcggcgacagcaactatggaaggtatgccgcaccgggcaggaacttcagtctcgcgctcgaaatgaagttttaa

SEQ ID NO: 41906 - DNA, 393 bp, Neisseria meningitidis
atgaacggtaaatactactacggcacaggccgccgcaaaagttcagtggctcgtgtattcctgattaaaggtacaggtcaaatcatcgtaaacggccgtcccgttgacgaattcttcgcacgcgaaaccagccgaatggttgttcgccaacccttggttctgactgaaaacgccgaatctttcgacatcaaagtcaatgttgttggcggcggcgaaaccggccagtccggcgcaatccgccacggcattacccgtgccctgatcgacttcgatgccgcgttgaaacccgccttgtctcaagctggttttgttacccgcgatgcccgcgaagttgaacgtaaaaaaccgggtctgcgcaaagcacgccgtgcaaaacaattctccaaacgttaa

SEQ ID NO: 41907 - DNA, 1200 bp, Neisseria meningitidis
atgcgaaaaaaacttaccgccctcgtattgtccgcactgccgcttgcggccgttgccgatgtcagcctgtacggcgaaatcaaagccggcgtggaaggcaggaactaccagctgcaattgactgaagcacaagccgctaacggtggagcgagcggtcaggtaaaagttactaaagttactaaggccaaaagccgcatcaggacgaaaatcagtgatttcggctcgtttatcggctttaaggggagtgaggatttgggcgaagggctgaaggctgtttggcagcttgagcaagacgtatccgttgccggcggcggcgcgacccagtggggcaacagggaatcctttatcggcttggcaggcgaattcggtacgctgcgcgccggtcgcgttgcgaatcagtttgacgatgccagccaagccattgatccttgggacagcaacaatgatgtggcttcgcaattgggtattttcaaacgccacgacgatatgccggtttccgtacgctacgactctccggaattttccggttttagcggcagcgtccaattcgttccggctcaaaacagcaagtccgcctatacgccggctcattatactactgtgtataatgctactactactactactactactactttcgttccggctgttgtcggcaagcccggatcggatgtgtattatgccggtctgaattacaaaaatggcggttttgccgggaactatgcctttaaatatgcgaaacacgccaatgtgggccgtgatgcttttaatttgttcttgcttgggcgcatcggcgatgatgatgaagccaaaggtaccgatcccttgaaaaaccatcaggtacaccgcctgacgggcggctatgaggaaggcggcttgaatctcgccttggcggctcagttggatttgtctgaaaatggcgacaaaaccaaaaacagtacgaccgaaattgccgccactgcttcctaccgcttcggtaatgcagtcccgcgcatcagctatgcccatggtttcgactttatcgaacgcggtaaaaaaggcgaaaataccagctacgatcaaatcatcgccggcgttgattatgatttttccaaacgcacttccgccatcgtgtctggcgcttggctgaaacgcaataccggcatcggcaactacactcaaattaatgccgcctccgtcggtttgcgccacaaattctaa

SEQ ID NO: 41908 - DNA, 852 bp, Neisseria meningitidis
atggtcggatgcgtttggcaggcaggacggtttgaaatcggtttggacaagccgaaaatcatgggcatcgtgaatctcacgcccgattctttgtccgacggcggcgcgtattcgcaaaacgccaaaaccgctttggcgcacgccgaacggcttttgaaagagggtgcggacattctcgacatcggcggcgaatcgacgcggccgggtgcggattatgttccgcctgaagaagaatgggcgcgggttgcgcctgttttggcggaagtggcggggtggggtgttcccgtcagtttggacacgcgccacacggcggttatggaaaaagcgttggcactcggcggcatcgatattattaacgatgtggcggcgttgaccgacgaaggcgcgctcgaattgctggcgcgtcaggcggatacgggcatttgcctgatgcacatgcagggttcgcctaaaaacatgcagattaatccgaaatatcaggatgttgtcggtgaagtggcgcggtatttgaaggcgcgggcggcggaatgtgtcgcggcaggcatcgccccgcaacgcatcacgctcgatccgggtttctgcttcggcaaaaccctgcaacacaatatcgcgctgatgcggcatttgcccgaattgatggcggaaaccggtttgccgctgcttatcggcgtatcgcgcaagagcatgataggcgagctgaccggcgaaaccgacgcggcggcacgcgtacacggcagcgtggcggcggcgctggcttccgtggcgcgcggcgcgcaaatcgtgcgggtgcacgatgtgaaggcgacggcggacgcgttgaaagtgtgggaagcgttgggcatcaatctgtaa

SEQ ID NO: 41909 - DNA, 324 bp, Neisseria meningitidis; identical to SEQ ID NO: 37526

SEQ ID NO: 41910 - DNA, 156 bp, Neisseria meningitidis
atggaaaaacgaaacacatacgccttcctgctcggtataggctcgctgctgggcctgttccatcccgcaaaaaccgccatccgccccaatcccgccgacgatctcaaaaacatcggcggcgattttcaacgcgccatagagaaagcgcgcaaatga

SEQ ID NO: 41911 - DNA, 915 bp, Neisseria meningitidis
atgcagaattttggcaaagtggccgtattgatgggcggtttttccagcgaacgagaaatctcgctggacagcggcaccgccattttgaacgctttaaaaagcaaaggcatagacgcatacgccttcgatcccaaggaaaccccattgtctgaattgaaggcacaaggttttcagacggcattcaacatccttcacggtacttacggcgaagacggggcggttcaaggcgcgttggaactgttgggcattccctataccggcagcggtgtcgccgcctccgccatcggcatggacaaataccgctgcaaactgatttggcaggcattggggctgcccgttcccgagttcgccgtcctgcacgacgacactgatttcgatgccgtcgaagaaaaattgggcctgccgatgtttgtgaaaccggcggccgaaggcagcagcgtaggcgtggtaaaagtcaaaggaaaaggccgtctgaaaagcgtttacgaagaattgaaacaccttcagggcgaaatcattgccgaacggtttatcggcggcggcgaatattcctgccccgtcctgaacggcaaagggctgcccggcatacacatcattcccgcaaccgagttttacgactacgaagccaagtacaaccgcgacgacaccatttatcaatgtccttcggaagatttgaccgaagccgaagaaagcctgatgcgcgaactggcggttcgcggcgcgcaggcaatcggtgcggaaggctgcgtgcgcgtcgatttcctcaaagataccgacggcaaactctatctgttggaaatcaacaccctgcccggtatgacgagccatagtttagtaccgaaatccgctgccgttacgggcgtgggttttgccgatttatgtattgaaattttgaagactgcacatgtgggataa

SEQ ID NO: 41912 - DNA, 198 bp, Neisseria meningitidis; identical to SEQ ID NO: 36305

SEQ ID NO: 41913 - DNA, 1503 bp, Neisseria meningitidis
atgagtcgtgaaatgttacagctggcagaagcactggcaagcgaaaaaaacgttgatgcggaagtcgtcttccaagcactggaattcgccctgtctaccgctgccaagaaaaaggcagaccgcgaacacatggatgtccgcgtacaaatcaaccgcgacaccggcgaataccaaaccttccgccgctggctgattgtcgccgatgaagactatacctatcccgatgtcgaaaaaaccatcgaggaaatccaagaggaaattcccggcaccgccatccaaatcggcgaatactacgaagagcagctgcccaacgaaagcttcggccgccaagccgcgcaaaccgccaaacaaatcatcctgcaacgcatccgcgatgccgagcgcgagcagaatctgaacgagtttctcgccgtcaaagaagacatcgtgtctggcacggtcaaacgcgtcgaacgccacggcatcatcgtcgaagtcgttgccggcaaactggacgcgctgattccgcgcgaccaaatgattccgcgcgaaaacttccgcagcggcgaccgcatccgcgccctcttcctgcgcgtcgaagaaatcggcaacaccggccgcaaacaagtcatcctgagccgtacttccggcgatttcctcgtcaaactgtacgccaatgaagtacctgaaattgcagacggcatgcttgaaatccgcgctgtcgcccgcgacccgggccaacgtgccaaagtcgccgtcaaagccaacgaccagcgcatcgatccgcaaggcacctgtatcggcgttcgcggttcgcgtgtcaatgccgtcagcaatgaattatccggcgagcgcatcgacgttgtcctttggtcgcccgagcctgcccaattcgtcatgagcgcgctctcacccgccgaagtcagccgcatcgtgattgacgaagacaaacacgccgttgacgtgattgttgatgaaaaccaactggcgctagccatcggacgcggcggtcaaaacgtgcgccttgcttccgacctgaccggctggcagctcaacatcatgacttccgccgaggcagacgaacgcaatgcggcagaagatgccgccatccgccgcctgtttatggatcacttgaacgtggacgaagaaaccgccgacgtactggttcaagaaggttttgcaaccttggaagaagtcgcctatgttcctgccgccgaactgcttgccattgaaggatttgacgaagaaatcgtcgatatgctccgcaaccgcgcccgcgatgccatcctgaccatggcgattgccgccgaagaaaaactgggcgaagtatccgacgatatgcgcaacctcgaaggcatagatgccgatatgctccgcagccttgccgaagcaggcattaccacccgcgacgacttggcagagcttgctgtggacgaactgattgaaatcaccggtgtaaacgaagaaaccgcaaaagccgtcatcctgaccgcacgcgaacactggtttaccgaagacaaataa

SEQ ID NO: 41914 - DNA, 216 bp, Neisseria meningitidis
gtgtttaagctcggcgtttatgcctgtctcggactgtttgccggctgggtgctgctgctgattgtgcaactttggttttcttttctcgaagccgaattgttcttcaaaatcacactgactatggcggggctgtttgtcatcatcctcgccgccctgctggtattcggccagtatttttccgaaaagaaaatgaaagacgacgggtttatcaactga

SEQ ID NO: 41915 - DNA, 1539 bp, Neisseria meningitidis
atgaatatgctgggagctttggcaaaagttggcagtctgacgatggtgtcgcgcgttttgggatttgtgcgcgatacggtcattgcgcgcgcattcggcgcgggtatggcgacggatgcgttttttgtcgcattcaaactgcccaacctgctgcgccgcgtgtttgcggaaggggcgtttgcccaagcgtttgtgccgattttggcggaatataaggaaacgcgttcgaaagaggcgacggaggcttttatccgccatgtggcggggatgctgtcgtttgtgctgatcatcgttaccgcgctgggcatactcgccgcgccttgggtgatttatgtttccgcgcccggctttgccaaagatgccgacaaatttcagctctccatcgatttgctgcggattacgttcccctatatcttattgatttcactttcctcttttgtcggctcggtactcaattcctatcataaattcagcattccggcgtttacgcccacgttcctgaacgtgtcgtttatcgtattcgcgctgtttttcgtgccgtatttcgatcctcccgttaccgcgctggcttgggcggtttttgtcggcggcattttacaactcggcttccaactgccctggctggcgaaactgggttttttgaaactgcccaaactgaatttcaaagatgcggcggtcaaccgcgtcatgaaacagatggcgcctgcgattttgggcgtgagcgtggcgcagatttctttggtgattaacacgattttcgcgtcttatctgcaatcgggcagcgtttcatggatgtattacgccgaccgcatgatggagctgcccggcggcgtgctgggggcggcactcggtacgattttgctgccgactttgtccaaacactcggcaaaccaagatacggaacagttttccgccctgctcgactggggtttgcgcctgtgcatgctgctgacgctgccggcggcggtcggactggcggtgttgtcgttcccgctggtggcaaccttgttcatgtaccgcgaattcacgctgtttgacgcgcagatgacgcaacatgcgctgattgcctattctttcggtttaatcggtttgatcatgattaaagtgttggcatccggcttttatgcgcggcaaaacatcaaaacgcccgtcaaaatcgccatcttcacgctcatctgcacgcagttgatgaaccttgcctttatcggcccactgaaacacgtcggactttcgcttgccatcggtctgggcgcgtgtatcaatgccggattgttgttttacctgttgcgcagacacggtatttaccaacctggcaagggttgggcagcgttcttagcaaaaatgctgctctcgctcgccgtgatgtgcggcggactgtgggcagcgcaggcttacctgccgtttgaatgggcgcacgccggcggaatgcggaaagcggggcagctctgcatcctgattgtcatcggaggctgcctgtatttcgcatctctggcggctttgggcttccgtccgcgccatttcaaacgggtggaaagctga

SEQ ID NO: 41916 - DNA, 897 bp, Neisseria meningitidis
atggagtctgaaaacattatttccgccgccgacaaagcgcgtatccttgccgaagcgctgccttacatccgccggttttccggttcggtcgccgtcatcaagtacggcggcaacgcgatgaccgaacctgccttgaaagaagggtttgcccgcgatgtcgtgctgctgaagctggtcggcattcatcccgtcatcgttcacggcggcgggccgcagatcaatgcgatgcttgaaaaagtcggcaaaaagggtgagtttgtccaaggaatgcgcgttaccgacaaagaggcgatggatattgtcgaaatggtgttgggcgggcatgtcaataaagaaatcgtgtcgatgattaacacatatggcggacacgcggtcggcgtaagcggacgcgacgaccatttcattaaggcgaagaaacttttgatcgatacgcccgaacagaatggcgtggacatcggacaggtcggtacggtggaaagcatcgataccggtttggttaaagggctgatagaacgtggctgcattcccgtcgtcgcccccgtcggcgtaggtgaaaaaggcgaagcgttcaacatcaacgccgatttggtggcaggcaaattggcggaagaattgaacgctgaaaaactcttgatgatgacgaatatcgccggtgtgatggacaaaacgggcaatctgctgaccaaactcacgccgaaacggattgatgaactgattgccgacggcacgctgtatggcggtatgctgccgaaaatcgcttctgcggtcgaagccgccgtcaacggtgtgaaagccacgcatatcatcgacggcaggttgcccaacgcgcttttgctggaaatctttaccgatgccggtatcggttcgatgattttgggcggtggggaagatgcctga

SEQ ID NO: 41917 - DNA, 1776 bp, Neisseria meningitidis
atgagtatcgtgctgcacggcgtggcggcgggcaaaggcattgccgtcggttgcgcccacctgattgcgcgcggtacggaggaagtgccgcagtatgatgttgcggaggcggacaccgatgccgaagccgaacgtttcgatgccgccgtcaaagccacgcgcaaagagttggaacagctccgcagcgcgattcccgaaaacgccccgaccgagttgggcgcgttcatctcgctgcacctgatgctcttgaccgatgttaccttgtcgcgcgaacccgtcgatattttaagggaacaaaaaatcaacgccgagtgggcattgaagcagcagagcgacaaactcgccgcccaattcgacaatatggacgatgcctatttgcgcgaacgcaagcaggatatgctgcaagtcgtccgccgcatccacaacaacctgatcgggcagggcaacgagttggaagttgccgacaacctgtttgacgaaaccgttctgattgcaaacgacctttcgcccgccgacacggttttgtttaaagagcagcgcattgccgccttcgttaccgatgccggcggccccaccgggcatacggcgattttgggcaggagcttggacatcccgtccgtcgtcgggctgcacaacgcgcgcaaactgattaccgaaggcgaaacggtcattgtggacggtatcaacggcgtgttgattatcgcgccggatgagtcggtgttgaacgaataccgccgccgtgcccgcgaataccgcagccacaaacgcgatttgaacaagctcaaaaaaaccgccgccgccaccgccgacggggtctgcatcgagcttgtgggcaatatagaatccgccgaagacgtgaaaccgctgcacaacctcggcgcagacggcatcgggctgttccgcagcgagtttctttacctgaaccgcgatacgatgccgtctgaagacgagcagtacgaagtgtacagcgcgattgtcaaaaaaatgaaaggcaaaagcgtaacgatacggacagtcgatttaggtgtggacaaaaacccgcgctggttcgggaaaaacagcacgcccaacggcagcctcaaccccgcgctgggcatgaccggcatccgcctgtgccttgccgaaccggtcatgttccgcacccagatgcgcgccatcctccgtgcggcggtacacggccccgtgcggatgatgtggccgatgattacctcagtatccgaagtgcgccagtgcctcatccacctcgacaccgcgcaacgccagcttgccgaacgcggcgatgccttcggtaaagtcggcatcggctgtatgattgaaattccgtctgccgcgctgaccgtcggcagtattttgaaactggtcgatttcatctccgtcggtaccaacgacctgattcaatacatcttgtccgtcgatcgcggcgacgacagcgtcagccacctctaccagcccggccatcccgccgtgctgaaaatgctgcaacacgtcatccgtaccgccaaccgcatggacaaagacgtatccgtatgcggcgagatggcgggcgataccgcgtttacccgcgttttattgggtatggggctgcgccgtttttccatgaaccccaacaacatcctgcccgtcaaaaacatcattctgcacagcaatgtcggacagctcgaaagcgatattgcgaaagtcatccgctgcgaagacgaggaaaaggcggaaaagctgatcaaacagatgaacagcgtgtctgtcgaggaagaagccgacttcaaggggcggaaataa

SEQ ID NO: 41918 - DNA, 1089 bp, Neisseria meningitidis
atgagcgactacacgcagcagcttcaagataaaaaagaccaccttaaaaccctttttgcaggtttggatgttcctgagtgggaagtgtacgaatctccggacaaacattaccgtatgcgtgccgagttccgtatttggcacgaaggcggtgaaatgttttatgccatgtttgaaaaaggacaaaaggctggcggggcaagcctgatccgttgcgaccgttttgaagcggcttccgaagccgtcaaccgcctgatgccagaattgattgccgttgccgcccaatctgccgaactgagaaaccgttggtatgccgtcgaatttttgtctacgctcagcggggaaatgctggttaccatgatttaccacaaaaggcttgataatgagtggatgcaggcggcgcaagcgttacagcaacagttggatatttccgtcatcgggcggagcaggggacagaaaatagtcttaaaacaggactatgtaacggaaactttgaaggtcggcaaccgggatttccgttatcggcaaattgaaggcagttttacccaaccgaatgccgccgtgtgtcagaaaatgcttgaatgggcctgcggtgcagcagaaggattggatggggatttgctcgaactgtattgcggaaacggcaactttacgcttcctttatctgaaaagtttgaacgtgttttggcaaccgaaatctccaaaacctccgtcagcgcggcgcaatggaatatcgaagccaaccgcatcggcaacatcaaaatcgcccgtctgtctgctgaagaatttaccgaagcctataccagaaaacgtgagtttaaacgccttaaggatggcggtattgctttgacggattacgcattttccactattttcgtcgatccgccgcgtgccggtatcgatgaggaaactttgaagctggtgtcgcagtttgacaacatcatctacatttcctgcaatcccgaaacgctgcgtgccaatttggacaccttggcggaaacccatgcggtcgaacgtgccgccctgttcgaccaattcccgtttacgcaccatatcgaaagtggtgtattgttgaaaaagaaaatcctttga

SEQ ID NO: 41919 - DNA, 1365 bp, Neisseria meningitidis
atgggcaaagccaacgcctttaccgcgccgattaccgtcgtcaattacgacgaacaagccctcaataacaccgaagcgcgtactttggtggatgccgtagcgaaaaaagacgcttccgtttggcaattcggcggcgaaagcaacacgctgaccggactgtattttagaggttatcagcttgatgcgcgccaatccggtactgcacgcctgaccgaccaatacttccgcactttaagcatgaacctgtctgcgcgaggcgaatttgaaaccggcccggtaacacataactggagtacggctttcgaccgcgttatccgccagcggaaaaccataaacggcagcggaaacggcaacagcaagatagaagtgaaggcaaacgaaaatattgagcatcaattggcatcgttcaaagccgactatcccaattcttgggcgaaaaccgccaacttggatgctaatatcaaagttaacagcctggctttgtccgacaccttgggcttcgtggataacaaataccgcctgactttgggcggacgtttccaagcggttgaatacaccaataagaaaaaatcacagagcggcgatgccaaacgtttcagcccgatgctgatggcggcgtgggtgccgcaacctgatttggttgtgtacggcaactatatggaagacttggagcgtgccgacatcaaaaccgatgattccggcgaaacgacaatggcgaaaccgcgcgtcagccgtcagtttgaagtgggtgtgcgtaaaaactggggtgatttcgttaccacgttaaacgcgtttcaaatcaaacgcccgggctactggcgcggcaataccaaaaaaggtactgattttgcagcatataaagcagcaggaggcgcggccggcgacgagcaaggtatggaacgcaatcgcggtattgaattcaatgcctatgccaacctgttgaacaaaaccttgcgtccgactttgggtctgatgtatctgcaatcgaccgtgaaagagtatccaaattcacgcgatatgctggttaacggcgtacaagtcgccaatccgcgcgtaattgccaaagcaggtttggaatgggatacaccgtttgccaaaggattgactttaaacggtaatgtttcgtatttcggcaagtcttaccaagacacgcaaaaacaatacgccttcccgtcctataccttgattgacgtaggcgcgcgctacaaaaccaagctcggcaaaaatactttgaccgtcagcagctcggtggaaaacctgttcaacaaaaactattggcaggtacagcgcggccaatacgaccgcagcttcgccgtcgtcggtatgccgcgcacttactggctgaaggcggaattggatttctga

SEQ ID NO: 41920 - DNA, 381 bp, Neisseria meningitidis; identical to SEQ ID NO: 39320

SEQ ID NO: 41921 - DNA, 447 bp, Neisseria meningitidis
atggctattgcgaacaataaaaaagcatttcacgattttttcattgaagaccggattgaagccggtttggtcttggaaggctgggaagtcaaagcaatccgcgccgcgcgcgtacagcttaaagagagttatatctattggaaaaaagacgcgttttatctggtcggctgccatattacggctttgcccacagcctcgacacacattaaaccagatgccgtacgtccgcgcaagctcttgttgaaccagtcggaaatcaacaaattaatcggcaaaaccgaacgtgccggctacaccatcgtgccgctggatttgcatttttcacgcggaaaaatcaagatggaaatcggtttggcaaaaggtaagaaacagcacgacaaacgccagagtatgaaagaggcggattggaaacgcgagaaacagcggttgattaagcatacgcgctga

SEQ ID NO: 41922 - DNA, 621 bp, Neisseria meningitidis
atgaagaataatgattgcttccgcctgaaaaacccccagtccggtatggcgctgatagaagtcttggtcgctatgctcgttctgaccatcggtattttggcactattgtctgttcagttgcggacagtcgcttccgtcagggaggcagagacgcaaaccatcgtcagccaaatcacgcaaaacctgatggaaggaatgttgatgaatccgaccattgattcggacagcaacaagaaaaactataatctttacatgggaaaccatacactaccgcatacactatcagctgtggatggcgattttgcgattgatgccatgaaaactaaggggcaattggcagaggcacaattgaagagatttagttatgagctgaaaaatgccttgccggatgcggcagccatccattacaccgtctgcaaggattcgtcgggtaatgcgccgacattgtccggcagtactttttctcaaaattgcgatggtagtgcaaatggggatactttgattaaagtattgtgggtaaatgattcggcaggggattcggatatttcccgtacgaatcttgaggtgagcggcgacaatatcgtatatacttatcaggcaagggtcggaggtcgggaatga

SEQ ID NO: 41923 - DNA, 1422 bp, Neisseria meningitidis
atggacacaaaagaaatcctcggctacgcggcaggctcgatcggcagcgcggttttagccgtcatcatcctgccgctgctgtcgtggtatttccccgccgacgacatcgggcgcatcgtgctgatgcagacggcggcgggactgacggtgtcggtattgtgcctcgggctggatcaggcatacgtccgcgaatactatgccgccgccgacaaagacaccttgttcaaaaccctgttcctgccgccgctgctgtctgccgccgcgatagccgccctgctgctttcccacccgtccctgccgtctgaaatcctgttttcactcgacgatgccgccgccggcatcgggctggtgctgtttgaactgagcttcctgcccatccgctttctcttactggttttgcgtatggaaggacgcgcccttgccttttcgtccgcgcaactcgtgcccaagctcgccatcctgctgctgctgccgctgacggtcgggctgctgcactttccggcgaacaccgccgtcctgactgccgtttacgcgctggcaaaccttgccgccgccgcctttttgctgtttcaaaaccgatgccgtctgaaggccgtccggcgcgcaccgttttcatccgccgtcctgcatcgcggcctgcgctacggcataccgatcgcactaagcagcatcgcctattgggggctggcatccgccgaccgtttgttcctgaaaaaatatgccggcctagaacagctcggcgtttattcgatgggtatttcgttcggcggagcggcattattgttccaaagcatcttttcaacggtctggacaccgtatattttccgcgcaatcgaagaaaacgccccgcccgcccgcctctcggcaacggcagaatccgccgccgccctgcttgcctccgccctctgcctgaccggcattttctcgcccctcgcctccctcctgctgccggaaaactacgctgccgtccggtttatcgtcgtatcgtgtatgctgccgccgctgttttgcacgctggtagaaatcagcggcatcggtttgaacgtcgtccgaaaaacacgcccgatcgcgctcgccaccttgggcgcgctggcggcaaacctgctgctgctggggcttgccgtaccgtccggcggcgcgcgcggcgcggcggttgcctgtgccgcctcattttggctgttttttgttttcaagaccgaaagctcctgccgcctgtggcagccgctcaaacgcctgccgctttatatgcacacattgttctgcctggcctcctcggcggcctacacctgcttcggcacgccggcaaactaccccctgtttgccggcgtatgggcggcatatctggcaggctgcatcctgcgccaccggaaagatttgcacaaactgtttcattatttgaaaaaacaaggtttcccattatga

SEQ ID NO: 41924 - DNA, 471 bp, Neisseria meningitidis; identical to SEQ ID NO: 39685

SEQ ID NO: 41925 - DNA, 870 bp, Neisseria meningitidis
atgtccgcaaacgaatacgcacaaatcggctggataggcttagggcaaatgggtctgcctatggtaacgcggctcttggacggcggcatcgaagtcggcgtatacaaccgctcgcccgacaaaactgcccccatctccgccaaaggcacaaaagtttacggcaacaccgccgaactcgtccgcgactatcccgtcattttcctgatggtttccgactatgccgccgtgtgcgacatcctgaacggagtccgcgacggattggccggcaaaatcatcgtcaacatgagcaccatctccccgaccgaaaacctcgccgtcaaagcacttgtcgaagccgcaggcggacagtttgccgaagcacccgtttccggatcggtcgggcccgccaccaacggcacgctgctgattctgttcggcggcagcgaagccgttttaaacccgctgcaaaaaatattttccctcgtcggcaaaaaaaccttccatttcggcgatgtcggcaaaggttcgggcgcgaaactcgtcttgaactcgctcttgggcattttcggcgaagcgtacagcgaagcgatgctgatggcgcggcagttcggcatcgataccgacaccatcgtcgaagccatcggcggctcggcaatggactcgcccatgttccaaaccaaaaaatccctgtgggcaaaccgcgaattcccacccgccttcgccctcaaacacgcctccaaagacctcaacctcgccgtcaaagagcttgaacaggcaggcaacaccctgcccgccgtcgaaaccgttgctgccagctaccgcaaagcagtcgaagccggctacggcgaacaggacgtttccggcgtttacctgaaactggcagaacactga

SEQ ID NO: 41926 - DNA, 789 bp, Neisseria meningitidis; identical to SEQ ID NO: 39927

SEQ ID NO: 41927 - DNA, 1338 bp, Neisseria meningitidis
atgagtaaccatacttcttggtcgtccaaaatcggtttcgtgcttgctgcggcaggttcggccatcggtttgggcgcgatttggaaatttccttatacggcaggcaccaacggcggcgcggtgtttttcctgctgtttttgatatttaccgtcttggtcgccctgcccgtccagcttgccgagttttatatcgggcgcacaggcggtcaaaacgccgtcgattccttcagggctctgcgtccgagtacgcaatggctttgggtcgggcgcatgggcgtttccgcctgctttattttgctgtcgttttacagcgtggtcggcggatgggtattaaattatgtcgtccacagtttcacgggggcggttcataccggcgcggactttgaagccttgttcggcgcgacgatttccaatccggcaggttcgctgtcctatcaggcactgtttatgctgattacggtttgggtggtcaaaggcggcatttcagacggcattgaaaaggcaaaccgttatctgatgccggggctgtttatcctctttattgcgctggcaatccgttcgctgacgctgccgggtgcaatggagggcgtgtctttcctgctcaaaccgaattggtcgtactttaaagccgatacgatgattacggctttgggacaggcgttttttgccttgagcatcggcgtttccgctatgattacctatgcttcgtatttgggaaaagatcaggatatgttccgctcggggcatacgattatgtggatgaacctcttggtttcgctgttggcaggtttggtgatttttccggcggtgttcgccttcggttttgaaccgagccaggggccgggattgatttttatcgtattgccggcggtgtttatgaaaatgccgttcggtacggttttgtttgcggtatttatgctgctggtcattttcgccacgctgacttcggcattttcgatgttggaaacggtcattgcctcaaccatccgccaagacgagcgcaaacgcaaaaaacatacttggcttatcggcacggccattttcattgtcggcatcccatccgcgctgtctttcggcgtatggggtgagtttaaggttttcggcaaaaccatttttgatttgtgggactatgttatttccgccgtcattatgcctgtcggcgcattgagcgttgccgtatttaccgcctggattcaggacaagcagtctgtgttaaaagatgccggcgcgggcagcaccgtaccacgggcagtgctgctgctgtggctgaataccttgcgctaccttgccccgattgccattattattgttttcatcaattctttggacatcctttaa

SEQ ID NO: 41928 - DNA, 966 bp, Neisseria meningitidis
atgagacgtaaaatgctaaacgtaccaaaaggcagttatgatggtatgaagggttttaccattattgaatttttggttgcgggcatgctcagtatgattgtcctgatggcggtcggatcgagttacttcacgtcccggaaattaaatgatgcggcaaacgagcgtcttgctattcaacaggatttgcggaatgcggcaacattgattgtccgcgatgcaagaatggcggggagcttcggttgtttcaatatgtctgagcataccgaaaagaatgttgtttccgatgtggcgcaaaaaaaccgtcttttttccttaaaagggagcagtgcaaataaacttatccccaacggtacagataataaacttatccccataacggaatctttagatatcggatatcagggttttacccagcgccttaacgcattggttttccaatacggtatcgatgatcttgatgcgagtgctgagactgttgtagtcagcagctgttccaaaatagcaaaaccgggtaagaaaatatctaccttgcaagaagcaaagagtgcattacagattactaatgatgataaacaaaatggaaatatcacccgtcaaaggtatgtggtcaatgcctatgcggtcggcaggattgccggtgaggaaggtttgttccgcttccaattggatgataagggcaagtggggtaatcctcagttgttggttaaaaagattaataaaatggatatacggtatatttatgtttccgattgtcctgaagatgacgatgccggcaaagaggaaaaattcaaatatacgggtacattcgacagctccacaaatgctgttacgcccgccggggtggaggttttattgagtagcggtactgataccaagattgccgcttcttcagacaatcatatttatgcttaccgtatcgatgcgacaatacgcgggggaaatgtatgcgcaaacagaacactttga

SEQ ID NO: 41929 - DNA, 372 bp, Neisseria meningitidis
atggctattactaaagaagacattttggaagcagttggttctttgaccgtaatggaattgaacgacttggttaaagcttttgaagaaaaattcggtgtttctgctgctgctgttgcagttgcaggtcctgctggtgccggtgctgccgatgctgaagaaaaaaccgaatttgatgtcgttttggcttctgccggcgatcaaaaagtcggcgtgattaaagttgtccgtgcaattaccggtttgggtctgaaagaagctaaagacatcgttgacggcgcacctaaaaccattaaagagggtgtttctaaagctgaagccgaagacatccaaaaacaactggaagaagcaggcgctaaagtcgaaatcaaataa

SEQ ID NO: 41930 - DNA, 423 bp, Neisseria meningitidis
atgaccgatattttcactacatccaaacgttctttcgtgatgtcaaaaatccatagcaaagaaaccaaaccggaaatattggtaaggaaatttcttttctcccaaggttttcgttatcggaaaaacgataaacgctatgcaggcaaaccggatatcgttttgccgaaatataaaacagtcgtgtttatacacggctgtttttggtacgggcattcttgtaataaaggacatatcccgaaaagcaatacggatttttggttggaaaaaatcacaaaaaattgcgaacgtgatattaaaaatgaaaccgagctggaaaagatcggtttcaaagtgattgtcgtttgggagtgcgaattaaaaaataaagctatttgtagggagcgattaaatcggttggtcagggaaataaaagatgccgtctga

SEQ ID NO: 41931 - DNA, 354 bp, Neisseria meningitidis; identical to SEQ ID NO: 40341

SEQ ID NO: 41932 - DNA, 780 bp, Neisseria meningitidis
atgttttttgtcctttcccctgcgaagaaccttaatgaaaaagaccctgcccctgtcagcgagtttacccaacccgacctgctggcagagtccgacattctaatgcagcagttgcgcgagcttgcgccgcaacagattgccgaactgatgcacgtttccgacaaaattgccctcttaaacgcgcagcgcaatgcagcgtggcacacgccgtttacgccggaaaacgccaaacaggcggtctttatgttcaacggcgatgtttacgaaggtatggatgcaaacacattggatattggacagatacgctatctgcaaaaccatgtccgcctgctgtccggtctgtacggtcttctgcgtccactggacctgatgcagccttaccgtttggaaatggggacggcatttgccaatttgcgcggcaagaatttgtatgagttttggggcgacatcattaccaaccttttaaatgatacgcttgcccaagcaggcagcaatacgcttgtcaaccttgcctcacaggaatatttcaagtccgtcaacacgaaaaaacttcgggcgcggctgattaccccgatatttaaagacgaaaaaaacggtaaatataaaatcatcagtttctatgccaagcgtgcgcgtggattaatggtgcgctatgcggcagaacatcatattaccgaccctgaaatgctgaaaaattttaattacgaaggctacgcattcaatgatgcggcctcaaatgaaagcgaatgggtttttatgcgttcggaacaaataaagtga

SEQ ID NO: 41933 - DNA, 486 bp, Neisseria meningitidis
ttgttgattcaatcggcattatgttttgaggcggaagcccatgaatatactaatattcaagagatggaatgggtgtctttattttctgatccgcaaagagacgatgatagtcttataacccttaaagatgaaaaaatcactgtaaaaaactatattgtgccttggtggaaaaaaggtgaaaactttagaaaattagaacttattaccactggtaaaaatgataatggaaatttaacggtaaatggaatttacggcatccaatcttttgcagactctcaattgggatatacgcctgaattattggtaaaaagcaataatgatattctatttaaaaataatttccaatctgttgacgtgaagccccattccggaaatatccatttggatgccaaaggaaaaattcaatttaatttgaatgttcccgatgttgatggggtacaagatgtagccagtggaaaaaaataccgacaaacaatagtgccttag

SEQ ID NO: 41934 - DNA, 924 bp, Neisseria meningitidis
atgaaaaaacgcaacaatcctcttccgctgttgaacggtgtcaaacccagttatttggtgctgccgcatgaaaagcagttttacgggctgtcgctgctgcattttctgtgcatccgctttccttttgtgggcgcggacgattggcgcaggcggttgaacagcggttttgtggtcggttcggatggtgcggcgttggacgaacatactttgttcgagccgggtaaggtgatgttttattatcgggaaaccagcagtgaggatgagccgcgtattccgtttgaagaaaagattttgcatattgatgagcatttgattgtggtggacaagccgcattttctgcccgtcatccccggcgggcgttttttgagggaaacgctgctcacacgtctgcgcctgcgtcctgaattgcagcatttgaatgttgaggacattacgccgctgcaccgcttggacaaggatacggcaggcgtgatgctgctgtcgcataatcctgccacgcgcggagcctatcagacgatgtttcaaaacaaaacggtatggaaaacgtatgaggcacttgcgccgacaaggacggatttgccgtatccgctcgatgtggtttcgcgtttggtgaggggtgagaaattttttacgacgcaagaggcggaaggcgaaccaaacgcacatacgacggtcgaactgattgaaaacaggggggaattcagcctttaccgccttacgccgcataccggcaagaaacaccagttgcgcgtgcatatgatgggtttgggtatgccgctgttgaatgacgcgctctatcccgtgccgtctgaagcgggcagcgaggattatcggaaacctttgaagttattggcaaaaaagattgcgtttgcagatcctttgtcgggtcgggaaagggtgttttgcagtaggttttgcctataa

SEQ ID NO: 41935 - DNA, 585 bp, Neisseria meningitidis
atgcacatactgaccgccggcgtggacgaggccggacgcggacctttagtcggcagcgtgtttgccgccgccgtcatccttccggaaacgtttgacctacccggactgaccgactccaaaaaactcagcgagaaaaaacgcgacacgcttgccgaaatgattaaagatcaggcggccgcgtggcacgtcgccgccgccacgcccgaagaaatcgccagcctcaacatcctgcacgccaccatgcttgccatgaaacgcgccgttgacggtttggttgtgcaccccgaaaaaatattcatcgacggcaaccgcattccagaacatttaggtatccctgccgaagccgtcgtcaaaggcgacagcaaaatcatcgaaatctccgccgcatccgttttggcaaagaccgcacgcgatgcagaaatgtacgcactggcgcaacgccatccccaatacggtttcgacaaacacaaaggttatggcacgaagcagcatctggaagccctcaaacaatacggcgtgctgcccgaacaccgccgcgacttcgcccccgtcagaaacctgctcgcgcagcaggccttgttttaa

SEQ ID NO: 41936 - DNA, 1746 bp, Neisseria meningitidis
atgttgattaagagcgaatataagcctcggatgctgcccaaagaagagcaggtcaaaaagccgatgaccagtaacggacggatcagcttcgtcctgatggcaatagcggtcttgtttgccggtctgattgctcgcggactgtatctgcagacggtaacgtataactttttgaaagaacagggcgacaaccggattgtgcggactcaaacattgccggctacacgcggtacggtttcggaccggaacggtgcggttttggcgttgagtgcgccgacggagtccctgtttgccgtgcctaaagagatgaaggaaatgccgtctgccgcacaattggaacgcctgtccgagcttgtcgatgtgccggttgatgttttgaggaacaagctcgaacagaaaggcaagtcgtttatctggattaagcggcagctcgatcccaaggttgccgaagaggtcaaagccttgggtttggaaaactttgtatttgaaaaagaattaaaacgccattacccgatgggcaacctgtttgcacacgtcatcggatttaccgatattgacggcaaaggtcaggaaggtttggaactttcgcttgaagacagcctgcatggcgaagacggcgcggaagtcgttttgcgggaccggcagggcaatattgtggacagcttggactccccgcgcaataaagccccgaaaaacggcaaagacatcatcctttccctcgatcagaggattcagaccttggcctatgaagagttgaacaaggcggtcgaataccatcaggcaaaagccggaacggtggtggttttggatgcccgcacgggggaaatcctcgccttggccaatacgcccgcctacgatcccaacaggcccggccgggcagacagcgaacagcggcgcaaccgtgccgtaaccgatatgatcgaacccggttcggcaatcaaaccgtttgtgattgcgaaggcattggatgcgggcaaaaccgatttgaacgaacggctgaatacgcagccttataaaatcggaccgtctcccgtgcgcgatacccatgtttacccctctttggatgtgcgcggcatcatgcagaaatcgtccaacgtcggcacaagcaaactgtctgcgcgtttcggtgccgaagaaatgtatgacttctatcatgagctgggcatcggtgtgcgtatgcactcgggctttccgggcgaaactgcaggtttgttgagaaattggcgcaggtggcggcccatcgaacaggcgacgatgtctttcggttacggcctgcaattgagcctgctgcaattggcgcgcgcctataccgcactgacgcacgacggcgttttgctgccggtcagctttgaaaaacaggcggttgcgccgcaaggcaaacgcatattcaaagaatcgaccgcgcgcgaggtacgcaatctgatggtttccgtaaccgagccgggcggcaccggtacggcgggtgcggtggacggtttcgatgtcggcgcgaaaaccggcacggcgcgcaagttcgtcaacgggcgttatgccgacaacaaacacatcgctacctttatcggttttgcccccgccaaaaacccccgtgtgattgtggcggtaaccattgacgaaccgactgcccacggttattacggcggcgtagtggcagggccgcccttcaaaaaaattatgggcggcagcctgaacatcttgggcatttccccgaccaagccactgaccgccgcagccgtcaaaacaccgtcttaa

SEQ ID NO: 41937 - DNA, 225 bp, Neisseria meningitidis
atggacgcggttcaagagttggaacaccgcatcacagagctggaaatccaatccgcgcttcaggaggacgtaatcgccggcctgaacgcgatggtggcggaattgcggcagacgctggatttgcagcaggctcagttgaggctgctgtatcaaaaaatgcaggacaggaatcccgacgcgcaagagccgtattccctgcgcgatgaaattccgccgcattattga

SEQ ID NO: 41938 - DNA, 612 bp, Neisseria meningitidis
atgcgccgcaccgccctcctgctgctcgcactcaccgccggcacgtcccttgctgccggcttcagccaaaaagacacgccgatcaacacccgctaccgcgaaacgcccgaagaagccgccgcccgcgaatttaaagaacataccgccaaactgccgccgctgcccgatacgcactcggacggctggttcgacatttatgtggatgaaaattacggcaaacagccgaaaatcctgctcgacagcctgcaaattatgcccgcgcccgacggcagcatccgctacattctcaatatccgctccgacaaaggctacgacaacctgactgccgaaggcatattctgcgcccgcttctccatcaggttcggcaacggcaaaccttcctcctataaagtgttcggctacggcgacacggtcaaccgccgctggatacagccccgaaacgccgaatggaaaccgataggcggtacattaagccgcaacgacgcactgcgcaccgtcctgtatcaggcattctgcgaaggcggtgtacccgccgacacgaaaggtttggtacaacgcctgaaagaacgtgccggacgctatgccccatcgataaagccgcacaacaaataa

SEQ ID NO: 41939 - DNA, 918 bp, Neisseria meningitidis
atgaatttgactaaaacacaacgccaactgcacaactttctgaccctcgcccaagaagcaggttcgctgtccaagctcgccaaactctgcggctaccgtacccccgtcgcactctacaaactcaaacaacgccttgaaaagcaggcagaagacccagatgcacgcggcatccgtcccagcctgatggcaaaactcgaaaaacacaccggcaaacccaaaggctggctcgacagaaaacaccgcgaacgcactgtccccgaaaccgccgcagaaagcaccggaactgccgaaacccaaattgccgaaaccgcatctgctgccggctgccgcagcgttaccgtcaaccgcaatacctgcgaaacccaaatcaccgtctccatcaacctcgacggcagcggcaaaagcaggctggataccggcgtacccttcctcgaacacatgatcgatcaaatcgcccgccacggcatgattgacatcgacatcagctgcaaaggcgacctgcacatcgacgaccaccacaccgccgaagacatcggcatcacactcggacaagcaatccggcaggcactcggcgacaaaaaaggcatccgccgttacggacattcctacgtcccgctcgacgaagccctcagccgcgtcgtcatcgacctttccggccgccccggactcgtgtacaacatcgaatttacccgcgcactaatcggacgtttcgatgtcgatttgtttgaagaatttttccacggcatcgtcaaccacagtatgatgaccctgcacatcgacaatctcagcggcaaaaacgcccaccatcaggcggaaaccgtattcaaagccttcgggcgcgccctgcgtatggcagtcgaacacgacccgcgcatggcaggacagaccccctcgaccaaaggcacgctgaccgcataa

SEQ ID NO: 41940 - DNA, 552 bp, Neisseria meningitidis
atgaaggttttgaacggttggtcggacaggaagatgtggcgggttttgagtgctttgccgataggcgtggtgttttttgatttgatctacggttttgtgttgaatgtgttgcagggtttggatttgcagcgtgccgtgccggattcggaaggcgtgttggcggttaggcccgatattgcattcaacagtttgcagattgtcgccaacggcggtatggcggcggtggtctgtttcgggttggcggttgtgtttttgctcaaccgttcggtgcggcggcggcaggtgttggaaatcggggtgttccggatgttggggctggtggcggtattggcgttcagcgcgccgtcggtgtgggagtgggcgaacgcgctgccgctgctgctgaagggcgcggacgtggttaatacggggaatgcgcgttatgtgctgacggctttgtgtatgccctttccggcggtgtcgtgcgtcatcgggctggtggggcggttcaggcttcagacggcatcgggcagggcggcaaagtcagggggtgcgggcaaggcggacggatag

SEQ ID NO: 41941 - DNA, 498 bp, Neisseria meningitidis
atgaataacctccccgttgccgacatactcatcttcgccatcatcgccgcctgcatcgtgctatccgcgatgcgcggcgtgattgcggaggcaggttcgatggcggcatgggtggtttccttctttttcgccaaactctttgccgcctccttcgccgacctcgcctttgcctcgttccaaccccgcctgtttgcattggctctgtcgttcatttccctgttcgtcattgcctgtctgatccagaaaatgctccgttcgctgctgaccggcgcagtttcggcggtcggtttgggctttgccaaccgcattttgggcggcgtattcggtgcattgaaaggcgttttgattgttaccctgctgatcatgcttgcttcaaaaaccgacctgcccgataccgaagaatggcggcaatcttacacactgccgtttttcgtatcgctttccgaagccgtgttgaaccatagcggcggcacggcggaaactccggaagacgattga

SEQ ID NO: 41942 - DNA, 219 bp, Neisseria meningitidis
atgagtgcggtcatacgctacaccacccaagacggcgaccgatgggatttgattgcgcacaagcattacggcaacgcactgttgattgacggtctgattgcggccaatccgcacttgcctttggcggaggagttcgtgagcgggctgacggtatttgtccccgttttggaaaccaaaccgaaaaataaccaagaggagctgccgccgtggatgcgttaa

SEQ ID NO: 41943 - DNA, 372 bp, Neisseria meningitidis
atgccaactatcaaccaattggtacgcaaaggccgtcaaaagcccgtgtacgtaaacaaagtgcccgcactggaagcctgcccgcaaaaacgcggcgtgtgcacccgtgtatacacgactacccctaaaaaacctaactctgcattgcgtaaagtatgtaaagtccgcctgaccaacggttttgaagtcatttcatacatcggcggcgaaggccacaacctgcaagagcacagtgtcgtattgattcgcggcggtcgtgtaaaagacttgccaggtgtgcgttaccacactgtacgcggttctttggatactgcaggtgttaaagaccgtaaacaagcccgttccaaatatggtgctaagcgtcctaaataa

SEQ ID NO: 41944 - DNA, 519 bp, Neisseria meningitidis
atgaatttgcctattcaaaaattcatgatgctgtttgcagcagcaatatcgttgctgcaaatccccattagtcatgcgaacggtttggatgcccgtttacgcgatgatatgcaggcaaaacactacgaaccgggtggcaaataccatctgttcggtgatggtcgcggcagtgttaaaaatcgggtttacgccgtccagacatttgatgcaactgcggtcggtcccatactgcctattacacacgaacggacaggatttgaaggtgtcatcggttatgaaacccatttttcaggacatggacatgaagtacacagtccgttcgatcatcatgattcaaaaagcacttctgatttcagcggcggtgtagacggcggttttaccgtttaccaacttcatcggacagggtcggaaatccatccggaggagcaagggatatatacagctattatgtcaaaggaacttcaacaaaaacaaagactaatattgtccctcaagccccattttcagaccgttggctaa

SEQ ID NO: 41945 - DNA, 390 bp, Neisseria meningitidis
atgaaaaacgttcaaaaaggctttacgctgctcgagctgatgattgccgtcgccatcctcggcatcctgacgctcatcacctacccttcctataaaacctacatccggcgcatccgcctgtcggaagtcaaatccaccctgctgatgaacgcgcagaccatggaacgttactaccgccaaaaagggacgtttgaaaactacgatacaaacaaactgaaacaaaacaaatatttcaagattaccttaagcgaagtcagccccgaccacttcacccttcaggccgaccccaatcccaccaccaacgacggcgaaacctgcgtcgttacgctcaacgacggcggtaccattgccgcttccggtacaaaccaatcctgccccggcttcgactaa

SEQ ID NO: 41946 - DNA, 969 bp, Neisseria meningitidis
atggagttgataagtccaataacatattggaatggaaaggttctattggatttagactcactctacacacgtccccaaaatataaatccgttgtattcctcacgatgttttggcacaattccaagccaatcaaccacgcttatactctgcatcctaatggcttcaaaacccttcctaaaatgggcaggcggcaaacataaacttgtcccctttatcgaacataatctacccactcctacacgaaaacgcctgattgaacccttttgcggttctgccgctttgtctcttgcattggacttcgaacattatctgctcaatgatattaacgctgacttaatcggcttattccgtatcctaaaagaagaaaaatccggattcatcgactacgcccgctctttctttatttccgaaaacaatagcgattcaagattctatgaattgcgggaacaattcaacttcagcaaaaatctgcacgaacgctcagcactatttatttatttgaaccgtcatgcttttaacggtttatgccgttacaacagcaaaggggtattcaatgtgccgttcggacgctacaaatcgccgtactttccccaacaagaaatggaaggtttcattcagaaatctgacagagttgaattaatgtgcggagattttcaaatgattctatctcagacagacaataccgatacggtttattgcgatcccccttacgcgcctttaagcccaaccgcttcatttaccacttatgccaaagaaagtttcaatttagacaatcaaatccgtcttgcccagtcagcccaacaaattgcgcccgattcccaaggcgttttgatttcaaatcatgatactgaattcacaagggatatttattcttttgccattctgaaaacaattgaagtacaacgcaatattgccgcaaaaggcagcagccgtaaaaaagtcggagaattattggcaatttatgattga

SEQ ID NO: 41947 - DNA, 879 bp, Neisseria meningitidis
gtgattatgtcattttcaattgctcttccattggtatatctgtttattggcattttgattgggaaaaccccttttagaaaaattaaaggcactttttctgtaatattgagcagatggattatcccttttgttattgtctataacataacgacatatcgtgatggtatgcagtatgttatgttatggatgattatttcgatggggttgattatcctaatcgggaaaagagttgataaagatcctgtttggaatttgtgtttgtgctatttgaacatcggatggttggggcttcccatagttgcaaccttgtttggagatgaggcggcgcaagtgcttatttcggcatacgtgggaagttctttattcggaaattcggtcggggtcgggttgttattgaataatagtaatttcatatccggattgaaaaagactttaaaatcccctcccgttgttgcattggtaataggagtgtccggtattccgctggggcattttgtagcagattattttggggaagtttattttttctcgaaaatggcaatgggaatattggggatggtgatactcggtatttggctggctgagataaaactaaatttgaatgatttgaagaaaagtattaaaccgtttctaataaaaaacattttatttatagggattgtttttctttttatccaaatagctgcatattttgacttgaagttgattattgaaaaccaaaaaacattgtatttaataccgttgctgccgcctgctgccaatattattgtgttggaaacggcatatttgaaaacagggcgttcggcttctatgattgcgtatggtacgatttttagtttaatcgcaatcagcatttatattttactggtgcaaatttaa

SEQ ID NO: 41948 - DNA, 174 bp, Neisseria meningitidis
gtgattattcccgatctgccgggctgctatcctgtcggcgatacggttgccgacgcgcttgccgataccaaagccgccgcaatgttccatctcgaagggcttttgcaggaaaacctgccgattcctggggcgcaaagcataaaggttcatcgggacaatcccgattatgcctag

SEQ ID NO: 41949 - DNA, 846 bp, Neisseria meningitidis
atgcgccgcccgtacacggcatcccttgccgccctgccttatttttatgtgaacctgccgcattgcggaatcgaaatgaacttcaccgacacccactgccaccttgccgatgccgccctgcgcgaaaacctgccgcacatcctgaccgccgcgcggaaagttggggtgaagcggtttatcgttcccgccacctgtccgcaggattggcaaagcgtggcggaactgtcggaaatgccgtccgaacacggtcaaatccgtattgcgctgggcatccatccttggttttcagacggcattgccgagcgtgattgcgtccgcctggaagcgatgttggcacgttatccgcaggcatgggtcggcgaaatcggtttggatttttacgacaaaacccaaacgccgccgcagcgcgaacggcaaatccaagttttcgtccgccagcttgccatcgcgcaaaccctgcgccgccgcgtgattatccataatctcaaagccaccgccgacatcgccgccgccgtcaaacagacaggctttgcccaaggcggcatcgttcacgccttctcaggcagcgcggaagaagcgcgcgtgttgacgaaactgggtttcaaaatcggcatcggttcgttgttgctcaatccgaacgcgcgtaaagtgcgcgatacgcttaaagccttgaacgacggggatttcgtattggaaaccgacagcccgtttatgctgaaaaaagagattaatacgcctgccaacattcttcggattgccgaaattgccgcgcagatacgcggtgtcggcgtggcggacatcgccgcgataacggaacgcaatgccgacagcctgctccgtccctag

SEQ ID NO: 41950 - DNA, 1428 bp, Neisseria meningitidis
atgtttttctccgccctgaaatcctttctttcccgctacattaccgtatggcgcaatgtttgggcggtgcgcgaccagttggaaccgcccaaacgcacggcggaagaacaggcgtttttgcccgcgcatttggaactgaccgatacgccggtctctgccgctccgaaatgggcggcgcgttttattatggcgtttgcgcttttggctttgttgtggtcctggttcggcaaaatcgatattgtggcggcggcttcgggcaaaacggtgtcgggcgggcgcagcaaaaccatccagccgctggaaacggcggtggttaaggcggtacatgtgcgcgacgggcagcatgtgaaacagggagaaacgctggcggaactggaggctgtgggaacagacagcgatgtggtgcagtcggagcaggctttgcaggctgcccaattgtccaaactgcgttatgaagcggtattggcggcattggaaagccgtaccgtgccgcatatcgatatggcgcaagcacggtctttaggtctctccgatgccgatgtgcaatcggcgcaggtgttggcgcagcaccagtatcaggcatgggcggcgcaggatgcgcaattgcagtcggctttgcgcggccatcaggcggaattgcagtcggccaaggcgcaggagcagaagctggtttcggtgggggcgatcgagcagcagaaaacagcagactaccgccgtttgcgggccgacaattttatttcggaacatgcgtttttggagcagcagagcaaatcggtcagcaattggaacgatttggaaagtacgcgcggtcagatgaggcagattcaggcggccattgcacaggcggagcagagtcgggtgctgaatacgcagaacctgaaacgcgatacgctggatgcgctgcgccaggcaaacgaacagattgaccaataccgcggccaaacggataaggcaaagcagcggcagcagctgatgacaatacagtcgcctgcggacggcacggtgcaggaattggccacctatacggtgggcggtgtggtgcaggctgcccaaaaaatgatggtggttgcgcccgatgacgacaaaatggacgtggaagttttggtattgaacaaagacatcggttttgtggaacagggacaggatgcggtggtgaagattgagagttttccctatacgcgctacggttatctgacaggcaaggtgaaaagtgtcagccatgatgcggtaagccacgaacagttgggcttggtttatacggcggtggtgtcgctggacaaacataccttgaatattgacggcaaagcagtgaatctgacggcgggcatgaatgtcacggcggagattaaaacgggtaaacggcgggtgctggattatctgttaagcccgctgcaaaccaaattggacgaaagctttagggagcgatag

SEQ ID NO: 41951 - DNA, 627 bp, Neisseria meningitidis
atgacgcaagaacgtttacccgaatttttcgaccgcgccccgacgctgaccgtacaagacccgcttgccgcattcctcggcgcggccgaaaacggcatcctcacttaccgctacgccgatgccgtgcgcctgtgcggacattcctgcccgaccgtcgcgggcgcgtacctgatggttatcaaaggtctgaaagccctttacggcgaagagctgcccgaacgcggcggcatcgaagccgccatgcagggagcgcgcgacgaaggcacggtcggcgtaaccgcgtccgtcgtccaactcctcaccggcgcagcccccgaaaccggctttggcggcatcggaatgcagggacgctttgcccgccgccacctcttatcctttggtgtaggcgaaatcaacggcacactgaccctgcgccgcaaagacaacggcaaaaccgtcgccgtcagcctcaacgccgccctgaaacccttcgcaccgcaaatgcgcgacatcatgcccaaagccgtcagcggcagcgcaagtaccgacgaactcaaacacttcggacaactctggcaggcacgcgttaaagcatttttgaccgaatcggcggacgacccgcagttcgtcatcgtccgcgaagtgtga

SEQ ID NO: 41952 - DNA, 1464 bp, Neisseria meningitidis
atgcgtatcgtagaaaaagcctatactttcgacgatgttttgttggttcccgcacattcgaccgtgctgccgcgagacgttaaacttcaaaccaagctcacccgcgaaatcacactcaacctccccctgctttccgccgcgatggacactgttaccgaggcgcgcctcgccatttcgatggcacaggaaggcggcatcggcatcatccataaaaacatgccgcccgaaatgcaggcgcgcgccgtttccaaagtgaaacgccacgaaagcggcgtggtcaaagaccccgtaaccgttgcgccgacgacgctcatccgcgaagtattggaaatgcgcgcgcagcgcaaacgcaaaatgtccggcctgcccgtcgttgaaaacggcaaagtcgtcggcatcgtaaccaaccgcgacctgcgttttgaaaaccgcgtcgatttgcccgtttccgccattatgaccccgcgcgaacgtctggttaccgtccccgaaggcacaagcatagacgaagcgcgcgaactgatgcacacgcacaaagtcgaacgcgttttggttctgaacgaaaaagacgaactcaaaggtctgattaccgtcaaagatattttaaaaaccaccgagtttcccaatgccaacaaagactccgaaggccgtctgcgcgtcggtgcggcagtcggcaccggcggcgacaccgaagagcgcgtcaaagccttggttgaggccggcgtggacgtgattgtcgtcgataccgcccacgggcacagccaaggcgtgatcgaccgcgtgaaatgggtgaaagaaacctatccacacatccaagtcatcggcggcaacatcgccactgccaaagccgcattggatttggtcgccgccggcgcggatgccgtcaaagtcggtatcggtccgggatcgatttgcaccacccgtatcgtggcaggtgtcggcgtgccgcaactgaccgccattcacaacgttgccgaagccctcaaaggcacgggcgttccgctgattgccgatggcggcatccgcttctccggcgacatcgccaaagccctcgccgcaggcgcgtacagcgtcatgctcggcggtatgtttgcaggcacggaagaagcgccgggcgaaatcgaactctaccaaggccgctcgtacaaatcctatcgcggtatgggttccttgggcgcgatgagccaaggttctgccgaccgctacttccaagacaaaaccgacagcgcagacaaatacgtccccgaaggcatcgaaggccgcgttccttacaaaggcccgattgtgaacatcatccaccagctgaccggcggtctgcgttccagtatgggttacttgggttgcgccaatattgccgaaatgcacgaaaaagccgaatttgtggaaatcacttccgcaggtatgagcgaatcgcacgttcacgacgttcaaatcactaaagaagcaccgaactaccaccgctga

SEQ ID NO: 41953 - DNA, 954 bp, Neisseria meningitidis
atgaatcataaaaagatcgttgttttggatgcggatactttgcccggccgggtttttcattttgattttccgcacgagctcgcagtttacggtacgacaggtgcggatgaaacggcagaacgggtgcacgacgcacatgttgtcattaccaataaggtaatgatttccgccgacattattgcggctaatccgcagttggagctgattgccgtcagtgcgaccggtgtgaacaatgtcgatattggggcggcgaaggcggcgggcgttgcggtatgcaatgtccgcgcatacggaaacgaatcggttgcggaacacgcctttatgctgatgattgcgttaatgcggaatttgcctgcctatcagcgtgatgttgcggcaggattatgggaaaagtcgccgtttttctgccattacggcgcgccgattcgggatttgaacggcaaaacgctggcggttttcggacgcggcaatataggacggacgcttgcccgatatgcacaggcgttcggtatgggggtggtgtttgccgaacacaaacacgcgcccgacgtgcgcgaaggctatgtttcctttgaagatgcggtacggactgccgacgtgttgtcgctgcactgtccgctgaacgcccaaactgaaaatatgataggcgaaaacgaattacagcagatgaagcccggtgcggttttgattaattgcgggcgcggcgggctggtggatgaaaacgcgctgcttgccgcactcaaatacgggcagatcggcggggcgggtgtcgatgttttgacgaatgagccgcccaaaaacggcaatcccttgctgaatgcacgattacccaatctgattgttacgccgcataccgcgtgggcaagtcgtgaggctttggacaggctgtttgatatattgttggcgaacattcacgcctttgtgaaaggagaggcgcaaaaccgcgtggtttga

SEQ ID NO: 41954 - DNA, 582 bp, Neisseria meningitidis
atggataatcaagaaatcaacaacggccgccgccgtttcctgacactcgcgacctgcggcgcgggcggagtggcagcattgggtgtggcaacgccgtttgtggccagttttttcccttcggaaaaagccaaggccgccggtgctgccgtcgaggtggatgtcagtaaaatcgaagcgggtcagctgctgaccgccgagtggcaaggcaaaccgatttgggtgctcaaccgtacagatcagcagcttaaagacctgaaaggcctgaacggcgaacttaccgatcccaattccgatgcggaacagcagccggagtatgctaaaaacgagacccgttcgattaagccgaacatccttgtcgccatcggtatctgcacccatttgggctgctcgcccaccttccgtcccgacattgcccctgccgatttgggtgcagactggaaaggcggcttcttctgcccctgccacggttcgaaattcgacttggccggccgcgtatataaaggtgttcctgccccgaccaacctggttgtcccgccatataaatacttgagcgacacaactatcttggtgggcgaagactaa

SEQ ID NO: 41955 - DNA, 435 bp, Neisseria meningitidis; identical to SEQ ID NO: 37846

SEQ ID NO: 41956 - DNA, 744 bp, Neisseria meningitidis
atgcctgatgccgtcaaaaaagtttacctgatacacggttggggggcgaaccgccacgtgttcgacgatttgatgccgcgcctgcctgcaacgtggccggtgtccgccgtcgatttgcccggacacggcgacgcgcccttcgcgcaacccttcgatattgaggcagccgccgacgctgttgccgcacaaatcgatacgcccgccgacattctcggctggtcgctcggcggattggtcgcgctgtatctggcggcgcgccatcccgacaaagtccgttcgctctgcctgacggcgagtttcgcccgactgacggctgacgaagactatcccgaagggcttgccgcgcctgcattggacaaaatggtcggcgcgttccgaacggattatgccaaacatatcaaacagtttctacaattacagcttttgcatacgcatgatgcggacggaatcataggcagaatcctgcccgatttggcgcgctgcggcacaccctccgccttacaggaagctttggacgcggcggaaagggcggatgcgcggcatttgttggacaagatagatgttccggtactgctggtgttcggtagcaaagacgcgattacgccgccgcgcatgggcgagtatctgcaccgccgtttgaaaggcagcaggctggttgtgatggaaaaggcggcacacgcgccgtttttgagccatgcggaagcgtttgccgcgctgtaccgcgactttgtcgaaggggtttga

SEQ ID NO: 41957 - DNA, 2115 bp, Neisseria meningitidis
atggatttattatcggttttccacaaataccgtctgaaatatgcggtagccgtgctgacgatactgcttttggcggcaatcgggctgcacgcttccgtatatcgcatcttcacacctgaaaacatccgaagccgcctccaacaaagcattgctcatacgcaccggaaaatctcgtttgatgcggatatacagcgcaggcttctgccccggccgaccgtcatcctgaaaaacctgaccattaccgaacccggcggcaaccggactgccgtttccgtcaaagaaaccaaaatcggattgggctggaaaaatctgtggtcggatcggatacaggttgaaaaatgggtggtttcgggtgcggagcttgccctgacgcgcgacaggaaaggcgtttggaatatccaagacctgatcgacaacccaaaacgcaaagcctcggtaaaccgcattattatcgaaaacagtaccgtccgcctcgacttgccgcaagaccggcttaccctgaaggaagtccgcctcaacctgcaatcccccgattcgtcggggcagcagtttgaaagttcgggcatactggtttgggggaagctgtccgtcccgtggaaaagcagggggctgttcctttcagacggcatcggcacgcccaaaatctcaccgttccatttcgaagccgagaccgccctgaacggacaccgcattgccgtttccaccaccggcagccccacgatccgcttcaatgccggcggggcggatgccgccgacctcgccctgcgtgccgacaccgccttccacaacctccacctgaccgcccaaatccctgcgctggcactcaggaacaacggcatcaaaattgaaaccgtcaacggcgcatttaccgccggcggcgaatatgcccgatgggacggttcgttcaaactcgacaaagccaacctgcactccggcatcgccaacatcggcaacgccgaaatctccggcagcttcaaaacaccgcgccaccagaccaacttctccctcaattcgccgctcgtatggacggaaaacaaagggctggacgcgccgcgcctgtatgtatcgacccttcaggataccgtcaaccgcctgccgcaaccccgtttcatcagccggctcgacggttcgctgtccgtaccgaatctgcaaaattggaatgccgaattaaacggcacattcgaccgccaaaccgttgccgcgaaattcagatacacacatgaagacgcaccgcatctggaagccgccgtcgcactgcaaaaattgaacctgaccccctatcttgacgacgtgcggcaacaaaacggcaaaatatttcccgacaccctcgccaagctgtccggcgacatcgaggcgcacctgaaaatcggaaaagtccaacttcccggcctgcaactggacgatatggaaacctacctccacgccgacaaaggccatatcgcgctcagccgtttcaagtcagggctttacggcggccataccgaaggcggcatcagcatcgccaacacccgtcccgccacttaccgcctgcaacagaatgcaagcaacatccaaatccaaccgctgctgcaagacctgttcggcttccacagcttcagcggcaacggcgatgcggtcatcgacctgaccgcgggcggcgaaacccgaaaagagcttatccgctcgcttcaaggcagcctgtcgctgaatatttccaatggcgcatggcacggtatcgacatggacaatatcctgaaaaacggcatttcgggcaaaactgccgacaatgccgcatccagcacacccttccaccgattcacgctcaacagcgaaatttcagacggcatcagccgccacatcgataccgaactcttctccgacagcctctatgttaccagcaacggctataccaatctggatacgcaggaattgtctgaagatgtccttatccgcaacgccgtccatccgaaaaacaaaccgattcccctgaaaatcaccggtacggtggacaaaccgtccattaccgtcgattacggcaggctgaccggcggcatcaattcgcgcaaagagaaacagaaaatcctcgaagacaccctgctggaacaatggcagtggctcaaacctaaagaaccgtaa

SEQ ID NO: 41958 - DNA, 300 bp, Neisseria meningitidis
atgaagaaaatgttcgtgctgttctgtatgctgttctcctgcaccttctcccttgcggcggtaaacatcaatgcggcttcgctgcaggagttggaggcgctgccgggcataggcccggcgaaggcgaaggccattgcggaataccgcgcgcaaaacggtgcgttcaagtctgtggacgatttgaccaaggttaagggcatcggccctgcggtattggcgaagctgaaggaccaggcttccgtcggcgcgcccgcaccaaaaggcccagccaaaccagtgctgcccgcggataaaaaatag

SEQ ID NO: 41959 - DNA, 300 bp, Neisseria meningitidis
atgaagaaaatgttcgtgctgttctgtatgctgttctcctgcgccttctcccttgcggcggtaaacatcaatgcggcttcgctgcaggagttggaggcgctgccgggcataggtccggcgaaggcgaaggccattgcggaataccgcgcgcaaaacggtgcgttcaagtctgtggacgatttgaccaaggttaagggcatcggccctgcggtattggcgaagctgaaggaccaggcttccgtcggcgcgcccgcaccaaaaggcccagccaaaccagtgctgcccgcggataaaaaatag

SEQ ID NO: 41960 - DNA, 300 bp, Neisseria meningitidis; identical to SEQ ID NO: 41959

SEQ ID NO: 41961 - DNA, 1395 bp, Neisseria meningitidis
atgaccgtcaaaacccgtttcgcccccagccccaccggctacctgcacattggcggcgttcgcaccgccttgttttcatgggcgtttgcccgccatcataaaggagaatttttattgcgtatcgaagacaccgacttggcgcgttccaccgccgaatctgtcaatatcatccttgacggtatggaatgggtcggtctcgattacgacaacgccgacaacgtggtgtaccaaacccgccgcttcgaacgctataaagaagtcatcgccgaactcttggcaaaaggcgatgcctactactgctattgcagcaaagaagaattggaagcgatgcgcgagaaagccgaaaaagaaggcacggcgacttacgaccgccgctggcgaccggaagcaggcaaaaccctgcccgaaattcctgccgacgtgcaacccgtcgttcgcttcaaaacgcctttggacggcgttaccaaatgggcggacctggtcaaaggcgaaatttccatccccaatgaagccctcgacgacctgattatcgcccgatccgacggctcgccgacctacaacttctgcgtcgttgtggacgactacgacatgggcgttacccacgttatccgcggcgacgaccatgtgaacaacacgccgaaacaaatcaacatcttgaaagccatcggcgcgaacctgcccgaatacggacacctgccgatgattctcaacgaacaaggcaaaaaaatctccaaacgcagcggcgataccgtcgccatcaccgatttcggcgcgatgggcatcctgcccgaagcgatgctcaactatttggcgcgtttgggctgggcgcacggcgacgacgaatttttcacgatggaacaattcatcgaatggtttgatttgaaagacgtttccccatctccaagccgcatggatttgaaaaaactctattggattaacggcgaacacatcaaaatcacgcccaacggcaaactagccgaactcatcaaaccgcgccttgccctgcgcgatattcatgaaaccgaaaaacctgctttggaagacgtgttggcattggtcaaagaccgcgcccaagatttgaacgccttgacagacgaatgtctgtatttctacaaaaaacaagtccctgccgaagccgatgttgccaaacactgggatgacgaagcggcggcacgcatgctgcgcttcgccgaacgcctcgaagggctggaagactggaatgccgaagccatccacgacctcttcaaacccttctgcgacgaagaaggcattaaaatgggcaaactcggcatgcccctgcgccttgctgtctgcggtacggcgaaaacccccagcgtcgatgccgtgttggcattaatcggcaaagaagaagtgttgaaacgtatccgcgcttaa

SEQ ID NO: 41962 - DNA, 2058 bp, Neisseria meningitidis
atgacacgcaaaatcctcgttacctccgccctgccctatgccaacggcagcatccacctcggccacatggtcgaacacatccaaaccgacgtttgggtgcgctttcaaaaactgcgcggccacgagtgccactactgctgcgccgacgacacccacggcacgcccgtgatgcttgccgcgcaaaaacaaggcattgcgcccgaagacatgattgccaaagtgcgcgaagaacacctcgccgactttaccggttttttcatcggctacgacaattattacagcacccattcccctgaaaacaaacagttttcccaagacatttaccgcgcactgaaagccaacggcaaaatcgaaagccgcgtcatcgagcagcttttcgaccccgaaaaacaaatgttcctgcccgaccgcttcgttaaaggcgaatgcccgaaatgccacgcccaagaccaatacggcgacaactgcgaagtctgcggcacgacctattccccgaccgaactgattaacccgtattccgccgtttccggcgcgaaacccgaattgcgcgaatccgaacacttcttcttcaaactgggagaatgcgccgacttcctcaaagcatggacttccggcaacaacccgcacgacggcaagccccatctgcaagccgaagccctcaacaaaatgaaagaatggctgggcgaaggtgaagaaaccaccctgtccgactgggatatttcccgcgacgcgccgtatttcggttttgaaatccccgacgcgccgggcaaatacttctacgtctggctggacgcgcccgtcggctacatggcgtcgtttaaaaacctgtgcgaccgcatcggcgtcgattttgacgaatacttcaaagccgacagccaaaccgagatgtaccacttcatcggcaaagacatcctctatttccacgccctgttctggcctgccatgctgcatttctccggccaccgcgccccgaccggcgtgtacgcacacggctttttgaccgtagacggacaaaaaatgtccaaatcgcgcggcacgtttatcaccgccaaatcctatctggaacaaggtttaaaccccgagtggatgcgctactacatcgccgcaaaactcaacagcaaaatcgaagacatcgatttgaacctgcaagactttatttcgcgcgtaaacagcgacctcgtcggcaaatacgtcaacatcgccgcccgcgcctcaggttttatcgccaaacgctttgaaggccgtctgaaagacgttgccgacagcgcattgctggcaaaacttgccgccgaaagcgacaccatcgccgagcaatacgaaaaccgcgaatacgcccgcgccctgcgcgatatcatggcattggcagatgccgtgaacgaatacgttgatgccaacaaaccttgggaactggcgaaacaggaaggtcaagacgaacgcctgcacgaagtgtgcagcgagctcatcaacgccttcaccatgttgaccgcctacctcgcccccgtcttgccgcaaaccgccgcaaacgccgccaaattcctgaatttggaagccatcacttgggcaaatacacgcgaaaccttgggcaaacacgccatcaacaaatacaaacatttaatgcaacgagtggagcaaaaacaagtggacgatttaatcgaagccaacaaacaaagcatcgccgccgcagccgcacctgccgccgaagagggcaaatacgaaaaagtcgccgaacaggcaagtttcgacgacttcatgaaaatcgatatgcgcgtcgccaaagtattgaactgcgaagccgtcgaaggcagcaccaaacttttgaaattcgacctcgatttcggttttgaaaaacgtatcatcttctccggcatcgccgcgttttaccccaaccctgccgagttaaacggaagaatggtcatcgccgtcgccaacttcgccccgcgcaaaatggcaaaattcggcgtatccgaaggcatgattttgagtgccgccacggcagacgggaaactgaagctcttagatgtggatacaggcgcgcagccgggcgacaaagtcggttaa

SEQ ID NO: 41963 - DNA, 1326 bp, Neisseria meningitidis
atgaaaaaatacctattccgcgccgccctgtacggcatcgccgccgccatcctcgccgcctgccaaagcaagagcatccaaacctttccgcaacccgacacatccgtcatcaacggcccggaccggccggtcggcatccccgaccccgccggaacgacggtcggcggcggcggggccgtttataccgttgtgccgcacctgtccctgccccactgggcggcgcaggatttcgccaaaagcctgcaatccttccgcctcggctgcgccaatttgaaaaaccgccaaggctggcaggatgtgtgtgcccaagcctttcaaacccccgtccattcctttcaggcaaaacagttttttgaacgctatttcacgccgtggcaggttgcaggcaacggaagccttgccggcacggttaccggctattacgagccggtgctgaagggcgacgacaggcggacggcacaagcccgcttcccgatttacggtattcccgacgattttatctccgtccccctgcctgccggtttgcggagcggaaaagcccttgtccgcatcaggcagacaggaaaaaacagcggcacaatcgacaataccggcggcacacataccgccgacctctcccaattccccatcactgcgcgcacaacggcaatcaaaggcaggtttgaaggaagccgcttcctcccctaccacacgcgcaaccaaatcaacggcggcgcgcttgacggcaaagcaccgatactcggttacgccgaagaccctgtcgaacttttttttatgcacatccaaggctcgggccgtctgaaaaccccgtccggcaaatacatccgcatcggctatgccgacaaaaacgagcatccgtatgtttccatcggaaaatacatggcggataagggctacctcaaactcggacaaacctccatgcagggcattaagtcttatatgcggcaaaatccgcaacgcctcgccgaagttttgggtcaaaaccccagctatatctttttccgcgagcttaccggaagcggcaatgacggccctgtcggcgcactgggcacgccgctgatgggggaatatgccggcgcagtcgaccggcactacattaccttgggtgcgcccttatttgtcgccaccgcccatccggttacccgcaaagccctcaaccgcctgattatggcgcaggataccggcagcgcgattaaaggcgcggtgcgcgtggattatttttggggttacggcgacgaagccggcgaacttgccggcaaacagaaaaccacgggatatgtctggcagcttctgcccaacggtatgaagcccgaataccgcccgtaa

SEQ ID NO: 41964 - DNA, 1017 bp, Neisseria meningitidis
atgaccgtcctgattaccggcggcaccggctttatcggttcgcacaccgccgtctcgctcgtccaatccggttacgatgccgtgattctggataatctgtgcaactcgtctgccgccgtcctcccgcgccttcggcaaattaccggcagaaacataccgttttatcagggcgacatccgcgaccgtcagattttgaggcagattttttcagaacacgaaatcgaatccgtcatccattttgccggtttgaaggcagtgggggaaagtgtggccgagccgataaaatattatgacaataatgtttccggcagcttggtgttggcggaagaaatggcgcgcgcgggcgtgtttagtattgtgttcagctcttcagcgacggtttatggcgatccgggcaaagtaccttataccgaagacatgccgccgggcgacaccaccagcccttacggcgcatcgaaatcgatggttgagcgcattctcactgacattcaaaaagccgatccgcgttggagcgtgattttgttgcgctatttcaacccgattggggcgcacgaaagcggcttgatcggcgaacagcccaacggtattcccaacaaccttttgccctatatctgccaagtggcttcgggcaggctgccgcaactgtcggtattcggcggcgattatccgacccccgacggtacgggaatgcgcgactacattcatgtgatggatttggcagaagggcatatcgcggcaatgaaggcaaaaggcggcgttgccggcgtacatttgttcaacttgggttcggggcgcgcctattccgttttggaaatcatccgtgcctttgaagccgcatccggcttaaatattccctatcaaatccaaccccgacgcgccggagacttggcgtgttcctttgccgacccgtcccataccaaacaagagacaggttgggaaaccaaacgcagccttgcgcaaatgatggaggattcgtggcgttgggtcagccgcaaccccaacggatatggggattaa

SEQ ID NO: 41965 - DNA, 1392 bp, Neisseria meningitidis
atgaccccttccgcactgaaaaaaaccgtcctgctgctcggcactgcctttgccgccgcatccgtccacgcatccggctaccacttcggcacacagtcggtcaacgcgcaaagcacggcaaatgccgccgccgcagaagccgccgacgcatcgaccatcttctacaaccctgccggcctgaccaaactcgacagcagccagatttccgtcaacgccaacatcgtgctgcccagcattcattatgaggcggattccgccaccgactttaccgggcttcccgtccaaggttcgaaaagcggcaaaatcaccaaaaccacggtcgcgccccacatctacggcgcatacaaagtcaacgacaatctgaccgtaggcttgggcgtgtacgtccccttcggttctgccaccgaatacgaaaaagattccgtgttgcgccacaacatcaacaaactcggtctgaccagcatcgccgtcgaacctgtcgccgcgtggaaactcaacgaacgccattccttcggcgcaggcatcatcgcccaacatacttccgccgagctgcgcaaatatgccgactgggggattatggaaaaagcgaaagcactaaaagaaacaccccccaatccaactaaagccgcccaaatcaaagccgacggacacgccgatgtcaaaggcagcgattggggcttcggctaccaactggcgtggatgtgggacatcaacgaccgcgcgcgcgtgggcgtgaactaccgttccaaagtctcgcacacgctcaaaggcgatgccgaatgggcggcagacggcgcggcggcgaaagcaatgtggagtacgatgcttgcagcaaacggctacacggcgaatgaaaaagcccgcgttaaaatcgttacgcctgagtctttgtccgtacacggtatgtacaaagtgtccgataaagccgacctgttcggcgacgtaacttggacgcgccacagccgcttcgataaggcggaactggtttttgaaaaagaaaaaaccatcgtcaacggcaaatccgaccgcaccaccatcacccccgactggcgcaacacctacaaagtcggcttcggcggttcttatcaaatcagcgaaccgctgcaactgcgcgccggtatcgcttttgacaaatcgcccgtccgcaacgccgactaccgcatgaacagcctgcccgacggcaaccgcatctggttctccgccggtatgaaataccatatcggcaaaaaccacgtcgtcgatgccgcctacacccacatccacatcaacgacaccacctaccgcacggcgaaggcaagcggcaacgatgtggacagcaaaggcgcgtcttccgcacgtttcaaaaaccacgccgacatcatcggcctgcaatacacctacaaattcaaataa

SEQ ID NO: 41966 - DNA, 558 bp, Neisseria meningitidis; identical to SEQ ID NO: 36535

SEQ ID NO: 41967 - DNA, 600 bp, Neisseria meningitidis
atggcttttattacgcgcttattcaaaagcattaaacaatggcttgtgctgctgccgatgctttccgttttgccggacgcggcggcggaggggatagatgtgagccgcgccgaagcgaggataaccgacggcgggcagctttccatcagcagccgcttccaaaccgagctgcccgaccagctccaacaggcgttgcgccggggcgtgccgctcaactttaccttaagctggcagctttccgccccgataatcgcttcttatcggtttaaattggggcaactgattggcgatgacgacaatattgactacaaactgagtttccatccgctgaccaaccgctaccgcgttaccgtcggcgcgttttcgacagactacgacaccttggatgcggcattgcgcgcgaccggcgcggttgccaactggaaagtcctgaacaaaggcgcgctgtccggtgcggaagcaggggaaaccaaggcggaaatccgcctgacgctgtccacttcaaaactgcccaagccttttcaaatcaatgcattgacttctcaaaactggcatttggattcgggttggaaacctctaaacatcatcgggaacaaataa

SEQ ID NO: 41968 - DNA, 318 bp, Neisseria meningitidis
atggcggaaaagctggcgatgtcggcaggagggtatgccaaaatcgaacggggcgaaacgcagttgaatatcccgcgtttggagcagttggctcagattttcaaaatcgatatgtgggacttgctcaaatcgggcggtggtgggatggtgtttcagattaatgaaggtgatagtggtggcgatattgcgttgtatgcgtcgggtgatgtttcgatgaaaatagaatttttaaaaatggagttgaaacactgcaaagaaatgttggaacaaaaagacaaagaaatcgagctgctccgcaagctgaccgaaaccgtttaa

SEQ ID NO: 41969 - DNA, 1185 bp, Neisseria meningitidis
atgacaccacaagtcctgaccatattaggcagtaccggcagcataggcgaaagcacgctggacgttgtctcccgccaccccgaaaaattccgcgtattcgcgctggcagggcataagcaggtcgagaaattggcggctcaatgtcaaacgttccgccccgaatatgccgtcgttgccgatgcggaacacgccgcccggcttgaagccctgttgaaacgcgacggcacggcgacgcaggttttacacggcgcgcaggcattggttgacgttgcgtctgccgacgaagtcagcggtgtcatgtgcgccatcgtcggggcagtggggctgccttccgcgctcgcagcggcgcaaaaaggcaaaaccatttatctggcgaacaaagagacgctggtggtttccggcgcgttgtttatggaaaccgcccgtgcaaacggcgcggcagtgttacccgtcgacagcgaacacaacgccgttttccaagttttgccgcgcgattacgccggccgtctgaacgaacacggcatcgcttcgattatcctgaccgcttccggcggcccgtttctgaccgccgatttaaacacgttcgacagcattacgcccgaccaagcggtcaaacaccccaattggcgtatgggacgcaaaatctccgtcgattccgccaccatgatgaacaaaggtttggagctgattgaagcgcattggctgttcaactgtccgcccgacaaactcgaagtcgtcatccatccgcaatccgtgatacacagcatggtgcgctaccgcgacggctccgtgctggcgcaactgggcaatcccgatatgcgaacgcccattgcttattgtttgggcttgccggaacgcatcgattcgggtgtcggcgacctggatttcgacgcattgtccgcgctgaccttccaaaagcccgactttgaccgcttcccctgcctgaaactcgcctatgaagccatgaacgcgggcggagtcgcgccctgcgtattgaacgccgccaacgaaaccgccgtcgccgcctttttggacggacagattaagtttaccgacattgccaaaaccgtcgcccattgtctcgcacaagacttttcagacggcataggcgatataggggggctcttggcgcaagatgcccggacacgcgcacaagcgcgggcatttatcggcacactgcgctga

SEQ ID NO: 41970 - DNA, 1128 bp, Neisseria meningitidis
atgaacacctcgcaacgcaaccgcctcgtcagccgctggctcaactcctacgaacgctaccgctaccgccgcctcatccacgccgtccggctcggcggggccgtcctgttcgccaccgcctccgcccggctgctccacctccaacacggcgagtggatagggatgaccgtcttcgtcgtcctcggcatgctccagtttcaaggggcgatttactccaaggcggtggaacgtatgctcggcacggtcatcgggctgggcgcgggtttgggcgttttatggctgaaccagcattatttccacggcaacctcctcttctacctcaccgtcggcacggcaagcgcactggccggctgggcggcggtcggcaaaaacggctacgtccctatgctggcggggctgacgatgtgcatgctcatcggcgacaacggcagcgaatggttcgacagcggcctgatgcgcgcgatgaacgtcctcatcggcgcggccatcgccatcgccgccgccaaactgctgccgctgaaatccacactgatgtggcgtttcatgcttgccgacaacctgaccgactgcagcaaaatgattgccgaaatcagcaacggcaggcgtatgacgcgcgaacgtttggagcagaatatggttaaaatgcgccaaatcaacgcacgcatggtcaaaagccgcagccacctcgccgccacatcgggcgaaagccgcatcagccccgccatgatggaagccatgcagcacgcccaccgtaaaattgtcaacaccaccgagctgctcctgaccactgccgccaagctgcaatctcccaaactcaacggcagcgaaatccggctgctcgaccgccacttcacactgctccaaaccgacctgcaacaaaccgtcgcccttatcaacggcagacacgcccgccgcatccgcatcgacaccgccatcaaccccgaactggaagccctcgccgaacacctccactaccaatggcagggcttcctctggctcagcaccaatatgcgtcaggaaatttccgccctcgtcatcctgctgcaacgcacccgccgcaaatggctggatgcccacgaacgccaacacctgcgccaaagcctgcttgaaacacgggaacacggctga

SEQ ID NO: 41971 - DNA, 558 bp, Neisseria meningitidis
atgatcaacgatattcaaaaaacagccgaaggcaaaatgcagcgttcggtcgaagtactgaaagaaaatctggcgaaagtgcgtaccggccgcgcgcataccggcctgctcgaccaagtggaagtcgaatactggggcagcatggtccccgtcagccaggttgccaacgtaacgcttctggacgcgcgcaccatcggcgtgaaaccgtttgagggcaatatggcggccaaagtcgagaaagctatccgcgattcaaacttggggctgaacccggcagctgtcggcgacctgatccgcgtgccgatgcccatgctgaccgaagaacgccgcaaagacctgattaaagtcgtacgcggcgaagcggaagaaggccgcgtctccatccgcaacgtgcgccgcgatgccaacgaccacatcaaaaaactcctcaaagacaaagaaatttccgaagacgaggcacgtcgcggcgaagaagcggttcaaaaactgaccgacaaatacattaccgaagccgacaaactcctgactgccaaagaagaagatttgatggcaatttaa

SEQ ID NO: 41972 - DNA, 1887 bp, Neisseria meningitidis
atgatttaccccaaaacctacgacgttatcgtcgtcggcggcggacacgccggcacggaagccgcgcttgccgccgcacgcatgggcgcgcagacgcttttgctcacacacaatattgaaacgctcggacaaatgtcgtgcaacccctccatcggcggcatcggcaaagggcatttggtacgcgaactcgacgcgctcggtggcgcaatggcgttggcaaccgacaaatcaggtatccaattccgccgcctgaacgccagcaaaggcgcggcagtgcgagccacgcgcgcacaggccgaccgcattttgtataaagccgccatccgcgaaatgttggaaaaccaagaaaacctcgaccttttccaacaagccgtcgaagacgtaacgctcgacggcgaacgcatcagcggcgtaattaccgcgatgggcgtggagtttaaagcacgcgccgtcgtgttgaccgcaggcacgtttttgtccggcaaaatccacatcggtttggaacactacgagggcggacgcgccggcgaccccgccgccaaatcgctgggcggacgtttgcgcgaattgaagctgccgcaaggccgtctgaaaactggcacgccgccgcgcatcgacggacgcacgattgacttttcccaactgaccgaacagcccggcgacacacccgttcccgtcatgtccgtgcgcggcaacgccgaaatgcacccgcgccaagtgtcctgctggattacgcataccaacacgcaaacccacgacatcatccgctcaggcttcgaccgcagcccgatgtttaccggcaaaatcgaaggcgtgggtccgcgttattgtccgtctatcgaagacaaaatcaaccgcttcgccgacaaagacagccaccagattttcctcgaacccgaaggtctgaccacgcacgaatactatcctaacggtatctccaccagcctgccgttcgacatccaaatcgcgctcgtccgcagtatgaaaggtttggaaaacgcccatatcctgcgccccggctacgccatcgaatacgactacttcgacccgcgcaacctcaaagccagcctcgaaaccaaaaccattgagggactgtttttcgctgggcaaatcaacggtacgaccggctacgaagaagccgccgcgcaaggtttattggcaggcgcgaacgccgtgcaatatgtgcgcggacaagacccgctcctgctgcgccgcgaacaagcctacctcggcgtattggtggacgacctcatcaccaaaggcgtgaacgaaccctaccgaatgttcaccagccgcgccgaataccgcctgcaactcagggaagacaacgccgacatgcgcctgaccgaagacggctacaaaatcggcttggtgggtgaagcgcaatggcgtatgttcaacgaaaaacgcgaagccgtcgaacgcgaaatccaacgtttgaaaacaacgtggtacacaccgcaaaaactcgccgaagacgaacaaatccgcgtattcggacaaaaactcagccgagaagccaacctgcacgatttgttacgccgcccgaacctcgactacgccgcgctgatgacgctcgaaggcgcgatgccgtctgaaaacctctccgccgaagtcatcgaacaagtcgaaatccaagtcaaataccaaggctatatcgaccgccaaaacgaagaaatcgacagccgccgcgacatcgaaaccttaaaactgcccgacggcatcgattacggcaaagtcaaaggcttgtcggcagaagtgcagcaaaagctcaaccagcacaaacccgaaaccgtcgggcaggcaagccgcatttccggcgtaacgcctgccgccgtcgcactgctgatggtgcatttgaagcgcgggtttaaagacgcgaaataa

SEQ ID NO: 41973 - DNA, 2760 bp, Neisseria meningitidis
atgaaaagaatgttatttaacgcaacgcaggccgaagagctgcgcgttgccatcgtcgacggacaaaacctgctggatttggacatcgaaacgctgggcaaagaacagcgcaaaggcaatatctacaaaggcatcattacccgcatcgagccgtcgctggaagcgtgtttcgtggattacggaaccgaccgccacggcttcttgccgtttaaagaagtatcgcgttcgtatttccgcgactacgaaggcggcagggcgcgtattcaggacgtgctcaaagaaggcatggaagtcatcgtccaagtcgaaaaagacgagcgcggcaacaaaggcgcggcactgaccaccttcatcagcctcgccggccgctatctcgtactgatgccgaacaacccgcgcggcggcggcgtatcccgccgtatcgaaggtgaagagcgtcaagagttgaaagccgccatggcggaactcgacattccgaacggcatgagcatcatcgcccgcaccgccggcatcgggcgcagcgcggaagagttggaatgggacttgaactacctcaaacaactctggcaggcgattgaagaagcaggaaaggcgcatcatgacccctacctgctctttatggaaagctcgctgctcatccgcgccatccgcgactatttccgccccgacatcggcgagattttggtggacaatcaagaagtttacgaccaagtttccgagttcatgagctatgtcatgccgggcaatataggccgtctgaaactctacgaagaccacacgccgctgttttcccgcttccaaatcgaacaccaaatcgaaagcgcgttttcgcgcagcgtcagcctgccctccggcggcgcgatcgtcatcgaccataccgaagccctcgtctccatcgacgtgaactccgcacgcgccactcgcggcgcagacattgaagacaccgcgttcaaaaccaatatggaagccgccgaagaagtcgcccgacaaatgcgcctgcgcgacttgggcggcttggtcgtcatcgacttcatcgacatggaaaaccccaaacaccagcgcgatgtggaaaacgtcctgcgcgacgcgctcaaaaaagaccgcgcccgcgtacagatgggcaaactctcccgtttcggccttttggaattgagccgccaacgtttgaaaccggctttgggcgaaagcagccacgtcgcctgtccgcgctgcgccggcaccggcgtgattcggggcatcgaatccaccgccctgcacgttttacgcatcattcaagaagaagcgatgaaggacaacaccggagaagtgcgcgcccaagtgcccgtcgatgtcgccaccttcctgctgaacgaaaaacgcgccgagctgtttgcgatggaagagcgtttggatgtcaacgtcgtcctgattccgaacatccacctcgaaaatccgcactacgaaatcaaccgcatccgcaccgacgacgtagaagaagacggcgaaccgagctacaaacgcgtcgccgagcctgaagaagacgaatccgccaaaccgttcggcggcgaaaaagccaaagccgcccgtcccgaacccgccgtcaaaggcgtgcgccacaccagccccgccccgactgccgcccccgagaaaaaaacctcttggtgggacagcttcaaagcttggctcaaacgcattttcggcggcagcgaaacccaagccgcgcccgctgccgaaacctccgaaaaacgcagcacggcaaaccgcagcggcagccgcgccaacaaccgccgccaaaacccgcgccgcagcaaacgcgaaggcagcaaagtagaagtccgcgaagtggcaggcaaaactgccggacaggaagcgcgtgccgacaaagccgaaacgcgcaacaacggcaaccgccgccgcaacgaacgcggcgaccgtgccgccggacgcgccgacgaagcggaaatccaagaccgcaacatacagcctgccgcaaccgttgcagatgccgcaccgtccgaaaccgaagtgcaaaccggaaaacgccgccgcaacggcagccgcagcgaacgcggccaaaccgcgccggaaaccgccaccgttgccgaaacaaccgttcagacagcggaaaacacgccgtccgaaccgcataccgcagaagacaaaggcagcaagcccaaatccgaacgcaaccgccgcgaacgcgacagccgagatgccaaagaacgccgcgagcgcaacaatcagcgcgaccgccgtcaaaacggcaaaaaacgcaatattccgtctgccgccaaaatcgagcagtacctgaatattcacgacaccgccgacaaagtccgttccgccgccgcgcacgttttcggcgaaaccgacgcaaacgcgccgattaccgtcagcattgccgatccggttgcagaaagggatcttccgacagcatctcccgccgtttcaaacggcgacgcaccggtttatgatgcggcggaaaaaatccgccgtgccaccgccgccatcctgcccgaaggcgcgacaccgaaagccgaagcacaggaaatgccgtctgaaaccgcaacctttacggctgcggcggaacaggcacgggaaaccgcacaaaccggcggactcgtcctgatcgaaaccgaccctgccgcattgaaggcatgggcggcacaacccgaagtccaagccggacgcggtttgcgccgttccgaacagcccaagccgtctgaagtcgcaaccgtccctgccgaagaaatgatccaagtcgaaacccggcaaggctga

SEQ ID NO: 41974 - DNA, 378 bp, Neisseria meningitidis
gtgaacaaaaccctcatcctcgccctttccgccctcctcggccttgccgcgtgcagtgccgaacgcgtctcgctgtttccctcctacaaactcaaaatcatccaaggcaacgaactcgaaccgcgcgccgttgccgccctccgccccggcatgaccaaagaccaagtcctgctcctgctcggcagccccatactgcgcgacgcattccataccgaccgctgggactataccttcaacacctcccgcaacggcatcatcaaagaacgcagcaatctgaccgtctattttgaaaacggcgtgctcgtccgcgccgaaggtgacgccctgcaaaacgctgccgaagccctcaaagaccgccaaaacacagacaaaccataa

SEQ ID NO: 41975 - DNA, 1977 bp, Neisseria meningitidis
atgaacgaattttcgcttgcccctattgtgattgttttgctggtgtcggtcattacggtgatcctgtgccgcaagttcaacattccctccatgctgggctacctgctggtgggctttttggcggggcccggtatgctcagcctgattccgaaaagccatgcgacggattatttgggcgaaatcgggattgtgttcctgatgttcagcatcggtttggagttctcgctgcccaagttgagggcgatgaggcggctggtgttcggtctgggcggtttgcaggtcggcgttacgatgctgtcggtaatgggcatactgatgctgacgggcgtgccgttcaattgggcgtttgccgtgtcgggcgcgttggcgatgtcgtccacggcgattgtgagccggattttgtcggaaaagacggaattggggcagccgcacggtcagatggcgatgggcgtgctgctgatgcaggacatcgccgtcgtgccgctgatgattctgattcccgcgctggcgggcggaggggacggaaatatttgggcggccttgggtttggcgtttgcaaaaatgctgctgacgctggggctgctgtttttcgtcggcagcaaaattatgtcgcgatggttcaggatggtggcaaaacgcaaatcgtccgaactctttatgatcaatgtgctgctggtaaccttgggtgtggcttatctgactgagctggaaggtttgtctatggcgttgggcgcattcgttgccggcatgctgctttcggaaacggaataccgtttccaagtcgaagacgacatccgcccgttccgcgatatcttgctcggctttttctttatcacggtcggcatgaagctggacattcaggcattaatcggcggctggcggcaggtattgatgctgttggcaatgctgctggtgttgaaggcactggttgtgtttgccattgccttcaaaatgaaacattcggtcggcgacagcctcaaaacggctttgtatctcgcgcaaggcggcgagttcggcttcgtgatgctggccattgccgggcagcttgatatggtttcgccagaatgggaacaggcggcgacggcggcggttctgctgtcgatgattatcgcgcccttcctcttgggcggcagcgatgcgctggtcgggcgtttggtcaagtcaagctgggacatgaagtcgctcgatctgcacagtatgctggtagaaaccatgagcaagtccgaccatgtgctgattgtcggcttcggcaggggcgggcagacggtcggacgcgtccttgcccaagaggatattccgtatttcgcgctcgacttggacattgcgcgggtgcaggttgccagaagtgcgggcgaaccggtgtcgttcggcgatgcgaaacgcagggaagtattggaagccgccggtctgggacgggcgaaaatggtggtggttacgctcaacaatatgcacgaaacgcaacacgttttagacaatgtgctgtccatgtatcccaatatgcccgtatatgtgcgcgccaccaatgacgattatgtgaaaacgtttaccgatataggtgcggaagaagccgtgtcggacaccaaagaaaccggactcgtgctggcaggctatgcgatgttaggcaacggcgcgtcgtatcggcacgtctatcagacgatggcaaatatccgccacagccgttatgccgcgttggagggactgtttgtcggtagtgatgatgaggcaggattcggcgaaaccggcgaaaccgtccgccacgcctttcctttggctgcagaagcatacgccgtcggcaaaacagtcggcacgcttccgatggcggcttacggcatcaaactcttgttcgtccgccgccgcaccggccggattgaaaacccggatgcctcgtttacattggaaggcggtgacgtgttggtggtcgcaggcaaaaaagaagaaattatctcttttgaaaactggagtttgcagggaatataa

SEQ ID NO: 41976 - DNA, 1365 bp, Neisseria meningitidis
ttcaaaatcggtatcgggccttccagttcgcatacggtcggcccgatgaaggcagccgccgcctttgcggcaggtttggatgcacaggctgttcgcatcgtcatcgacatttacggctcgctcgcactgaccggatacggacacggtacatttgacgcgctgatgctcggtttggaaggcagcctgccgcacgacatcccgcttgccggcattcccgaacgcctcgaacgcatccgcacgcagcacatcctccggctcaacgggcaagaaatccgcttcatccccgaccgcgacctgaacatactcggcaatcaagtgctgcccaaacaccccaacggcctgcgttttaccgcctatgcttcagacggcacggtattgaatgaacaggtttattattcggtcggcggcggctttgtcgttaccgaagaagattttgaccggcaggcggaaacggaaaaagccgttccctatccctataccagttgcgccgaactgcttgcccgatgccgtctgaaccggctcgacatctccgaagtcgtgttggcaaacgaagccgcgcttgccggatgcggcgaagccgaaatccgccgccgcgccgctgccgttgccgaggttatggaaggctgcatcaaacgcggcttgggtgcggacggcgaactgcccggcggattgaacgtccgccgccgcgccccgcagcttgccgccaagctcaaagtcctgcgcgaaaccgaaatcgtcaacacccagctctggccgatggtgtacgccatggcggtcaacgaagaaaacgccgccggcggacgcgtcgttaccgcaccgaccaacggcgcggcaggcatcattcccgccgtattgcactatttccgcaagttcaatccgcacgccacacaggaacgcgtcgaaaacttcctgctcaccgcaggcgcaatcggcatcctctacaagaccaacgcctccatttccggtgcggatgtcggctgtcagggcgaagtcggcgtagcgtgttcgatggcggcgggcgcatacgccgaagtcatcggcggcacgcccaaacaagtggaaaacgccgccgaaatggcgatggaacaccatttggggctgacttgcgaccccgtcggcggactggtgcaaatcccctgcatcgagcgcaacggcatcgccgccgaaaaagccctcaaactcggcacgctcgcgcttttggaagacggcacggacaaaaaagtctcgctcgacgaagtcatccgaaccatgctgcaaaccggccgggatatgaaggcgacctacaaagaaacctcgcttgccggactcgccgccacgctccggaaaaaagccgtccccgtatccgcgcgcgtggtcgagtgctga

SEQ ID NO: 41977 - DNA, 924 bp, Neisseria meningitidis
gtgcaaagcaagcagataaaaggcttcaagctttggaaatcttacgatgagcagttggagattctaagaagtagaggattgcagattgatgatgagaaaaaggcattaggatatttacgcaccatcggttattaccgattaagcggttatttttactctttccgacaatttgctcctgaaagttctaagagcaggttggatgagtttattacagatactcgttttgaagatgtcaaaagcctttatatgttcgataagaaattgcggcaattggcattagatgcactggaaagaattgaagtagcgcttcgggtaaatattgcccatacattaggacggcatgaccccttggcttacaaagatagcaaatattctgccacaggtttcgaccatgcggaatggctggataggtataacaggctggtcgagcgcgaaaagaaaaccggttttgttaaacatcatttggaacattatgccgacttacctgtctgggtagcctgcgaagtatgggatttcggcacgatgtctatgctgtataaagggatgttgaataaagataaagactctattgccaaattgtatcgtttgaaagacggtaagcatctgcaaacacatctgcacgcatttaactttatccgcaacgtttcggcacatcacagtcgattatggaatagggatattacttttaaagccagcttgaaaggtttgtctgatgcagaatggaaatcattgcctatcaataaaccgtttgtgtatttttgcctgatgaaacggatgttggatgttatttgtccgcgaaccgaatggggaaaccgtcttcttgctttactggatgagtttcccgatgtcgccaatgaagctgtaagtttgcgcgatatgggtttggaaaataatccgcgagactggagattgtggcagggataa

SEQ ID NO: 41978 - DNA, 873 bp, Neisseria meningitidis
atggaaatatggaatatgttggacacttggctcggtgccgtcccgatacgtgcggaggcggtcgaatccgtggcggtggtcgcggctttgctgctggcgcgcgcccttctgttgaacatccacttcagacggcatccggatttcagcatcgaaagcaagcggcggtttctggttgccagccgcaatataacgctgcttttggtgctgttttcgctggcatttatctggtcggcgcaaattcaaacgctggctttgtcgatgtttgcggtggcggcggcggtcgtcgtggcgacgaaggaactgattatgtgtctgtcgggcagtattttaaggtctgccacccagcaatactcggtcggcgactatatcgaaatcaacggcctgcgcgggcgcgtggtcgacatcaacctgttgaacacgctgatgatgcaggtcggtccgaaccccctggtcggacagcttgcgggaaccaccgtttctttccccaacagcctgttgttgagccatcccgtgcgccgcgacaatattttgggcgactacgtcatccatacggtcgaaatccctgttcccatccatttggattcggatgaagtcgtatgccgtctgaaagccgtactcgagcccttgtgcgcgccctacatccccgccatccaacggcatttggaaaacgtgcaggcggaaaaactgtttatcacgcccgccgccagaccgcgcgttacccgcgtgccgtacgatgacaaggcataccgcatcatcgtccgcttcgcctcccccgtttcaaagcggctggaaatccaacaggcggttatggacgaatttttgcgtgtacaataccgcctgttaaatcaccccgccggctccgaaacactttaa

SEQ ID NO: 41979 - DNA, 129 bp, Neisseria meningitidis
atgaacgaacaagatttagatttggacaatctcgacaacctgcttgaagattttgacggcgttaccgtggaaggcggcgtcgattcggaaaacgacgacggctgtgaaggcggagcgtgcaaaatctaa

SEQ ID NO: 41980 - DNA, 1452 bp, Neisseria meningitidis
atgctttctttccttagcggcttattgagcttgggtatagaagtcttgtgggtaaggatgttttcgttcgcagcacagtccgtgcctcaggcattttcatttactcttgcctgttttctgaccggtatcgccgtcggcgcgtattttggcaaacggatttgccgcagccgctttgttgatattccctttatcgggcagtgcttcttgtgggcgggtattgccgactttttgattttgggtgctgcgtggttgttgacgggtttttccggcttcgtccaccacgccggtatcttcattaccctgtctgccgtcgtcagagggttgattttcccgctcgtacaccatgtgggtacggatggcaacaaatccggacgacaggtttccaatgtttatttcgccaacgttgccggcagtgcattgggtccggtccttatcggctttgtgatacttgatttcttgtccacccaacagatttacctgctcatctgtttgatttctgctgctgtccctttgttttgtacactgttccaaaaaagtctccgactgaatgcagtgtcggtagcagtttccctaatgttcggcatcctcatgttcctactgccggattctgtctttcaaaatattgctgaccgtccggataggctgattgaaaacaaacacggcattgttgcggtttaccatagagatggtgataaggttgtttatggggcgaatgtatacgacggcgcatacaataccgatgtattcaatagtgtcaacggcatcgaacgtgcctatctgctaccctccctgaagtctggcatacgccgcattttcgtcgttggattgagtacaggttcgtgggcgcgcgtcttgtctgccattccggaaatgcagtcgatgatcgttgcggaaatcaatccggcataccgtagccttatcgcggacgagccgcaaatcgccccgcttttgcaggacaaacgtgttgaaattgtattggatgacggtaggaaatggctgcgtcgccatcctgatgaaaaattcgacctgattttgatgaatacgacttggtactggcgtgcctattccaccaacctgttgagtgcggaatttttaaaacaggtgcaaagccaccttaccccggatggtattgtaatgtttaataccacgcacagcccgcatgcttttgctaccgccgtacacagtattccctatgcataccgctatgggcatatggtagtcggctcggcaaccccggtagttttccctaataaagaactgctcaagcaacgtctctcccggttgatttggccggaaagcggcaggcacgtatttgacagcagcaccgtggatgctgcagcacaaaaggttgtctctcgtatgctgattcagatgacggaaccttcggctggtgcggaagtcattaccgacgataatatgattgtagaatacaaatacggcagagggatttaa

SEQ ID NO: 41981 - DNA, 1857 bp, Neisseria meningitidis
atgttgaacaaaatcttttcctggttcgaatcccgaatcgacccttatcccgaagccgccccgaaaacgccagaaaaaggcttgtggcggtttgtctggagcagcatggccggggtgcggaaatggatagccgccctggctgcgctgaccgccggcatcggcattatggaagccctggtttttcaatttatgggcaaaatcgtggagtggctcggcaaatacgcgcccgccgaactgtttgccgaaaaaggttgggaactggcggcaatggcggcgatgatggtattttcggttgcgtgggcgtttgccgcgtccaacgtgcgcctgcaaacccttcagggcgtgttccccatgcgcctgcgctggaacttccaccgcctgatgctgaaccaaagcctcggtttttatcaggacgaatttgccggacgcgtgtccgccaaagtcatgcagaccgcgctggcgttgcgcgacgcggtgatgacggttgccgatatggtcgtttatgtgtcggtgtatttcattacctccggcgtgattctcgcctcgctcgactcatggctgctgctgccctttatcggctggattgtcggtttcgcttcggtgatgcgcctgctgattcccaaattggggcaaaccgccgcatggcaggcggatgcccgatcgctgatgaccggccgcattaccgatgcctattccaatatcgccaccgtcaaactcttctcccacggcgcgcgtgaagccgcctatgccaagcagtcgatggaagaatttatggttacggtgcgcgcccaaatgcggctggcgacgctgctgcattcgtgcagcttcatcgtcaacacctccctgaccctctccaccgccgcactgggcatctggctctggcacaacgggcaggtcggcgtgggcgcggttgctacagccaccgccatggcgttgcgcgtcaacggtttgtcgcaatacattatgtgggaatccgcgcggctgtttgaaaacatcggcaccgtcggcgacggcatggcaaccctgtccaaaccgcacaccatcctcgacaagccgaacgccctgccgctgaacgtgccgcaaggcgcaatcaaatttgaacacatcgatttctgctacgaagcgggcaaaccgctgctcaacggcttcaacctcaccatccgcccgggcgaaaaagtcggcttgatcggacgcagcggcgcgggcaaatccaccatcgtcaacctgcttttgcgcttctacgaaccgcaaagcggcacggtttcgatcgacgggcaggacataagcggcgttacccaagaatctttacgcgcccaaatcggtttggtcacgcaagatacctcgctgctgcaccgttccgtgcgcgacaacattatttacggccgccccgacgcgaccgatgccgaaatggtttctgccgccgaacgcgccgaagctgtcggcttcatccccgacctttccgatgccaaagggcggcgcggctacgacgcacacgtcggcgaacgcggcgtgaaactctccggcgggcaacgccagcgcatcgccatcgcccgcgtgatgctcaaagacgcaccgattcttcttttggacgaagccaccagcgcgctcgattccgaagtcgaagccgccatccaagaaagcctcgacaaaatgatggacggcaaaaccgtcatcgccatcgcccaccgcctctccaccatcgccgcaatggacaggctcgtcgtcctcgacaaaggccgcatcatcgaagaaggcacgcacgccgaactcctcgaaaaacgcgggctttacgccaaactctgggcgcaccagagcggcggcttcctcaacgaacacgtcgagtggcagcacgactga

SEQ ID NO: 41982 - DNA, 2379 bp, Neisseria meningitidis
gtgctggcattgggcctctgcttcggcacgcattgcgccgccgccgatgccgttgcggcggaggaaacggacaatccgaccgccggaggaagcgttcggagcgtgtccgaacccatacagcctaccagcctgagcctcggttcgacctgcctgttttgcagtaacgaaagcggcagccccgagagaaccgaagccgccgtccgaggcagcggcgaagcatccatccccgaagactatacgcgcattgttgccgacaaggtggaaggacagtcgcaggtgcaggtgcgtgccgaaggcaacgtcgtcgtcgaacgcaaccggacgaccctcaataccgattgggcggattacgaccagtcgggcgacaccgttaccgcaggcgaccggttcgccctccaacaggacggtacgctgattcggggcgaaaccctgacctacaatctcgagcagcagaccggggaagcgcacaacgtccgtatggaaaccgaacacggcggacggcggctgcaaagcgtcagccgcaccgccgaaatgttgggcgaagggcattacaaactgacggaaacccaattcaacacctgttccgccggcgatgccggctggtatgtcaaggccgcttccgtcgaagccgatcgggaaaaaggcataggcgttgccaaacacgccgccttcgtgttcggcggcgttcccattttctacaccccttgggcggacttcccgcttgacggcaaccgcaaaagcggcctgcttgttccctcactgtccgccggttcggacggcgtttccctttccgttccctattatttcaaccttgcccccaatctcgatgccacgttcgcgcccagcgtgatcggcgaacgcggcgcggtctttgacgggcaggtacgctacctgcggccggattatgccggccagtccgacctgacctggctgccgcacgacaagaaaagcggcaggaataaccgctatcaggcgaaatggcagcatcggcacgacatttccgacacgcttcaggcgggtgtcgatttcaaccaagtctccgacagcggctactaccgcgacttttacggcaacaaagaaatcgccggcaacgtcaacctcaaccgccgtgtatggctggattatggcggcagggcggcgggcggcagcctgaatgccggcctttcggttctgaaataccagacgctggcaaaccaaagcggctacaaagacaaaccgtatgccctgatgccgcgcctttccgccgattggcgcaaaaacaccggcagggcgcaaatcggcgtgtccgcacaatttacccgcttcagccacgacagccgccaagacggcagccgcctcgtcgtctatcccgacatcaaatgggatttcagcaacagctggggttacgtccgtcccaaactcggactgcacgccacctattacagcctcaaccgcttcggcagccaagaagcccgacgcgtcagccgcactctgcccattgtcaacatcgacagcggcgcaacttttgagcggaatacgcggatgttcggcggcggagtcctgcaaaccctcgagccgcgcctgttctacaactatattcctgccaaatcccaaaacgacctgcccaatttcgattcgtcggaaagcagcttcggctacgggcagctctttcgcgaaaacctctattacggcaacgacaggattaacaccgcaaacagcctttccgccgccgtgcaaagccgtattttggacggcgcgacgggggaagagcgtttccgcgccggcatcggtcagaaattctatttcaaggatgatgcggtgatgcttgacggcagcgtcggcaaaaaaccgcgcaaccgttccgactgggtggcatttgcctccggcagcatcggcagccgcttcatcctcgacagcagcatccactacaaccaaaacgacaaacgcgccgagaactacgccgtcggtgcaagctaccgtcccgcacagggcaaagtgctgaacgcccgctacaaatacgggcgcaacgaaaaaatctacctgaagtccgacggttcctatttttacgacaaactcagccagctcgacctgtccgcacaatggccgctgacgcgcaacctgtcggccgtcgtccgttacaactacggttttgaagccaaaaaaccgatagaggtgctggcgggtgcggaatacaaaagcagttgcggctgctggggcgcgggcgtgtacgcccaacgctacgttaccggcgaaaacacctacaaaaacgctgtctttttctcacttcagttgaaagacctcagcagtgtcggcagaaaccccgcagacaggatggatgtcgccgttcccggctacatccccgcccactctctttccgccggacgcaacaaacgaccctga

SEQ ID NO: 41983 - DNA, 198 bp, Neisseria meningitidis
atgccctatgatttatcgaaacgacttgtaatcggcttagcatcaagcgtcctattcgacttatccgaatcggataatatatttagaacggaaggggcagaaacctataggcaatatcagagggaaaaacaaaaccatcccctaaaaaaagcgttgtctttccatttatcaaaaaacttctgtcaatcaatgaaataa

SEQ ID NO: 41984 - DNA, 525 bp, Neisseria meningitidis
atggaaatgaaacaaatgcttttggccgtcggcgtggcggcggtgttggcgggctgcggcaaggatgccggcggttacgagggttattggcgcgaaaaatcggacaaaaaagagggtatgattgccgtcaaaaaagaaaaaggcaattacttccttaataaaatcaacgtggttacaggtaaggaagaatctatgcttttgtctgaaaaagacggcgagctttcgataaacacggggataggggaaatcccgatcaaactttccgacgacgggaaagagctgtatgtcgaacgcaggcagtatgtcaaaaccgatgcggcgatgaaggacaaaatcatcgcccatcagaaaaagtgcggacaaacggcacaggcatatctcgacgcgcgaaatgcgttgccgtcaaaccaaacgtatcagcagcgtcaggcggcgatcgagcaattgaaacggcggtttgaagccgagtttgacgaattggaaaaagaaatcaaatgcaacggcaaaccgacattgttgctttag

SEQ ID NO: 41985 - DNA, 951 bp, Neisseria meningitidis
atgaccaaacaggaaaagcaagaagaccgcgaaaaaaaatataaaattatttctttatttagcggttgtggcggaatggatttgggttttctggggggctttgagtttttaaaccgtacttatgacaaacatgattttgatattatttgggcgaacgaaatcgacgaacacgctgttagaacctaccgccacaacttaggaaatcacattgtacatggtgatatttggcagtatttggatgaaatacccactagcgcagacatcattatcggtggctttccttgtcaggatatttctattaatggtaaaggtgcaggtatttcaggcagccgcagcgggctgtataaagccatgttgtctgctgttgaacgcgttcgccccaaaatatttgttgctgaaaatgtcaaagggctactgatgaagcatcatcggaaagatttggaaacagtgctttcagattttcgcaatttgggttatcaggtagattactacttgctgaatgcagccgattacggtgttccacagactcgggagcgagttatcatcgttggaaggctacctgaaattcccgaaatacagattgaaaaaacaaataccagcaacagctatgtaacagctagacaggctataggcgatttggtcgacaaagtagaagacgaaattgccaaccatatttggagtagagcagaaaaaagccccgatcaaggtagtcgaaaattggatgccgaaagggcgggctacactattagggcagaatgccatggaaacatacagtggcattacgaattaccccgccgcatctccatgcgtgaggcggcgcgcatccaatcgtttcccgacaattttattttccaggcaaaattgcgtgcaacagaacggcaaattggcaacgccgtccctcctgttttagggtggcacatcgccgccgccgttagtaaggcacttaaataa

SEQ ID NO: 41986 - DNA, 1404 bp, Neisseria meningitidis
atgaacaatcccgacttaccctatcggcagaccttagaatgcctttctcaaaaacaatataactttaccgaagtccgccgactgctgacagaagcggccttggcaggtcatcccgccgccgcattcgagttggcaaaacacctgatggatgcggacagcccctaccaagaccgcgaacaaggtatggaaatgctccgcatcgccgccgaacaggggcatccctacgcgcgttacaatctggcatatatccaagaattggaaggcgcgcccccggaaaccctgataccgctttacagaccgttggcagaggaaggactgcctgaagcacaagtccgcctgatgtaccttctgtatgcgtcccgacattttgaagaagccctgaaatgggcaaaaacaagcgcaaaaaacaacaacccccacgggcaatacctgcttgcccaatactgccggtacggcacgccgccggattttgaaacggcgcacctgctctaccgcaaagcggcggcacaaggcttggcggcggcacactggcagctcgggctgcaataccgtttcggacaagggacgaaagccgacacggcacaggccgtcaatcatttgcgcgccgccgcacaacaaggatacattcccgcctacaccccgcttgccgagctcatcctacctacggctcctgatgaagccgttcactggtttcaacaggcggcacaggaaaatgaccccgatgcccatgccgcacttgccgacatctacctgcaaggcaagcatccggaaagaaactacaaacttgccctgcatcacgccgaagcagccgccgccgaacgccatcccgaaggtttgcggatactgggcgacatctaccgctacggactgggcatgacttccgataaagaaaaagccctgcattattaccggcaggcagccgaagcaggcagccttgccgcgcatcagaaactcatatccgacagtgcgttaaaccatcccgagcaatatagtggcatcaaagattccgccatcaggtggcaaagggcagaacagctttatcaaaaagcccaagccctgcattacggattacaatgcgcgcccgaatacgcagccgcgctcaaactctacacagaagccgcagaactcggacacagcaaagcccaaaccaatctgggcagcatgtattacttcggacagggtatgaccgccgactacaatgaagcacgcaaatggtttgaaaaagccgccgcgaaaaaagacagtatggcgttctacaacctcgcctgcatccattacagcggacacggtgtcgggccggacaaagaaaaagcctgccgctacctgcaagaagccataaacaacggatacgggcaaaaaagcgtcctgcaagaactgctgcaacaatggcaaaatgccgtctga

SEQ ID NO: 41987 - DNA, 327 bp, Neisseria meningitidis
atgaaaacccccctccccatctgcaccctgtcggcactcgccgcctgcgccctttccggacaaggcggcagcagggtttacggcgaaatcaaagcccgagacctttgcgttaccgctcctataaggcggcagcagggtttacggcgaaatcaaagcccgagacctttgcgttaccgctcctatcctgctttctgctttctgtcttgcctgctctcgttgagccaagcgttcttgcaagctcgcttgcacgttggcaagcattgcactctatcggctttcttttcctgttgcggctggtggttcaggctcgcgttgtacgctttgcac

SEQ ID NO: 41988 - DNA, 291 bp, Neisseria meningitidis
ttgaaggttcccgcaaaacgctatttcacgctggacgagttgtgcggactgttgcaaatcagcccctatggttttgcgcaatggcagcatgatcacggtgtggttgtcggttacggcggcgaacgctacacccgtttggatgtggtgaaactgttgaaattgcagagcacgtttgcaccgtatgcagaaggtgcggagtcgggttcggacggcaaccgtccggttacgcttcaggaaatcggagacggtctgaaagagctgttggcggatttggataaggaattgtgctga

SEQ ID NO: 41989 - DNA, 774 bp, Neisseria meningitidis
atgaacactattgcagacgtgcaatccagccgagatttgcgcaatctgccgatcaatcaggtcggtatcaaagacctgcgctttccgattaccctgcaaactgcagaaggcatccagtccaccgttgcccgtctgaccatgacggtttacctgcctgctgagcagaaggggacgcatatgtcgcgttttgtcgcattgatggagcaacattctgaagccttggattttgcacaattgcacaggctgactgccgaaatggtcgcgcttttagattcccgcgccggcaaaatcagcgtttcttttccgtttttccgcaagaaaaccgcgccggtttccggtattcggtccttactggattatgatgtctgtctcacgggcgaaatgaaagacggggcatacggctacagtatgaaggtcatgattcccgtaacctcgctttgcccgtgttccaaagaaatttcccaatatggcgcgcacaaccagcgttcgcatgttaccgtcagcctgactgccgatgcagaagtcggtatcgaggaagtcattgattatgtggaggcgcaggcaagctgccaactctacggcctgctcaaacgccccgatgaaaaatatgttaccgaaaaagcctacgaaaacccgaaattcgtggaagatatggtgcgtgatgtcgctacttcgctgatcgccgacaaacgcatcaagagtttcgttgtcgagagcgagaatttcgagtctatccacaaccattcggcttatgcctatatcgcctacccgtag

SEQ ID NO: 41990 - DNA, 1158 bp, Neisseria meningitidis
atgaaattcgccacgaaagccattcattccagctacgattgcgacgaacacaaccgcgcgctgatgccgccgatttatcaaaacagtatgtttacgttgcacgagattggcgaaaatgtgccttaccgttattcgcgcctgagcaacccgacccgtcagattttggaagacaccgttgccgatttggaacacggtgcggcaggctttgcgttttccagcggtatggcggggattgatgccgtatggcgtaccttcctgcaaccgggcgataccatcgtcgcggtcgccgatatttacggcggcgcgtatgacttattggtcgatgtttatcaaaaatggggggtaaatgttgtttttgccgatttaggcaatcccgacaatttggacgaattgctcaaagcgcacaaggtcaaactggtttggctggaaacgccgtccaatccgcttttacgcttggtagacatcaaagcccttgccgcaaaagccaaagcgaccggcgcgctggtcggcatcgacaacacctttgccacgccgtatctgcaacagccgttggatatgggttgcgattttgtgttccattccgctaccaaatatttgtgcggccattccgacgtattgatgggcatcgtcgttgccaaaaccaaagagctggctcagcctttgcacgatatgatggtgcataccggtgcgattgcaggcccaatggactgctggctggtgttgcgcggcatcaaaacgcttgccctgcgtatggaggcacactgcaaaaacgcactcgaaatcgcgcgccgtctggaagaccatcctgccattgaaaaagtgttccatcccggcctgccgtcgcacgaacattatgaactcgcccaagcgcaaatgcctaaaggcatcggcggcgtggtgacggtttatctcaaaaacgacacgcgcgaagcggcaaacagcgtgattaaaaacatgaaactggtcaaaatggcttccagcctcggcggcgtggaaagtttggtcaaccattgctattcccagtcccacagcggcgtgccgcataatgtgaaaatggaaatgggcatcaaagtcggcctgctgcgtttctccatcggcatcgaagacgcggacgatatttggaacgatatttccgccgcactcgatacgactttgtaa

SEQ ID NO: 41991 - DNA, 1116 bp, Neisseria meningitidis
atgggcttgaaaaaggcttgtttgaccgtgttgtgtctgattgttttttgtttcgggatattttatacatttgaccgggtaaatcagggggaaaggaatgcggtttccctgctgaaggacaaactcttcaatgaagagggggaaccggtcaatctgattttctgctataccatattgcagatgaaggtggcggaaaggattatggcgcagcatccgggggagcggttttatgtggtgctgatgtctgaaaacaggaatgaaaaatacgattattatttcaatcagataaaggataaggcggagcgggcgtattttttccacctgccctacggtttgaacaaatcgtttaatttcattccgacgatggcggagctgaaggtgaaggcaatgctgctgccgaaggtcaagcggatttatttggcaagtttggaaaaagtcagcattgccgcctttttgagcacttacccggatgcggaaatcaaaacctttgacgacgggacaggcaatttaattcaaagcagcagctatttgggcgatgagttttctgtaaacgggacgatcaagcggaattttgcccggatgatgatcggagattggagcatcgccaaaacccgtaatgcttccgacgagcattacacgatattcaagggtttgaaaaacattatggacgacggtcgccgcaagatgacttacctgccgctgttcgatgcgtccgaactgaaggcgggggacgaaacgggcggcacggtgcggatacttttgggttcgcctgacaaggagatgaaggaaatttcggaaaaggcggcaaaaaacttcaacatacaatatgtcgcaccgcacccccgccaaacctacgggctttccggcgtaaccacattaaattcgccctatgtcatcgaagactatattttgcgcgaaattaagaaaaacccgcatacgaggtatgaaatttatacctttttcagcggtgcggcgttgacgatgaaggattttcccaatgtgcacgtttacgcattgaaaccggcttcccttccggaagattattggctcaagccggtgtatgccctgtttacccaatccggcatcccgattttgacatttgacgataaagattaa

SEQ ID NO: 41992 - DNA, 207 bp, Neisseria meningitidis
atgtttgatggagcaaaggttgtacgaaggatggaaggcaacctgtgggtgtttggtatggtcgcgcttgaaaaaacgtgttttaagggacaaatgccgtctgaaaatcggtttcagacggcattttctgtttatttaaagcaaacaggaaaaggcagcaatattctgcagtcttcctattcacacaagcgttttatagttaattaa

SEQ ID NO: 41993 - DNA, 378 bp, Neisseria meningitidis
atgtgtgagttaaaaaacttcagaagaaatattacttgttttgagggatatgacgaaaattcatttattggcaaatggtatgatgacggggtgtgggatgatgaagaatattggaaattggagaatgatttaatcgaggttagaaaaaaatatccttatccgatggatataccaagggatattgtgattggaatcagtaccattattgattttttaatggttccaaattgggagcttttcgaaattaaagcttccccttggctacctgatagcgtgggaattcatgaacgttatgaaagattcacaacaatgctccgttatatttttaccgagaaagacatagtcaacgtgcgatttgattattacaacaaaaaatag

SEQ ID NO: 41994 - DNA, 312 bp, Neisseria meningitidis
atgattaatcatattgaaaaatatataggcactatttctcatggatcgaaaagtgatttgggaagtcagtacaaattaaatatcgcagctattccctcttcccctaacagggatttaaaaacttatattactttagggttaagcaaatataatctgaattataaaagcaggtttgaaatactttttgtatgttctttaaaatatgatgaaaatcagattttcccatttttaagatggctggcagaaaccatcattgagaataaaaaaatccttcttcggggggcaggttgtttatttgcccagaagcattgt

SEQ ID NO: 41995 - DNA, 483 bp, Neisseria meningitidis
atgccccaactcactttagacaaaaccgatattaaaatcttacaggttctccaggaaaacggcaggctgaccaatgtcgaactgtccgaacgtgtcgcactttcgccttctccgtgcctgcgccgtctaaagcagttggaagatgccggcatcgtccgccaatatgccgcgctgctgtctccggaatccgtcaacctggggcttcaggcatttatccgcgtttccatccgcaaagcaaaagacgcgcgggaagactttgccgcatcggttcgaaaatggcctgaagtcttgagctgcttcgccctgacaggggaaaccgactacctgcttcaggcgttttttaccgatatgaacgcgttttcccattttgttttggatacgctcctgtcccaccacggcgtacaggatgcccaatcgagctttgttttaaaagaaatcaaacacaccacatccctgccgctcaaccacctgctgaaggaatag

SEQ ID NO: 41996 - DNA, 375 bp, Neisseria meningitidis
atgaaacttctgaccaccgcaatcctgtcttccgcaatcgcgctcagcagtatggctgctgctgccggcacgaacaaccccaccgttgccaaaaaaaccgtcagctacgtctgccagcaaggtaaaaaagtcaaagtaacctacggcttcaacaaacagggcctgaccacatacgcttccgccgtcatcaacggcaaacgtgtgcaaatgcctgtcaatttggacaaatccgacaatgtggaaacattctacggcaaagaaggcggttatgttttgggtaccggcgtgatggatggcaaatcctaccgcaaacagcccattatgattaccgcacctgacaaccaaatcgtcttcaaagactgttccccacgttaa

SEQ ID NO: 41997 - DNA, 1662 bp, Neisseria meningitidis
atgacagaatccatcacccgcgacagtatgcaatacgatgtcgtgattgtcggcgcaggcccgtcgggtttgtccgccgccatcaaactcaagcagcttgccgaaaaaaacgggcgcgaaatcagcgtttgcgtggtggagaaaggttctgaagcaggcgcgcattcgctggcgggcgcggttatcgatccgattgcgctgaatgagttgattcccgactggaaagaaaaaggcgcgccgctgacgcgcgcggtaactcaggacaaagtgttgttcctgaccgagaaaaaagcgttcaatctgcctattacccccaatttcgacaatcatggcaactacatcgtcagcttgggcgaagtcgtgcgctggttggcggagcaggcggaaaatatgggcgtggaaatctatccgggctttgccgccgccgaagtgctgtatcacgaagacggttcggtcaaaggcattgcaaccggcaatatgggcattggcaaagacggcgagccgaccgattcattccaacccggcatggagctttgggcgcagcaaaccctgtttgccgaaggttgtcgcggttcgctttccaaacaaatcatcgaacgcttcaaactcgaccaaaacagccagccgcaaacttacggcttgggcattaaagaagtttgggaagtgccgtccgaacagcatcagcccggtttggtggtgcacagcgcaggctggccgctggacagcaaaacctacggcggcgcgtttgtttaccatttcgacgacaacaaagtcgccgtcggcttcgtggtcggtttggactatcaaaatccttatctgtcgccgtttgaagagttccaacgtttcaaaacccatcccgaaatccgcaaaacctttgaaggcggccgccgcattgcttacggcgcgcgttcgctgattgaaggcggtttgcaaagtttgccgaagctctcgttcaaaggcggcattttggtcggcgatgcggcgggtttcctcaatatgccgcgcatcaaaggcattcataccgcgatgaaatccgccatgctcgccgccgaagccgtgttccccttgttggaaaaccttgaagaagtggagggtttcgacagcggcaaagaggcggcggattatcagcaacgttttgaacaaagctggctgtatcaagagctttacgccgcgcgcaatgtccgtccgtcattcaaatggggcgtttacctcggctcaatctacaccggcatcgatcagatgattttcagaggcaaagccccgtggaccttgaaacatcacggcaaagacaacgagcagcttaaaaaagccgccgcgtgcaagccgattgattatccgaaacccgacggcgtgttgaccttcgaccgcttgagcagcgtcttccttgccaatctcgcgcacgaagaaaaccagcccgaccatttggtgctgaacaatccgcaaacgatgatagacgtgaactacaaagaatacgcctcgcccgaaacgcgctattgtccggccggcgtgtacgaaattgttgaagaaaacggcaatccgcgcctgcaaatcaacgcggcaaactgcgtgcactgcaaaacctgcgacatcaaagacccgacgcaaaacatcacttggatttgccccgaaggcgcgagcgggccgaattacggcgggatgtaa

SEQ ID NO: 41998 - DNA, 489 bp, Neisseria meningitidis; identical to SEQ ID NO: 39373

SEQ ID NO: 41999 - DNA, 1227 bp, Neisseria meningitidis
atgacctttttacaacgtttgcaaggtttggcagacaataaaatctgtgcgtttgcatggttcgtcgtccgccgctttgatgaagaacgcgtaccgcaggcggcggcaagcatgacgtttacgacgctgctggcactcgtccccgtgctgaccgtgatggtggcggtcgcttcgattttccccgtgttcgaccgctggtcggattcgttcgtctccttcgtcaaccaaaccattgtgccgcagggcgcggacatggtgttcgactatatcaatgcgttccgcgagcaggcgaaccggctgacggcaatcggcagcgtgatgctggtcgttacctcgctgatgctgattcggacgatagacaatacgttcaaccgcatctggcgggtcaattcccagcgtccgtggatgatgcagtttctcgtctattgggctttactgacgttcgggccgctgtctttgggcgtgggcatttcctttatggtcggctcggtacaggatgccgcgcttgcctcaggtgcgccgcagtggtcgggcgcgttgcgaacggcggcgacgctgaccttcatgacgcttttgctgtgggggctgtaccgcttcgtgccaaaccgcttcgttcccgcgcggcaggcgtttgtcggggctttggcaacagcgttttgtctggaaaccgcgcgctccctcttcacttggtatatgggcaatttcgacggctaccgctcgatttacggcgcgtttgccgccgtgccgttttttctgttgtggctgaacctgttgtggacgctggtcttgggcggcgcggtgctgacttcttcactctcctactggcagggagaagcgttccgcaggggcttcgactcgcgcggacggtttgacgacgtgttgaaaatcctgctgcttctggatgcggcgcaaaaagaaggcaaagccttgcctgttcaggagttcagacggcatatcaatatgggctacgacgagttgggcgagcttttggaaaagctggcgcggtacggctatatctattccggcagacagggttgggtgttgaaaacgggggcggattcgattgagttgagcgaactcttcaagctcttcgtttaccgtccgttgcctgtggaaagggatcatgtgaaccaagctgtcgatgcggtaatgatgccgtgtttgcagactttgaacatgacgctggcagagtttgacgctcaggcgaaaaaacagcagcaatcttga

SEQ ID NO: 42000 - DNA, 318 bp, Neisseria meningitidis
atggtagtacgcggcggaatctatctggtctccttagaccagaccgtaggaagcgaaatcaaaaagacacgtccttgtgtcgtagtctctcctcctgaaatacacaactatctcaagactgtgctgatcgttcccatgacgagcggaagccgtcctgccccgttccgcgtcaatgtccgctttcaggataaagacggtttgcttttgcccgaacagattagggctgtggataaagccggattggtcaaacatcttggaaatttagacaacagtacggctgaaaaactgtttgcagtattgcaggagatgtttgcctga

SEQ ID NO: 42001 - DNA, 276 bp, Neisseria meningitidis
atgcaatggagtatagaaaccgaatggctgggcttgaatgtcatcgcacaccgcaacttcggcaaacagcacgcccaagtcgaatttgaagcctacttccgagacggacaacaccgatccgcgcatcacgaactgtccggcttcgtcaacatcggcggacaatggtattttatcgatcccaccgttccgcatcctgcgatgaaacaaccctgcatttgcggatcaggcaaaaaattcaaagcctgctgcggcaaatatctgaaacctgtcgcataa

SEQ ID NO: 42002 - DNA, 216 bp, Neisseria meningitidis; identical to SEQ ID NO: 37963

SEQ ID NO: 42003 - DNA, 1356 bp, Neisseria meningitidis
atgtctgatttttttcattctgacgtgttgtccgtttccgagttgaacgcatttgccaaaagtattttggaaaaccaccttgccggtttgtggattgccggcgaagtgtccaacctgacccgcgccgccagcggacattattacttctcgcttaaagacagccgcgcgcaggtgcgttgcgcgatgttcaaaggtgcggcggcgcgtttggcgaagcctttgaaagaaggcgaccatatcgaagtatcagggaaaatcagtatttacgaggcgcggggcgaatttcaaattaccgtaaacgaagtacggctcaaaggtttggggcagctttacgaagcctatgagcggttgaaggcgcagttgcaggcggaaggcgcgtttgcggcggaacgcaaaaaacctctgcctgcccgaccgcaatgtatcggcatcgtaaccagtttggcggcggcggcattgcgcgatgttgtaaccaccttgaaacgccgcgcgcccgaaattcccgtcatcgtttatccgaccgtcgttcaaggcacaggcagcgagttgcaaatcgcacaagcgattaaaaccgcatcgcaacgcgccgaatgcgatgtgttgattgtctgtcgcggcggcggcagcattgaagatttgtgggcgtttaacgaagaaccggtcgtacgcgccatcgaagcctgcacggttcccgtcgtcagcggcgtaggtcacgaaaccgatttcacgcttgccgattttgtcgccgacgtgcgcgcgcccacgccgaccggctcggcggaactggtcagccccaaccgccaagaatcgctgcatcgtctcgcccaggtgcaaggccgtctgaaaaccgttttggaacaacgctatttcgatgccagccaaaaactcgactggctcgcgcggcaaatccgtcatccgcgccaaaaacttgatgagcagcgcgcttcaatcggcaagctggcacaaacgctgtcttactctatgaagcaaaacctccgcgcccacacagcccgtttcgaacgccaaacccaagcactgaaacattgccgtcctgatgtttccgtttacaaacacaacatcgaccgctttcagacggccctgtcgcacgccttccaccaactgcttacccaccgccgccaaagcctgaccgcccaagcagcattgctcgaagccgtttcgccgcagcacattctggaacgcggcttttccgtcgtcaaaaacacacgcggacaagtcatccgcaacgccgatgttttgaagcaggggcagaagctgcacattatcttcgccgacggcgaaaccgacgtgcgcgtaagcaaagaacaagggcagcaggatttgttcgattgcatttaa

SEQ ID NO: 42004 - DNA, 279 bp, Neisseria meningitidis; identical to SEQ ID NO: 40034

SEQ ID NO: 42005 - DNA, 507 bp, Neisseria meningitidis
ttgaaggtagtacctgagcgtaccgtttcggcagatgcaaaaaccagagacccgatgtgggacaatgcggctttacagaccagcgaaggcgtaaattttattgctcgtttcctaggattttttagcgatggggaataccgctatgtggatgtcctgcaacccaaccattccgatattattcggtattcagataaagattttccgctaaatcaaacacttaatcatatacaccccgcccgttatgcggtaacgttcgaaaacaatgtcgattccaagctgcgcaggcactgggtggcaggtgcgaccatacggattatcgaccgccaaactgacgaagtgattgccaagaaaaccatctatgtctttgaaaaaggcttggacggcacgggtggggcgagaatgccgtggaagtttgctatcttgtgcaataaagaaagacttacttcttcagagccgttatcggattttgttcttagcgttttaaaaccttatatattgcgtccctaa

SEQ ID NO: 42006 - DNA, 1677 bp, Neisseria meningitidis
atgctgacctacactccgcccgatgcccgcccgcccgccaaaacccacgaaaagccgtggctgctgctgttgatggcgtttgcctggttgtggcccggcgtgttttcccacgatttgtggaatcctgccgaacctgccgtctataccgccgtcgaagcactggcaggcagccccacccccttggttgcccatctgttcgggcatgccgatttcggcataccacccgtgtatctttgggttgccgccgcgttcaaacatttgctgtcgccgtgggcagccgacccgtatgatgccgcacgctttgcaggcgtgtttttcgccgttgtcgggctgacttcctgcggctttgctggcttcaactttttgggcagacaccacgggcgcagcgtcgtcctgattctcatcggctgtatcgggctgattccgaccgtacactttctcaaccccgctgccgccgcctttgccgccgccggactggtgctgcacggttattctttggctcgccggcgcgtgattgccgcctcttttctgctcggtacgggctggacgctgatgtcgttggcagcagcttatccggcagcatttgccctgatgctgcccttgcccgtactgatgtttttccgtccgtggcaaagcaggcgtttgatgttgacggcagtcgcctcacttgcctttgccctgccgcttatgaccgtttacccgctgctcttggcaaaaacgcagcccgcgctgttcgcgcaatggctcgacgatcacgttttcggtacgttcggcggcgtgcggcacgttcagacggcattcagtttgttttactatctgaaaaacctgctttggtttgcattgcccgcgctgccgctggcggtttggacggtttgccgcacgcgcctgttttcgaccgactgggggattttgggcgtcgtctggatgcttgccgttttggtgctgcttgccgtcaatccgcagcgttttcaggataacctcgtctggctgcttccgccgcttgccctgttcggcgcggcgcaactggacagcctgaggcgcggcgcggcggcgtttgtcaactggttcggcattatggcgttcggactgtttgccgtgttcctgtggacgggctttttcgccatgaattacggctggcccgccaagcttgccgaacgcgccgcctatttcagcccgtattatgttcctgatatcgatcccattccgatggcggttgccgtactgttcacacccttgtggctgtgggcgattacccggaaaaacatacgcggcaggcaggcggttaccaactgggcggcaggcgttaccctgacctgggctttgctgatgacgctgttcctgccgtggctggacgcggcgaaaagccacgcgccggtcgtccggagtatggaggcatcgctttccccggaattaaaacgggagctttcagacggcatcgagtgtatcgacataggcggcggcgacctgcacacgcggattgtttggacgcagtacggcacattgccgcaccgcgtcggcgatgtacaatgccgctaccgtatcgtccgcttgccccaaaatgcggatgcgtcgcaaggctggcagacggtctggcagggtgcgcgcccgcgcaacaaagacagtaagttcgcactgatacggaaaatcggggaaaatatattaaaaacaacagattga

SEQ ID NO: 42007 - DNA, 822 bp, Neisseria meningitidis
gtgaaccgaactgccttctgctgcctttctctgaccgccgccctgattctgaccgcctgcagcagcggaggcggcggtgtcgccgccgacatcggcgcggggcttgccgatgcactaaccgcaccgctcgaccataaagacaaaagtttgcagtctttgacgctggatcagtccgtcaggaaaaacgagaaactgaagctggcggcacaaggtgcggaaaaaacttatggaaacggcgacagcctcaatacgggcaaattgaagaacgacaaggtcagccgcttcgactttatccgtcaaatcgaagtggacgggcagctcattaccttggagagcggagagttccaaatatacaaacaggaccactccgccgtcgttgccctacagattgaaaaaatcaacaaccccgacaaaaccgacagcctgataaaccaacgctccttccttgtcagcggtttaggcggagaacataccgccttcaaccaactgcccggcggcaaagccgagtatcacggcaaagcattcagctccgacgacccgaatggcaggctgcactactccattgattttaccaaaaaacagggttacggcagaatcgaacacctgaaaacgcccgagcagaatgtcgagcttgccgccgccgaactcaaagcagatgaaaaatcacacgccgtcattttgggcgacacgcgctacggcagcgaagaaaaaggcacttaccacctcgcccttttcggcgaccgcgcccaagaaatcgccggctcggcaaccgtgaagataggggaaaaggttcacgaaatcggcatcgccggcaaacagtag

SEQ ID NO: 42008 - DNA, 432 bp, Neisseria meningitidis
atgaccgaaaacgcacaggacaaggcgcggcaggctgtcgaaaccgtcgtcaaatccccgtagcttgtcgagcaaatcctgtccgacgagtacgtgcaaataatgatagcccggcgtttccattcgggatcgttgccgccgccgtccgacttggcgcaatacaacgacattatcagcaacggggcagaccgcattatggcaatggcggaaaaagaacaagccgtccggcacgaaaccatacggcaagaccaaaccttcaacaggcgcgggcaactgtacggcttcatcagcgtcatcctgatactgctttttgccgtcttcctcgtatggagcggctaccccgcaaccgccgcctcccttgccggcggcacagtgtttgccttggcgtgtgctttcgtgattggaagaagccgagaccaaggcaaaaattaa

SEQ ID NO: 42009 - DNA, 543 bp, Neisseria meningitidis
atgattaatcatattgaaaaatatataggcactatttctcatggatcgaaaagtgatttgggaagtcagtacaaattaaatatcgcagctattccctcttcccctaacagggatttaaaaacttatattactttagggttaagcaaatataatctgaattataaaagcaggtttgaaatactttttgtatgttctttaaaatatgatgaaaatcagattttcccatttttaagatggctggcagaaaccatcattgagaataaaaaaatccttcttcgggggcaggttgtttatttgcccagaagcattgttaattcaacaaaaatggatgcactgtatgtttccgctccattttatttcgacgatgattttcaggtctgttatggcgaacactacaatatcgttttccctttgcttgtccccttgtataaacaggaagccgaattggtggaaaagaaaggttggaatgcttttgagcagttcttgctggataatgaagttgacaacctttcggatatgaatcggaaaccgtttgcttggtaa

SEQ ID NO: 42010 - DNA, 486 bp, Neisseria meningitidis
atgccaatcgaaaagcaaaaggagaagagcatggtcgacgcggtcgttaaaactcccgaatttttaccttttacttctgtaggaatattccgttttggtgcggatataacagagtacaaaaacatactggaaacttttatgtatgaacctcctgatgagtttagaacagaatattatgaatctcccgactcaaatttactcatttccgtcaaaaaaaacaaaattatttcgatattttgttatcaggagctatattttatgggcgttaatataataggtctgaattttgaagattttaaacagcttttccatcaccctaaatcatacggtgttgataaatattatttatcaaatgaatcttatccgacatatgtctatgagtttgatgaaataggagtacaagcatgggaagcaaaagggaaaattgttactatcattgccgggggcaaagacaattattcgacagaaccttactacgatgaataa

SEQ ID NO: 42011 - DNA, 1041 bp, Neisseria meningitidis
atgaaagcaatggtttatcacggcgcaaacgacatccgttttgaggaaaaaccccgtccgcagattatcgatccgaccgatgcggtggtgaaaatcgtcaaaaccacgatttgcggtaccgatttgggtatttggaaaggcaaaaaaaccgaagtcgccgacggccgtattctcggccatgaaagcatcggtattgtagaagaagtcggcgatgctgtaaaaaacattaaagtcggtgataaagtcattatttcatgcgtcagcaaatgctgcacttgcgacaactgcaaaatccaactctattcacactgccgcaacggcggctggattttgggctacatgattgacggcacgcaagccgaatatgtccgcacgccttatgccgacaacagcctcgtgccgctgcccgacaacgtcaacgaagaagtcgccctgctgttgagcgacgccttgccgaccgcccacgaaatcggcgtgcaatatggtgatgtgaaacccggcgacactgtattcattgcaggtgccggccctgtcggtatgtctgcgttgctgactgcgcaactgtatagccctgccgccatcatcgtttgcgatatggacgaaaaccgtttgaaactggcgaaagagttgggcgcgacccataccgtcagccctgcttccggcgacgtatccaaacaagtctttgctatcgtcggcgaagacggtgtggactgcgcgattgaagcggtcggcatccctgcgacttggaatatgtgccaagacattgtgaaacccggcggccatatcgccgtcgtcggcgtacacggtcaatccgttgatttcaaactggaaaaactttggattaaaaaccttgccatcacaaccggtttggtaaacgccaataccaccgaaatgctgatgaaagccatttccagcagctcagtggactacaccaaaatgatgacccaccgcttcaaattcagcgaattggaaaaagcctacgacgtgttcaaacacgccgccgaaaaccaagccatgaaagtggttttggaagcggattaa

SEQ ID NO: 42012 - DNA, 585 bp, Neisseria meningitidis
atgaacaatatgtttgccgcaaaattgtccaaactggtttataccgcttccgaccatcctgattccctgtcggagatggaggagtttgaccgcctgattctgctgatacgcaaactgtatcaaatattggacgggcaacatatcctctccagagtaacggtttgccttcaccaccaaaaccggcgcctgattgccttggataaagcggctgccggttgcgatgcggcaatgttgcgcgcccaacgttggcgtatctacacgcagattgcggaacgcctttccgggtcgggcggcggcttcacggttacggcagaaagcgtgtccgccgcctgcccggagcttgaaggacgctatctcgagcttgtccgccgcgccgccgtctctttcggtttcacgcaaggatgggaaaatccggcaggcgggcaggaaaaaacacaagccgtcccggatgccgcatcgggtcattccgtcagaaaaccaatcaaaatcaatatagaagcgaaagtggaacgctatccggcataccgcccgaccgccgccctgaaagtaacccgccggcggtttttccggctgcaaaaccgataa

SEQ ID NO: 42013 - DNA, 660 bp, Neisseria meningitidis
atggacaggcatttcgggcgcaggcgttttctgacggttgccgccgttgcggcggcgggcgcggcggtttctttcctgccgaatccttttgccgccgacggtgaaaaacgaaacggggatgaaaaacgcaatgaaaatgtgtttttctggaaaggtgtcgcgctgggttccggcgcggagctgcgcctgttcggtgtggacgacagacaggcggcggatttggtcaacaaggttttggcggaagtggcgcgtttggaaaaaatgttcagcctttaccgtgaagacagcctgatcagccgcctgaacagggacggttatctgacttcgccgtcggcggattttttggaactgttgagcctgtgccgcgatattcacgcgctgacggacggcgcgttcgatccgacagtgcaggcgttgtggaaactgtatgccgattattttgccgcccatcctgatgcggaaacaccgccgccggagaatagcgtgaaggaagccctgaagcgggtcggcttcggcaaagtctcgtttgacgaccgtgaaatccgttttgccgaaaagggtatgggtttgtccttgaacggcatcgcgcaaggctatagtggattaacaaaaaccagtacggcgttgcctcgccttagctcaaagagaacgattctctaa

SEQ ID NO: 42014 - DNA, 600 bp, Neisseria meningitidis
atgggcagtctgttcctgccgggtggcgcactgttgtttctgagcgtggtttcgaccactttgtccgcacgtttgggaatgcctttgctgctggtttctcccgccggcgtgttggacggggcggcggaagccttggcgattgcggcgttcctgatgctggttgcgcgtccgccggcagtgttcggcggtttgtggaaattcaattacagcctgcgtgaaaaggcgtatagccgaatagaaatgcagtccgacaccgtgcttcaggcggatttggcgtggtacatcctgcccgacggcaaggtcgataaaatgtcgaaatacgttaccgagacggatatcggtgtccgtgagcattttgatttcttcggcgagtttgtcgtttcgccggcagcacgttcggacgatttggcacttgcttacggtttgaggctggaagcgggcgaagagggtttgagccttgccgagcttttcgataagcgttccgacagtcaggagccggtcgagtgcggccgtattgacatcggcggctttatgctgaccgcgaaggaggttgacggggacggcaatatcgggtctatggggctgaaagtaccgcgttag

SEQ ID NO: 42015 - DNA, 1014 bp, Neisseria meningitidis
atgaacacacgtcccttttatttcggacttatatttatcgcgattatcgctatatttgctaactatttaggaaacactgatttttcccatcattatcatatcagtgctttaattattgctatcttgctgggaatggcaatcggcaataccatttatccgcaattttcaacacaagtggaaaaaggcgttttgtttgccaaaggcacgcttcttcgcactggcattgtgctgtatggtttccgcctcacttttggcgatattgccgatgtaggattaaatgctgtcgttaccgatgcaatcatgctaatttcaaccttctttaccgcacttttaggcattcgttatctaaaaatggataaacaattggtttatctcactggggcaggttgcagcatttgcggtgcggcagcagtgatggcggcagagtctgttaccaaagcagaatcccataaagtttcagtggcgattgccatagtggtcattttcgggacgcttgctatttttacttaccccttgttctacacgtggtcacaagatttaattaacgcccatcaattcggtatttatgttggttctagtgtacacgaagtggctcaagtttatgcgattggggaaaatattgatcctatcgtggcgaatactgccgtcatttccaaaatgatccgagtgatgatgctcgccccctttttattaatgctttcttggttattaacacgtagtaatggagtatcagaaaatacatcacacaaaattacaattccttggtttgctgtactttttattggtgttgccatttttaattcttttgatttattaccaaaagaactcgtgaaattattcgttgaaatcgattctttcttattaatttcatcaatggctgcgcttggcttaacgacgcacgcaagcgcaatcaaaaaggcaggattaaaaccgtttgttttaggaatactaacttatttatggctagtggttggtggatttttagtgaactatggaatatcaaaattaatataa

SEQ ID NO: 42016 - DNA, 687 bp, Neisseria meningitidis
atggcaggcttaacatttgaacaaaccgtttccaacatcatcggtatgaaaggcgaaatcgtccgcgcattgggcgaaaccttcgtaatggtcggtttgtccaccacattcgccgtcgttttcggcacgttgctgggcgtgttgctcttcgtaacttccagccgccaactgcattacaacaagccggtgaacttcctgctcgacaacctcgtcaacctcatgcgcgccttccccttcgtcattttgatgattgcgatgatacccgccacacgcgccatcgtcggcagcaccatcggcccggttgccgcctcgctggtgttgagcgtgtcgggattgttttattttgcccgactggtggaacaaaacctgcgcgaagtccccaaaggcgtaattgaagccgccgccgcgatgggtgcgccgccggttgccatcgtccgcaaagtcctcttaaacgaagcgcgcgcgggcatggtttccagcattaccgtgcttgccatcgggcttttgtcatacagcgcggcggcagggatgataggcggcggcggcttgggcgacctcgccatccgctacggctactaccgctaccaaaccgaagtcatcgtcttcatcgtcgccctcctcgtgctgctggtcatcctgattcaaagcaccggcaacgcattggcgcggaaattggataaacgttaa

SEQ ID NO: 42017 - DNA, 1392 bp, Neisseria meningitidis
atgtttcccgatttctcccaaaccctctccaaagaccgccacttcctgcaatccgccttcaaaaatcccaacaaatacggcggcttgtccaaagtcgaagaaaaataccgaaaatcgcacgaaatctttttgaaacgtttggccgccttgcccaaacccgaattcgacaacaccctgcccgttcacgaaaaacttgacgaaatcaaaaaaaccgttgccgaacatcaggtaacgattatttgcggcgaaaccggttcgggcaagaccactcagttgcccaagatttgtctggaactcgggcgcggggcggcgggtttgatcgggcatacccagccgcgccgtttggcggcgcgttccgtagcagagcggattgccgaagagctgaaatccgaaatcggcagcgcggtcggctataaagtgcgcttcaccgaccacacctcgcgcgatgcctgcgtcaagctgatgaccgacggcatcctgctggcggaaacccagaccgaccgttatctcgccgcctacgacacgattatcatcgacgaagcgcacgagcgcagcctgaacatcgacttccttttgggctatttgaaacaactcctgccgcgccgccccgatttgaaagttatcatcacctcggcaacgatagacacagaaggcttctcccgacacttcaacggcgcgcccgttttagaagtgagcgggcgcacctatcccgtcgaaatcctctacagcccgctgaccggcaaagacgaagacgacgcagaagtcgagctgaccgacgcgattgtcgatgcggcggacgaattggcgcaatatggcgaaggcgatattttggtattcctgccgggcgaacgcgaaatccgcgaagccgccgaagccctgcgcaaatccacgctacgccgcaacgacgaaatcctgcccctgttcgcacgcctgtcgcacgccgagcagcacaaaatctttcacccctccggagcgaaacgccgcatcgtgctggcaaccaacgtcgccgaaacctcgcttaccgtgccgggcatcaaatacgtcatcgacaccggcctcgcacgcgtcaaacgctattccgcacgggcgaaagtggagcagcttcatatcgaaaaaatctcccaagccgccgcccaccaacgctccggccgctgcggacgcgtctccgcaggcgtatgtatccgattgttttcagaagaaaatttcaacaaccgccccgaatttaccgaccccgaaatcgcccgcagcaacctcgccgccgtcatcctgcgcatggcatcgctgaaactcggcgacgtagcggcattcccatttttagaaatgcccgattcgaggtatattaatgatgggtttcaggtgttgctggaattaggggcagtggaggccgcctga

SEQ ID NO: 42018 - DNA, 558 bp, Neisseria meningitidis
atgaatccacttattcatcaagcaaaggaatcatctatgcaaacccgcatcctctccgccgtactgctggctttttcaaccgctgcctttgccgggggcgcattcacgctgcaattcgacaacccgtccgaagacggcggcttcacgcaaaaccagcttttgagtgcgccttacggcttcggctgttcaggcgacaatgctccgcccgcgctgtcgtggaaaaatccgcccgccgggacaaaaagtttcgtcctgaccgtttacgataaagacgcgccgaccggactgggctggatgcactgggtggtcgccgacattcccgccgatgtccgccgccgcaacgcggcctcgctgcaattaagccgctgcgccaacatcgccgacgaccagcccgcagccatatcggcagtaatcagtttgcggatttgccgcatcaggttgacgccttcgtacacggcaaaaccgatgccgtcatgctgcaaccacgccaacacgccgcaaagcgcggcctccgccacattgtgcggcactttttcatccgccagcaccgcagccgca

SEQ ID NO: 42019 - DNA, 2025 bp, Neisseria meningitidis
atgaagacagacattcaaaccgaattaacccaagccctactaccacacgaaaaagtatgggcgaacgaagaaaaaaccattttagccaaaaacattctgttggatttggtggaaaaaaccgacccgaccattatccgtttgttattggggaacgatgagttaaaacgccatttctttgtggaagtgaatggtgttttggtgtttaaattgcaggattttcgttttttcttggacaaacacagcgtcaataattcctacacaaaatacgccaaccgcattggcttgacggacggcaaccgctttttgaaagacaattcggatattgtgttggattttccgtttaaagattgcgtattgaatggcggacaaagcaccgaggaaggcgaagagatttattttaaacgcaataatagccagccccaattatacactaaattaacccgaaaaagacaagaaatcttttttaatcaaacgcttgcttttgatgaaatcgataggctttttgacgcaaaagcattctcaaaattctctcgctataccgcagacggcaaacaagcggttggcaaaatcaaacgtcattcagacggcacacccgccgaaaatctcattatcaaaggcaataatctgatagccctacattcgcttgccaaacagtttaaaggcaaagtgaagttgatttatattgatccgccatataacacgggcaatgacggtttcaaatacaacgacaaatttaatcattccacttggctgacttttatgaaaaaccgtctagaaatcgccaaagagctgcttatggaagacggttcgatttttgtgtcaattgacgacaacgaacaggcatatttgaaaattttaatggatgaagttttcggaaatgaaaatttcatctgcaattttatttgggaaaaaaagacaggtgcgtccgatgccaaacagataacgactattacagagtttgtcttatgttactcaaagaactttaaaacagttaaattaaataaaaacacgtcttcttatgatacagagagatacaaattaagtgataagtttgaacaggaaagaggcaaatattatatcgacaatttagatagagggggattgcagtatagtgacagtttgaattttgcaatccaatgtccagatggcacttttacgtatccgaatggcaggactgaatttgtcaatgatggctggatatggaaatggagtaaaaataaaattgattgggcaataacaaacggttttttggagtttagaaaatcaaagtctaaaaaatctggatggagtgtatgttataaaaactatatgttggttgataacgaaaacaagccgatagaacgttctgctccctataagaatttaatacaggatatcttaaatacacatgcgacagatgaattgaaaaaactgttcggcagcaaagtttttactactccaaaacctgagagcttattgcagtatcttattcaaattgccacatccgaatccgacatcgtcttagactaccacttgggtagtggcacaaccgccgccgttgcccacaaaatgaatcgccaatacatcggtattgaacaaatggactatattgaaacgcttgccgttgaacgcttgaaaaaagtgattgaaggcgagcaaggcggtatttccaaagccgtgaattggcaaggtggtggcgagtttgtctatgccgaacttgccccatttaacgaaaccgcaaaacaacaaattttagcttgcgaagattcagacggcatcaaaacgctgtttgaaggtttatgcgaacgctatttcttgaaatacaacgtcagcgtaaatgaatttagtcaaattattcaagagcctgaatttcaatctttgccattagacgaacaaaaacaaatggtgcttgaaatgttagatttaaatcaaatgtatgtttcattatccgaaatggatgacgaacaatttgcagaccgcctgaatgatgacgataaagcggtaagccgtgcgttctatcaagcggagaaaaaaaatggcgaataa

SEQ ID NO: 42020 - DNA, 1269 bp, Neisseria meningitidis
atgcaacaaattaaatttattgacttattttccggaatgagtggcatcaggaaaggattcgaacaagcctgtcggaaacagtcggttgcttgcgaatgtgtttttacttcagaaatcaaaccggcagctttggaagtattgaagcaaaactaccctgatgaagtgccgtatggagatataacgaaaattgaaacaggggatattcccgattttgacatcctgttggcaggcttcccttgtcaggctttttctttcgccggaaaaagattgggctttgaagatacacggggaacgcttttctttgatgtggcaaggattttaaaggcaaaaaaaccaaaaggttttattttggaaaatgtggaaggattggtgacacacgatagaaaagatccgacacaaaaaatagggcgcaccctgaccgttattttggaaaccttggaagcattgggctactatgtttcttggaaagttttaaatgcaaaagatttcggcattccccaaaacaggaagcgcatttatctgacaggcagtttgaaatccaaacccgacttatctttcgaaacaagcccaagtccgaaattaaaaaatattttggaatcgggactgcctactgaaagcagccctttcatcaagaaattgctaaaaaaatttcccccgtccgaactgtacggaaaatcagtaaaagacaaacggggagggaaaaacaatattcacagttgggatattgaattaaaaggcgcagtaaccgaagaagagaagcaattgttaaatatccttctaaaagaacggaggaaaaaatgggcttcagaaatcggcatagattggatggatgggatgcctttgacaaaagcgcaaatttcaactttctataaacaccccaatctccaaaatattttggacagcctgacagataaaggctatttggttttagagcatccgaaacaaaaaattggcgggcaaagaatcaaagatgaatccctgcccaaaggctacaatattgtttcaggtaaaaaatcttttgaaatcaataaaatattagatccaaacgatgttgcgccaaccttggttgcaatggatatggagcaccttttcgtcgttgacaacggcggtttgcgtacacttaccggaaaagaagggttgcgcttattcggctatccggacgattattcgtttgatattcccaaaaaagacagatgcgatttattgggtaataccgttgtcgtccctgtgattaaggcggtatctgaaagacttctgcatactttataa

SEQ ID NO: 42021 - DNA, 1071 bp, Neisseria meningitidis
atgaaaatcgttttgaccacatctatggcaggcttgggcggcacggaaaccgccaccgtccgcctcggcaggctactcaggcagcacggacacgacatcatgcttgcctcttcggacggaccgttgctcaaagaggcgcaagccttgggcatacgttggcaacccgtcgatttctatcgcggcggccttttcggctacctcaaaggtatgattgcctacgcccgaatgctgcggcgcgaacaacccgacatcatcaactgccaaatggcgcgcgtcgtacccgcctgcgccattgccgccaaaatcgtttcgccgaaaaccaaaatcatctaccactcgcacggtttggacgcggcaacctaccccaaaatcgccaaactcttcgacaagctgggcgtgtacatcatcggtaactgcaaacacgagcgcgaaaaactcatccgccacggtttccccgccgaccggattgtctacgcctacaacgcacccccccccccggaatttcctttccggaaaaccgaaaaagaatgcgccgtactcggcacgctgtcgcgtctggacaccgtccgcgccgtgcatctgatgctggacattttcaaaaaaatggtcgaccgcgatatgcccgtacgcctgaacgtggcgggcataggcgaagaaatggacaatttgaaagcgcaggcggaacgtctgggcatagacggcaaagttaccttcctcggcggcgtgcgcgatttgaccgcctacttcaaagacgtggatattttggtgaacacgccccactgcatcggcgaccacggcgcaggcgtgggcaacaacatcttagaagccggactttacgacacgcccgtcgttacctacgatatggcgggcatttccgaaatggtcgtcaacggggaaacgggttactgcattcctttcggcgaagacgaagcgtttatcgaagccgtcgatacactcatcaagcatccggagttgcgcggtcaaatgggcaaagccctgcacaaacacgtcgaaaccttatgttccgacgacgaaatctaccgtaccaccatggcggcgtataccatgtaa

SEQ ID NO: 42022 - DNA, 777 bp, Neisseria meningitidis
atgaatagacccaagcaacccttcttccgtcccgaagtcgccgttgcccgccaaaccagcctgacgggtaaagtgattctgacacgaccgttgtcattttccctatggacgacatttgcatcgatatctgcgttattgattatcctgtttttgatatttggtaactatacgcgaaagacaacagcggagggacaaattttacctgcatcaggcgtaatcagggtgtatgcaccggatacggggacaattacagcgaaattcgtggaagatggagaaaaggttaaggctggcgacaagctatttgcgctttcgacctcacgtttcggcgcaggaggtagcgtgcagcagcagttgaaaacggaggcagttttgaagaaaacgttggcagaacaggaactgggtcgtctgaagctgatacacgggaatgaaacgcgcagccttaaagcaactgtcgaacgtttggaaaaccagaaactccatatttcgcaacagatagacggtcagaaaaggcgcattagacttgcggaatcagtagcaaaaacggcactgggcagacaggaattgtcgggattgggcatggtatcctccgatttggcgaagagcaacgaacctgtttatcttgtgaaaataaaacccgacaaaccaaccatcactgcatacggtgaggaaaaaccgctgcaaatcggcatgacgttggaagcagacatcctgcacgagaaacggcgattgtatgaatgggtattggagccgatttatagtatatcgggcaaactgtaa

SEQ ID NO: 42023 - DNA, 1410 bp, Neisseria meningitidis
atgaatttccccaaaacagcggcctccctgctgctgcttctcgcctccctcgccgcacacgcgctcgatacaggtcgcattccgcaaaacgaaatcgccgtatatgtccaagagcttgacagcggaaaagtcatcattgaccaccgctcggatgtccccgtcaaccccgcctccacaatgaaactcgttaccgcgtttgccgccttcaaaaccttcggcagcaattaccgctgggcgaccgagtttaaaagcaacggtacggtaaacgacggcacgcttgacggaaacctgtattgggcgggcagcggcgaccccgttttcaatcaggaaaacctgcttgccgtccaacgccagttgcgcgaacaaggcatacgcaatatcacgggacacctgatgctcgaccacagcctgtggggcgaagtcggcagccccgacgatttcgaagccgacagcggttcgccgtttatgacgccccccaatccaactatgctgtctgccggtatggttatggtgcgcgccgaacgcaatgccgccgacagtaccgacatcctcaccgatccgcctttgccgcatattttcgcccaaaacaacttgaaaattaccgcctcccaagctgcctgcccttcgatcaaaaaactgatgcgtgcatctttttcggacaatacgctgaaattgcgcggcaatattcccgagagctgtttgggcaagcctgtcggtgtccggatgttcgcgcttgacgaactgatccggcaaagttttaccaaccactggctgctcggcggcggacggatttcagacggtatcggcatagccgacacgccggaaggcgcgcagacgcttgccgttgcacactcaaagccgatgaaggaaattttgacggacatgaacaagcgttcggacaatctgattgcgcgttccgtcttcctcaaactcggcggcaacggcaaactgcccgccgtttccgaacaggcggcatctgccgtccggcgcgaacttgccgtgtcgggcatcgatgttgcggatttggttttggaaaacggttcgggtctgtccagaaaagaaagggtaacggcgagaatgatggcgcaaatgttggaaacggcttatttcagcccgtttgcacaagatttcatcgatacgctgcccatcgccggcacagacgggactttacgcaaccgcttcaaacaaagcggcgggctgttgcgcttaaaaaccggcacgctcaacaatgtccgcgcccttgcaggttattggctgggcgacaaaccgatggcggtggtcgtcatcatcaacagcggccgcgccgtttccctgctgcccgacttggacaacttcgttgccaacaacatcatctccggcggcgatggctggctggatgcgaaactgatgtgcaaagaacgccgagcctga

SEQ ID NO: 42024 - DNA, 1200 bp, Neisseria meningitidis
atgtggacgggatttttttcaaaatcaggcactggcattgcagaggaaaggcatcaaaaccgccgtgcttgcaccgatgttccgctacttgcggaaagaaacagcaagcatcctgaccggccttacggttttgcaaaatatcggcaaagcggtttggacatctatgcatggcacggcatgtatttcttcccccgctttccgttcatcgacatcgaccgcatccgctgggtgtgtgcgggtttgaaagccttcaaacactacatccgcgaaaacgggctgcccgacctgattcacgcccactgcatgaactatgcaggcatactcgctcaaaaaatttctgaaaaatacggcattccctacgttttaaccgaacacagcagcaccatcacgcgcggtctgatccgtccccaccaatggcagccgatggaaaaagcagcggcgcacgcctccgcactgctcgctgtcagccgccatttcgcacacgtcctgcaacacaaatacggctgcgaatggcagtacctcccccacatactgggcggaatattcaaccgaccgtttgaacaaagagaaaaaaacaacaaaccgcatttcgtgttctgcaccgtctcgcaccttcgccgtctcaaaggacacgatgtcctactcactgcctttgcccgggcgttggcacaatgcccgcaactgcgcctgaacatcggcggcagcggacaggaagaacagcggctgaaacagcaggcggcagacttgggcattacccatgccgttacatttttgggcgcattgcagcccgaagcagtcttggatttgatgaggaacagcgacgcattcgtccttgccagccgcaccgaaaccttcggcgtggtctatatcgaagcactgtcccaaggattgcccgtcattgcgacacgctgcggcggtgcggaatctattgtttcagacggcaacggatatttggttcctgttgacgacgacgatgcccttgccgacgcactcatcaaaatgtatgaacaccactctgattttgaacctgcccgacttagggaaaactgtctgaacgaatttggcgaaaatgccgttataggcaggttgatcggcattttccgacaggcaatcgcagaatacggtaagaaaataccggtgaaatatagtggattaacaaaaatcaggacaaggcgacgaagccgcagacagtacaaatag

SEQ ID NO: 42025 - DNA, 309 bp, Neisseria meningitidis; identical to SEQ ID NO: 38004

SEQ ID NO: 42026 - DNA, 1170 bp, Neisseria meningitidis
atggacaatgaattgtggattatcctgctgccgattatacttttgcccgttttcttcgcgatgggctggtttgccgcccgtgtggatatgaagactgtattaaagcaggcaaaaagcataccgtcgggattttataaaagtctggatgccttggttgaccgcaacagcggacgtgccgccagggaattggcagaggtcatcgatcagcagcctcagtcatacgacctgaacctcaccctaggcaagctttaccgtcagcgtggcgaaaacgacaaagccatcaatatgcaccaaacattgcttgactctcccgatacaaccggagccaagcgtgcgcgcgtattatttgaattggcgcaaaactatcaaagtgcggggttggttgaccgtgccgaacagatttttttggggctgcaagacggtgaaatggcgcgtgaagccagacagcacctgctcaatatctaccaacaggacagggattgggaaaaagcggttgaaaccgcccggctgctcagccatgacgatcagacctatcagtttgaaatcgcccagttttattgcgaacttgcccaagccgcgctgttcaagtccaatttcgatgtcgcgcgtttcaatgtcggcaaggcactcgaagccaacaaaagatgtacccgtgccaatatgattttaggcgacattgaatacaggcagggcaattttcctgcatcggttgaagcgtatgccgccatcgagcagcaaaatcatgcctatttgagcatggtcggagagaaactttatgacgcttatgcggcgcaaggaaagcctgaagaaggattaaatcgcctgatagggtatatgcagaccttcccagaacttgatttgattaacgtcgtgtacgagaaatccttattgctcaggggggagaaagaggctgcacaaactgctatcgagcttgttcggcgcaaaccggacttgaacggtgtttaccgcctgctcggtttaagaatcagcgatatggatccgacttggaaagccgatgccgatatgatgcgttcggttatcggacggcagctacagcgcagcgtgatgtaccgttgccgcaactgccacttcaaatcccaagtctttttctggcattgtcctgcctgcaacaaatggcagacgtttacgccaaacaaaatcgaagtttaa

SEQ ID NO: 42027 - DNA, 1143 bp, Neisseria meningitidis
atgaaaaaatccgtattagccgttttggccgcgctgtctctggcagcctgcggcggcagcgaaaaaaacgccgtgcaacctcaagcagacgctgcgtctgctgccaatgccgaagccgctgccaccgatactctgaacatctacaactggtcgaactatgttgatgagagtacggtcgaagactttaaaaaagccaacaatctgaagctcacttacgacttgtacgaaaacaatgaaacgctggaagccaaaatgctgaccggcaaatccggttacgatttggttgtgccgggcatcgccttcctaccgcgccaaattgaggcgggcgcgtatcaaaaagtcaacaaagacctgattcccaactataaaaacatcgatcccgaactcttgaaaatgctggaaaccgccgacccgggcaaccagtatgccgtcccctatttctccggcgtgaacacgattgcgattacggcgaagggcaaagagcttttgggcggcaagctgcccgaaaacggctgggatttgctgttcaaacccgaatacacccacaagctgaaatcctgcggcatcgccctgtgggacaccccgagcgaaatgttcccgattttgctgaactacttgggcaaagaccccaaaggatcgaatcctgaagatttgaaggcggcggcggaagtgttgaagtctatccgtccggatgtcaaacgtttcagcccgtccatcatcgacgagctggcgcgcggcgacatctgcctggcggcaggcaacggcggcgatttgaacttggcgaaagcacgttccgaagaagtgaaaaacaacgtcggcatcgaagtgctgaatccgaaaggcatgggcttctggattgagtcttggctgattcccgccgatgcgaaaaacgtcgccaatgcccacaaatacatcaactacacgctcgaccccgaaatcgcggcgaaaaacggcatcgccgtaaccttcgcccccgccagcaaaccggcgcgcgaaaaaatgcctgccgagctggtgaacacccgttccatcttcccgaacgagcaggatatgaaagacggttttgtgatgccgcaaatgagtacggatgcgaaaaaactgtctgtcagcctgtggcagaaaatcaaagtcggcaccaactga

SEQ ID NO: 42028 - DNA, 507 bp, Neisseria meningitidis
atgggatcaaaattctttttcctgctgctgcgttttgccggttcggtgttgccgccgtcgcatatgcgcggcatcgtcggcagacgggtacgcggttttttggcgcggcgggtttctccgcatattggacgcggggtcaatatcgaacgcggggcgtatgtgtttccggatacggttttgggcgacggctcgggcatcggggcaaactgtgaaatctgccgtgggccggtggtcggcaaaaatgtgatgatggagccggaatgtctgttttattcaaataaccacaagtttgaccgttaaaaacgctttgagggctacacggaaatccgtccgattacgttggaggacgatgtctggccggggcgcagggtgattgtaatggcgggcgtaaccgtcggacgcggttcggtcgtgggcgcaggcgcggtggttacaaaagacattccgccctactctttggcggcaggcaatccggcagtggtgaaaaagaatctgccggaaggttga

SEQ ID NO: 42029 - DNA, 1644 bp, Neisseria meningitidis
atgtctgaagaaaaattgaaaatgagtttcgagccaaccgtaatcgaacatttgggtgtaaagatgtattcgcacactgttcctgcgattgccgagttgatagcgaatgcctacgatgcatgtgctacggaagtggaagttaggttattcgataaaccggagcataaaatcgttattaaagataatggtataggaatgagcttcgatgaaatcaatgatttttatttgagaatcggtcggaacagaagggaagaaaaacaagcttccccgtgcggaagaattccaacgggtaaaaaaggccttggtaaattggcattattcgggcttggcaacaaaattgaaatttctactatccagggaaacgaaagggttacttttactttggattatgcagagattcgaagaagcaagggtatttatcaaccggagtttcgaaaagaatctgttgaatccaatatcgaaagcgggacaaccataactttaaccgaactgacgaaaaagcaaggatatccgttagataattatgtagagcatctttcccgcttgtttgattttccggctcaggattttaaaatcaaagtaagcttgaacggctctgaacctaaaatcattgatggaaatctaaaatatgatcttgttaccccacaattcgaatgggaataccaggatttagcaaccaatatttcatcgttatcttcaaaattcgaacagtatgaatacagcggattaatacaaggtaagttcattacaacggaaaaacctttaaagaataatatgaaaggtattaccttgtttgccaacggcagaatggtaaatatgcccgagtttttcactgatagcgaatccagccatttctattcatatttgactggatggctgaatgtggactttatagataatgacgatgaagatttaattgctaccgacaggacatcattagactggaagcattcaaaaacctcaaaattacgtgttttccttggggagatcgtccgagccatcgggcaagattggagaaaaagaagaaaaaaagagaaagatgacgaagtgaaaggcgaaagcggagttgatatcgaagattggaaaaacaaattgccaaaaaaggaaagggaaccagtagaagttattttgaatcgtttagattcggagcttacaaataaagagcaagcggaagtaatctctgccttacatagtattattccagaatatccttactatcattggcggcatttgcatcaggatttgcatactgcctgtaatgatttttacaatgaaaagaaggattatttaagtgctgcaatcgaggcagttaaagttttcgaagataaggttcagaagcaaacaggtcttcatagcatagacggaagagaattgattgaacaagctttcgggagtaaaaattctatacttctattaacgaataacaaaacgaaggcggaacaaaatttagaagatggtcttgaacagcttgcatgcggaacatggactggatttagaaatcctgtacaacatgagttaagagcaaatttatctcctagtatttttaatgataaggatgctttggatttaataagcttggtttcgtatttgttaagaaaagtggaacagacaaaaaaacgatcgaaggtggtatcttccaagtaa

SEQ ID NO: 42030 - DNA, 798 bp, Neisseria meningitidis
atgattgattttgacaaaccggctgaagaagacgccatttatcaaagtcgtttgaaaaaaatcgtttcagacgaccttgtcctctacaacgaaaattcccttaacgtcatgcggaagatattggaaaaatatccaaacggctgttttgatatgattttctcagacccgccttactttctttccaatgacggcttcagttgtcaaaacggacaaatggtttccgtcaataagggcaactgggataaatccaaaggaatggcggcagatttggaattctacgaagaatggctccgactgtgaaaaccaaacggcacaatttgggtttgcggcacattccataatatttatttaatcggctacctgatgcaaactatcggataccatattttgaacaatattacttgggaaaaacccaatcctccccctaatttgtcctgccgtttttttacccattcgacagaaacaatcttatgggcaaagaaaaataaaaaagccaaacacacgtttcattatgaaatgatgaaagcacaaaatgatggcaaacagatgaaatgtgtttggacatttcctcctccaaacaaagccgaaaaaacattcggcaaacatccgacacaaaaaccactccccttgcttgaacgctgcatactctcagcttcaaacatcggagatttaatttttgaccctttcatgggcagcggcacaacaggcgttgccgccttaaaacatggtcggaaattttgtggttgcgaactggaagaagatttttttgaattagcaaaaaaaaggttagaaaaatga

SEQ ID NO: 42031 - DNA, 1269 bp, Neisseria meningitidis
atggatatgcaaagcaaagcgaaaaaattgattgagatgattcagacggcaccggtggagtggaagccgttgggggaggttggtctattggttcgtggcaacggtttgcagaaaaaagattttaccgagagcggcgtaccggcgattcattacggacaaatttacacctattatggcaatcagacggataagactctttctttcgtttcaccggaattggcggaaaaactgaagaaagtagataaaggtgatgtggtaattaccaacactagtgaaaatatagaagacgtaggaaaagcccttttatatttgggagaagagcaagctgttacaggcggacacgcaactatttttaaaccaagcaaagaaattgtcggcaaattctttgtctatttcactcaaacagaaatttttgataaggcaaaaagaaaatttgcaaaaggaacaaaggttattgatgtttccgcaaccgatatggcaaaaatcaaaattcccatcccatccctagaaactcagcaaaaaattgtaaaaataattgacaaattcaccgagctggaagctacgctggaagctgaactagccctgcgcaaacgccaataccggtattaccgcgactttcttttagattttgacaatcaaatcgggggaatagctgatggctatcaatgccgtctgaaagatgtggtttggaagacgttgggggaggtgtttgacttgaagaatggctataccccttccaaatcaaataaagaatattgggaaaatggctcaatcccttggtttagaatggaagatattagggaaaatggtcgtattttagataattcattacagcatatatcaaaaagcgcagtaaagggcggtaagctatttccagccaattctattatcatggctacatctgcaaccataggtgagcatgcactaataaccgttccattcttagccaaccaaagatttaccagtttatctttaaagcctgaatttgccgataaactcagcatttattttctttattactattgttttaatcttagtgaatggtgcaaaaagaatacaacaacatcgagttttgcttctgtggatatgaatagttttaaacgcttcccaatccccatccccccactccccgaacaagaaaaaatcgtcgccatcctagacaaattcgacaccctgacccactccatcagcgaaggcctgccgcacgaaatcaccctgcgccgaaaacaatacgaatattaccgcgaacagctgcttgcctttcggtag

SEQ ID NO: 42032 - DNA, 177 bp, Neisseria meningitidis; identical to SEQ ID NO: 37081

SEQ ID NO: 42033 - DNA, 1305 bp, Neisseria meningitidis
atgaaaaaacacatatgggcggcatctttgctgccggcatccctatcggcagaacctttaaactggtggaagccttattccgccgtcaattcgggcgataccgcctgggtgatgactgcggctgccttggtactgttgatgacgcttcccgggctggctttattctacggcggtatggtgcggaaaaaaaacctgctctcgacgatgatgcacagcttttccatcgcgacattggtgggcatcctttgggtcgccgtcggctattctttagcgttcacgccgggaaatgcctttatcggcggtttggggcgcgtatttttaagcgggatgcagatagacgctgccgcacagatgctgaccgtgtcgcccaatgcgccgactgttcccgaaccggtatttatgttttttcagatgacgtttgccattatttcgaccgccattattaccggcgcgtttgccgaacggatgaaatattcggcaatgatgctgttttcgggcatatggtttttattggtttatgtgccgggcgcgcattgggtctggggcggcggctttatgagcaagggcggcgtattggattatgccggcggtacggtggtgcacatcaatgccggtatcgcgggactcgtcgccgccttggttttgggcaggcgcataggctacgggcgcgaggcgatgcctccgcacaatatggcgatgacactgatcggcgcggcaatgttgtggttcggctggttcggctttaacgccggatcggcgcttgcggcagacgcggcggcgggtatggcgatggcggtaacgcaggtgtcggccgtattcggcgcggcaggctggcttgcctgcgaaaaaatagcgggacacaaaccttccgctttggggctggcttccggcgcggtttccggtctggtcggcatcacccctgccgccggctttaccggcccgtcgggcgcggccgccatcggtatattgactgccgccgcgtgctttgtgtccgtcaccgtcgtcaaacacaaattgcgttacgatgattctttggacgctttcggcatacacggattcggcgggctggtgggcggaatattgaccggcatctttttcgacaaccgcattttcggcggggatgcggcagtttggcagcagttgtggatacaggtaaaagacgggttcgttatggtggcatacagcgggctaatgagttgggcgattttgaaggtcgtggggaaaatctgcggcggcctgcgcgtcggcaaggatgtcgaacgcgaaggtttggatctgaatatccacggcgaacgcgtggaataa

SEQ ID NO: 42034 - DNA, 1251 bp, Neisseria meningitidis
atgaccaaactgacacgaagacaaatcatccgccgcaccgccggcacactgttcgccctaagccccatcgcatccgccgttgccaaaacggtacgcgcaccacaattcactgccgcacggatatggccatcgcacacctacacccgcctgacgctggaaagcaccgccgcgctcaaataccaacacttcacgctcgacaacccgggcaggctggtcgtcgacatacaaaacgcgaacatcaataccgtattgcacggactgtctcagaaagtcatggcagacgacccctttatccgcagcatacgcgcgggtcagaacacgccgaccaccgtccgcctcgtcatcgacctgaaacagcccacccacgcacaagtcttcgcgcttccgcccgtcggcggctttaagaaccgcctcgtcgtcgacctctatccgcacgggatggatgccgacgatccgatgatggcactgctcaacggtagcctgaataaaaccctgcgcggctcccctgaagccgacctcgctcaaaacactcccgcacaaaccgaacgcggcaaaaacgggcgcagacccgtcatcatgctcgatccaggacacggcggcgaagaccccggcgccgtcagcccgggcggtttgcaggaaaaacacgtcgtcctctccatcgcccgcgaaaccaaaaaacaattggaagccttgggttacaacgtctttatgacgcgcaacgaagacgtgttcatcccattgggcgtgcgtgtcgccaaagggcgcacacggcgggcggacgtattcgtctccatccacgccgacgctttcaccagcccctccgcgcgcggcacaggggtttatatgctgaacaccaaaggcgcgaccagctccgccgccaaattcttggaacaaacccaaaataatgccgacgcggtcggcggcgtaccgaccagcggcaaccgcaatgtcgataccgccctgctcgatatgacccaaaccgccacgctgcgcgacagccgcaaactcggcaaactggtgcttgaagaattgggcaggctcaaccacttgcacaaaggcagggtggacgaagccaatttcgccgttttgcgcgcgcccgatatgccgtctatcctggtcgaaaccgccttcctgtccaaccctgccgaagagaagctgctgggcagcgaatccttccgtcggcagtgcgcccaatccattgcctcgggtgtccaacgctacatcaatacatccgtattgaagcggggttga

SEQ ID NO: 42035 - DNA, 537 bp, Neisseria meningitidis
atggatattttattgaaatactggaagccggtaggcgtattgctgctaatcgtcctgatttttaccgcatggcatttcgacagtgccgaaaaataccgcatgggacgggaggctgctgctgccgaaatttcgaatcgtctgaaagacggctatatcgagcaggcaaagcaggcgcgttctgccgagcaggcaaagcaggcgcgttctgccgagcagaaggccgctgccgcgtttgccgaacgacaaaccaaattagaagaggaaaaacaaaatgctgaaaaaactgttgccgctatgcgtcttgagcttaaccgcctgcgccactacgccgccgcccaaaatcgcagcagaaacctgcccgcaaccactaccgccgccaccgcatctgatggcgcgtcagattcccaaggctggctattattcggacagtgcgctgaaaaatatgcaggactggcagaaacagccgacggacatgcggccgatttaagggaatggcaggcatatggtcatgcaataagcagtcagcgtgccgaataa

SEQ ID NO: 42036 - DNA, 363 bp, Neisseria meningitidis
atgcaatgcgatttttctcaagcagtaccatcaaaccaaacccaaaacattcaaaaccaagcctaaacggtaaccatcccccacaagctggcaaacgacgcagcagacgcttgcttttacgcagaccgcgcgtctgaaaaccttgccgccatccttgaagcggtggaagcactgatagatatttccattaccacgcaaacagagcaggcgcaacggcacaatttgccgctgattgctcgcaacctcatcaaaaccgccaagaacgaagtagagacactggcagagtttcctcctttcagcctgtttgaaaccgcaatggatttaaacaacgaaatttacagccaaacccacggcgcgaaataa

SEQ ID NO: 42037 - DNA, 189 bp, Neisseria meningitidis
ttgccgaaattcggggaatgccctctccccaaccctcccccacgggggagggggcaggttgcagcggattttgcggttgcaggcggtttgagaaagaatgcccgaaatatcaacagcgggaatttttcaggcagcctttatcgcaaggcagatggaacaaacgccgcgagcgttttttcagacgacctt

SEQ ID NO: 42038 - DNA, 3195 bp, Neisseria meningitidis
atgcgaacgaccccaaccttccctacaaaaactttcaaaccggctgccatggcgttagctgttgcaacaacactttctgcctgcttaggcggcggcacttctgcgcccgacttcaatgcaggcggcaccggtatcggcagcaacagcagggcaacaacagcgaaatcagcagcagtatcttacgccggtatcaagaacgaaatgtgcaaagacagaagcatgctctgtgccggtcgggatgacgttgcggttacagacagggatgccaaaatcaatgcccccccgaatctgcataccggagactttacaaacccaaatgacgcatacaagaatttgatcaacctcaaacctgcaattgaagcaggctatacaggacgcggggtagaggtaggtatcgtcgacacaggcgaatccgtcggcagcatatcctttcccgaactgtatggcagaaaagaacacggctataacgaaaattacaaaaactatacggcgtatatgcggaaggaagcgcctgaagacggaggcggtaaagacattgaagcttctttcgacgatgaggccgttatagagactgaagcaaagccgacggatatccgccacgtaaaagaaatcggacacatcgatgtggtctcccatattattggcgggcgttccgtggacggcagacctgcaggcggtattgcgcccgatgcgacgctacacataatgaatacgcatgatggaaccaagaacgaaataatgtctgcagccatccgcaatgcatgggtcaagctgggcgaacgtggcgtgcgcatcgtcaataacagttttggaacaacatcgagggcaggcactgccgaccatttccaaatagccaattcggaggagcagtaccgccaagcgttgctcgcctattccggcggtgataaaacagacgagggtatccgcctgatgcaacagagcgattacggcaacttgtcctaccacatccgtaataaaaacatgcttttcattttttcggcaagcaatgacgcacaagctcagcccaacacactgaccctattgccattttatgaaaaagatgctcaaaaaggcattatcacagtcgcaggcgtagaccgcagtggagaaaagttcaatggctccaaccattgcggaattactgccatgtggtgcctatcggcaccctatgaagcaagcgtccgtttcacccgtacaaacccgattcaaattgccggaacatccttttccgcacccatcgtaaccggcacggcggctctgctgctgcagaaatacccgtggatgagcaacgacaacctgcgtaccacgctgctgacaacggctcaggacatcggtgcagtcggcgtggacagcaagttcggctggggactgctggatgcgggtaaggccatgaacggacccgcgtcctttccgttcggcgactttaccgccgatacgaaaggtacatccgatattgcctactccttccgtaacgacatttcaggcacgggcggcctgatcaaaaaaggcggcagccaactgcaactgcacggcaacaacacctatacgggcaaaaccattatcgaaggcggttcgctggtgttgtacggcaacaacaaatcggatatgcgcgtcgaaaccaaaggtgcgctgatttataacggggcggcatccggcggtagcctgaacagcgacggcattgtctatctggcagataccgaccgatccggcgcaaacgaaaccgtgcacatcaaaggcgatctgcagctgggcggcgaaggtacgctgtacacacgtttgggcaaactgctgaaagtggacggtacggcgatgaccggcggcaagctgtacatgtcggcacgcggcaaaggggcaggctatctcaaccgtaccggacaacgtgttcccttcctgagtgccgccaaaatcgggcgggattattctttcttcacaaacatcgaaaccgacggtggtctgctggcttccctcgacagcgtcgaaaaaacagcgggcagtgaaggcgacacgctgtcctattatgtccgtcgcggcaatgcggcacggactgcttcggcagcggcacattccgcgcccgccggtctgaaacacgccgtagaacagggcggcagcaatctggaaaacctgatggtcgaactggatgcctccgaatcatccgcaacacccgagacggttgaaactgcggccgccgaccgcacagatatgccgggcatccgcccctacggcgcaactttccgcgcagcggcagccgtacagcatgcgaatgccgccgacggtgtacgcatcttcaacagtctcgccgctaccgtctatgccgacagtaccgccgcccatgccgatatgcagggacgccggctgaaagccgtatcggacgggttggaccacaacggcacgggtctgcgcgtcatcgcgcaaacccaacaggacggtggaacgtgggaacagggcggtgttgaaggcaaaatgcgcggcagtacccaaaccgtcggcattgccgcgaaaaccggcgaaaatacgacagcagccgccacactgggcatgggacgcagcacatggagcgaaaacagtgcaaatgcaaaaaccgacagcattagtctgtttgcaggcatacggcacgatgcgggcgatatcggctatctcaaaggcctgttctcctacggacgctacaaaaacagcatcagccgcagcaccggtgcggacgaacatgcggaaggcagcgtcaacggcacgctgatgcagctgggcgcactgggcggtgtcaacgttccgtttgccgcaacgggagatttgacggtcgaaggcggtctgcgctacgacctgctcaaacaggatgcattcgccgaaaaaggcagtgctttgggctggagcggcaacagcctcactgaaggcacactggtcggactcgcgggtctgaagctgtcgcaacccttgagcgataaagccgtcctgtttgcaacggcgggcgtggaacgcgacctgaacggacgcgactacacggtaacgggcggctttaccggcgcgactgcagcaaccggcaagacgggggcacgcaatatgccgcacacccgcctggttgccggtctgggcgcggatgtcgaattcggcaacggctggaacggcttggcacgttacagctacgccggttccaaacagtacggcaaccacagcggacgagtcggcgtaggctaccggttctga

SEQ ID NO: 42039 - DNA, 255 bp, Neisseria meningitidis
atgaacggtattgactatgcgttagaacttgaagaagcgcgagaaattctgaacagtcttcgaaaagcctacaaggaacatgcggcaggcaggggcatgaccaagcggtacaaaatcaaagaccgcgaaatggagttttccagccttgccgatttattgaagcagatacggttctggcagcgggaaatcaagcggctggaagcggcggcgggtatttctccgcgccgttcaggccgtatcatcacgcgattttag

SEQ ID NO: 42040 - DNA, 363 bp, Neisseria meningitidis
ttgcacaaacaagtgcaacatattactacaaagctattttatttcaaaataactgatatatcttttttcatagattttaaatttcatatttttaatattttaggaattttattccaaagaaaaagaaacagattgataaaaacaatacccgccattcattcggacaaaaccgcacggaacatccgttttcccatttccacgacaatccggtacagaacaccccgctgccgattccgcctgcacatccggcaaaatttcatacacaaggaaaatgttgaaaacaaaaagaactcattgcttgaaaaaagatttaatgggaatgcgggtatttcccacactttttccatttatttatcctcatta

SEQ ID NO: 42041 - DNA, 237 bp, Neisseria meningitidis
ttgaaacgattggaggacatgattatgggtttttggaatggtgtggcaaaagcagcaaaagcagtgggagagggaatgattgaagccggcaatgagcataaggcgttgaaaatggaatatgcggagaaatcaagtgaggagctgcatgaaatcgtcaagagtgatggtttttttaaaaattccacacgggagaaaagtgcggcttatgctattttaaaagagcgtggcgaggtgtga

SEQ ID NO: 42042 - DNA, 156 bp, Neisseria meningitidis
ttgtataccggtcattatggcggaaataccgtttgggaggcagccgcatcgcgtggaatcggcacggcaggcgatgcgccgatgccttcgggcgtgaaggcggggcaatcggcagtttggaaaaaggcaatggaatctgtgggcagaagaagttaa

SEQ ID NO: 42043 - DNA, 192 bp, Neisseria meningitidis
atgaacacgaatcaagatacgattccatttggcggcaaccttgtgatttgctgttcgacgggaaacggcggggacgggcggttttcttgtctgattaccgatcagataccggatttaaatcttgtcagaagcgggcaggcgttcccgatgttcatttatgagtacgaaactagagaaaaaaggaaagcctga

SEQ ID NO: 42044 - DNA, 288 bp, Neisseria meningitidis
ttgaggcaggcatttcagacggcattccttaaatgcgtgtacctgtggtgttccaaaaggtcgtctgaaagtgcagcttctgcgaagctaaagcgcagtatcaacgaagttaaaatttgcctgaaccttaaaggcagcctgcaccccaatcccctctcccgtgggagagggctaggacgaggctggcaaactgaaagtttgcttgggcggcattttcaatgtgcaggctgcttttatagtggattaacaaaaatcaggacaaggcgacgaagccgcagacagtacaaa

SEQ ID NO: 42045 - DNA, 414 bp, Neisseria meningitidis
ttgacagaagaaatgatgaaaaagcagcggcatatcctgtgtgtcggctgcctgtatattatattgaaggtcaacgtatttcccaataccggctggatggaagcgtcgaaagggatgcagggcatgtcgttcagtaccttcggatacgcggatgctccgggctatacattcagccgcattggccatactttaattttcctacttggaaagaccactgggacacgtacaactgtttccgatagttcgcataatgtatattatgttaaattatatatttgtgcaaataactccaaggcattaagctgttgtttgatgctttgccagtttgggagaaagttgtccatatgcgccataaaacgggcgttgcgatggcgttcgagcaaatgggtcagttcgtggacgacgacgtattaa

SEQ ID NO: 42046 - DNA, 165 bp, Neisseria meningitidis
atggctaaaatatgtagcattatgttctgtatcgttgtttaccatttccgcacctttgtccgccttaaagcaggtaaacaccgcaatgaatcgacgcaaagaaaatgccgtctgaacatgcgttcgggcggcgttttgttgggggtatcggagcggaacgtctga

SEQ ID NO: 42047 - DNA, 204 bp, Neisseria meningitidis
atgaatattattggtaaattgaaagaagctgcttcctattttcttacaaaattgattggagaaaatcctagtaatgagcaggtaaaccgcgcacttatacagatgccaaatgttcgtccgatacacacctatccacgcccaaatttaagaaactcaggcgtggcagccgcgaaacgggctgcgcgcaaacgcaagaatcgtcgt

SEQ ID NO: 42048 - DNA, 123 bp, Neisseria meningitidis; identical to SEQ ID NO: 38059

SEQ ID NO: 42049 - DNA, 195 bp, Neisseria meningitidis
atgccgtctgaaaaaatctattacggcgtattgattttcttatgtatcgcttctatgctgctgtcgccgtttttttatgcgggtgctttgaagcccaagaaggcggcattgcggaaggacgggcagtggaaactcatcttattgtccaatgccgtggcggcggcggttttgttttggatgtggtggaaatggttt

SEQ ID NO: 42050 - DNA, 129 bp, Neisseria meningitidis
ttaacgcagataaacaaggtaatgccgtctgaagggctttcagacggcattttgcgctattttgtgaaggtagggatgacggttcgggtattcctgacagggtggattttcaaggtgttgtatagggtg

SEQ ID NO: 42051 - DNA, 270 bp, Neisseria meningitidis
atgtttaccacaaacgatttacgccatttcctagaaagtttggtcatcctattcgcaatcggctattgggacaccatgctgctgttgctttggtttctcgtccgctttgcctacaaaaaaccccggcaaaatcctttcaggcagcctgaccgccgccgctatcctgatgctgtttgtttggattattcccaaacaattcggcccgagcaaagaagaaatacaggcacaagaagagtgggacagaaaatacaaagaagccgaagccgtgtt

SEQ ID NO: 42052 - DNA, 222 bp, Neisseria meningitidis
atgagcggtaaagtgcagcacaataaaggtaaaatacgtgacaatgctttaaaagccttagtgaaatctgatttgttccgacacaaggtggaacggaaaaggaaaggcaaaggcagctacaacaggcaggaagcgaaaaaatggcgggacggttttgatactgtcccgccgtttttatgccttaaacgtggaagctttcgccgcagccgcaggagtctttga

SEQ ID NO: 42053 - DNA, 213 bp, Neisseria meningitidis; identical to SEQ ID NO: 39705

SEQ ID NO: 42054 - DNA, 204 bp, Neisseria meningitidis
atgccgtctgaagcagcttgggctttcagacggcatttcctccgcttaaaacagcatatcggcaaccccgccccgcccgtccacggcaatctgcatctgaaaaccatctgtatgccaaaccacacccccatcccgatttccgtcatttgcaccctgcctgtattgggcaatcatcggtttttcgcttacaatagccgaatctga

SEQ ID NO: 42055 - DNA, 180 bp, Neisseria meningitidis
atgccgtctgaacgcacgttttgccgttcagacggcattttcatttcctttttccgcctgccgccccttgaaaatcccttacgcgccgccctgtttgaaacaaagcaaacgcccgccgcgaaccggacaatcttgatacgcagccaaagcaagtccggcggtaagttgttaaatatataa

SEQ ID NO: 42056 - DNA, 198 bp, Neisseria meningitidis; identical to SEQ ID NO: 38072

SEQ ID NO: 42057 - DNA, 186 bp, Neisseria meningitidis
gtgccggaacaggcacgcgcccgcccgattcaaaccgcgatgacgctttgccgccggttcggggcaggatggcggcacacacgccgtctgccgcgtttcatttcacaccgctcttccgaaacccgaaacccgcccggtccgacgtgcggtatgaaacgcttaagctggcgcgaagtcttttactga

SEQ ID NO: 42058 - DNA, 414 bp, Neisseria meningitidis
ttgccgagcgataaagaagcgcggacagggtgcttatctttgcctgccaataacggtataattcgggcgttatcaccgccttttaccggtataaacatcagactttttgccgccttgggtctcctgtccctttccggcgcggcggcgcaagcctccgtataccattgcaactcaaatggcaaaagcgtatatacatcagccccagcaggatcgtgcgccgatgcggatttacctaaaatcagcagccatcagggaggcggataccgcctgaaaattaaaaaactcagtcaagaagccaaaatacacatagaaagtaaaaagaaaaacaaaaaacctgccgggaaaaagaacaggcaggctgccaaagccccgaaagaaaatcaaaagcaaacaaccgaaaagaaaagcccgtaa

SEQ ID NO: 42059 - DNA, 201 bp, Neisseria meningitidis; identical to SEQ ID NO: 39543

SEQ ID NO: 42060 - DNA, 174 bp, Neisseria meningitidis; identical to SEQ ID NO: 36913

SEQ ID NO: 42061 - DNA, 1281 bp, Neisseria meningitidis
atgaagctgaacgatcgacaaatcaaaaacgccaagcccgccgaaaaaccgtataagctgaatgacggcaaaggtttgtatctgtatgtcaatacgagcggcgggaagttatggcggtttgacttttcgcataacggcaaacgtaaaacgctttcaatcggcaaatatccgaccgtatcactgctggaagcccgccaaaccgctgaaaatgcccgccgcttgcttgcagcggggcaagaccccggcgaagccaagcagcaggaaaagcgtgaacggcaagccgctgtcagtaacacatttcggagcattgccgccgaatggcacaaacaccgtgaaacaggattgacgggcaatcatgccgcccgtgtatgggatagtttagaaaaggacgttttccccatgcttggcggtttgcctgtcagtgaaatcaaagtcagccaagtaaaagaagtgattgaagcggtagcggcaagaggagcacttgaaacggcagggcggatattgcagcgtatcaaggctgttttcacttatgccatacggacggagcgggcagagaataatcccgccgtccctttggtaggtttaattaaagcaccaaagcagaaacaccagcccgcattaccgcaatccgagctgaccgagttttaccgccggttgatgttggaacaagccgaacggcaaacaaaaatagccatgcagttaatcatgctgacttttgtcaggaatggagagcttagggcggcggaatgggtggaatttgatttaaacggggcagaatggagcatacctgccgccaagatgaagatgaaagccccgcatatcgtcccccttgctgattggacgcttgagcttttggcagaactaaaggaaataacagggcatagccgctatttattcccatcggtaaaagaccctgacaagcacatgagtgaaaacaccctgtcttacttaatgggcagaatgggctacaagggcatagcaacaccgcacggctttagaagcctagccacagatgttttgaatgagaacggctttgacagcgatgtgatagagcgacagcttgcccatgtggaacaaaataaagttagggcggcataccacagaacggaatatatcccacagcgtaaagagcttatgcaatggtatagtgattttttgcgggagcgataccgccaagcggaaaaagagcttgcgggaatactgccaagacgtagggaacaagggggaaaccgtccaagatgcagggcggttttttttggttttctgaaaatccctatatag

SEQ ID NO: 42062 - DNA, 843 bp, Neisseria meningitidis
atgacaacagaaaacaatgcttttgaaaacgccaagcacatcgacgaaacaggcaatgaatattggtcggcgcgcaccttgcagcaaatcttggaatattccgaatggcgtaatttccaacgggccattgataaagccataactgcttgcgaaacatcaggaaatgacaaaaatcatcattttgttgaaaccaacaaaatgatagccctcggaaaaggcgggcagcgcgaagtgccggattaccgcctttctcgctatgcctgctacctgattgtgcaaaacggcgatccgtccaaaagcgtcattgccgcagggcaaacctactttgccgtgcaaacccgccgccaagagctgcaagacgaggccgcattcaggagtttgggcgaagacaaacaacgcctgctgcttcgcaggcagctgcgcgaacacaataccgaccttgccgccgcagccaaggatgcaggcgtagaaaaacccgttgagtaccaaaaccacggctatcgggggctatacggaggactggacaagcagggcatacacagccgcaaaggcttgaagaaaagccagaaaatcctagaccacatgaacgccagtgaactggctgccaatctgtttcgcgccacgcaaaccgaagaaaaactacgccgcgaaaacatccaaggcaaaacacaggcaaaccgggtgcatttcgaagtcggacaaaaagtgcgccaaaccattgaagaactgggcggcatcatgcctgaaaaccagcccgtacccgagaaaagcatcaaacagcttgagaacgaagaacagaaaaggcttgccgcaaccgaacagcatcaaaacggcaaaaaataa

SEQ ID NO: 42063 - DNA, 1671 bp, Neisseria meningitidis
atgcagaaatggcaaaccgagctttattccacaccgctttggctttgtctgacaccgaaaagcgcggtcaaagtcttgctgctgattacggcgatgattacgctggtgttaaccgaaatgcggctgaatgtgttgagtacctttatgtccaaagggctttacgactcgatgcaggatttgaatgcttcggcattttggatgtttgccgcaatgaacgcgggcgtggtgctgatacgggcgtttaacaacgtcgtcaacgacttcctcgatcaaggcttggcgattaaatggtcggagcggctcaacgaagtgctgacagcacgctggcttgccgacaaaaactactaccgcctgcaaatgcgccgccacgcgccggacaacatcgaccagcgtatccaacaggacgcgcaggaatttatcgcttcgaccatcgaatttgtgcgcggcatggtcaattcggtcgttacttctctggaatttgccgttgttttgcggggcttggctggcatcctgaccgtgttcggcttcgacattccgcacggcatcgtttggtttgtctatatatttgtgattttggcgacctttatcgccatgtagataggcaaccctttgattcgttacaattatgaaaacgaaaaactcaacggcgactaccgttattccctcatccgcgtgcgcgaccacgccgaaagcgtggcgttttgcaacggcgaaaaacatgaatacgaccagctttccgaccgctttaaagccattatccgcaaccgttggcgcattgcgcggcaaagcgtctgcttaagcggctttaacgatatgttcaccaacggcatcaaactcttcccgattattttgcaagctccgcgcctgtttgccggacaaatcaaaatcggcgacatccagcagaccgtccaagccttcgcgcgactgcaaaacgcgctttctttctttcgaatgttctacaacaaattcaccgcctaccgcgcccgattgaagcgtctgtacggctttttgctgagtaccgaagaacaacacagcgcgcggcaacccgagattagtgaagtttcagacggcattgcactggaaaacgtcgccctgttccgccacaacggcgaagttttattggacggcatcaatatcaacctcaaaaacggcgattccctgctgatacgcggtccgagcggttacggcaaaacctcgctgctgcgcgcgctggctgggctttggccgttcggcagcagcggcaaagtcagccgtccgccgcatcaagacatcctcttcctgccgcaacgcccgtacacggcacagggcagcctgcgcgacgcggtttgttatcccgacatcgacaaacagcatccggagctaatcgaagccatgaacacctgccgcttgggttatctgattgacaaattggacaaaacagacgactggcagcacaaactctccctgggcgaactgcaacgcgtcgccttcgtccgcgccctgctttccaagcccaaaatcgtcctgctcgacgaagccaccgccgccttggacgaaccggccgaagccgcgatctaccgcgccttaaagcaaaaactgcccgacagcatcatcatcagcatcggacaccgaagcacgctcaacgcgttccacaatatgcgcctcgatgtcggcaacgttgcctgcggttga

SEQ ID NO: 42064 - DNA, 855 bp, Neisseria meningitidis
atgttttaccaaatccttgccctgattatctggagcagctcgtttattgccgccaaatatgtctatggcggcatcgatcccgcattgatggtcggcgtgcgcctgctaattgccgcgctgcctgcactgcccgcctgccgccgtcatgtcggcaagattccgcgtgaggaatggaagccgttgctgattgtgtcgttcgtcaactatgtgctgaccctgctgcttcagtttgtcgggttgaaatacacttccgccgccagcgcatcggtcattgtcggactcgagccactgctgatggtgtttgtcggacactttttcttcaacgacaaagcgcgtgcctaccactggatatgcggcgcggcggcatttgccggtgtcgcgctgctgatggcgggcggtgcggaagagggcggcgaagtcggctggttcggctgcctgctggtgttgttggcgggcgcgggcttttgtgccgctatgcgtccgacgcaaaggctgattgcacgcatcggcgcaccggcattcacatctgtttccattgccgccgcatcgttgatgtgcctgccgttttcgcttgctttggcgcaaagttataccgtggactggagcgtcgggatggtattgtcgctgctgtatttgggtttggggtgcggctggtacgcctattggctgtggaacaaggggatgagccgtgttcctgccaacgtttcgggactgttgatttcgctcgaacccgtcgtcggcgtgctgctggcggttttgattttgggcgaacacctgtcgcccgtgtccgccttgggcgtgtttgtcgtcatcgccgccaccttggttgccggccggctgtcgcatcaaaaataa

SEQ ID NO: 42065 - DNA, 399 bp, Neisseria meningitidis
ttgtttgtatgctttgaaaaatgtttgtttccggattttgccattcccatccggttttgcgctgtacgatgtgttttagcgcggacttgctcaaaatcgcatgtgattccggtatttgaggctttgattagggatgcggactttcaatatattttctgctacaacaacgaaggcttgatgtctgtcgggcaggtaagggagatttttgagcgtttcggcaaatatgatttggttcaaacggaatatcggcgttttaaggcagataagacagaaaaccgtaatcataaggcaaattcgatattcgaatatctgcatattttagaaaagaccttttatagtggattaacaaaaaccagtacagcgttgcctcgccttagctcaaagagaacgattctctaa

SEQ ID NO: 42066 - DNA, 1131 bp, Neisseria meningitidis
atggaacgcaaatatttccatgaaaattatttatataaaaagccatttatttttaaaaaatctttagatgtaagttgtatttcgtggaaagaaatcaatgaattgtatcaacgtgcagaccctactgattggcaatttaagttccgaaaaggggaaataattccaaaagaagcctatgttgaatcattcaatgatgtgggtaggatacgtcatcgatttaataaaacagccgtgtatcagtatttgcaagatggcgcgacaatggtttataaccgtattgataatgagccatttgttgatagtattgctaaacaaattgctcagtttgctcaagcataaactgttgttagtggttatttagcttttggtagctcatcatcatatcgtaatcattgggatactcgagatgtatttgcagtacaattgattggcaaaaaacattggacaatttctgccccaaattttgatatgccgttgtatatgcagcaagcaaaagatatgccgcacattactccacctacaacagtagatatggaagtcattttagaagcaggagatattctatatattccacgtggttggtggcataatcctatgcctatgaattgtgaaacattccatttagctattggtacatttccgccaaacggttataactatatggaatggttgatgaaaaaaatacctgatatccagagtattcgtcaaaatttcataggctgggaacatgaccaaaaaaatctagatgattcagctcaagcagttactgaaatgatgaataacccaaaaaattatcaagcatttatgcaagattttttgggaaatcagcgcaccaatacagcattcaatatggatttgtttggaaatgctcataatcagacattacctgagcattgctttttaagattaaatagtaatgattgctcaactctttcacaaggatactttattgcgaatggcattaaagtaaatattgatgaaatcagtatgaaatttttaacgattttagttaataaacacataatccccttaactgaaatgttatcgttatttaatactaacgaacaagaaagtattaataaattagtttggcagctaggagagttagatataattgaaattataagatga

SEQ ID NO: 42067 - DNA, 1074 bp, Neisseria meningitidis
atgcgcccgtttttcgtcggcgcgacagtgcttgccatactcggcgcgttggtgtttttcatcagccccggtgccgtcgtcctgcaccgccaaatcttcttagaactcatgctacctgcggcatatggtggtttcctgactgcggctttgttggactggacggttttttcgggtaacctgaaacctgtcgcgactttgatggcggcattattgctcgccgcatccgctatactgcccttttcgccgcaaactgcctcgtttttcgtcgccgcctattggctggtgttgctgctgttctgcgcccggctgatttggctagaccgaaacaccgacaacttcgccctgctaatgttacttgccgcgttcactgtttttcagacggcatatgccgtcagcggcgatttgaacctgttgcgcgcgcaagtgcatctaaatatggcggcggtgatgttcgtatccgtgcgcgtcagtattcttttgggcgcggaagccctgaaagaatgccgtctgaaagaccctgtttttattccaaatatcgtttataaaaacatcgccattactttcctgctcttgcacgccgccgccgaactttggctgcccgcgcaaaccgccggttttaccgcgctcgccgtcggctttatcctgctcgccaagctgcgtgagcttcaccatcacgaactcttacgtaaacactacgtccgcacttattacctgctccaactctttgccgccgcaggctatctgtgggcaggcgcggcgaaactgcaaaacctgcccgcctccgcgcccctgcacctgattaccctcggaggcatgatgggcggcgtgatgatggtgtggctgactgccggactgtggcacagcggctttaccaaactcgactaccccaaactctgccgcatcgccgtccccatccttttcgccgccgccgtttcgcgcgctgttttaatgaacgtgaacccgatattcttcatcaccatccccgcgattctgaccgccgccgtgttcgtactgtatcttttcacatttgtaccgatatttcgggaaaatgcgtttacggatgatccggaataa

SEQ ID NO: 42068 - DNA, 1011 bp, Neisseria meningitidis
atgattttctccataatcgtccctatttacaatgtggaaaaatatctccgctgctgcgtggattccgtgcttgccgaaaattttaccgattatgaaatgattttggtcgatgacggttcgccggacggctgcgggaagatttgcgacgaatatgcaggcaaatatccgcatataaaagtgattcatcaagaaaacggcgggctgtcggatgcccgcaacgccggtatccgggcggcaaaaggcgattacctaatctttttggacagcgacgactattgggccgataccaaccattcaaaaaacgggggggggattctctttgatttacaacaacttgcagacaaaaaggttgatttgatcctgcatccctcgtccctcaattaccacgtcatccccaaaggggcggacttttcggataatgattttgtccgccattttgaaacgttggtggaggggcggtactatatcgccaacgcgtggacaaagattgtcaggcgggaaataatcatcaaaaacaatctgtttttcccaaaaggatacattcacgaggatttcccgtacagtttgcaattggcgcgttttatcaagacttttgccttttacgataaccctttttaccagtaccgcgttctcggcaactctatcagccacaacatcaaatacaaaaatttcagcgatatgctggcgcatctcgaccggggcgtggattttttagtcgaaaacaaaaattcccccatctacggcggtttgcaaaaatttgtcttcgacaatatcggctatctgaggtctatattagtaaggctttatttttccaaaaacattatcgtcatctaccggaaatatttttcatttaaagaaaaatgcagaaagatattcggcgcgaaggcaatccgtccggtttttatcgggaagaccgcattcatcataggattgccgatattgcgcctgctcgtaccgcctatgctgtacccggcaatcaaggccgtttatcaaaaatttttttcggaataa

SEQ ID NO: 42069 - DNA, 402 bp, Neisseria meningitidis
atggcaaaccgatttcggcagcgcaaatccgcataccgccgccttagcggcaagccgttgttttcagacggcattgcggccaacctttgcggcgggcgaaaaaccttgtcctataatttatcccgcttcaaaatcagcatacggtcggaaatgcaaaaaatatctttcaatttgttgaaacctgcaaccccgaaaatagggaaacgccgccccggtttgaacggtgcgccgcatattccgatgccctccccccgataccttccggcaagcccagaaatgcccggcaacaatatccatccggcaaaaatccgaaacaacacacccggtggcaggcagagtcaaaccgccccgcaaagcatccgccatcagaaaaacaaaccgcctccgagggcttcatcctaa

SEQ ID NO: 42070 - DNA, 657 bp, Neisseria meningitidis
atgataaaaaatctttataaattgataaattatgcggctttgattggtttcgccccaaatatagtttttgcttggcctatgtttgttgaccccccttcttaccaaaacatccatgtacgaagttggaaagcacggcgagattccggcatagtaaaacaagatttggatttttcttgcggcgcggcttcgattgccacgttactgaataatttttatggcagacattattctgaagcagaaatcttagacaaaatggataaaacccaaatgcgtgcttcttttgatgatatgcaacgcataatgcccgaactgggttttgaagcacaaggttatgctttgccatttgaacagttggtacaactaaaaattcctgtaattgtgtatttaaaataccgtaaaaacaaccatttttcggtattgaacggtattaacggagaaactgttttgctggctgatccatcgctggggcacgtctcaatgagcaaatcacaattcttgagcgcatggaaaacacgtgatggcgaaatggaaggaaaaattttagccatcgtgccaaaaaatactgattttgttagaaatcagatgttttttaataagaatcccgttcgtcaaacacgttttacggtagaacaaatccaaatgcggcaaaaacgataa

SEQ ID NO: 42071 - DNA, 1293 bp, Neisseria meningitidis
atgcagttttcagcattcggcgaaaaattcacgcaacacagcggcatcctccaactgatggacgacctcggcgacgcgctcaaaagcgacaagcccgtcaacatgctcggcggcggcaacccggcgcgcattccggaaatcgatcgggcgtttgccgacatattctccaaactggcggcagaacacgccgtcgaaaacatcggcaactactccaatcctcaaggagatgccgcgctgattgacgcgctgaccgccttcctcaaccgcgaatacggctggaacctgaccgccgacaatatcgcgctgaccaatggttcgcaaaacgcgtttttctatttattcaacctcttcggcggcaaattcaacctttcagacggcacatccgcagaaaaagccattttgttgccgctcgcgcccgaatacatcggctatgccgacgtgcatatcgaagggcagcacttcgtttccgtcaaacccaaaatcgaaaacgtcgaacacgaaggcgaagcaggcttcttcaaataccgcgtggactttgacgcactggaaaacctgcccgaactgaaagaaggcaaaatcggcacgatttgctgttcgcgcccgaccaacccgaccggcaacgtgctgaccgacggcgaaatggcgcgtttggacgctttggcgcgtgaacacggcattccgctgattatcgacaacgcctacggaatgccgttccccaacatcatttacagcgacgtaacgctgaattggcatgaaaacatcatcctctgcttcagcctttccaaagtcggcttgcccggtgtgcgtaccggcattattgtcgccgcgccggaagtggttaaagccgtcagcagtttgaatgcgattgtgaacctgtcgcctacgcgttttggtgcggcaattgcggctccgctgttgaacgacggccgtctgaaacaactggccgaccaagtgattcagccgttttaccgtcagcaggcgcaaacggcggtttccctgctcaaacgcgaattgggcgcgtatccgttgaaaatccacaagcctgaaggtgcgattttcttgtggctttggtttgaaaacctgcctgtttcgtcgcaaactttgtacgaaatgctcaaggccgaaggcacgctgattattccgggcgagcatttttttgtcggcatcgatacgcaagattatccgcacgcgcacgagtgcatccgtatgagcattgcgcaggacgcggaaacgctggaaaaaggcattgccgcgatcggcaaaaccgtccgaaaactgtacgacaacgtttaa

SEQ ID NO: 42072 - DNA, 381 bp, Neisseria meningitidis
atgaagctgaccgtccgcaactaccatctcgacggctacggccatgtcaacaatgcgcgctacctcgaatttttcgaagaagcgcgctgggcgttttttgaagaacgcggactgctgcacgagttggcaggcctcatactgattgtcgcccgcatcgacatccgatacagccgccccgccgtcgaaggcgacgtattgcagttttcatgccgcctgaaaacccccggcacgcgccgtattgtgctgacccagacgattacactgccaaacggcaaaaccgccgcagaagccgacatcaccctgatgcccgtccacgccgccacacaacgcaccgtcagcctgcccgccacccttgcccgcgcattggaagccttgtccgaa

SEQ ID NO: 42073 - DNA, 516 bp, Neisseria meningitidis
atgaaacgtgccaaacaatatcctttcttaacgttgcagcggcaacgtttccatttgaactttgaaaacgcctcttccgccgccggcatcccagccgaacgcgatttctaccgctgggcgtggtctgccttgaaaaatgaataccgccgcgccgacatcagcctgattcttctggacgaagaagaagcccgagcctacaaccgcgactaccgcggcaaagattacgccaccaatgtattgagtttcgcgctcaacgaaggcgaaatcctgccctgccaagtttcggaaaaactgtacggcgatttgattatctgcccgcaagtcgttttaaaagaagccgccgaacagggcaaaacgcccgaacggcattttgcccacctgaccatacacggtactttacacctgatgggctacgaccacatcgaagacgacgaagccgaaataatggaagccgaagaaatccgcctgatgctggcggcaggcttccccaacccctaccaagaggacgaatattaa

SEQ ID NO: 42074 - DNA, 891 bp, Neisseria meningitidis
atgaatcctaaatcccctttatttttacgactgtccgatcgtttggatgtgtacctgcgcctgatgcgggcggacaagcccatcgggacgctgcttttgctgtggccgacctactgggcgttgtggctggcttcagacggcattcccgatccggcggtattggcggcgtttacaatcggcacgtttttaatgcggagtgccggctgcgtcatcaacgactttgccgaccgcgattttgacggggctgtcgagcgcaccaaaaaccgtccgttcgcacagggcagggtcaagaaaaaagaagcgctgctgctgacggcatttttgtgcctgcttgccgcattgtgcctgattccgctgaatcatctgacttggctgatgagcctgcccgcgctgtttcttgcgctgacttacccgtttaccaaacgtttttttccgattccccaactctatctcgggcttgccttttccttcggtatcccgatggcgtttgccgccgttgccggaaacgtgctgcctcaagcgtggatactctttgccgccaatgtgttatggactctggcgtatgacacggtttatgcaatggcggacaaagaagacgatttgaaaatcggcatcaaaacctccgccgtcacgttcgggcgttacgacatcgccgccgttatgctgtgtcacggaggctttaccctgctgatggcagtattgggtgcggttatcggtgcggcatgggcatattggacggcaatccccatcgtcctgctgctgcaataccgccaatatgccgccatcaaaagccgcgtccggcaaatctgttttgaaacgtttttggcaaacaacagaattggttgggtgtggtttaccgccatttttgcccatacgtttttcgcgaaataa

SEQ ID NO: 42075 - DNA, 684 bp, Neisseria meningitidis
atgccgtctgaaaaatgttcagacggcatttcttataacctttcgtttgcagcacataaccaatcagtctttcctattccgttccgaaatgcataccatgcgcccgtacccaatatttgcgaacaaggaaagaaaatggcacgtttaaccgtacacaccctcgaaaccgcccccgaagccgccaaagcgcgcgtcgaggcggtacttcaaaacaacggctttatccccaaccttatcggcgtattatcaaacgcccccgaagccttggcgttttaccaagaagtcggcaagctcaacgccgccaacagcctgaccgccggcgaagtcgaagtaatccagattattgccgcccgcaccaaccaatgcggcttctgcgtggcagggcacaccaaactcgcaaccctgaaaaaactcctttccgaacaatccgtcaaagccgcgcgcgctttggcggcaggcgaatttgacgatgctaaactcggcgcgctcgccgcctttacccaagccgtaatggcaaaaaaaggcgcggtatccgacgaggaactcaaagcattttttgatgcgggctacaaccagcagcaggcagtcgaagtcgtgatgggcgtagccttggcaactttgtgcaactacgtcaacaacctcggacaaaccgaaatcaaccccgaattgcaggcttacgcctga

SEQ ID NO: 42076 - DNA, 504 bp, Neisseria meningitidis
atgtcagaccctaatttgattgacccggaaattttcgccgccgaagggcagaacctgcaaggcagttttctgctggaagaattggacgagcgagtcagtttgcacgattatcccgccgacaggcagaccaaaatatcgtttacactgaccggcggtcgcgaccggctgcaacgcctgttcctcgacctgaacgtcaaagccgatatgcccctgatttgccagagatgtatcaaacccatgccgttcatgcttgatgaaagcagccgtatcgtcctgttttccaacgaagagtccttggacgaatccatgcttgccgatgaagaattggaaggtatgctgctcgaaaaagagcttgacttgcggaccttggtcgaagaccaaatcctgatgtcgctccctttctccccccggcacgaagactgcggcgacaatgggacactggaagaagtcaatcgggacaaacccaacccctttgctgttttggcaggtttgaaaagcagttaa

SEQ ID NO: 42077 - DNA, 1359 bp, Neisseria meningitidis
atgtcttccccttcaaataccaatcgtcaaacctgatccagccgattaacctatatcctgaccattgccggcgcgactgtcggtttcggcgcgacgtggcgtttcccgtatttggtcggtgaaaacggtggtggcgcgtatgtgtttttattctgtatcgcgatgctggttatcggcatcccgatgattttggtggaaaatgtcatcggacggcgcaaaggcgtgaacgcgctggatgcgttcggcggcccgatgaacggcaaacccattgccaaaatttggaaactggtcggctggatggggctcggcgcgttcggcatcatggcttattacatggtactcggcggctgggtaatcagctatatcgttaatattattggaggaaatttgaatatttccagccccgtcgacggtgtggttacaaaaggcttctttgccgaacacataaacagcccttgggaaattgcgttttatacgctgctttttgtcgccgtgaaccaatggattttggtcaaaggcgttatcggcggcattgaaaaagcggcaaaatagctgatgccgctgctgtttttgttcctaatcgcgatggtcgtccgcaacgttacccttccgggcgcaatggaaggggttgctttctatctgaaacctgatttcagcaagattaccgccgaactgttcgtcttcgttttggggcaggtattttttgccctgagcctgggtttcggcgtgatgattaccttgtccagctatttggataaaaacgaaaatctggttcagacggcagttatcacggcaattaccaataccatcatcgccatacttgcgggctttatgattttcccgtcgctcttcagcttcggcgttgcccccgattccggcccgactttggtgttccaaagcttgccgattgtgttctcacatatgtgggcgagatctgtgttcgccgtgattttcttctcgctgctcctgattgccgcattgacgacttcgctgaccatttatgaagtgttgattacgaccattcaggaaaaaaccaaaatccgccgtaccgccgcgattacgattgtattagccgccatcttcattttcggcaacatcccgtccattctgagctatggttcgtggaaagacgtcgtgttcggcaaaaatattttcgatgccttcgactacatcagcggcaacatcttgtttatgctgaccgcgctcggtttcgcgctgtttgtcggttttgtgatgaaggacgaagcgaaggaagaattgctttacaaaggcaaccatacgacggtcaatatttggtttgcttatgtgaaatatcttgtgccgttggtgattttgctgatttttgtcagcaacctgttc

SEQ ID NO: 42078 - DNA, 423 bp, Neisseria meningitidis
atgtctgaaccgattattacccctgccgccgtttatacttttggcggcgtggtcggcgcaggttatctgttggggatgcctgtcgatgcagtcgtgctgggcgcagtggcttcggcggcggtaacgatgataagcgagccgaaaagccgctggatggtagtggcctatatcgttatcggcgggcttttgggtggcgcttttgccccaccgctgacgcatttcttaatcggcgaagtagttggcagccatccgtcgctgggtgagcagcgcatacagtttgcacatgcctttgcccccgtcgttgtcggcttgttgtggcaggtattgttgagatttgcccgcgctgtctggccatcgttcgaaaagcatgcagacgatattgtggagtggctgctgaatcttctgccgtggagaccgaaaaaa

SEQ ID NO: 42079 - DNA, 273 bp, Neisseria meningitidis
atgaaattacttttgattctttctgccgccccatcactgatttcggcgtacttgatgatttgtcgtctgaacgggcgcaaatggagtgcattgtcgccggaggcgtgggcgtatctcgcctttttaggtggagcgatctataccttttacatagtctttgcttacggactgacgccgagcttaggcaaatttatgatggatattgccgcctgtgtatatttcggcagccgttcggtacgggttgtcaaatggcggcatcggcatggtttgaaa

SEQ ID NO: 42080 - DNA, 612 bp, Neisseria meningitidis
atgaactttacccgactgctcaaccaagtcttaagcacggttcaaaaaaaaggcaacacattctccgacagcccgctcaattcattcggcggaggcgcgctggttgccggtgtcgcctccatgctgctgaacggtaaaaaccgcaaaaccatcaccaaaatcggttcgaccgccgctttgggctacctcgcctaccggggctatcagatgtggcagcaaaacaaagggcgggcaaccgtaacacaaagcgatttccaacctgccggagaaaccgaagaaacatacaaccgcaccgtattgcgcaccatgatagccgccgccgcttcagacggcatgatagacgaagccgaacgccggactatcgaacaggaaagcggcacagaccccgaaactgctgcatggctcgccgccgaataccgcctgcccgcaagcatcgaagacatcgccgccgccgtcggcaacgatgaggcgttggcggcggaggcctatctggcggcaagactggtatgtgccgatttgtcgcggaaagaaaccgtcttcctcgcccgcctgtcgtaggctttggaactggatgacaatctggtggaaaacttggaaaggcaattggggttt

SEQ ID NO: 42081 - DNA, 2034 bp, Neisseria meningitidis
atgaaactcgaagcaagcaagcaagagcagaagtttaaaaaatcatttattataagtctatttttttctattctttatacctctccgcttttggctgttgattacgtttacgacaattctaaattaacaaatgagcaaattgatcgcttaaaaaaacttagagataaaagcagcgaatactggaaacaagaaacttatcttctaaaaccgacgaatggtagctctcagaactctctcaaagttcccgcactatactctaaaacacaccaattcgaaaacatcaacaactcaaaaaagatttctttttatgacaaggaatacactgaagattaccttgttggcttcgcccgaggtttcggggttgaaaaaagaaatggggaagaagaaaaaacactccagcaatattttaaggactgtgtaaatactgggaattccaataatgatcagtgtgaacaaccatccttcggaaactctggcccaagattaataaagagcgatattttcgccttagctccacaaataaaaaatagccatatcaacagcgaaattttatctgtaggtaattatatcgaatggcttcgcccaacacttaataagcttcctagttggcaagagcatctatattctggtttagatccattccactatattgaggttacagacaactcgcacgttatcgggcaaacgatcagtttggatgaattccgcttagaaaattctctctgggaaccccgttgggattctgatgttggggaattaaaaacaacgaatgcagacatccgttttaatactaaaagtgaaagtttactcgtaaaagaagattatgctggcggagctcgttttcgttttgcttacggtctaaaagataaagtccctgaaacaccagttttaacttttgaaaaaaatataactggcacttccgacatcatcttcgaaaatccaatagacgatttaaaaagtctcgacgggcatcaaattatcaaagtaaatggcacagcagataaacacgcattccgtctttctggcaaacaccaaaagggaatttatacgctttctttacaacaacgcccagaaggcttttttaccaaagtgcaagaacgcgatgatatttcgatttatgcacaacaagcccaagccgccaataccttattcgccttgcgtttaaacgacaaaaacagcgatatttttgaccgcactttaccgcgcaaaggcttgtggttacgtgtgattgacggacattccagccaatgggtacaaggcaaaacggcacctgtagaaggctatcgaaaaggtgtgcaactcggcggcgaagtattcacgcggcaaaacgaaagtaatcaattttccgttggcttaatgggtggacaagcagaacaacgcagcactttccgcaatccagatacagataatcttacaacgggaaatatgaaaggctttggtactggtttttacgccacttggcatcagcttcaagataaacaaacaggggcatatattgacagctgggtacaatatcaacgtttccgccaccgtattaacactgaagatgctacagaacgttttacttcaaaaggtattactgcctcaattgaagcaggttacaatgctttattggcggaacacttcactaaaaagggcaaccgtgttcgtttttacctgcaaccacaggcacaattgacttatttgggggtaaacggaaaattcagcgatagcgaaaatgcccacgtgaatttacttggctctcgccaattacaaagccgagtgggcgttcaagctaaagctcaattttcactctataaaaatatcgctattgaacctttcgccgctgtgaacgcgctttaccacaacaaacctttcggtgtggaaatggacggagagcgtcgagtgataaacaataagacggcaattgagagccaattaggtgtagcagtgaaaatcaaatctcacttaaccttacaagccacattcaaccgccaaacaggcaaacatcatcaaactaaacaaggtgcgttgaatttgcagtggacgttttaa

SEQ ID NO: 42082 - DNA, 186 bp, Neisseria meningitidis; identical to SEQ ID NO: 38793

SEQ ID NO: 42083 - DNA, 1821 bp, Neisseria meningitidis
atgccttgtatgaatcatcaatcaaactcaggcgaaggagtgcttgtggctaaaacatatttattgactgcattgataatgtctatgacaatctctggatgtcaagtcatccatgccaatcaaggtaaggttaatactcattctgctgtcatcacaggtgcagacgctcacacgcctgaacatgcaacgggactgaccgaacaaaagcaggtgattgcaagtgattttatggtagcgtcagccaatccattagcaacacaagctggctatgatatcttaaagcaaggcggtagcgctgcagatgcgatggtggcggtgcagacgacactaagcttggtagagccacagtcgtcaggcttgggcggtggtgcatttgtgttgtattgggataataccgccaaaacattgaccacatttgatgggcgtgagacggcaccgatgcgtgcgacgccggaattatttttggataaagatggtcaaccattgaaatttatggaagcggtggtcggtggtcgctcggtgggtacgcctgctatccctaaactgatggagacaatacatcagcgatacggtgtattgccttggggaaaattatttgatacaccgatccgcttggcaaaacaaggctttgaggtgtcgccaaggcttgccatctcggttgagcaaaatcagcagcatttggcacgctatccaaaaacagccgcttattttttgccgaatggtgtgccgctacaagcaggcagcttgctgaaaaatttagaatttgctgacagtgttcaggcgttagcagctcaaggtgcaaaagctctgcatactggtaaatatgcccaaaatatcgtttcagttgtccaaaatgctaaggataaccccggtcaattatccttacaagatttatctgattatcaagtggtggaacgcccgcctgtttgtgtgacttatcgtatttatgaagtatgcggtatgggtgcaccaagctcaggtgggattgctgtgggtcagattttggggattttaaatgaattttcacccaatcaggtggggtatgatgctgaaggtttacgtctcttgggcgacgcttctaggcttgcgtttgcggatcgtgatgtatatttgggcgaccctgattttgtaccagtacccattcgccagttgatttctaaagactacctaaaacatcgcagccagctgcttgagcagtcggataaggcattgcctagcgtatctgcaggcgattttattcatgagtgggtgtcctcacaagcgattgagttaccttctaccagtcatatatcaattgtggataaggcgggcaatgtgctatcaatgacgacttccattgaaaatgcgtttggctcaactttgatggcaaatggctacctgctgaataatgagctgacagactttagttttgagccaataaagcagggcaaacaggtcgccaatcgtgtcgagcccggcaagagaccacgctcctcaatggcaccaaccatcgtatttaaagcaggcaagccttatatggcaatcggctccccaggtggtagccgtatcattggctatgtcgctaagacgattgtggcacatagtgactggaatatggatatccaaaatgccatcagtgcacccaatttattaaatcgctttggtagctatgaactagaaacgggtacaaccgccgtccagtggcaacaagcattaaatgatttgggctataagactgatgtgcgtgagctaaattcaggtgttcaagccattattatcgagccaagcaggctggttggtggtgccgatccacgccgagaaggtcgagtgatgggtgattag

SEQ ID NO: 42084 - DNA, 645 bp, Neisseria meningitidis
atgactttaggtctggttggacgcaaagttggtatgacccgcgtgttcgacgaacagggtgtttctgttccggtaaccgttttggatatgtctgccaaccgcgttacacaagtaaaatccaaagatactgacggctatactgccgttcaagttacctttggtcagaaaaaagccaatcgtgtcaacaaagccgaagccgggcactttgcaaaagcaggtgttgaagccggtcgcggtttgattgagtttgctttgactgaagaaaaactggctgaattgaaagctggtgacgaaatcaccgtttctatgtttgaagtcggtcaactggtcgatgtaaccggtacctctaaaggtaaaggtttctccggcacgattaaacgtcataacttcggtgcccaacgtacttcccacggtaactcccgttctcaccgtgttccaggctctatcggtatggcgcaagacccgggtcgcgtgttccccggtaaacgcatggccggccaatacggcaacaccaaagcaactgttcaaaaattggaagttgtccgtgttgacgcagaacgccaactgctgttggttaagggtgctgttccgggtgcggtcaacagcgatgttgtagttcgtcccagcgtgaaagtaggtgcgtaa

SEQ ID NO: 42085 - DNA, 975 bp, Neisseria meningitidis
atgccgtctgaaaaaaatatcggttttatggcaggaagcagccgtccgttgtgggtcgcctttgcgctgttgctggtttcctgcgtcctgtttatgacgctcaacgtcaaaggcgattgggattttgttttgcacctgcggctgaccaaacttgccgcgctgctgatggtcgcctatgcggtcggcgtgtccacgcaactcttccaaacgctgaccaacaatccgattctgaccccttcgattttgggttttgattcactgtatgtgtttttgcagaccttgctggtgtttacgctcggcggcgtgggctatacgtccctgcctgcggtcggcaagttcggcttcgaacttgccgtcatgatgggcggctcgctgctgctgttctacacgctcgtcaaacaaggcgggcgcgatttgtcgcgcatgattttaatcggcgtgattttcgggattttattccgcagcctttcctcgctgctctcccgcatgatcgatcccgaagagtttaccgcggcgcaggcaaacatgttcgccagtttcaataccgtccacaacgaactgttggggataggcgcgctgattctgctcatcagcgcggcggcggtttggcgcgaacgctaccgcttggacgtacaccttttggggcgcgaccaagccgtcaatttgggcatcagctacacgcgcaacaccttatggatactgctttggattgccgcgctggtggcgacggcgaccgccgtggtcggcccggtgagctttttcgggcttctcgccgcctcgcttgccaaccacttttccccgtccgtgcgccattccgtccgcctgccgatgacggtttgtgtcggcggtatcctcctggtcggcggacaaaccgtattcgaacacttcttgggcatgaaggcggtattaagcgtggtggtcgaatttgcgggcggactcgttttcctctatctcgttttaaaacacaaaaaatga

SEQ ID NO: 42086 - DNA, 807 bp, Neisseria meningitidis
atgtggcattgggacattatcttaatcctgcttgccgtaggcagtgcggcaggttttattgccggcctgttcggcgtaggcggcggcacgctgattgtccctgtcgttttatgggtgcttgatttgcagggtttggcacaacatccttacgcgcaacacctcgccgtcggcacatccttcgccgtcatggtcttcaccgccttttccagtatgctggggcagcacaaaaaacaggcggtcgactggaaaaccgtatttacgatgatgccgggtatgatattcggcgtattcacgggcgcactctccgcaaaatatatccccgcgttcgggcttcaaattttcttcatcctgtttttaaccgccgtcgcattcaaaacactgcataccgaccctcagacggcatcccgcccgctgcccggactgcccggactgactgcggtttccacactgttcggcacaatgtcgagctgggtcggcataggcggcggttcactttccgtccccttcttaatccactgcggcttccccgcccataaagccatcggcacatcatccggccttgcctggccgattgcactctccggcgcaatatcgtatctgctcaacggcctgaatattgcaggattgcccgaagggtcactgggcttcctttacctgcccgccgtcgccgtcctcagcgcggcaaccattgcctttgccccgctcggtgtcaaaaccgcccacaaactttcttctgccaaactcaaaaaatccttcggcattatgttgcttttgattgccggaaaaatgctgtacaacctgctttaa

SEQ ID NO: 42087 - DNA, 957 bp, Neisseria meningitidis
atgattttaacaccgccggacacgccctttttcctccgcaacggcaatgccgacacgattgccgccaaattcctgcaacgccccgcgcccgcataccgccgagagctgcttcccgacagcacgggtaaaaccaaagtcgcctacgacttttcagacggcatttcgcccgatgcgccgctggtcgtgctgtttcacggtttggaaggaagcagccgcagccattacgcggtcgaactgatgcttgcggtacgcgatcggggttggcacggcgtagtcgtccatttccgcagctgcggcggcattgccaacaccgctccggtgttctaccacttgggcgataccgccgaaatcgcctttactttggacacgttcgccgcgcgttaccgtgaaatatacgccgtcggcgtatcgctgggcggcaacgcgctggcaaaatatttgggcgaacagggcaaaaaggcattgccgcaagccgctgccgtcatctccgcccccgtcgatgcagaggcggcaggcagacgcttcgacagcggcatcacgcggctgctctacacgcgctacttcctccgcaccctgatacccaaagcaaaatcgctccaaggttttcagacggcatttgccgcagggtgcaaaacactgggcgagtttgacgaccgcttcaccgcaccgctgcacggctttgccgaccggcacgactactaccgccaaacttcctgcaaaccgctgctcaaacacgttgccaaaccgctgctcctgctcaatgccgtcaacgaccccttcctgccgcccgaagccctgccccgcgcagacgaagtatccgaagccgttaccctgttccagccggcatatggtggtcatgtcggctttgtcagcagcaccggcggcaggctgcacctgcaatggctgccgcagaccgtcctgtcctatttcgacagcttccgcacaaacaggcgttaa

SEQ ID NO: 42088 - DNA, 2433 bp, Neisseria meningitidis
atgcccatcccctttaaacccgtattggctgccgccgccatcgcccaagcgtttcccgcctttgcggcagaccccgcgccgcagtccgcccaaacgctgaacgaaatcaccgttaccggcacgcacaaaacccaaaaactcggcgaagaaaaaatccgccgcaaaactttagacaagctcttggtcaacgacgaacacgacctggtgcgctacgaccccggcatttccgtcgtcgaaggcggcagggcgggttctaacggctttaccatacgcggcgtggacaaagaccgcgtcgccatcaacgttgacgggctggcgcaggcggaaagccgctcttccgaagccttccaagaattgttcggcgcgtacggcaacttcaacgccaaccgcaacacttccgagccggaaaacttttccgaagtaaccatcaccaaaggcgcggactcgctcaaatccggcagcggcgcattgggcggcgcagtcaattaccaaaccaaatccgcaagcgattatgtttccgaagacaagccctaccatttggggataaagggcggcagcgtcggcaaaaacagccaaaaattcagcagcatcaccgccgccggcaggctctttggtttggatgccttattggtttatacccgccgcttcggcaaagaaaccaaaaaccgctcgaccgagggcgatatcgaaattaaaaacgacggatatgtctataacccgaccgatacaggcggacccaacaagtacctgacctatgtagccacaggggttgcgcgctcccaacccgacccgcaagaatgggtaaacaaaagcaccctgttcaagctgggctacaacttcaacgatcaaaaccgtatcggctggatttttgaagactcgcgcaccgaccgttttaccaacgagctgtctaatttgtggacgggtacgaccacgtctgccgcaacgggcgactaccgccaccgccaagacgtgagctaccgccgccgctccggtgtcgaatacaaaaacgaattggaacacggcccgtgggacagcctcaagctgcgctacgacaagcagcgcatcgatatgaacacttggacttgggacatcccgaaaaattacgatttgcgcggcatcaacggcgaggtttaccattcgttccggcatatccgccaaaacaccgcgcaatggactgccgattttgaaaaacaactcgacttttccaaagccgtttgggcggcgcaatacggcttgggcggcggcagaggggacaatgccaactcggattacagctatttcgcaaaactgtacgcccccaaaatcctcgcttccaaccaagccaaaatcacaatgctgatcgaaaaccggtcgaaatataaatttgcctattggaacaatgcgtttcacttgggcggcaacgaccgcttccgcctgaacgcgggcatacgctacgacaaaaacagcagcagcgcgaaagacgatccgaaatacaccaccgccatccgggggcagattccccatttgggttcggaacgcgcgcacgcgggcttcagctacggcacggggttcgactggcggtttaccaagcatctgcacttgttggcaaaatacagcaccggcttccgcgcaccgacttcggacgaaacctggctgctgttcccacaccccgatttctacttgaaagccaacccaaacctgaaagcggaaaaagccaaaaactgggaattgggtctggcgggcagcggcaaagcgggcaacttcaagctctcgggcttcaaaaccaaataccgcgactttatcgaattgacgtatatgggcgtttcgtcagacgataaaaacaaccccagatacgccccgctttcagacggtacggcattggtcagctcgcccgtttggcaaaaccaaaaccgctccgccgcctgggtgaaaggcatagagtttaacggcacgtggaacctcgacagtatcggtttgcccaaagggctgcacaccggcctcaacgtcagctacatcaagggcaaggcaacgcaaaacaacggcaaagaaacgcccatcaacgcgctttcgccgtggacggcggtttacagcctgggctacgacgctccttccaaacgttggggcatcaacgcctacgccacgcgcaccgccgccaaaaagccgtccgacaccgtccacagcaacgacgacttgaacaacccgtggccttatgccaaacacagcaaggcctatacgctgttcgacctttccgcctacctcaacatcggcaaacaggttacgctccgcgccgccgcgtacaacattaccaacaagcagtactacacttgggaatctttacgcagcatccgcgagttcggcacggtcaaccgcgttgacaacaaaacccacgccggcatccaacgctttacctcgccgggcaggagctacaatttcaccatcgaagcgaagttctaa

SEQ ID NO: 42089 - DNA, 900 bp, Neisseria meningitidis
atgaaaaccaattcagaagaactgaccgtatttgttcaagtggtggaaagcggcagcttcagccgtgcggcggagcagttggcgatggcaaattctgccgtaagccgcatcgtcaaacggctggaggaaaagttgggtgtgaacctgctcaaccgcaccacgcggcaactcagtctgacggaagaaggcgcgcaatatttccgccgcgcgcagagaatcctgcaagaaatggcagcggcggaaaccgaaatgctggcagtgcacgaaataccgcaaggcgtgttgagcgtggattccgcgatgccgatggtgctgcatctgctggcgccgctggcagcaaaattcaacgaacgctatccgcatatccgactttcgctcgtttcttccgaaggctatatcaatctgattgaacgcaaagtcgatattgccttacgggccggagaattggacgattccgggctgcgtgcacgccatctgtttgacagccgcttccgcgtaatcgccagtcctgaatacctggcaaaacacggcacgccgcaatctacagaagagcttgccggccaccaatgtttaggcttcaccgaacccggttctctaaatacatgggcggttttagatgcgcagggaaatccctataagatttcaccgcactttaccgccagcagcggtgaaatcttacgctcgttgtgcctttcaggttgcggtattgtttgcttatcagattttttggttgacaacgacatcgctgaaggaaagttaattcccctgctcgccgaacaaacctccgataaaacacacccctttaatgctgtttattacagcgataaagccgtcaatctccgcttacgcgtatttttggattttttagtggaggaactgggaaacaatctctgtggataa

SEQ ID NO: 42090 - DNA, 657 bp, Neisseria meningitidis
atgttggaaattttgttccgccatcaagacttcgtcgccatcaacaaaccgggcggcatatccgtccaccaagacagcggcgagaccggactggcccgaacactcgccatacagttgggcgtagagcgtgtgtggctgctgcaccgattggacaaacagaccagcggcattttactgtttgccctcaacaaagaaagcgcgtccgcccttagcggacagtttgccggcaaaagcatcaaaaaaacctatttggcactgtccgaccgcaagccgtccaaaaagcagggttggattaaaggcggaatggaaaaatccagatgtggaatgtggaagttgacgcgcaatacagaaaatatcgccgttacccgattccacagcatcagtatcgccgaaaaactgcggctgttcatcctagaaccgcatacgggcaaaacgcaccaattgagagtggcgatgaaaagtttgggcagtccgattctgggcgacagcttatacggcggaacagaatccgaaaccatgtttctgtatgcatggaaaatacaatttgactaccaaaaccgacaaatcgaaattgttgcacccttaaaaaacgaatggcagactgaaaatatccatcgggcactggaagaattctgtatggaaaataaaattgactga

SEQ ID NO: 42091 - DNA, 324 bp, Neisseria meningitidis; identical to SEQ ID NO: 37053

SEQ ID NO: 42092 - DNA, 996 bp, Neisseria meningitidis
atgttgagaaaattgttgaaatggtctgccgtttttttgaccgtgtcggcagccgttttcgccgcgctgctttttgttcctaaggataacggcagggcataccgaatcaaaattgccaaaaaccagggtatttcgtcggtcggcaggaaacttgccgaagaccgcatcgtgttcagcaggcatgttttgacggcggcggcctacgttttgggtgtgcacaacaggctgcatacggggacgtacagattgccttcggaagtgtctgcttgggatatcttgcagaaaatgcgcggcggcaggccggattccgttaccgtgcagattatcgaaggttcgcgtttttcgcatatgaggaaagtcatcgacgcaacgcccgacatcggacacgacaccaaaggctggagcaatgaaaaactgatggcggaagttgcgcccgatgccttcagcggcaatcctgaagggcagtttttccccgacagctacgaaatcgatgcgggcggcagtgatttgcagatttaccaaaccgcctacaaggcgatgcaacgccgcctgaatgaggcatgggaaagcaggcaggacgggctgccttataaaaacccttatgaaatgctgattatggcgagcctggtcgaaaaggaaacagggcatgaagccgaccgcgaccatgtcgcttccgtcttcgtcaaccgcctgaaaatcggtatgcgcctgcaaaccgacccgtccgtgatttacggcatgggtgcggcatacaagggcaaaatccgtaaagccgacctgcgccgcgacacgccgtacaacacctacacgcgcggcggtctgccgccaaccccgattgcgctgcccggcaaggcggcactcgatgccgccgcccatccgtccggcgaaaaatacctgtatttcgtgtccaaaatggacggcacgggcttgagccagttcagccatgatttgaccgaacacaatgccgccgtccgcaaatatattttgaaaaaataa

SEQ ID NO: 42093 - DNA, 444 bp, Neisseria meningitidis
ttggtgatgcccgtgaaaaaagttgaaaaaaacatcttggtgctgcacggcgcggacaaaatgttcgagctggtcgacaaggttgaagactatccgcactttctgccgtggtacagcaagaccgaagtcatcgggcgtagcggcaacgaactgaaggcgcggctgtttatggattatatgcacgttcgccaatcgtttgccacgcacaaccgcaacattccgggcagggaaatccgtatggaactgctcgagggtccgttcaaaaccttacgtggaacgtggaaatttatcgatttgggcgacgatatgtgcaaaatcgaattcaatttggaatacgatttttccaatgccgttttgtccgccttaatttcccccgtcttcaaccacctttccaccacgctggtcgaagcgttcgtcaaagaggcagaccgccgttatgcttga

SEQ ID NO: 42094 - DNA, 786 bp, Neisseria meningitidis
atgaaacaaactctgaaaaactggtttgctgccttattgctggcagtgcctatgagtgcagccgtcgccagcggcggcggacactacgaaaaagtcgatatcgacctgcgtgaccaagtcagcctgcagcacggtgcgcaaatctttacaaactactgtttgtcttgccactctgcaagcggtatgcgcttcaaccgtctgaaagacatcggtttgactgacgaagaaatcaagaaaaacctgatgtttaccaccgataatgtcggcgatgtcatgcattcggcgatgaacccgaaagatgcggcaaaatggtttggtgctgctccgcccgatttgacgttgattgcgcgttccaaaggtgcagactacctttacgcctatatgcgcggcttctataaagatccgacccgtccgagcggctggaacaatactgtattcgataaagtcggtatgccccacccgttgtgggagcaacaaggtgttcaagccgttgagttggatgccaaaggtcagccggttatggtaaaagacgaacacggcgagatgaagcctaagctgtattgggaatctaccggtttgcacagccgccgcctgcctaacggcaaagtgatccaaaaagagtacgacgcatatgtacgcgatttggtcaattaccttgtgtacatgggcgaacctgcacaactgcaacgcaaacgtataggctatgtcgtgatgattttcctatttgcggttatgctgcctttggcttacttcctaaataaagaatattggaaagacgtacactaa

SEQ ID NO: 42095 - DNA, 1581 bp, Neisseria meningitidis
atggagccgataatggcaaaaaagaacaataaaactaaaatccaaaagcccgaagctgcattgcagacggacgtggctcaaattacggcgaccggtcgggttatcgccgagcatccgtccaattttattacgccgcaaaagatgcgggccctcttcgaggacgcagaaagcggcgacatccgcgcccaacacgagcttttcgcggacattgaggagcgcgacagcgacatcgcggcaaatatggggacgcgcaaacgcgcgctgctgacgctcaactggcgcgtcgccccgccgcgaaatgcgacgcccgaagaagaaaagctgtccgaccaagcctacgaaatgatggacagcctgcctaccctcgaagacctgattatggatttgatggacgcggtagggcacggattttctgcgttggaggtcgagtgggtattttcagacggcctttacctaccccgaaactttatccaccgcccgcaaagctggttcaaatgggacaaagacaacgggctgctgctgcgtacccgcgaaaatccggaaggcgaagcgttgtggccgctgggctgggtcgttcatacccaaaaatcgcgcagcgtccagcaggcgcgcaacgggcttttccgcacgctttcctggctgtatatgttcaaacactacgccgtccacgattttgccgagtttttggagctgtacggcatgcccatccgtatcggcaaatacggcgcgggcgcaaccaaagaggaaaaaaacaccctgcttcgagcggtggcggaaatcggtcacaacgcggcaggcatcatgccagaaggtatggaaatagagctccacaacgcggcaaacggtacgacggcaaccagcaatccgtttttgcagatggccgactggtgcgaaaaatcggcggcgcggctgattttggggcaaacgctgaccagcggtgcggacggaaaatccagcaccaacgcgctgggcaatatccacaacgaggtacgccgcgatttgctggtgtcggacgcaaaacaggtggcgcaaaccatcacaagccaaatcatcggaccgttcctgcaaatcaactatccccatgccgacccaaaccgcgtgccgaaatttgaatttgacacgcgcgagccgaaagacatcgcggtctttgccgacgctatcccgaaactggtggatgtcggcgtacaaatccccgaaagctgggtgcgcgacaaactggtcattccagatgtgcaggagggtgaggctgtgttggtgcggcaggtaccggacaatccggtaaacagaactgcattggcggctttatccgcccacaccgtaccatctaaggctacgggcaggcatcaggaaatattggacggcgcgttggatgacgcgctggttgagcccgatttcaattctcagctcaacccgatggtgcgtcaggcggttgccgcacttaatgcttgcaacagctacgaggaggcagatgccgcactgaatgcgctttatccgaatttggacaacgcgaaactgcgtacctatatgcagcaggccttgtttatcagcgatattttgggacaagaccatgcccgcgcctga

SEQ ID NO: 42096 - DNA, 759 bp, Neisseria meningitidis
atgaaaatcacccccgtcaaagccctaaccgacaactacatctggatgatacagcacggcaaccatgccgtctgcgtcgacccttccgaaccctcgcccgtcttggaattcctcgtccgcaaccgcctcatgcttgcccaaacatgggtaactcacccccatcccgaccacgagggcggtgcggcggcactctggcgcggctacatggaatcgcccgtttacggcgaatccgacatcgaagcagcaacccacaccgtaaccgccggcacccaattcaccttcggcgacggacaggttaccgtttgggcaacacccggccacacagaccgccacaccagctaccttctcgaaacttcagacggcatacacgtcttttgcggcgacacccttttttccgccggctgcggacgcgtgtttaccggcacaatcgaacagctttacgacagcttccaacgcttcaaccgcctgcctgaaaacaccctgttctatccggcgcacgaatacaccgccgccaacctgcgtttcgccgcccatatcgagccggacaacgccgacattcagacggcactgaaagcggcggcgcatacgcctaccctgcccgttaccctcgcgcacgaacgccgcgtcaatccgtttttgcgcgtcgacctgccgcacgtcagagaccgcgccgaggcattgagcgggaaaacgttaaacagcagcctcgatacctttgtcgcgctgcgtgaacttaaaaaccaataccggacgaaataa

SEQ ID NO: 42097 - DNA, 1071 bp, Neisseria meningitidis
atgaacctgatttcacgttacatcatccgtcaaatggcggttatggcggtttacgcgctccttgccttcctcgctttgtacagcttttttgaaatcctgtacgaaaccggcaacctcggcaaaggcagttacggcatatgggaaatgctgggctacaccgccctcaaaatgcccgcccgcgcctacgaactgattcccctcgccgtccttatcggcggactggtctccctcagccagcttgccgccggcagcgaactgaccgtcatcaaagccagcggcatgagcaccaaaaagctgctgttgattctgtcgcagttcggttttatttttgctattgccaccgtcgcgctcggcgaatgggttgcgcccacactgagccaaaaagccgaaaacatcaaagccgccgccatcaacggcaaaatcagcaccggcaataccggcctttggctgaaagaaaaaaacagcattatcaatgtgcgcgaaatgttgcccgaccatacgcttttgggcatcaaaatttgggcgcgcaacgataaaaacgaattggcagaggcagtggaagccgattccgccgttttgaacagcgacggcagttggcagttgaaaaacatccgccgcagcacgcttggcgaagacaaagtcgaggtctctattgcggctgaagaaaactggccgatttccgtcaaacgcaacctgatggacgtattgctcgtcaaacccgaccaaatgtccgtcggcgaactgaccacctacatccgccacctccaaaacaacagccaaaacacccgaatctacgccatcgcatggtggcgcaaattggtttaccccgccgcagcctgggtgatggcgctcgtcgcctttgcctttaccccgcaaaccacccgccacggcaatatgggcttaaaactcttcggcggcatctgtctcggattgctgttccaccttgccggacggctcttcgggtttaccagccaactctacggcatcccgcccttcctcgccggcgcactacctaccatagccttcgccttgctcgccgtttggctgatacgcaaacaggaaaaacgttga

SEQ ID NO: 42098 - DNA, 1356 bp, Neisseria meningitidis
atgagtatccaatccggcgaaattttagaaaccgtcaaaatggttgccgaccagaattttgatgtccgcaccattaccatcggcattgatttgcacgactgcatcagcagcgatatcaatgtgttgaaccaaaatatttacaataaaattaccacagtcggcaaagacttggtcactacggcaaaatatctgtctgccaaatacggcgtaccgattgtgaatcagcgcatttccgttacgccgattgcccaaatcgcggcggccacccatgctgattcttacgtcagcgtggcgcaaactttggataaagctgccaaagccatcggtgtgtcttttatcggcggtttttccgcgttggtgcaaaaagggatgtcgccttcggatgaggtgttaatccgctccattcccgaagcgatgaagactaccgatattgtgtgcagctccatcaatatcggcagtacgcgtgccggtatcaatatggatgcggtcaagctggcgggcgaaaccgtcaaacgcacggcggaaatcacgcccgaaggtttcggctgcgctaaaattgtcgtgttctgcaacgcggtggaagacaacccgtttatggcgggcgcgtttcatggttcgggcgaagcggatgccgttatcaatgtcggcgtatccggcccaggtgtcgtaaaagccgcgttggaaaattcagatgcaacgacattgaccgaagttgcggaagtagtgaagaaaactgctttcaaaattacccgcgtgggcgaactcatcggccgcgaagcctcaaaaatgctgaatatcccgtttggtattctcgacttgtcgctggcgccgacccccgccgtcggcgactcagtggcacgcattcttgaagaaatgggcttgagcgtctgcggtacgcacggcacaacagcagctttggcattgctgaacgatgccgtgaaaaaaggcggcatgatggcttccagcgcggtcgggggtttgagtggcgcgtttatccccgtttccgaagacgaaggtatgattgccgccgccgaagcaggcgtgctgacgctggacaaactcgaagccatgaccgccgtttgttcggtcggcttggatatgattgccgttcccggcgacacgcccgcgcacaccatttccggcatcattgccgacgaagccgccatcggcatgatcaacagcaaaaccactgccgtgcgcattattccggtaaccggtaaaaccgtcggcgacagcgtcgagttcggcggcttgttgggctacgcgcctgtgatgccggtcaaagaaggttcgtgcgaagtattcgtcaaccgaggcggcagaattccggctccggttcaatcgatgaaaaactga

SEQ ID NO: 42099 - DNA, 762 bp, Neisseria meningitidis
atggatgcgaataaagagccgaattgggaaaaacgtttggaaaacctgcgtcagacgcgccgtatgaaggcagtgccgacttacgcgccgctgtcccgcccctctgaaaccggaacggacgcgcctgtgccgaaactggacgatgagagccgagcccgtgtgttgaaggcgtatctgaaaaaatggcaggaggaacacaatgccgccgttgccgattgcggcgaggaagtcgaaaccgacccgatgatcgtccttcaggaaaactggctcaacgcgcaggcttccctgcaaatgtcggtttcggaaaaacacatcgaatcgcggcggagaatccggtttgataccaaaaaagacagtgtcgaatttgaaaccggacagattgaaagcggggaaaacgccgacgaggcagaatccggcacgaatgagccggcggtttcggaaaacggggaaaacgatgcggaagaaacgttgatgcccgtccaaatcaatatcctgaacccgaaagccgtcaaccggcgcgaagtgttctgcctgtccgaacaggagctgaccgaacggctgatcaaacgcctgcgcccgcatctgaccgataccgtcaacggcatcatccgaacggcggtgcaaaagcagatggcggttttcacctatcagctccagcagatgctgcacgagcaggcgggggcggtagtcgaagacgtgttggaacacgatgtccgcaaaatcctcaacgacatcaagtacgagttaaaatacaaacgctga

SEQ ID NO: 42100 - DNA, 285 bp, Neisseria meningitidis
atgaaattgttggccgcattgattccgcttttgatgagcgtggcaggccgtatattgactgcattaggcttgatggcggtaacctattcaggggtggatagattggtagcccattttcagcaggcgataaccaatagcataacgggcgcgcctcaagcgatgttgcagcttttttatataagcggcggtggaaccgttcttaatatcctgtttggcgcgatcgcctttattctgtcattcaaacaaatgacaaaactagcaacctcaatcgggaagaaaaaataa

SEQ ID NO: 42101 - DNA, 345 bp, Neisseria meningitidis
atgtttttagatgatgtaaatgtttttttagatgatttaaatgtttttttagatgatttaaatactaatccaatcactgacgaatggtatatgtccaattttgccgataaacatattaaaattttggaaagttacgaagcctttgatattctaaaacaatttgttgattacatgattgaagaatatgatgaaaaatcagaatatgaaatcatggaaatattgagacaattaaaatatcaagcagataccaacgaaaaattttatacaaatacacagaaacagaaaattgtagaattatataaacaagaaattagtcaggatattttaaatgaaatctttagataa

SEQ ID NO: 42102 - DNA, 2364 bp, Neisseria meningitidis
atgcaattctcctactcatggctgaaaacccaagccgataccgaactttcctccgataagctggaacatctgttaacgatgtccggcttggaagtggaagaggctgaaactgccgcgcctgcgtttgcgggcgtggtgattgccgaagtgaaatccgttgaaaaacatccggatgcagaccgtttgaacgttacccgagttgatgcgggtacgggcgggttggtgcagattgtgtgcggtgcgccgaatgtgaaagcgggcatcaaagtgccgtgttcgctgccgggtgccgttttgccgggtaatttcaaaatcaagccgaccaaaatgcgcggcgaggtgtcggacgggatgttgtgttccaccgacgaactcggtctgcccgacgacggtgtgaacggcctgcacattctgcctgaagatgcgcccgtcggtaccaatatccgcgaatacttggatttggacgatacgctgtttacgttgaaaattacgcctaaccgcgccgactgcttgagcatcaaaggcattgcgcgcgaagtgtccgcattgacggggtgcgcgttcaggcagcccgaaatccataccgcgccgatcacgggcagtcgaaaacagcccgtgcagattaacgcgcctgccgattgcggccgttttatcagccgtgtgattgaaaacgtgaacgcgcgcgctactacgccggattggatgaaacaacgtttggagcgcagcggcatccgcagtatttccgcgctggtggacatcggcaattatgtgatgctggaaatcggtcagccgatgcacgtttttgatgccgacaaactttccggcagcctgcacatccgccgcgcgcgcgaaggggaaacgctggaatgcctgaacgagaaaaccgtttccctgtctgaaaacacgctggtcgtggcggacgaaaaaggcgtgttgagtttggcgggcttaatgggcggcgcggcgagcgcggtttcagacggcacgcaaaatatcgtgctggaagcggcttggtttgcgcccgaaatcatcgccggcaaatcgcgccaatacggtttcggttcggattcgtcgttccgcttcgagcgcggcgtggattaccgtttgcaggcggatgccattgaacgtgctaccgaattggtgttgcagatttgcggtggtgcggcaggcgagatggtggaagcgcaaggcgaattgcctgaagcgaagcaggttggattgcgtttggaccgtctgaaaaccgtgttgggcgtggacattcctgccgaacaggtggaaaccattttgcaacacttgggcctgcagcccgagaaaacggcggaaggcttccgcgttaccgcgccgagcttccgttttgacatcgaaattgaggctgatttgattgaagaaatcggacgcgtttacggctatgaaaacatccccgacgattacacgtcaggccgtctgaaaatgctggaactgcccgaaacacgccgcccgcgttttgccgtttacaacgaaatggcggctcgcggttaccgcgaagtggtcagctatgccttcgttgacgagcagtgggaacaagattttgccgccaacgccgaccccatccgcctgcaaaacccgctggcggcgcagtatgccgtgatgcgttccacgctcatcggcggcttggtggaaattctgcaaaacaatctgaaccgcaaacaaaaccgcgtgtgcgtgtttgaaatcgcccgcgtgttcagcaaaggttcagacggccagtttgtccaaaacgaacgcatcggcggattgtggtacggcgcggtcatgccggaacaatggggcgggaaaacgcgcaatgcggatttttacgacatcaaggcggacgtggaaaatctgttgaaaaacaaagcagtcgagttcgttaaaaccggacatcccgccctgcatcccggacgtgccgccaatatcgtttcagacggcaaagtcatcggctttgtcggcgaactgcatccgaaatggctgcaaaaatacgacctgccgcaagcgccgctggtatttgaaatcgatatggcggccgtgttggaatgcgggaaaacgcgctatcgggtcgtatcgaaattccagccggtgcgccgcgatttggcgtttgtgatgccggaagctatgagccatgatgatttgctgcttgtcttgaaaggcgcggcaaacaagttggtacaggaaatcagcgtgtttgacgtgtatcgcggcacgggactgcccgaagggatgaagagcgtggcggtcaaagtgattttgcaggatatggaaaacacgctgacggatgaggcagtcgagccgcttatcggaaaactgattggcgcggcaacggcggcaggggcgcggcttcgcagttaa

SEQ ID NO: 42103 - DNA, 408 bp, Neisseria meningitidis
atggaaattcgggcaataaaatatacggcaatggctgcgttgcttgcatttacggttgcaggctgccagttggcgggttggtatgagtgttcgtccctgtccggctggtgtaagccgagaaaaccggctgccatcgatttttgggacattggcggcgagagtcctccgtctttagaggactacgagataccgctttcagacggcaatcgttccgtcagggcaaacgaatatgaatccgcacaacaatcttacttttacaggaaaatagggaagtttgaagcctgcgggctggattggcgtacgcgtgacggcaaacctttgattgagacgttcaaacagggaggatttgactgcttggaaaagcaggggttgcggcgcaacggtctgtccgagcgcgtccgatggtaa

SEQ ID NO: 42104 - DNA, 2751 bp, Neisseria meningitidis
atgaccgacgcaaccatccgccacgaccacaaattcgccctcgaaaccctgccggtaagccttgaagacgaaatgcgcaaaagctatctcgactacgccatgagcgtcattgtcgggcgcgcgctgccggacgttcgcgacggtctcaagccggtacaccgccgcgtactgtacgcgatgcacgagctgaaaaacaactggaatgccgcctacaaaaaatcggcgcgcattgtcggcgacgtcatcggtaaataccacccccacggcgataccgccgtatacgacaccatcgtccgtatggcgcaaaatttcgctatgcgttatgtgctgatagacggacagggcaacttcggatcggtggacgggcttgccgccgcagccatgcgctacaccgaaatccgcatggcgaaaatttcccacgaaatgctggcagacattgaggaagaaaccgtcaatttcggcccgaactacgacggtagcgaacacgagccgcttgtactgccgacccgtttccccacactgctcgtcaacggctcgtccggcatcgccgtcggcatggcgaccaatatcccgccgcacaacctttctgataccgtcaatgcctgcctgcgcctgctcgatgcacccgacaccgaaatcgacgaactgatcgacattatccaagcccccgacttcccgaccggggcaaccatctacggcttgagcggcgtgcgcgaaggctataaaacaggccgcggccgcgtcgttatgcgcggtaagacccatatcgaacccataggcagaaacggcgaacgcgaagccatcgttatcgacgaaatcccctatcaggtcaacaaagccaagctggtcgagaaaatcggcgatttggttcgggaaaaaacactggaaggcatttccgagctccgcgacgaatccgacaaatccggtatgcgcgtcgttatcgagctgaaacgcaacgaaaatgccgaagtcgtcttaaaccaactctacaaactgactccgctgcaagacagtttcggcatcaatatggtggttttggtcgacggacaaccgcgcctgttgaacctgaaacagattctctccgaattcctgcgccaccgccgcgaagtcgttacccgacgtacgcttttccggctgaagaaggcacgccatgaagggcatattgccgaaggcaaagccgtcgcactgtccaatatcgatgaaatcatcaagctcatcaaagaatcgcccaacgcagccgaggccaaagacaaactgcttgcgcgcccttggcgcagcagcctcgttgaagaaatgctgacgcgttccggtctggatttggaaatgatgcgtccggaaggattggctgcaaacatcggcttgaaagagcaaggttattacctgagcgagattcaggcagatgctattttacgcatgagcctgcgaaacctgaccggcctcgatcaagaagaaattgtcgaaagctacaaaaacctgatgggtaaaatcatcgactttgtggatatcctctccaaacccgaacgcattacccaaatcatccgcgacgaactggaagaaatcaaaaccaactatggcgacgaacgccgcagcgaaatcaacccgttcggcggcgacattgccgatgaagacctgattccgcaacgcgaaatggtcgttaccctgacacatggcggctatatcaaaacccagccgaccaccgactatcaggcgcagcgtcgcggcgggcgcggcaaacaggcggctgccaccaaagacgaagactttatcgaaaccctgtttgttgccaacacgcatgattatttgatgtgctttaccaatttgggcaagtgtcattggattaaggtttacaaactgcccgaaggcggacgcaacagccgcggccgtccgattaacaacgtcatccagttggaagaaggcgaaaaagtcagcgcgattctggcagtacgcgagttccccgaagaccaatacgtcttcttcgccaccgcgcagggaatggtgaaaaaagtccaactttccgcctttaaaaacgtccgcgcccaaggcattaaagccatcgcgctcaaagaaggcgactacctcgtcggcgctgcgcaaacaggcggtgcggacgacatcatgctgttctccaacttaggtaaagccatccgcttcaacgaatactgggaaaaatccggcaacgacgaagcggaagatgccgacatcgaaaccgaaatttcagacggcatcgaagatgaaaccgccgacagcgaaaacgcactgccgagcggcaaacacggtgttcgcccgtccggtcgcggcagcggcggtttgcgcggtatgcgcctgcctgccgacggcaaaatcgtcagcctgattaccttcgcccctgaaaccgaagaaagcggtttgcaagttttaaccgccaccgccaacggatacggaaaacgcaccccgattgccgattacagccgcaaaaacaaaggcgggcaaggcaatattgccattaacactggcgagcgaaacggcgatttggtcgccgcaaccttggtcggcgaaaccgacgatttgatgctgattaccagcggcggcgtacttatccgcaccaaagtcgaacaaatccgcgaaaccggccgcgccgcagcaggcgtgaaactgattaacttggacgaaggcgaaaccttggtatcgctggaacgtgttgccgaagacgaatccgaactctccgacgcttctgtaatttccaatgtaaccgaaccggaagtcgagaactga

SEQ ID NO: 42105 - DNA, 390 bp, Neisseria meningitidis
atgtggaaaatcataaaagaggatagtgatgatttagaatttgcaattaaatgcttattctctcagtctattgatttaaatgaattcaagttatggattgaacaagtaatacgcgatatgcccatcgaggacatccctttttatatttttgatttggcggattttgatgggggaattgccgatattgacaatattgtaggttttgtttcaagttgcagactatcaaaatcgaaaaaaaatgccttgaccggcattgccttcttaagggggatagatgtctatgatccgcctatttcaaaagaaaaagcattaaaagccttagagaaacatcctgaaatttatcagaaatttcagcatttctttccgtttgtagaactgcccccgctttaa

SEQ ID NO: 42106 - DNA, 666 bp, Neisseria meningitidis
atgacagtattaagcaaagagcaggttctatccgcatttaaaaaccgtaaatcatgccggcattacgatgcggcacgcaaaatcagtgccgaggattttcagtttattttagaactcgggcgtttgtcgcccagttcggtcggttcggagccttggcagtttattgtggttcaaaaccctgaaatccgacaggcaatcaagccgttttcttggggtatggcggatgctttggataccgccagtcatttggtggtgtttttggcgaagaaaaatgcccgctccgacagcccgtttatgttggaaagcctcaaacggcgcggcgttaccgaaccggatgccgtagcaaaatctttggcaaggtatcaggcgtttcaagctgacgacatcaagattttggacgattctcgcgccttgtttgactggtgttgccgtcagacctatatcgcgttagccaacatgatgacgggtgcggcgatggcaggtatcgattcctgcccggtggaaggtttcaactatgccgagatggagcgcatattgtccgggcagtttggtttgttcgatgcggcagaatggggcgtgtccgtcgccgcgacattcggctaccgcgttcaggaaatcgccacgaaagcgcgtaggcccttggaagaaaccgttatttgggcataa

SEQ ID NO: 42107 - DNA, 1338 bp, Neisseria meningitidis
ttgctttttctttatcgggacggaaccgtgctgactttagatgcgtttgagcaatgcttgaaggattgttttcctcaaggtctgaatggaaaaaaaacagcggtggcattaagcggcggcttggattccgtcgttttgctgcatctgcttgtccgcgccggaaaaaagggcggttttattccggatgcattgcatatccatcacggcttgagtccccgtgccgacgattgggcagatttctgccaaaactattgcgatatgctcggggtggggctggaaacggttaaggtctgcgtggaaaaaaacggtttgggcatcgaggcggcggcaaggcaaaagcgttatgccgcgtttgccgaaaaaggctttgacgttttggcgttggcgcaccacagggacgatcaaatcgaaacctttatgctggcggtcgcgcgcggcggcggtttgcgcgctttggcggctatgcccgccgtccgcccttttggggaaaaaggcatcatctggcggcccttgctgcctttttcacgccaagatatatgggattatgcccaaaaacacggtttgccgaatatcgaggatgaaagcaataccgatacggcttatttgcgaaaccgcttccggcaccgtattttgcccgaactttcggcgcagattccccatttcgggcggcatgtgctgaacaatgtccgcgctttgcaggaagatttggctttgttggacgaggtcgtcgttcaggactgccgttgggtttgcggggccggttatttcgatacggcgcggtggctgacgttttccccgcgccggaaaacccatattttgcggcattttctgaaggaaaacggcattcccgtgccgaatcagaatgcccttgccgacattgcccgggttttgacggaggcaaaaaccggacgttggaacttgcaaggctttgaattgcatcattatgcaggcaggctgtttgtgttccgactggaaaaaacggataaactgcggtttttgaaagacaggcagataagcggaaatttaagggaaatattgacggggcagggatttgtgttgaagcggcatccgtttgggcttcctgagcatcttttggagcaggacggaattttgaggacggtagcggcatcggatacgttggccatgggcggcatccataaggatgtgaaaaaaatccttcaggggaaacgggttttgcctgtcctgcgcccaatttggccgcttgttgccgacagcggaaaccgtccattggcgttggcaaactgttgtgcggatttccaatactcggtttcagacggcattttgcccgtccatcctgactttcccattttattttga

SEQ ID NO: 42108 - DNA, 921 bp, Neisseria meningitidis
atgacaaagttatacgcagaaatcgccaagatggagacgcaggacgacgacacggtcaaggtttggggttacgcttcaagcgaggaaatcgattcggacggcgaagtcatcgcggcggcagctatgaaggcggcgattcccgattatatgaagtttggcgcggggcgcgagatgcacggctcaaacgctgcgggaacggcaattgaaatcaacgtggaagatgacggcagaacctttttcgtggcgcatatcgtcgatcccgttgccgtgacgaaggtcaaaacaggcgtttacaagggcttttccatcggcggcagcgttaccgcccacgatgagttgaacaagtcgcaaatcacgggtttgaagctgacggaaatcagcttggttgaccgacccgccaatcccgatgcggtgtctacctgctttaaggcggacaaaggtgcggaagcggtaaacaacgatacagaacataatgctacatattttagccatttcccttccaaacaaaaaagcaccgacggcggccgatgccctttcctttacaggttcccctattttttatccgcgggcagcaccggtttggctggggcttttggtgcgggcgcgccgaccgaagcctggtccttcagcttcgccagcaccgcagggccgatgccctttaccttggtcaaatcgtctacagacttgaacgcaccgttttgcgcacggtattccgcaatggccttcgccttcgccgggcctatgcccggcagcgcctccaactcctgctgcgaagccgcattgatgtttaccgccgcaagggagaaggcgcaggagaacagcatacagaacagcacgaacattttcttcatggtttttcctttaagggttgcaaacaataaaccgcatcttgcgacgataaaacgagtcattctaaaatga

SEQ ID NO: 42109 - DNA, 936 bp, Neisseria meningitidis
atggaactctttaaaatcaaacgcgatattccgtttatgagctacggcaaactgacgaccttcatttcgttggttacgtttatcgctgccgtgttctttttggttaccagaggtctgaatttctctgtcgaatttaccggcggtacggtaatggaagtccaatatcagcagggtgcggatgtcaataagatgcgcgaacgcctcgatacgctgaaaataggtgatgtacaggttcaggcattgggtacgaacaaacacatcatgatccgcctgccgaacaaagaaggtgttacttccgcacagttgtccaatcaggttatggatttgctgaaaaaagacagtcccgacgttaccttgcgccaagtcgaatttatcggcccgcaagtcggtgaggaattggtaagtaatggattgatggctttaggttttgtcgttatcggcatcattatttacctgtcgatgcgttttgaatggcgttttgccgtatctgccattatcgccaatatgcacgacatcgtgattattctcggctgctttgccttcttccaatgggaattttcgctgaccgtcttggcgggtatccttgccgtattgggctattctgtgaacgaatccgtcgtcgtcttcgaccgtatccgtgaaaacttccgcaagccggcgatgcgcggacatgccgtgccggaagtcatcgacaacgcgattaccgcaacgatgagccgcaccatcattacccacggttcgaccgaggcgatggtcgtatccatgctggtgttcggcggtgcggccttgcacggcttttctatggcgttgaccattggcatcgtgttcggcatttattcttccgtattggttgccagcccgcttctgctaatgttcggtttgagccgcgacaatatcggtaaagaaccgaagaagaaagaagaaatcgtggtttga

SEQ ID NO: 42110 - DNA, 846 bp, Neisseria meningitidis
atgctcagttacagacacgcattccacgccggcaaccacgccgatatgctcaaacatttcaccttgtttttagtgctgcaatatttcaaccgcaaagacaagccctactggtacatcgacacgcacggcggcgcgggtgtgtacaatctcgaaggcagcgaggcgcagaaagtcggcgaataccgacaaggcatcgccctgctccgacaggcgcaaaacctgcctgccgaactctctgactttgccgcgcacatacaaaaaatcctgccctcgcccaaactttactgcggttctccgtggctggcgcaatcgctgacccgcgtcggcgacaaattacgcctgtttgagctgcaccccaccgactttgtccatctgcaaaacaatatgggcgaagcaggattgggcaaacgcggacaagtattacgcgaagacggttacaaagggctgatttccctgctgccgcccccgccgcgccgcgccaccgtcctcatcgacccgccctatgaggaaaaacaggactaccggcgtgtaacggaaacgctgaaagccgctttaaaacggtttgagtccggctgttatctcatttggtatccctgcctcagccgcgaagaaagccgcaagctgcccgaagaattgaaaaaactcctgcccgacaactaccttcacgccgaacttcacgtccacgcgccgaaagccgacggtttcggtatgcacggcagcggaatgttcgtcatcaatccgccctatctgttggcggaacaattggcggcaaacctccccgccctgacgcggctgctggcgcaagacgaaggctcgcgctaccttttggacagcaaaatccgctga

SEQ ID NO: 42111 - DNA, 1443 bp, Neisseria meningitidis
atgaactggtctgatttgaatttaatgcccgccatgcccgaaatcgtgctgctgtcgctgctggtgttattgttgctggcggacttgtgggtcagtgatgacaaacgcccgtggacgcattacggcgcgttggcaacggtggcggttacggctgtggtgcagttggcggtgtgggaacagggcagcacgtcttcgttcaacgggatgtatattgcagacggtatgtcgcgtttggcaaaaatggttttatatgccttgacctttgccctgtttgtctatgccaagccctacaaccaagtgcgcggtatttttaaaggcgagttttacaccctgtcattgtttgccctgttgggtatgagtgtgatggtgagcgcggggcattttttaactgcctatatcggtttggaactcttgtcgcttgccctttacgccctgattgccctgcgccgcgattccggctttgccgccgaagccgccttgaaatattttgttttgggcgcgctggcatccggcctgctgctctacggtatttctatggtttacggcgcaaccggttcgctggaatttgccggcgtgctcgcctcttccttcaatgaagaagccaacgaatggctgttgaaactgggtttggtgtttatcgtcgtcgccgtcgcgttcaaactcggtgcggtgccgttccatatgtgggtgcccgacgtgtatcacggcgcgcccacttctgttaccgccttggtcggcactgccccgaaaatcgccgccgtcgttttcactttccgcatcctcgttaccgggctgggaaccgtgcatcatgactggtctctgatgtttgccctgcttgccgccgcctcgctgctggtcggcaaccttgccgccatcatgcagaccaatatcaaacgtatgttcgcctattccaccgtatcgcatatgggtttcatcctgttggcgtttatggcgggcgcggtcggctttgcggcgggcctctattacgccattacctacgcgctgatggcggcggcagggttcggagtgttgatggtgttgtcggacggggacaacgagtgcgaaaacatcagcgatttggcagggttgaaccaacaccgcgtatggcttgcctttttgatgctgctggttatgttctctatggcgggcattccgccgctgatgggtttttacgccaaattcggcgtgattatggcactcttgaaacaaggccatgtttggttgtctgtatttgccgtcatcatgtcgctgattggtgcgttctactacctgcgcgtggtcaaagtcatctacttcgatgtgcctgatcatgaccagccggtcggcagcaactatgccgccaaatttgttctgacggtcaatgccttcttgctgctcctgtggggcatcatgccgcaaaccgttatcgactggtgcgccaaggcgttggagaacacgctgtaa

SEQ ID NO: 42112 - DNA, 486 bp, Neisseria meningitidis
atgagatttttcggtatcggttttttggtgctgctgtttttggagattatgtcgattgtgtgggttgccgattggctgggcggcggctggacgttgtttttgatggcggcaggttttgccgccggcgtgctgatgctcaggcatacggggctgtccggtcttttattggcgggcgcggcaatgagaagcggcgggagggtatccgtttatcagatgttgtggcctatccgttatacggtggcggctgtgtgtctgatgagtccgggattcgtatcctcggtgttggcggtattgctgctgctgccgtttaagggaggggcagtgttgcaggcaggaggtgcggaaaattttttcaacatgaaccaatcgggcagaaaagagggcttttcccgcgatgacgatattatcgagggagaatatacggttgaagagccttacggcggcaatcgttcccgaaacgccatcgaacacaaaaaagacgaataa

SEQ ID NO: 42113 - DNA, 870 bp, Neisseria meningitidis
atgtttatgaacaaattttcccaatccggaaaaggtctgtccggttttttcttcggtttgatactggcgacggtcattattgccggtattttgttttatctgaaccagagcggtcaaaatgcgttcaaaatcccggcttcgtcgaagcagcctgcagaaacggaaatcctgaaaccgaaaaaccagcctaaggaagacatccaacctgaaccggccgatcaaaacgccttgtccgaaccggatgctgcgacagaggcagagcagtcggatgcggaaaaagctgccgacaagcagcccgttgccgataaagccgacgaggttgaagaaaaggcgggcgagccggaacgggaagagccggacggacaggcagtgcgtaagaaagcgctgacggaagagcgtgaacaaaccgtcagggaaaaagcgcagaagaaagatgccgaaacggttaaaaaacaagcggtaaaaccgtctaaagaaacagagaaaaaagcttcaaaagaagagaaaaaggcggcgaaggaaaaagttgcacccaaaccaaccccggaacaaatcctcaacagcggcagcatcgaaaaagcgcgcagtgccgccgccaaagaagtgcagaaaatgaaaacgtccgacaaggcggaagcaacgcattatctgcaaatgggcgcgtatgccgaccgtcagagcgcggaagggcagcgtgccaaactggcaatcttgggcatatcttccaaggtggtcggttatcaggcgggacataaaacgctttaccgggtgcaaagcggcaatatgtctgccgatgcggtgaaaaaaatgcaggacgagttgaaaaaacatgaagtcgccagcctgatccgttctatcgaaagcaaataa

SEQ ID NO: 42114 - DNA, 924 bp, Neisseria meningitidis
atgacgaaaaccgaaccgaacaacgcccaactcgactggttggaatccgaatccatccacatcatccgcgaagtggcggcagaatgcgaaaaccccgccctgctcttttccggcggcaaagattccgtggtcctgctcgccctcgcctgcaaagccttccggctgggcagccggccggtgaaactgcccttcccgctggtgcatatcgacacgggacacaactaccccgaagtgattgccttccgcgacgcgcaggcggcaaaactcaatgcccgcctgatagtggggcgcgtggaagactccattgccaaaggcacggtggtcttacgcaaagaaaccgattcgcgcaatgcggcacaggcggttaccttgttggaaaccatcgaggcaaacggcttcgacgcgcttatgggcggcgcgcggcgcgacgaagaaaaagcccgcgccaaagaacggattttctcgttccgcgacgagttcggacaatgggatccgaaggcgcaacgccccgagctgtggtcgctgtacaacaccaggctgcacaaaggcgaaaatatgcgcgtcttcccgatttccaactggacggaactcgacatctggcaatacatcgcccgcgaaaacctcgagctgccgccgatttattacagccacaggcgcgaagtggtcagacgcagggggctgctggtccctgtaacgccgctcaccccgaaaatgccgtctgaaacctccgaaatccttgatgtccgcttccgcaccgtcggcgacatcagctgcacctgcccggtagaaagcaccgcgtccacgccgacggagattatcagagaaacagcggttgccgacatttccgaacgcagcgcgacccggctggacgatcaggcaagcgaggcggcaatggaaaaacgcaaaaaagaaggctatttctaa

SEQ ID NO: 42115 - DNA, 369 bp, Neisseria meningitidis; identical to SEQ ID NO: 37026

SEQ ID NO: 42116 - DNA, 588 bp, Neisseria meningitidis
ttgaatattaaactgaaaaccttgttattgcccttcgccacgctggcattgtgcaccaatgcttttgccgccccgcccagcgacgcgtcgttggcgcgttggctggatacgcagaattttgaccgggatatagaaaaaaatatgattgagggctttaatgccggatttaaaccgtatgcggacaaagcccttgccgaaatgccggaagcgaaaaaagatcaggcggcagaagcctttaaccgttatcgtgagaatgttttgaaagatttgattacgcccgaagtgaaacaggctgtccgcaatactttattgaagaatgcccgtgagatatacacgcaagaagaaattgacggcatgattgccttttacggttcgcctgtcggtcagtccgtcgttgccaaaaatccgcgcttaatcaagaaatcgatgagtgaaatagcggtatcttggactgcattgtcagggaaaatcgcgcaacatcatctgcccgagtttacggaagagttgcggcgcatcatctgcggcggtaaaaatcccgatgcgggctgtaaacaagccggacaggttgggaaaaggcatcagaaataa

SEQ ID NO: 42117 - DNA, 708 bp, Neisseria meningitidis
ttggtcaaaacggcagacggctacaaagccattgcccgtatccgaaccggcgaccgcgtcttcgccaaggacgaggcaagcggaaaaacgggatacaaacccgttaccgcccgatacggcaatccgtatcaagaaaccgtttacattgaaatttcagacggcatcggcaacaaccaaaccctgatttccaataaaatccacccgttttacagtcaaggaaaatggatacaggcaggtcgtctgaaaaaaggcgacaccctgctttccgaaagcggcgcaaaacagacggttcaaaacattaccttcaaacagcagccgctcaaagcctacaatctgaccgtcgccgattggcatacctacttcgtcaagggcagtcaggcggaaacggaaggggtttgggttcataatgattgtccgtatgataaaggcaaccaacgatataaagacgcttcttatcatggcaaaaatgataattctgtgaaaagtagagcaccaacaaacggacaagcagctcttgataattccgttcaagttaaatcaacttctcctcgaagagttggggttgataaagccaataatgaaatcgttgtattaaacaaaactcaaacttttaataacggttctgcggaatatcacgggcatgtcagaagttggcaagatttgcataccgatcagaaaaatgctttaaaaaaagcaggattggattag

SEQ ID NO: 42118 - DNA, 1287 bp, Neisseria meningitidis
atgagcgcaatcgttgatattttcgcccgcgaaattttggactcacgcggcaaccccacagtcgagtgtgatgtattgctcgaatccggcgtaatgggacgcgcagccgtaccgagcggcgcgtccaccggtcaaaaagaggctttggaacttcgcgacggcgacaaatcccgttattcgggcaagggcgtattgaaggcggtcgaacacgtcaacaaccaaatcgcccaagccctcattggtatcgatgccaacgagcaatcttatatcgaccaaatcatgatcgaattggacggtactgaaaacaaaggcaatttgggtgcgaatgcgactttggcggtttctatggcggttgcacgcgccgctgccgaagactcaggcctgccgctttaccgctacttgggcggcgcaggcccgatgtccctgcccgtaccgatgatgaacgtcatcaacggcggcgaacacgccaacaacagcctgaacatccaagagtttatgattatgcccgtcggcgcaaaatctttccgcgaagcgttgcgctgcggtgcggaaattttccacgccttgaaaaaactgtgcgacagcaaaggcttcccgaccacagtcggcgacgaaggcggtttcgcccccaacctgaacagccacaaagaagccctgcaactgatggtcgaggcgaccgaagccgccggctacaaagcgggcgaagacgtattattcgcattggactgcgcctccagcgagttctacaaagacggcaaataccacttggaagccgaaggccgctcctacaccaacgcggaatttgccgaatatctggaaggcctggtcaacgagttccccatcatctccatcgaagacggcatggatgaaaacgactgggaaggctggaaactgctgaccgaaaaactgggcggtagagttcaattggttggcgacgacttgttcgtaaccaatccaaaaatcttggccgaaggcatcgaaaaaggcgtagcaaacgcattgctggtcaaagtcaatcaaatcggtactttgagcgagaccctgaaagccgtcgacttagccaaacgcaaccgctacgccagcgtaatgagccaccgctccggcgaaaccgaagacagcaccattgccgacttggcagtcgccaccaactgtatgcagatcaaaaccggttctttgagccgttccgaccgcatggcgaaatacaaccaactgctgcgtatcgaggaagaattggcggaagccgccgactaccccagcaaagccgcattctaccaactgggcaaataa

SEQ ID NO: 42119 - DNA, 1974 bp, Neisseria meningitidis
atgcaccccatcgaaacccccgataagaccttccacgacggcgacggcgtgtccgaattgggcaccatcctgcccgcgtggtggctcaaccaagtgcaatccgagctgctggccgtgctgactgcggccggtatccagccggataagtcgcagcctaatcaattactggcagcactaaataggctggctgtagttatcaccggcgaccaaaccgtcaacggccaaaaaacctttaccgcccaaacccaattccaaagcggcatccatttatccgccaaccagacgaactggaacggcggccacaaagcctacatcggcgcggatgccgacaacgcccacatcgtcttcggcgacgacaccctccgcctgcacggcgcaaacaaccgcatttcctacaacaaccacgacatcttccacaaagccaacaaaccgcgttttgccgaagacatccaaggcaaaccgaacacactgtccggatacggcatcggcaatttcaaagtcgaaacattccggggcgatttgaacaccctcaaaacagacggcatctattccctgccgacggcggtcggcagctccaacctgcccgttgaaaacaccgcctgccatatccaagtcatcgccggcacgaaacacggctggtgcaggcagttgggttatcccgcctacacgtccgacgtgtacgaacgccaccaaacgagcagcgcaaacgacaactggtccgcatggaaaaaactcaattcggacggcatccccgtcggcgcgatcgtatcctttcccaaagccgtacaaaaccccgcaggctatctcaaagccaacggcacgacctttgcacaaaacaccttccccgacctttaccgcgccttgggcaacagcaaccgcctgcccgatttaagccgtaccgacatcggcatcaccgcgtggtttccgtccgaccaaatcccgaccggctggctggcgtttgacgacatccgcacgcgcgtaaccgaaaccgcttatcccgagctgtaccgtctgctgaccggaaaatacggcagcatccaaaacgtcccgcaggcggaagaccgctttatccgcaacgcgggcaacagcttggcagtcggaacgaagcaggaagacgaaatcaaacggcacgtccacaaagtattttcacactggacaaaccacacagacgcggcagccctcggttacgaagaccgcaacgaaaggcagagaagcgcgctcgtatcgacttggacggacgaaaatttaaacgacaacggctttttaaccccgcgctcggacagcaaaatggcgacaggcggcgacgaaaaccgccccaaagccctggttttaaaactgtgcatcaaagccgccgacaccttgggcgaagccgtgttttggataaagtcccacggcgaaaccatcaacgcaggcgcgctggacgcgggcacgctggcgcaaggtttgcaagacaaagccgaccgagaccacacccacaccgccgcccaaatccaagggctggacgaaaaaatcagcaccgccgttgccgcgcaattcacacgccaaaccatcggcggcgtggatattgtcagattccccgacggcacaatgatacagaccggcagctacaggttcacacgaagcggcggccccatcgaaaacgaagtcgtcttccccgtcgcctttgccgacggcaacgtcaaatgcttcgtatccgaacgccattcggaacgcgttaccggcgatcgaaggcaacacaactggctgtttatccgcgcaaaaaaccacgccgccgccattatcaccaactggtacgaaggcagttgcgactggatggccatcggcaaagccgcctcgggaaacgccgccagctccccgataggccccgaaatacctgaaaccaacgaagaaccgcaaagagagagtggaagaacatcaaccggaccccgaaaccgccgccgccgagacggcttgctcgaggcactgcaagactag

SEQ ID NO: 42120 - DNA, 234 bp, Neisseria meningitidis
gtgccgcgtgccgtttcaaaaacaaaccgtccggcgtgcagtgtcggcatttcgggcgtatcgccgccgatttgttccggaatggctgttaaccgccttgccgtcggcaaagaagcaaaacccaagcacaatcaaaatctaaaggctgtgtttgaagattccgttgatgcaacccaatcagtcggacaaaatgcctttcatccaatggaaccggtttccgaccggacggaataa

SEQ ID NO: 42121 - DNA, 627 bp, Neisseria meningitidis
atgtatacaggcgaacgcttcaatacttacagccatttgagcggtttgattctggcggcggcaggtttggcgctgatgctgctgaaaaccataggacacggggacggctaccgtatcttcagcgtatcggtttacggcatcagccttcttctgctctatttgagttcctcgctgtaccacggaattgcagccggaaaactgaaaagcattttgaaaaaaaccgaccactgcatgatttatgtgctgattgccggaagctacacaccgtttgcactggtttctttgagaaacgggccgggctggacggtattttcactgtcctggctgctggcggctgcaggaatcgcacaagaactcaccattggacggaaaagcgaaaaacgactgctgtctattgcgatttatatcgtaatgggctggatggtcttggcggtaatgaaatccctgacagcctcactcccgccggcaggactggcttggctggcggcaggcggtatgctgtacagcgtcggcatttactggtttgtaaacgatgaaaaaatccgacacgggcacggaatctggcatctgttcgtattgggcggcagcatcacccaatttgtcagcgtgtacggttacgtaatctaa

SEQ ID NO: 42122 - DNA, 723 bp, Neisseria meningitidis
atgcccgaaacaggttttcgggcatttttacggcaaatgccgtctgaaaccaccaaacagcggttcagacggcatccctttcaaaagcgcaccattatgaaaaacatcgtcatcctgatttctggacgcggcagcaatatgcaggcaatcgtcaatgccgccattcacaacgtccgcattgccgccgtgttgagcaacagcgaaacggctgccggtttgcaatgggcggccgaacgcggcatcccgaccgatagcctgaatcataaaaactttacatcccggcttgccttcgataccgccatgatggagaaaatcgacgcatatcaacccgacttggtggttttggcaggttttatgcggattctgacccccgagttttgcgcccgttacgaaggcaggctgatgaacattcacccgtccatccttccctcgtttaccggacttcatacgcacgaacgcgctttggaggcgggctgccgcgttgccggctgcaccatccatttcgttactgccgaactggattgcggcccgattgtatcgcaaggggttgtgccgatactcgacggcgatacggcagacgatattgccgcacgggttttggctgtcgagcataaactttatccgaaagccgttgccgattttgccgccggccgcctgattattgagggaaaccgcgtcagaaattcggaaaacgccgatgccgcccgttttctgacggcgtaa

SEQ ID NO: 42123 - DNA, 2355 bp, Neisseria meningitidis
ttgaaaaacaacagacaaatcaaactgattgccgcctccgtcgcagttgccgcatcctttcaggcacatgctggactgggcggactgaatatccagtccaaccttgacgaacccttttccggcagcattaccgtaaccggcgaagaagccaaagccctgctaggcggcggcagcgttaccgtttccgaaaaaggcctgaccgccaaagtccacaagttgggcgacaaagccgtcattgccgtttcttccgaacaggcagtccgcgatcccgtcctggtgttccgcatcggcgcaggcgcacaggtacgcgaatacaccgccatcctcgatcctgtcggctactcgcccaaaaccaaatctgcactttcagacggcaagacacaccgcaaaaccgctccgacagcagagtcccaagaaaatcaaaacgccaaagccctccgcaaaaccgataaaaaagacagcgcgaacgcagccgtcaaaccggcatacaacggcaaaacccataccgtccgcaaaggcgaaacggtcaaacagattgccgccgccatccgcccgaaacacctgacgctcgaacaggttgccgatgcgctgctgaaggcaaacccaaatgtttccgcacacggcagactgcgtgcgggcagcgtgcttcacattccgaatctgaacaggatcaaagcggaacaacccaaaccgcaaacggcgaaacccaaagccgaaaccgcatccatgccgtccgaaccgtccaaacaggcaacggtagagaaaccggttgaaaaacctgaagcaaaagttgccgcgcccgaagcaaaagcggaaaaaccggccgttcgacccgaacctgtacccgctgcaaatactgccgcatcggaaaccgctgccgaatccgccccccaagaagccgccgcttctgccatcgacacgccgaccgacgaaaccggtaacgccgtttccgaacctgtcgaacaggtttctgccgaagaagaaaccgaaagcggactgtttgacggtctgttcggcggttcgtacaccttgctgcttgccggcggaggcgcggcattaatcgccctgctgctgcttttgcgccttgcccaatccaaacgcgcgcgccgtaccgaagaatccgtccctgaggaagagcctgaccttgacgacgcggcagacgacggcatagaaatcacctttgccgaagtcgaaactccggcaacgcccgaacccgctccgaaaaacgatgtaaacgacacacttgccttagatggggaatctgaagaagagttatcggcaaaacaaacgttcgatgtcgaaaccgatacgccttccaaccgcatcgacttggatttcgacagcctggcagccgcgcaaaacggcattttatccggcgcacttacgcaggatgaagaaacccaaaaacgcgcggatgccgattggaacgccatcgaatccacagacagcgtgtacgagcccgagaccttcaacccgtacaaccctgtcgaaatcgtcatcgacacgcccgaaccggaatctgtcgcccaaactgccgaaaacaaaccggaaaccgtcgataccgatttctccgacaacctgccctcaaacaaccatatcggcacagaagaaacagcttccgcaaaacctgcctcaccctccggactggcaggcttcctgaaggcttcctcgcccgaaaccatcttggaaaaaacagttgccgaagtccaaacaccggaagagttgcacgatttcctgaaagtgtacgaaaccgatgccgtcgcggaaactgcgcctgaaacgcccgatttcaacgccgccgcagacgatttgtccgcattgcttcaacctgccgaagcaccgtccgttgaggaaaatataacggaaaccgttgccgaaacacccgacttcaacgccaccgcagacgatttgtccgcattacttcaaccttctgaagcacctgccgttgaggaaaatgcagcggaaaccgttgccgatgatttgtccgcactgttgcaacctgctgaagcaccggccgttgaggaaaatgcagcggaaatcactttggaaacgcctgattccaacacctctgaggcagacgctttgcccgacttcctgaaagacggcgaggaggaaacggtagattggagcatctacctctcggaagaaaatatcccaaataatgcagataccagtttcccttcggaatctgtaggttctgacgcgccttccgaagcgaaatacgaccttgccgaaatgtatctcgaaatcggcgaccgcgatgccgctgccgagacagtgcagaaattgctggaagaagcggaaggcgacgtactcaaacgtgcccaagcattggcgcaggaattgggtatttga

SEQ ID NO: 42124 - DNA, 1143 bp, Neisseria meningitidis
atgaaaaaatccgtattagccgttttggccgcgctgtctctggcagcctgcggcggcagcgaaaaaaacgccgtgcaacctcaagcagacgctgcgtctgctgccaatgccgaagccgctgccaccgatactctgaacatctacaactggtcgaactatgttgatgagagtacggtcgaagactttaaaaaagccaacaatctgaagctgacttacgacttgtacgaaaacaatgaaacgctggaagccaaaatgctgaccggcaaatccggttacgatttggtcgtgccgggcatcgccttcctgccgcgccaaatcgaggcgggcgcgtatcaaaaagtcaacaaagacctgattcccaactataaaaacatcgatcccgaactcttgaaaatgctggaaaccgccgacccgggcaaccagtatgccgtcccctatttctccggcgtgaacacgattgcgattacggcgaagggcaaagagcttttgggcggcaagctgcccgaaaacggctgggatttgctgttcaaacccgaatacacccacaagctgaaatcctgcggcatcgccctgtgggacaccccgagtgaaatgttcccgattttgctgaactacttgggcaaagaccccaaaggctcgaatcctgaagacttgaaggcggcggcggaagtgttgaagtctatccgtccggatgtcaaacgtttcagcccgtccatcatcgacgagctggcacgcggcgacatctgcctggcggcaggcaacggcggcgatttgaacttggcgaaagcacgttccgaggaagtgaaaaacaacgtcggcatcgaagtgctgacaccgaaaggtatgggcttctggattgagtcttggctgattcccgccgatgcgaaaaacgtcgccaatgcccacaaatacatcaactacacgctcgaccccgaaatcgcggcgaaaaacggcatcgccgtaacctttgcccccgccagcaaaccggcgcgcgaaaaaatgcctgccgagctggtgaacacccgttccatcttcccgaacgagcaggatatgaaagacggtttcgtgatgccgcaaatgagcacggatgcgaaaaaactgtctgtcagcctgtggcagaaaatcaaagtcggcaccaactga

SEQ ID NO: 42125 - DNA, 375 bp, Neisseria meningitidis
atgcagtatctgattgtcaaatacagccaccaaatcttcgttaccatcaccattttggtattcaacatccgttttttcctactttggaaaaatccagaaaagcccttggcgggcttttggaaggcactgccccaccttaacgacaccatgctgctgtttacgggattgtggctgatgaaaattacccatttctccccgttcaacgcgccttggctcggtacaaaaatcctgcttctgctcgcctatatcgcattgggtatgatgatgatgcgcgcccgtccgcgttcgaccaagttctacaccgtttacctgctcgccatgtgttgcgtcgcctgcatcgtttaccttgccaaaaccaaagtcctgcctttctga

SEQ ID NO: 42126 - DNA, 279 bp, Neisseria meningitidis; identical to SEQ ID NO: 37465

SEQ ID NO: 42127 - DNA, 543 bp, Neisseria meningitidis
gtgcagagttggaaagaaaggcgcgatttcaatattgtaaagcaggatttggatttttcctgcggggcggcttcggtggtgacgcttttgaacaatttttacgggcaaaagctgacggaagaggacgtgttaaaaaaactggataaggagcagatgcccgcgtcgtttgaggatatgcggcgcattatgcctgatttgggttttgaagcgaaaggctatgccctgtctttcgagcagcttgcacagttgcaaatccccgtcatcgtgtatctgaaataccgcaaggatgatcatttctcggtattgcgcggtatagacggcaatacggttttgcttgccgacccgtcgctgggtcatgtttcaatgagcagggcgcagtttttggatgcttggcaaacccgtgagggaaatttggcaggtaagattttggcggttgtgccgaaagggagggatgccggcggggataaggcgtttttcacacgcagtccgaaacgtcagacggagtttgcggtcggacaggtaaaatggtggcgtgcttattga

SEQ ID NO: 42128 - DNA, 861 bp, Neisseria meningitidis
ttgcccgtcttcccgataagccttaaaatacacgccgtcaaacctaccgtccgtccgtacatgagcccatccccctttatcgaaatgaaagacgtcgccttcgcgtatggcgaccgcccgattctgaagaacatcaatttcagcattccgcaaggcaattttgctgccgtaatgggcggttcgggcagcggcaaaaccacgctgatgcgactgattacaggacagattcgtccgcagtccgggcaggttttgattgaaggacgggatttggcgggcttttcggctgacgagttgtatgaacaccgccgccgtatgggcgtattgttccaacacggcgcgctgtttactgatttgtcggtattcgacaatatcgcttttccgatgcgcgaactgacgcgcctgccggaagcggtgattcgggatttggttttgttgaaattgaacgcggtcggtctgcgcggtgtggaaaacctgatgccgtccgagttgtccggcgggatgtcgcgccgcgtcgcgcttgcccgcacgattgcgctcgaccctgaaattatgttgtacgacgagccgtttaccggcctcgatccgatttccttgggcgtgattgcccacttgatcagccgcgtcaacaaggctttgcgttcgaccagtattatggtaacgcacgacattgaaaaatctttggaaatcgtcgatcaggtgattttcttggcgcacggcgaaattatgttctccggctcgccgcaggaaatgcgcgaactggattcgccttgggtgcgccagtttgtcggcgggctggcagacggccccgtagcataccgttatccggcgcaaacgtcgttgcagcaggacctgttgggataa

SEQ ID NO: 42129 - DNA, 189 bp, Neisseria meningitidis
ttgaccgtgaaatacactatctttttttcaacaagccaccacagcaatcagacaaaagcaacccaccgccacacccatgtcggcagtacggccggacaaaccaccatccgaagcggcggggataccaccctcaaaggtgctcagcttatcggcataggcatacaggcagacccccaactacaaccctga

SEQ ID NO: 42130 - DNA, 1194 bp, Neisseria meningitidis
atgttcttcaagcacatcgaagccgcccccgccgatccgattctcggtttgggcgaagcgttcaaagccgaaacccgccccgaaaaagtcaacctcggcatcggcgtttataaagacgcatccggcgcgacacccctcgtcaaagccgtcaaagaagccgaaaaacgcctgttggaaagcgaaaccaccaaaaactacctcaccatcgacggcgttgccgactacaacgcgcaaacccaaatcctgctgttcggcaaagaccacgaaatcatcgccagccgtcgcgccaaaacagcgcaaagcctcggcggtacgggcgcattgcgtattgcggccgagtttgccaaacgccagttgaacgcgcaaaccatctggatttccaatccgacttggcccaaccacaacgccatcgccaaagcggtcggtatccaagacaaaccttatcgttactatgatgccgccaaacacggtttggattgggacggcatgattgaggacttgagccaagcgcaaaaaggcgacatcgtcctgctgcacggctgctgccacaatcctaccggcatcgaccctacgcccgaacaatgggaaactttggcaaaactttctgccgaaaaaggctggttgccgctgtttgactttgcctaccaaggcttcggcaatggtttggaagaagatgcctacggcttgcgcgtgttcttgaaacacaatacagaattgctgattgccagctcttattccaaaaacttcggtatgtacaacgagcgcgtcggcgcgttcactttggtggccgaagatgaagaaacagcagcccgcgcccacagccaagtcaaaaccatcatccgtaccttgtattccaacccggcttcacacggtgcgaacaccattgcgctggtgttgaaaaatgatgatttgaaagcacaatggattgccgaactcgatgaaatgcgcggccgcatcaaagccatgcgccaaaaatttgtcgggttgctcaaagccaaaggtgcaagccaaaactttgatttcattatcaaacaaaacggtatgttctctttcagcggcttgactcccgaacaagtcgaccgcctgaaaaacgagtttgccatttatgccgtccgctccggccgcatcaacgtcgccggcattaccgacaacaacatcgattatctgtgcgaaagcatcgtgaaagtactgtaa

SEQ ID NO: 42131 - DNA, 357 bp, Neisseria meningitidis
atgaaaaaatccctgtttgccgctgctttgttgtctttggttctggcagcctgcggcggtgaaaaagccgctgaagctcccgctgctgaagcacctgccgccgaagctcccgctactgaagcacctgccgccgaagctcccgctgctgaagcacctgccgccgaagctcccgctactgaagcacctgccgccgaagctcccgctgctgaagcacctgccgccgaagctcctgctgctgaagctgccgctaccgaagcacctgccgctgaagctgccgctaccgaagcacctgccgctgaagctgccgctaccgaagcacctgccgctgaagctcctgctgccgaagctgcaaaataa

SEQ ID NO: 42132 - DNA, 930 bp, Neisseria meningitidis
atggattccattatcgaattgcgccacctcaaaaccctgctggcacttgaagaaaccggcagcgtctcccttgccgccaaacgggttttccttacccaatccgccctttcccaccagatccgtatgctcgaaaaccactacggcacgccgctgttcgaacgcaaatccacgcccttgcgctttaccccggtgggcgaaaggctgctgcgcctcgcccacgaacttatacctcaagttgctgttgcagaatgggatttggcgcgaatcacggaaggagaggcgggagagctgcggattgccgtcgaatgccatacctgtttcgactggctgatgcccgccatgggcgaattccgcccgatgtggccccaagtcgaattggatatcgtatcgggattccaagcggatcccgtcggactgctgctgcaacaccgtgccgaccttgccattgtttccgaagcggaaaaacaaaacggtatttctttccaaccgctgtttgcctacgaaatggtcggcatttgcgcaccagaccatccgcttgccgccaaaaacgtttggacggcggaagactttatcggggaaaccctgattacttatcccgttcccgacgagatgctggatttgcccaaaaaaatcctgattccgaaaaacatcaacccgccgcgccgacacagcgagctgaccatcgccattatccaactggttgccagcagacgtggcattgccgcccttccctattggacagtcatgccctaccttgaaaaaggctatgtcgtccaccgccaaattactgccgacggactgcaaagcaaactgtatgccgccatccgtaccgaagatacggacaagagctatctgaacaatttttgccaaatcatacgcgaacgcggttttgcagatttgcccggactgagcgaactggaaccggtctga

SEQ ID NO: 42133 - DNA, 810 bp, Neisseria meningitidis
atgaccgccctcccccgctacgccgttttcggcaaccccgtcgcccacagcaaatcgccgcaaattcatcaacaatttgcccttcaggaaggcgttgacattgaatacgaacgcatttgcgccgacatcggcggtttcgcgcaggcggtttcgacattttttgaaacaggcggttgcggggcaaacgttaccgtaccgttcaaacaggaagcgtttcatctggcggacgagcattccgaacgcgcattggcggcaggtgcggtcaatacgctgattccgttgaaaaacggcaagctgcgtggcgacaacaccgacggtatcggtttgaccaacgacatcacgcaggtcaaaaatattgccatcgagggcaaaaccattttgcttttgggcgcaggcggcgcggtgcgcggcgtgattcctgttttgaaagaacaccgtcctgcccgtatcgtcattgccaaccgtacccgcgccaaagccgaggaattggcgcagcttttcggcattgaagccgtcccgatggcggacgtgaacggcggttttgatatcatcatcaacggcacgtcgggcggtctaaacggtcagattcccgatattccgcccgatatttttcaaaactgcgcgcttgcctacgatatggtgtacggctgcgcggcaaaaccgtttttagattttgcacgacaatcgggtgcgaaaaaaactgccgacggactgggtatgctagtcggtcaagcggcggcttcctacgccctctggcgcggatttacgcccgatatccgccccgttatcgaatacatgaaagccctataa

SEQ ID NO: 42134 - DNA, 3210 bp, Neisseria meningitidis
atgttttatctgtatcaatccaaccgtcttgaaacgctggcggcattgtttgcccgcattcaaaaagtcaaaccgctgaaatcggctttacagcccgaacagattattgtgcagagtcaggggatgcgccgctacctcaatacctgcctcgcccgcgatttgggcgtggcggcgaatttgtcgttcagcctgcccgccggcctgacgtggaagctgatgaaaaaactgattcccggtattccggaactcagcccgtttgcgcccgaagtcatgcgctggcggctgctggatttgttccgcagcgaggcatttcggaatacggcagaatttgaagatgtgaggaatgtgctgcaagactatctgggcagcggcgaatcggcagattaccagcttgcgggacagcttgcggacatattcgaccaatacctcgtgtaccgtcctcagtggatagacgcttggcagcagggcaggcggctcggtttgggcgacgacgaaatctggcagtccaaactgtggcgttacctcgacgacggcaggcagagcgcgccgcaccgtgtcgcgttgtgggaaaagctgttggaatctttgagcagtgataagctgcccgagcgttatttcgtgttcggcatttccacgatggcgccgatgtatttgcaacttttgcacaagctgtccgaacattgcgacgtgttcgtgttcgcactcaatccgagcgggatgtactggggcaacgtcatcgaagcggcgcaaatcctcaaaggtggcggcgatcccgatttaactcaggcagggcatccgctgctcgcctcattgggcaagcaggggcgggactttttcgactttttgaacgaaatggaaatagaaggcgaaacgccggtatttgaggaaggcgggcgcgatacgcttttacacgccctgcaaaccgatattcaaaacctgaaaatgccgtctgaaatggcgggaagcgtcaacacgggcgacggctcgatacgcatcgtctccgcacacagccctttgcgcgaattgcagatactcaaagacaagctgttgaaaattctgcatgaacatcccgattggcagccgcacgatatcgccgtattaaccccgaatatcgaatcctatacgccttttatcgaagccgtgttcggacaggcgcagcccggtgcgcaggcattgccgtattccgtgtcagacgtgaaaatcagccgccgccaaccgctgtttcatgctttgtcatgcctgttcgacttgttggaaagccgatttgaagtcgataaagtgcttgtgcttttagaaaccgcgcccgtgttgcgccgtttcggactgactgaggacgatttaccgcttttgcacgacatggttgccgatttgaacgtccactggggtttggacggagaaatgcgcggcggcacggatcagctgttcacctggaagcaggcggtagaacgcatgatattgggctggatgctgcccaaaggcggcaatccgatgtggcaggatgtcagcgcgtggtatgccgacgtgaatcaaaccgccatgttcggacgttttgccgccttcctcgaaaccctgacggatattgtacggatatggcggcagcccgcaacggtcggcgaatgggtggcgcgttgccgggatttgcttgaaacattgttccaagctgaagccgatgaccaaaagtcagtccaaaaccttgaaaacgaatgggtcaaatggcaggcggaaaccgaattggcgcaattttccggacagttgccgccgcacaccgtcatccgccatatccgacgctttctcgacagcgaaagcgaggcaggctttttacgcggcggcatcaccttttgcagtatggtgccgatgcggagcctgccgttcaaagtcatctgcctgttgggtttgaacgacggagattttccccgtaataccaaagccgccgtattcgacctgattgccaaacatcccgccaaaggagaccgcgcccgccgcgatgacgaccgctacctgttcctcgaagccctcatcagcgcgcgtgaaatcctctacctgtcctacatcgggcgcgacatccgcaaagacgaagagcttgccccgtcttccctgttgggcgaactcatcgataccgttgccgctatggcgggcatcggtagccgccaacttgcacaaaacctgatagaacagcatccgctgcaagccttctcgcgccgatattttcaagaaggcggacgttcagacggcatattcggcacgcgtaccgactacgccgccgcgctcggacaaacgcccgaaccgccgcaaccctttttcgatcaacccgtagaaaacgccgaacctgttgccgaaatcggacaggacgaatttatccgtttctggcgcaaccctgtcaaagtatggcttcagcagcagcttgcgtggagcgaaccccatatcggcgaagcctgggagcctgccgaacccttcgagccgcaacacgccgatcaaatcgccgaaatctacatcgaagcacggcgcgaaggacgggattttgcccaaaccgccgcccgcatcggggcggaaagcctcctgccgtcgggagagttgggcagactttggcagcaggacttccaaactgctgccaaacaaatcgacacggcggttttaaacagccccaaactgccaccgctttcatatgccataccgtcggacgggcaaatcctgaaaggcagcttgggcaatctgtaccgctgcggacaagtgttttacgcctacggcaaacccaacgcgccgcaacgtatcgcttttctgctggaacacctgatattttgcgccgttatgccgtctgaagccgaaatgcggcaaacctttatcgtccaatccggagaaaccgaaatattggcggaaatcgcgcaagacagggcattgcagctattgtcggaatggatggcgtttttcaatatcgggcaaaaccgcccgctgccgttttttgccaaaacctcgcttgccaccgccgaagcgtttgcccaaaaacaagattgggaagccgccctgaaaaaagcccaaaccgcctaccacggcagcaaagtcagcaaagggcagaaagactataccgaagtcgccctcgtgttcggcaacgcaagccaaaacccgctcgaacagcccctgtttgaaaacctcgtccgtctgcttgccgacacgcttgccgcagcggaaaaaaaggaagaggccggagaagcctga

SEQ ID NO: 42135 - DNA, 789 bp, Neisseria meningitidis
atggaagatttatatataatactcgctttgggtttggttgcgatgattgccggatttatcgatgcgattgcgggcgggggtggtttgattacgctgcccgcactcttgttggcaggtattcctcccgtgtcggcaattgccaccaacaagctgcaagcagccgctgctacgttttcagctacggtttcttttgcacgcaaaggtttgattgattggaagaaaggtctcccgattgccgcagcatcgtttgtaggcggcgtggccggtgcattatcggtcagcttggtttccaaagatattctgctggcggtcgtgccggttttgttgatatttgtcgcactgtattttgtgttttcgcccaagctcgacggcagtaaggaaggcaaagccagaatgtctttttttctgttcgggctgacggtcgcaccgcttttgggtttttacgacggtgtgttcggaccgggtgtcggctcgttttttctgattgcctttattgttttgctcggctgcaagctgttgaacgcgatgtcttacaccaaattggcgaacgttgcctgcaatcttggttcgctatcggtattcctgctgcacggttcgattattttcccgattgcggcaacgatggcggtcggtgcgtttgtcggtgcgaatttaggtgcgagatttgccgtccgcttcggttcgaagctgattaagccgctgctgattgtcatcagcatttcgatggctgtgaaattgttgatagacgagagaaatccgctgtatcagatgattgtttcgatgttttaa

SEQ ID NO: 42136 - DNA, 357 bp, Neisseria meningitidis
atgaatgaacacaacctgttaattttctgtttaaaagacaatgtttcaattagtgaatatactgaaatggttgattgggcttatgaaaacattcaatctgaaacagttgtagaaattacggaaaatcaaattattgaatatcaaaatcgtggattatgggggcttgtttctgaaattaccgataattggttatttggaccaagtgagggggattggctaatagataaggaaagtattttggctgtaaaagaaaaattacaaaattcagatttttctacagagcccttagtgaaaaatattattcatgtacttgaatatgctataaagaatgaaaaaacagtaatttttcatttttga

SEQ ID NO: 42137 - DNA, 672 bp, Neisseria meningitidis
gtgtttcccgacaaatacaagttgagtttgaaagaaaatatttttttggcaaagaaagtattggttgcccaaattcacaacctcagtcgttttgagaattgtcagacgaccttgttgcagaccgaacaaattatccatggcaaaaatgtagcctccgcgtcactggaagacatccaaaccatcttgaacctgaaacgtgcctatcaatatgtgatttcgcatatttcaaacggcgaaccggtcgatatttcactccttaaaaaaatcaacaacattgttgccaaggacgattctttggcacccggtgatttccgtaccggttcggtcggcgtaacgctattggacggttcccgtcatgccccgaatccagtgaaggaaattgaagtggcccgcgtgttacaaaatatcggactgcaaagcggttcgacgacggaggcagccgtccgttttatgctttattgtatgcggcagcaggttttttgggacggcaacaaacgaacggcaaccttatttgccaacggtctgatgatggcggggggctgcggcatcttggaaatctccgaaatgcagatgccgcaattcaatgaaaaactgtccgcattctatcgctccggcgacgataccgatatttccaagtttgtgtatcaaaattgtatatcgggcatagactga

SEQ ID NO: 42138 - DNA, 693 bp, Neisseria meningitidis
atgccgtctgaaaccgcttcagacggcatcgtcagcacaagacgcaaacccatgaaagcctttaccaaaattaccgccatcgtcgccccgctcgaccgcagcaacgtcgataccgacgccatcatccccaaacaatttttaaaatccatcaaacgcagcggcttcggccccaatgcctttgacgaatggcgttacctcgaccacggcgaaccaggcatggacaacagcaaacgcccgttgaaccctgatttctcgctgaaccagccgcgttaccaaggcgcgcaaatcctgttgacgcgtaaaaacttcggttgcggctcttcacgcgaacacgccccttgggcattggacgactacggcttccgcgccgtcatcgcccccagcttcgccgacatcttctttaacaactgctacaaaaacggccttttacctatcgtgttgaccgaagaacgggttgaccgacttttcaaagaagttgaagccaacgaaggctatcagctctccatcgaccttgccgaacaaaccctgaccacaccaagcggcgaaacgttcacatttgacattaccgaacaccgcaaacactgcctcttaaacggcttggacgaaatcggtctgaccctgcaacacgccgacgaaattcacgcctttgaagaaaaacgccgccaaagccagccttggctgtttaacggttaa

SEQ ID NO: 42139 - DNA, 918 bp, Neisseria meningitidis
atggaaaaagcagaacatttgaacagcagccggttcgtcaatctagtcaaaagcggcggcggcagctatgtggagggcagctaccgtttcgatactttgtccaacggcatttccatccacggcggcacagtaacggcacggtgtgatttttgcagcagccgcctcgccgaaccttatgtgtcgttcgtgctcttgctggaaggcagtttggacttcggcatcaaccgctgccgcttccaaatcgatgcggacggcggcaagattgtcctaattgctgtcggggaagaagtcctgttcagccgctatctttaccgaggcggcaaaacggtcaaaatgaccattaaaggtatggaacaatggctgctgcgtccggaatacgcgcgtttcgcacccctgctttaccgcgaaccggtcaggatatgggatttgcccccgaacctgcgcggcttggcggcatcctgcctgaaagccgtcccaaaggggcatttgggcgaaacattgcgccgcgaggcggacgtgttgcggctgctgtcggacttgtgggacacggtttcagacggcatcgggccggcggcggggcaaacggcggaagcagacgctatgccgtctgaagacttcagccgcaccctaaatgccgcgtttgccgacggcgcacaccaagtcaaccggctgacagacgcgctgaacatcagtgaaaggacgctgcaacgccgtatgcgcgaccatttcggcattacggcaagcgaatggctgcaccacaaacaaatgcagcacgcgctctatctgttgcaaaacgggggaaaaagcataggcgaaaccgcatatttatgcggctaccgccacgtttccagctttactcaggcattcaggcaatatttcggcagcacgcctgcggaaaccaaaaaagaaaaccggtaa

SEQ ID NO: 42140 - DNA, 1968 bp, Neisseria meningitidis
gtggggaacacctttaaatcaatccttgtctgggtcgccttgggtatcggcctgatggctgcgttcaacgctttagacggtaaaaaagaagacaacgggcaaatcgaatactctcagttcatccaacaggtcaacaacggcgaagtatccggcgtcaacatcgaaggatccgtcgtcagcggctacctgattaagggcgagcgcaccgacaaaagcactttcttcaccaacgcgcctttggacgacaacctaattaaaacactgctcgacaaaaacgtccgcgtaaaagtaacgccggaagaaaaaccgagcgcgctggctgccctgttttacagcctgctgcccgtcctgctgctgattggcgcatggttctacttcatgcgtatgcagacgggcggcggcggaaaaggcggcgcattctcattcggtaaaagccgcgcccgcctgctggacaaagatgccaacaaagtgacctttgccgatgtcgccggctgcgacgaagccaaagaagaagtacaggaaatcgtcgattacctcaaagcgccgaaccgctatcaaagcctgggcgggcgcgtgccgcgcggcatcctgctggcgggcagcccgggtacgggtaagacgcttttggcgaaagcgattgcaggcgaagccggcgtgccgttcttcagcatttcaggttccgactttgtcgaaatgttcgtcggtgtcggtgcgagccgcgtccgcgatatgttcgagcaggcgaagaaaaacgccccctgcatcatctttatcgacgagattgacgcagtcggccgccaacgcggcgcaggtttgggcggcggcaatgatgagcgcgagcaaacattaaaccaattgttggttgaaatggacggttttgagagcaatcagactgtaattgtgattgcggcaaccaaccgccccgacgtactcgatcctgcgctgcaacgccccggccgtttcgaccgccaagtggttgtccccctgccggacatccgagggcgcgaacagattttgaacgtccattctaaaaaagtgcctttggacgaatctgtggatttattgtccctcgcgcgcggcacgccgggtttttccggcgcggatttggcgaacttggtcaacgaagccgccctgtttgccggccgccgcaataaagtcaaagtcgatcagagcgattttgaagacgccaaagacaaaatctatatgggtccggaacgccgcagtatggtgatgcacgaagacgaaaaacgtgcgacggcgtatcacgaatccggacacgcgattgttgccgaaagcctgccctttaccgaccccgtccacaaagtaaccattatgccgcgcggacgtgcgctgggtctgacttggcagcttccggagcgcgaccgcatcagtatgtataaagatcagatgttgagccagctctccatcctgttcggcggacggattgccgaagacatcttcgtcggacgcatctccaccggcgcatcaaacgactttgaacgcgcaacccaaatggcgcgcgaaatggtaacgcgctacggcatgagcgacaaaatgggcgtgatggtttatgcggaaaacgaaggcgaagtcttcttgggacgcagcgtaacccgttcgcaaaacatttccgagaaaacccagcaggacatcgacgcggaaatccgccggattttggacgagcaatatcaggttgcctacaaaatcctcgatgaaaaccgcgacaagatggaaacgatgtgcaaagccctgatggaatgggaaaccatcgaccgcgatcaggtactggaaatcatggcgggcaaacaacccagcccgcccaaagattacagccacaacctgcgcgagaatgcggacgcggcggaagataacgcgccgcacgctccgactcgggaagaaaccgaagcacctgccccggcagacaccgcttcgacagagtccgagcagcagcctgaaaacaaggcttaa

SEQ ID NO: 42141 - DNA, 687 bp, Neisseria meningitidis
atggcagacttaacattccaacaagccgtttccaccatcgtcggcatgaaagacgaaatcttccgcgccttgggcgaaaccttcgtgatggtcggcttgtccaccacattcgccgtcatcttcggcacgctgctgggcgtgctgctcttcgtaacctccagccgccaactgcattacaacaagctggtgaacttcctgctcgacaacctcgtcaacctcatgcgcgccttccccttcgtcatcctgatgattgcgatgatacccgccacacgcgccatcgtcggcagcaccatcggtccggttgccgcctcgctggtgttgagcgtgtcgggattgttttattttgcccgactggtggaacaaaacctgcgcgaagtccccaaaggcgtaattgaagccgccgccgcgatgggtgcgccgccgattgccatcgtctgcaaagtcctcttgaacgaagcgcgcgcgggcatggtttccagcattaccgtgcttgccatcgggcttttgtcatacagcgcggcggcagggatgataggcggcggcggcttgggcgacctcgccatccgctacggctactaccgctaccaaaccgaagtcatcatcttcatcgtcgccctcctcgtgctgctggtcatcctgattcaaagcaccggcaacgcgttggcgcggaaactcgacaaacgttga

SEQ ID NO: 42142 - DNA, 1347 bp, Neisseria meningitidis
atgtcggataacgttccaacgattgcggcagtcgctaccgcaccagggcgcggcggcgtgggcgtgatacgcatatcggggaaaaacctgctgccgatggcgcaggctttgtgcgggaaaacgcccaagccgcgtaccgcaacctatgctgattttacggacacggacggacaggcaatcgacagcgggcttttgctgttttttgccgcaccggcaagttttacgggtgaagatgtcatcgagcttcagggacacggcgggccggtggtgatggatatgctgctgaaccgctgtttggaattgggcgcgcgccttgccgaaccgggcgagtttacgaagcgtgcgtttttgaacgacaaactggacttggcacaggcggaaggcgtggcggatttgattgacgcatccagccgttcggcggcgcgtctggctttgcgctcgctcaagggcgatttttcgcggcggatacacggtctggtcgaagacttgattaccttgcggatgctggtcgaagcgacgttagattttcccgaggaagacattgattttctcgaagcggcagacgcacgcggcaaactggacggcttgcgccgcgccgtggatgatgtgcttgccaacgcgcagcagggcgcgattttgcgcgaaggtctgaatgtcgtattggtcggcgcgccgaatgtgggcaagtccagcctgctgaacgcgttggcgggcgacgaagtggcgattgttaccgatattgccggaacgacgcgcgacgcggtcagggaacgtatcctgattgacggcgtgccggtgcatattgtcgatacggcaggtttgcgcgagacggacgacgtggtcgagcgtatcggcatcgaacgcagccgcaaagccgtatccgaagccgatgtcgcgctggtgttggtcgatccgcgcgagggtttgaatgaaaagacacgggcgattttggacgcgttgccgccggagttgaaacgcatcgaaatccacagcaaatccgatttgcacgcacacgcggcaggcgggttcggtacgggcgcggaaaccgtcatcgcgttgtcggcgaaaaccggcgacggcttggacgcgctgaaacggacgttgttgcgcgaggccggttggcagggcgaaagcgaagggttgtttttggcgcggacgcggcacgtcaacgcactcaaagcagcgcaggaagaattgtcgctggcggcattgtgcggcaaccatcaaatcgagctgtttgccgaacacttgcgcttggcgcaggtcgcatgcggcgaaatcacgggcgagtttacggcggacgacctgctcggcgtgattttttcgaggttttgtatcggaaaataa

SEQ ID NO: 42143 - DNA, 240 bp, Neisseria meningitidis
ttgcattccgctgaagccgacagcgtggaggcaatgatggacttggcggtttacgggctggcggcgatggttgccaaacacaacaaaacgcgcggcgagcagcttgtgttacaggcgattgccggtcatatgcggaagcttttggccgcgcttcccgaaaccgagtcattggtgcagaccgggaaggtttaccgccgacttgaagatttgatttttaaaacgtatttgccggagcagtaa

SEQ ID NO: 42144 - DNA, 351 bp, Neisseria meningitidis; identical to SEQ ID NO: 41719

SEQ ID NO: 42145 - DNA, 1398 bp, Neisseria meningitidis
atgagccaaggcaaaatcgtacaaattatcggtgcggttgttgacgtggaatttccacgcgacatgattccgcgcgtttacgacgctttgaaattagacgaaaacggtctgactttggaagtccaacagcttttgggcgacggcgtagtccgtgccattgcgatgggcagctcggacggtttgaaacgcggcatgactgtgagcaataccggtgcgcccattactgtgccggtaggtaaaggtacgttgggacgcattgtcgatgtattgggaacgcctgttgacgaagcaggtccgatcgataccgacaagagccgtgccatccaccaagctgcccctaagtttgacgaactgtcttccacaaccgaattgctcgaaacgggcattaaagtgattgacttgctgtgtccgtttgccaaaggcggtaaagtaggtctgttcggcggtgccggtgtgggtaaaaccgtgaacatgatggaattgatcaacaacatcgccaaagcgcacagcggcttgtccgtgttcgcaggcgtgggtgagcgtacccgcgaaggtaacgacttctaccacgagatgaaagattccaacgtattggataaagtggcaatggtttacggtcagatgaacgaacctccgggcaaccgtttgcgcgtcgcattgaccggtttgaccatggcggaatacttccgtgacgaaaaagacgaaaacggcaaaggccgcgacgtattgttcttcgtggacaacatctaccgttacaccctggctggtaccgaagtatccgcattgttgggtcgtatgccgtctgcagtgggctaccaaccgacattggcagaagaaatgggtcgtttgcaggagcgtattacctctacccaaaccggttctattacttccatccaagccgtatatgtacctgcggacgacttgaccgacccgtctccggcaacaacgttcgcccacttggacgcaaccgtcgtattgagccgcgatattgcctctttgggtatttacccggcagtcgatccgcttgattctacttcgcgccaactggatccgatggtattgggtcaagagcactacgacgtggcgcgcggtgtgcagtccaccctgcaaaaatacaaagaattgcgcgacatcatcgccatcttgggtatggacgaattgtctgatgaagacaaactgaccgtaatgcgtgcgcgtaaaatccaacgcttcctgtcccaaccgttccacgttgccgaagtgtttacaggttctccgggtaaatatgtcgccctgcgcgataccattgccggcttcaaagccatcttgaacggcgaatacgatcatctgcccgagcaggcattctatatggtcggcagcattgaagaagcagtagagaaagcgaaaaccttaaactaa

SEQ ID NO: 42146 - DNA, 480 bp, Neisseria meningitidis; identical to SEQ ID NO: 36216

SEQ ID NO: 42147 - DNA, 1005 bp, Neisseria meningitidis
atgtcgggcgcggctgccgcgctgcttgccggcatcatcctttatttcaaaagcgacaagaagcggcaggaaaacggggaatggagttccggccttgaatacgcctatatcctgacagcggtcggcgtgtttgccgctttgtccctgtttatgagctttaccgccgttttcctgattttcgttgtattgtgcggtacggcttggggggtatataaataccgcctgaagactcatcccgaaatctcggaaagcagccacttcggcgattatttcggcagtttcttccctaccgttttggtattgttcctcatccggtcgtttatcgccgaaccgttccaaatcccgtccagctcgatgcgcccgggcctgatcaagggcgatttcattttggtcggcaaattttcctacggcctgcgcgtacccgttttaaacaatatatttattcctacaggcaaaatcgaacggggcgatgtcgttgtttttaattatcctctgcagccggagatgacctacatcaagcgtattgtcggcattccgggcgatgtggtcgaatatcgggataagattttgacggtaaatggcaaacccacttccgacattcctgacggcacataccgttatcccgacgacaccgacccttccgaaatccacaacacggatatgttccgcagcggtctagacggcaaatccttcaatattctgaaaaaagaaggacagcctgccgtttccctgcccgtattgggcaaatatacctccgatattatgtctgaaaacggatattccatagagcaaagcggtttggaacactgccaatatgccgacgacggcagcggtttcgtgtgcaaagttcccgaaggacgctatttcgctatgggcgacaaccgcgacaacagtgccgattcgcgctactggggatttgtggatgacaagctggttgtcggcaaggcaatgttcattttgatgaacttcggcgatttcggcaggtccggtacggcaatccgttag

SEQ ID NO: 42148 - DNA, 594 bp, Neisseria meningitidis
atggcaagcattcaagacttatacgaaaccgtcagccgcgttttgggcaatcaggcaggcaaagtcatttccgctttgggcgagattaccgtcgagtgtctgcccgagcactatatttcagtcatgaccgcattgcgtgaccatgaagagttgcatttcgagcttctggttgacttgtgcggtgtcgattacagcacttacaaaaacgaagcatggcagggcaaacgctttgccgtcgtcagtcagttgctttccgttaaaaacaatcaacgcatccgcgtgcgcgtctgggtttcagacgacgacttccccgtagtcgaatctgtagtcgatatttacaacagcgcggattggtacgaacgcgaagccttcgatatgtacggcatcatgttcaacaaccatccggacttgcgccgcatcctgaccgattacggcttcgtcggacatccgttccgcaaagacttcccgatttccggctatgtggaaatgcgttacgacgaagagcaaaaacgcgtgatttaccaacctgttaccattgagccgcgcgagatcacgccgcgtatcgtccgtgaggagaactacggtggccaataa

SEQ ID NO: 42149 - DNA, 381 bp, Neisseria meningitidis; identical to SEQ ID NO: 39549

SEQ ID NO: 42150 - DNA, 2283 bp, Neisseria meningitidis
atgacggtttttcggatttgctttattatccgtttatttttgaaatatctggggtggggagacgtgttccgtcgttggtttttgccgtgttgggttgtcggcgcggcggcttcgtttgcgctgccggtcgtgccgcattggctgttttggctggcggcttttgcggtttttgctgtgtttgcaaggcgttttgcgtttgccggtctgatgctgtgcgtgttggcgggcgcggcttacggcgtattcagaacggaagcggcactgtcttcgcaatggcgggcggaggcggtttcaggtgtgccgttgacggtggaagtggcggatatgccgaggtcggacgggcggcgcgtgcagtttgcggcaaaggctgtggacagcggtggtcggacgtttgatttgctgctgtcggactacaaacggcgcgaatgggcggtcgggagcagatggcggataacggcacgtgtgcaccccgtcgtcggcgaattgaacctgcgcggtttgaaccgtgaggcgtgggcattatccaacgggataggcggcgcggggacggtcggtgcggacagggttttgctgcatggcggaagcggttgggggattgcggtttggcgcagccgcatcagccgtaattggcagcaggcggatgcggacggcgggctttcagacggcatcgggctgatgcgcgcgttgagcgtgggcgaacagtcggcattgcgccccgaattgtggcaggcgttccgaccgttggggctgacgcatttggtcagtatttcgggtttgcacgttacgatggtggcggtgatgtttgcgtggctggcgaagcggctgcttgcctgttccccgcgccttcctgcccggccgcgcgtgtgggttttggcggcggggtgtgcaggcgcgctgttttacgcgctgcttgccggtttttccgtgccgacgcagcgcagcgttttgatgttggcggcgtttgcgtgggcttggcgcaggggaagattgtcggcgtgggcgacgtggtggcaggcgttggcggcggtgctgctgttcgacccgtcggcggtcttgggtgtggggacttggctgtctttcggtttggtggcggccctgatatgggcgtgctcggggcgtttgcacgagggaaaacggcaaactgctttgcgcgggcagtgggcggcttcggtgttgtcgctggttttgctcggttatctgtttgcttcgctgcctttggtcagccctttggtcaatgcggtggcaattccgtggttttcttgggtattgacgccgctggcgttgctgggttcggtcgtgccgtttgcgcctttgcaacagttgggggcatttttggcggaatatactttgcggtttttggtgtggcttgccgatgtgtcgcccgagtttgccgttgcctccgcacctttgccgctgttggtgttggcggtgtgtgccgctttgctgttgctgctgccgcgcggcttgggtttgcgtccgtgggcggtgttgctgttggcagggtttgtgttttaccgttcacccggcgtgccggaaaatgaggttgcggttacggtttgggatgcggggcagggtttgtcggtgtcggttcagacggcaaatcatcatcttttgtttgacaccggaacggcagcggcggcgcagatggggattgtgccgagcttgaatgcgtcgggaatcaggtatttggattatttggttttgtcgcatcacgacagcgaccacgacggcggttttcaggcagtcggcaagataccgaacggcgggatttatgccgggcagccggaattttatgagggggcgcggcattgtgcggaacagcgttggcaatgggacggcgtggattttgagtttttgatgccgtctgaacgcaaaaacatcgatgataatgggaaaagttgtgttttgcgtgttgtggcgggcggtgcggcactgctggtaacgggcgatttggatacgaagggcgaggaaagcctggtcggcaagtatggaggcaacctgtacagccaggttttggttttgggacatcacggcagcaatacgtcctcgtcgggcgtgttcctcaatgccgtctcgcccgaatatgccgttgcttcaagcggttatgccaacgcctacaaacatccgaccgaagcggtgcagaaccgtgtccgcgcacacggcatcaaactgctgcgtaccgatttgtcgggcgcactgcaattcggcttgggacgcggcggcgtgaaggctcaacgtttgagagggtataaattctattggcagaaaaaaccgtttgaatga

SEQ ID NO: 42151 - DNA, 396 bp, Neisseria meningitidis
atggataaaaacctgcttgaagccgtcaaatttgacgaaaaaggtttggtttgcgccatcgcccaagatgccgaaaccaaacgtattttaatggtggcgtggatgaacgccgaagccctgcaaaaaaccgtcgaaaccggctttgcccactattacagccgttcgcgccaaaaacaatggatgaagggcgaagagtcgggacacacgcaaaaagtccgcgcactgcgcctcgactgcgacggcgacgccattgtgatgctcatcgcccaaaacggcggcatcgcctgccacaccgggcgagaaagctgcttttacaaagtctggcgtggcagcgcgtgggaaaccgccgatgccgtcctgaaagacgaaaaagagatttacggcagcacgcactga

SEQ ID NO: 42152 - DNA, 1422 bp, Neisseria meningitidis
atggacacaaaagaaatcctcggctacgcggcaggctcgatcggcagcgcggttttagccgtcatcatcctgccgctgctgtcgtggtatttccccgccgacgacatcgggcgcatcgtgctgatgcagacggcggcggggctgacggtgtcggtgttgtgcctcgggctggatcaggcatacgtccgcgaatactatgccaccgccgacaaagacaccttgttcaaaaccctgttcctgccgccgctgctgtctgccgccgcgatagccgccctgctgctttcccgcccgtccctgccgtctgaaatcctgttttcactcgacgatgccgccgccggcatcgggctggtgctgtttgaactgagcttcctgcccatccgctttctcttactggttttgcgtatggaaggacgcgcccttgccttttcgtccgcgcaactcgtgcccaagctcgccatcctgctgctgctgccgctgacggtcgggctgctgcactttccagcgaacaccgccgtcctgaccgccgtttacgcgctggcaaaccttgccgccgccgcctttttgctgtttcaaaaccgatgccgtctgaaggccgtccggcacgcaccgttttcgcccgccgtcctgcaccgggggctgcgctacggcataccgatcgcactgagcagcatcgcctattgggggctggcatccgccgaccgtttgttcctgaaaaaatatgccggcctggaacagctcggcgtttattcgatgggtatttcgttcggcggggcggcattattgttccaaagcatcttttcaacggtctggacaccgtatattttccgcgcaatcgaagaaaacgccccgcccgcccgcctctcggcaacggcagaatccgccgccgccctgcttgcctccgccctctgcctgaccggcattttctcgccccttgcctccctcctgctgccggaaaactacgccgccgtccggtttatcgtcgtatcgtgtatgctgccgccgctgttttgcacgctggcggaaatcagcggcatcggtttgaacgtcgtccgcaaaacgcgcccgatcgcgctcgccaccttgggcgcgctggcggcaaacctgctgctgctggggcttgccgtgccgtccggcggcgcgcgcggcgcggcggttgcctgtgccgcctcattctggctgttttttgccttcaagaccgaaagctcctgccgcctgtggcagccgctcaaacgcctgccgctttatctgcacacattgttctgcctgacctcctcggcggcctacacctgcttcggcacgccggcaaactatcccctgtttgccggcgtatgggcggcatatctggcaggctgcatcctgcgccaccggaaagatttgcacaaactgtttcattatttgaaaaaacaaggtttcccattatga

SEQ ID NO: 42153 - DNA, 264 bp, Neisseria meningitidis
atgtcattaatcgaatttttattcggcagaaagcagaaaacggcaaccgttgcccgcgaccgccttcaaatcatcattgcccaagagcgcgcccaagaaggtcaggctccggattacctgccgactttacgtaaagagttgatggaagtcctgtccaaatatgtgaatgtttcattagacaatatccgtatttcccaagaaaagcaggatggtatggatgtgcttgagttgaacattactttgccggaacagaaaaaggtatag

SEQ ID NO: 42154 - DNA, 1002 bp, Neisseria meningitidis
atgattgacagacaaacaaacgaacccaaacaaaaaacccgaatcatccttgcccctatgcagggtctggtcgatgacgtgatgcgcgacctgctgacgcgtattggcggctacgacgaatgcgtcagcgaatttgtacgcattacccataccgtgcattcccgatccatatggttaaaatatgtccccgaaatcgccaacggaaacaaaacgttttccggcacgccctgcaccgtccaacttttgggcagcgatgcggacaatatggcggcgaatgcgctggaagccgtccgcttcggtgcgaacaaaatcgatttgaacttcggctgccccgcgcccaccgtcaacaaacacaaaggcggcgcaatccttttaaaagagccggaactgatattccacatcgtcaaaacgctgcgcggacgtttgcccgcacatattccgctcaccgcaaaaatgcggctcggttacgaagacaaaagccgggctttggaatgcgcctgtgcgattgccgaagggggcgcatgcggactgaccgtacacgcgcgtaccaaagccgagggttacgaaccgccggcgcattgggaatggataaggaaaatccgagacagcgtcaatattcccgttaccgccaacggcgacgttttcagcctgcaagactatatcggcatcaaaacaatcagcggctgcaacagcgtgatgctcggtcgcggcgcggtcatccgccccgatttggcgcggcaaatcaagcaatacgagaacggcgggccggtcaaagacacggattttgccgaagtttccaaatggatacggcagtttttcgagctgtgcctgacaaaagaggcaaacaacaaatatccgctggcgcggctgaaacagtggctgggtatgatgaagaaagaatttgcagcagcacaaaatctgttcgaccgcgtccgaacggttaaggatgcggacgaagttcggaacatcttggctgaatttgagcgagaaatgaatacttga

SEQ ID NO: 42155 - DNA, 450 bp, Neisseria meningitidis; identical to SEQ ID NO: 36806

SEQ ID NO: 42156 - DNA, 480 bp, Neisseria meningitidis; identical to SEQ ID NO: 41071

SEQ ID NO: 42157 - DNA, 600 bp, Neisseria meningitidis; identical to SEQ ID NO: 37454

SEQ ID NO: 42158 - DNA, 843 bp, Neisseria meningitidis
atggataaagaacgaattttaacccccgcagtcgtgttttccgtcgcactgctgcatttggcaatggtggcattgctctggcaggcgcacaagctgcccgtgatagagtcaggcaatgttattgaatttgtcgatttgggcgattttggcggaggggacggcgcccccgaaggtgcaggcgcgcctgctgcgcccgaaccgcaacccgtgcccgagccgcccaaacctgtcgagccgcccaagccggttttgaagccggtggttacgaaaaaggcggatgcggatattcagcagcctaaggaagagccgaaacctgaagaaaagccgaaacccgaagaaaaaccgaaaccagagcctaagccggaagcgaagcctgtcccgaaaccggcggaaaaaccggtcgagaagccgtctgaaaaacctgccgaacatcccggcaatgcttctgccaaagcagacagcgagcagggcaatggggaagataagggaactggtaccaaaggagacggaacggggcgcggagaaggcagcggtaaaggtagcggcggtgtcaaaggcgaacacggggaaggagccggcagcagcaaaggcaatcctttacgcgccaacggcagcattccgcgcccggcttatcccacgctttctatggagaatgacgagcagggtacggttgttttgagcgttttggtttctccgggcggtcatgttgagtccgttaaaatcgtgaaaagcagtggtttttcccggttggacaatgcggcacgcaaggcggcgcaaaacgggcattttcaagccaatgcctggacggagtttaaagtccccgtcaagtttgaattgaattag

SEQ ID NO: 42159 - DNA, 942 bp, Neisseria meningitidis
atgccgaccccgaaagcctttgccctgctcgggccgaccgccggaggcaaaaccgcgctcgccctcaaaattgccgaaaccctgcctgtcgaaatcatcagcctcgattccgcgctggtttaccgcgatatggacatcggcacggcgaaaccgtccgcctccgaacgcgcctttgtcccgcaccaccttatcgacatcatcccgcctaccgaatcatacagcgccgcccgctttgtcgaagactgcacgcgcttggtcggggaaatttcctcacgcggcaggtttgcccttattgtcggcggcacgatgatgtatttccgcgccctgacccaaggtttgaacgatttgcccgaagccgacgcctgcctgcgtgccgacttggacgaacaaaaacagatgtacggcttggatttcctctaccgcaccctgcaaaaagtcgaccctgaaaccgcatgccgtctgaaaccgaacgacagccagcgtatcggacgcgctttggaagtttattatttaaccggcaaaccgatgagcacacatctcggcagcctgacctcccatacgctcccttttgatttgcataccgccgccctgattcccgaaaaccgtgcccgcctgcatgaaaacatcgccctgcgtttccacctgatgcttgaacagggctttatcggcgaagtagaaaacctgcgccgccgctatcccggcctgaccgcctactcccccgccatccgctgcgtcggctaccgtcaggcatggaaatatctggatggaaaaaccgatttcccggcatttgtcgagaaaggcattgccgccacccgccaacttgccaaacgccaactgacttggttgcgcaaaacacctttagactgcgttgccgacccgttttcagactgcacttcatgcacacgcctgattgaggcggcaaaacggtttttcggcgcataa

SEQ ID NO: 42160 - DNA, 171 bp, Neisseria meningitidis
atgaaatacggcgtattttttgcggcggcaaccgccctcctgctctcggcctgcggttacaaaggcgacctctacctgcccaaagaaggcgacaaggcgcgtttcggcgtaatccaaaccggtttgcaacttcaaagcaaaccgcaatccgctccacaaacccaaaaatga

SEQ ID NO: 42161 - DNA, 474 bp, Neisseria meningitidis
atgactgatttttccgtttgggagaccgccccctttggtgcaaccgtcgatcatatcctgcaacgctaccacaatgtccaccgtgcacaatttgaagaattggtgccgctggcgcaaaaagtggcccaagttcatgccgacacctttccggcggaaattgccgagctgcttgcctatatgcagaacgaactgctgatgcatatgatgaaagaggaaaggatgctgtttccgatgattaatcagggtgtcggacgcggtgcggcgatgcccatcggcgtgatgatgcacgaacacgaagaacacgaccgcgccatcgcacggctcaaagagctgaccgacaatttccaaccgccagaaggggcttgcggaagctggacgcggctttacgcgctggcgaaagaaatggtggaggatttgaacgaccacattcatttggaaaacgatattttgtttgcccgcgtactcgattcttaa

SEQ ID NO: 42162 - DNA, 375 bp, Neisseria meningitidis
ttggccgaaggtcaaaaatcagccgtcacagagtattacctgaatcacggcgaatggcccggcaacaacacttctgccggcgtggcatcttcttcaacaatcaaaggcaaatatgttaaggaagttacagtcgcaaacggcgtcattaccgccacaatgctttcaagcggcgtaaacaaagaaatccaaggcaaaaaactctccctgtgggccaagcgtcaagacggttcggtaaaatggttctgcggacagccggttacgcgcaacgccaaagccgccaacgacgacgttaccgccgccgccgccgccaacggtaagaagattgacaccaagcacctgccgtcaacctgccgcgacgcaagtgatgccagctaa

SEQ ID NO: 42163 - DNA, 378 bp, Neisseria meningitidis; identical to SEQ ID NO: 39350

SEQ ID NO: 42164 - DNA, 888 bp, Neisseria meningitidis
  misc_feature 8, 9, 10, 11, 12: 'n' is a, c, g or t
gtgtgtgnnnnnaaccgccacaaaagcaccatcagccgcgaaatcagacggcaccgcacccaagggcagcaatacagcgccgaaaaagcccagcggcaaagccagactatcaaacagcgtaagcgacaaccctataagctcgattcgcagctgattcagcacatcgacccccttatccgccgcaaactcagtcccgaacaagtatgcgcctacctgcgcaaacaccaccagatcacgctccaccacagcaccatttaccgctaccttcgccaagacaaaagcaacggcagcacgttgtggcaacatctcagaatatgcagcaaaccctaccgcaaacgctacggcagcacatggaccagaggcaaagtacccaaccgtgtcggcatagaaaaccgacccgctatcgtcgaccagaaatcccgtatcggcgattgggaagccgacaccattgtcggcaaaggacagaaaagcgcattattgaccttggtcgaacgcgttacccgctacaccatcatctgcaaattggatagcctcaaagccgaagacactgcccgggcagctgttaggacattaaaggcacataaagacagggtgcacaccatcaccatggataacggcaaagagttctaccaacacaccaaaataaccaaagcattgaaagcggagacttatttttgtcgcccttaccattcttgggagaaagggctgaatgagaacaccaacggactcatccggcaatacttccccaaacaaaccgatttccgtaacatcagtgatcgggagatacgcagggttcaagatgagttgaaccaccgaccaagaaaaacacttggctacgaaacgccaagtgttttattcttgaatctgttccaaccactaatacactag

SEQ ID NO: 42165 - DNA, 510 bp, Neisseria meningitidis
atgacagacactcaaaaccgggtagccatgggctacatcaaaggcgtattcggcataaaaggctggttgaaaattgccgccaacaccgaatattccgacagccttttggactaccccgagtggcatttggtcaaggacggcaaaaccatcagcgttacccttgaagccggaaaagtcgtcaacggcgaactccaagtcaaattcgaaggcataaacgaccgcgacttggcattctcattgcgcggttacaccatcgaaataccccgtgaagcattcgccccgacagaagaagacgaatactactggacagacttggtcggcatgaccgttgtcaacaaagaccataccgttttaggcaaggtaagcaacctgatggaaaccggcgcaaacgacgtattgatgattgacggagaacacgggcagattctgattccgttcgtttcccaatatatcgaaaccgtcgataccggcagcaagaccattactgccgactggggtttggactactga

SEQ ID NO: 42166 - DNA, 198 bp, Neisseria meningitidis; identical to SEQ ID NO: 36305

SEQ ID NO: 42167 - DNA, 453 bp, Neisseria meningitidis
atggcaaaaccgctcaaataccccgtttccgcactggtcgtcctttatagcggggacggcggcatcctgctcatcgaacgcacgcatccggaaggattttggcagtcggtaaccggcagcctcgaaccgggcgaaaccgtcgcccaaacggcaaggcgcgaagtttgggaagaaaccggcatcctgctggcggacgggcagcttcaagactggcacgacagcacggtttacgaaatctaccaccactggcggcaccgctatccaaaaggcgtgtttgaaaaccgcgaacacctcttctctgccgaaatcccgcgtgatacgcccatcgccctgcaacccgaagaacacgtctcctacggttggttcgatatggaagaagcagcggaaaaagtattttccccgtccaacaggcgcgcgattttggaactgggcaggtttttgggcaaacggtaa

SEQ ID NO: 42168 - DNA, 1515 bp, Neisseria meningitidis
atgactacctccaaatgccctgtaacccatctgaccatgaacaacggcgcgcctgttgccgacaatcaaaacagcctgaccgccggtcctcgcggccctctgctggcgcaggatttgtggctgaatgaaaaactcgccgacttcgtgcgcgaagtcatccccgaacgccgtatgcacgccaaaggttcgggcgcgttcggtacgtttaccgtaacgcacgacatcaccaaatacacccgcgccaaaatcttcagcgaagtcggcaaaaaaaccgagatgttcgcccgtttcaccaccgtggcaggcgaacgcggcgcagccgatgcagaacgcgacatccgcggttttgccttgaaattttataccgaagaaggcaactgggatgtggtcggcaacaacacgcccgtgttcttcctgcgcgacccgcgtaagttccccgacctgaacaaagccgtcaaacgcgacccgcgcaccaatatgcgctctgccacaaacaactgggacttctggacgctgctgcccgaagcactgcaccaagttaccatcgtgatgagcgaccgcggcatccccgccggctaccgccatatgcacggcttcggttcgcatacctacagcttctggaacgaagcaggcgagcgtttttgggtgaaattccatttccgcacccaacaaggcattaaaaacctgaccaacgaagaagccgccaaaatcatcgccgacgaccgcgaaagccatcagcgcgacttatacgaagccatcgaacgcggcgagtttccgaaatggacgatgtacatccaagtcatgcctgaagcagacgcggaaaaagtaccttatcatccgtttgacttgaccaaagtttggccgaaaaaagactatccgctgattgaagtgggcgaattcgagttgaaccgcaatcccgaaaacttcttcgccgatgtggaacaatccgccttcgcaccgagcaacctcgttcccggtgtcggcgccagcccagataaaatgctgcaagcgcgtttgttcaattacgccgacgcacaacgctaccgtttgggcgtaaacttccgccaaattcccgtcaatcgtccgcgttgccctgttcacagcaaccagcgcgacgggcaaggccgagccgacggcaactacggcagcctgccgcactacgaacccaacagcttcggtcaatggcagcaacaacccgacttcgccgaaccgcctttgaaaatcaacggcgacgcggcacactgggactaccgccaagacgatgacgactatttcagccaaccgcgcgccttgttcaatttgatgaacgatacgcagaaacaggctttgttcggcaacaccgccgccgcaatgggcgacgcgcccgacttcatcaaataccgccatatccgcaactgctaccgttgcgacccggcatacggcgaaggcgtggccaaagcccttggactgactgtcgaagatgcccaagccgcccgcgcgaccgatcccgcactgggtcaggctggtttgctgtaa

SEQ ID NO: 42169 - DNA, 2151 bp, Neisseria meningitidis
atgaaaaccccactcctcaagcctctgctcattacctcgcttcccgttttcgccagtgtttttaccgccgcctccatcgtctggcagctaggcgaacccaagctcgccatgcccttcgtactcggcatcatcgccggcggccttgtcgatttggacaaccgcctgaccggacggctgaaaaacatcatcgccaccgtcgccctgtttaccctctcctcgctcacggcacaaagcaccctcggcacagggctgcccttcatcctcgccatgaccctgatgaccttcggctttaccattttaggcgcggtcgggctgaaataccgcaccttcgccttcggcgcactcgccgtcgccacctacaccacacttacctacacccccgaaacctactggctgaccaaccccttcatgattttatgcggcaccgtactgtacagcaccgccatcatccttttccaaatcatcctgccccaccgccccgttcaagaaaacgtcgccaacgcctacgaagcgctcggcagctacctcgaagctaaagccgactttttcgatcccgacgaagccgaatggataggcaaccgccacatcgacctcgccatgagcaacaccggcgtcatcaccgccttcaaccaatgccgttccgccctgttttaccgccttcgcggcaaacaccgccacccgcgcaccgccaaaatgctgcgttactactttgccgcccaagacatacacgaacgcatcagctccgcccacgtcgattatcaggaaatgtccgaaaaattcaaaaacaccgacatcatcttccgcatccaccgcctgctcgaaatgcagggacaagcctgccgcaacaccgcccaagccctgcgcgcaagcaaagactacgtttacagcaaacgcctcggccgcgccatcgaaggctgccgccaatcgctgcgtctcctttccgacggcaacgacagccccgacatccgccacctgcgccgtcttctcgacaacctcggcagcgtcgaccaacaattccgccaactccagcacaacggcctgcaggcagaaaacgaccgcatgggcgacacccgcatcgccgccctcgaaaccggcagcctcaaaaacacctggcaggcaatccgtccgcagctaaacctcgaatcaggcgtattccgccatgccgtccgcctgtccctcgtcgttgccgccgcctgcaccatcgtcgaagccctcaacctcaacctcggctactggatactgctgaccgcccttttcgtctgccagcctaactacaccgccaccaaaagccgcgtccgccagcgcattgccggtaccgtactcggcgtaatcgtcggctcgctcgtcccctacttcaccccgtctgtcgaaaccaaactctggattgtcatcgccagtaccaccctctttttcatgacccgcacctacaaatacagtttctccaccttcttcattaccattcaagccctgaccagcctctccctcgcaggtttggacgtatacgccgccatgcccgtacgcatcatcgacaccattatcggcgcatcccttgcctgggcggcggtcagctacctgtggcccgactggaaatacctcacgctcgaacgcactgccgcccttgccgtatgcagcaacggcgcctatctcgaaaaaatcgccgaacgcctcaaaagcggcgaaacggccgacgacgtcgaataccgcgccacccgccgccgcgcccacgaacacaccgccgccctcagcagcaccctttccgacatgagcagcgaacccgcaaaattcgccgacagcctgcaacccggctttaccctgctcaaaaccggctacgccctgaccggctacatctccgccctcggcgcataccgcagcgaaatgcacgaagaatgcagccccgactttaccgcacagttccacctcgccgccgaacacaccgcccacatcttccaacacctgcccgaaaccgaacccgacgactttcagacagcactggatacactgcgcggcgaactcgacaccctccgcacccacagcagcggaacacaaagccacatcctcctccaacagctccaactcatcgctcggcagctcgaaccctactaccgcgcctaccgacaaattccgcacaggcagccccaaaacgcagcctga

SEQ ID NO: 42170 - DNA, 300 bp, Neisseria meningitidis
atgaccgcatccatgtacatccttttggtcttggcactcatctttgccaacgcccccttcctcacgaccagactgttcggcgtggccgcactcaagcgcaaacatttcggacaccacatgatcgagctggcggcaggtttcgcgctgaccgccgttcttgcctacatcctcgaatcccgtgcaggatcggtacacgatcagggttgggagttttatgccacagtcgtctgcctgtacctgatttttgcgtttccatgttttgtgtggcggtatttttggcacacgcgcaacagggaatag

SEQ ID NO: 42171 - DNA, 507 bp, Neisseria meningitidis
atggttgacgcttggtctgtccctgattttgaatcgaaaatctgtccgcccgaggcgttggcggcgcgtttggcgttgttgccgcgcccgctggtgtttaccaacggctgtttcgacatcctccacagggggcacgttacttatctggcgcaggcgcgttcgatgggggacgcgttggtgctggcgttgaataccgatgcttcggtgcggcgtctgggcaagggcggtgaccgcccggttaatcctttggagaaccgtgccgccgttgccgccgctttggaaagtgtggatttggtaacgtggtttgacggggatacgccggcggcgttgattgaggcggtcaaacctgagattttggtcaagggcggcgattgggctgcggataagattgtcggtgcggcagaaacgttggcgcgcggcggtcaggtgttttcaattccgtttctgcaccagacttcgacaacgaagactttggcaaaaatccgtgcggcagagggcggaaaatga

SEQ ID NO: 42172 - DNA, 1035 bp, Neisseria meningitidis
atgagcctgcccgcaatggatgccggtatttatctcgaagaaactgccccgcgcgccctgattgaacacaacaatattttggataattcggtcggcgtatatctgcatggttctgccgatgcgatggtgcgcgagaataaaatcgtcggcgacgcgactttgcgcgtgaacgagcgcggcaacggcgttaccgtttggaacgcacccggtgcgcaggtcgtcggcaacgacatttccaaagggcgggacggcattttttccaataccagcacgcacaacacctacaaaaacaaccgcttcagcgatttgcgtttcgccgtccactatatgtacaccaacgacagcgaaatcagcggcaatatttccgtgggcaacaatatgggctatgtgctgatgttttccgagcggctcaaagtattcgacaatatcgccgtcggcagccgcgatcagggcattatgctcaactatgtcaactattccgatattcacgacaacattatcaacaaggcaggcaagtgcgtatttgcctataatgccaactacgataaacttttcgccaatcattttgaaaactgtcaaatcggcatacactttaccgccgccatcgaaggcacgtccttgcatgacaattcctttatcaacaacgaaagccaggtcaaatacgtcagcacgcgctttctcgattggagcgagggcggacacggcaactattggagcgacaacagcgcgttcgatttgaacggcgacggcttcggagacagcgcgtaccgccccaacggcatcatcgaccaaatcatctggcgcgcgcccgtatcgcgccttttgatgaacagtcccgcaatcagcatcgtcaaatgggcgcaggcgcagtttcccgccgttctgcctggcggcgtggtggacagcaaaccgctgatgaagccttatgcccccaaaattcaaacccgttatcaggcgatgaaggacgagctactcaaagaagtcgaaacgcggcagtcggaatggggcagggcggaaaacggttctttgaactag

SEQ ID NO: 42173 - DNA, 1425 bp, Neisseria meningitidis
ttggtatttatcatgaaaatttccagacctccggaatttaccctgttgcaacaggaatatatgcagcatctcactgaaagaatgacgcaaattgccaagctgctgaattcttccgcaaacaatcctgatatagacattcccgattttcttactgaaatcaaagattattcagaattttccgtgacagatgaaaatggaacctacctgcattgggacaaattccgccggattcacacggaagatacgcggatgaaatggcgcgccgttaaggaaagccgcaaaaaaatccaaaaaccaattgatttcccgtttgaacatcagttttggttctgcattcccgactctttgcaggcacggcttcatttgattgacaaaagctgcggcagttctatcggcacgtctagcttgggtggcttcggcagaagcgagcaaaacagattcttgctcaagtctctgattatggaagaagcgattacatccgcccaactggaaggtgcggctaccacgcgtaaagtggccaaggatatgctcaaatcgcagcgtaaacccaaaacaaaagacgaaatcatgatagtgaacaactatcacttgatgaaaaaagcggtagaattgaaaaatacgccgttaagtgttgaaatgattttggatttgcaccgcattgctaccagtaacgctattgaaaacaaggccgagcccggacaattcaggcaggatgacgaaatctttatcgccgatatcaatggtaacagcctgtatcaaccaccgccgcacggacaggttcatacgctgatggaagaggtgtgtgcgtttgccaataatacctatgacggcgtggaaaatccgtttatccatccggttgtccaagctattatcttgcatttcctcatcggctacatccacccatttggtgatggcaacgggcggacagcgcgggctttgttctattggtttatgctcaaaaacggctactggctatttgaatacatatccatcagccgtcttctgaaaaacgctcctgcccaatacgccaaatcctatttgtatgcggaaactgacgatttagatttaacctatttcatctattaccaatgcgatattatcaagcgggcggttgccgatttggagcactacatttccgacaaacaaaaacaccaacaggaattcaaagcagcgattgcccaatatactgaaaagataggaaagttgaaccaacggcaaattggtatcctgcaaaaagcagtggaagaaagcggaaaaatctttactgcacaagaaattgccaaccaatacggcatctccctgaatactgcccgtagcgatttgagtaaactgggagaatatagattcctagtgccgttcaaatcaggaaatgctttagagtatgttgctcctcaggatttattggaaaggttagaaaaaaaatag

SEQ ID NO: 42174 - DNA, 321 bp, Neisseria meningitidis
atgccgcattattctttttattcaagcagtaggaaaatgacggataccaaattgaacaccaaagaaattttggaactgaaagcgcgcgcgcaccatctccatcctgttgtgatggtcggtcagcagggtctgacggacgcggtcatcaaggaaaccgatgcggcattgacggcgcatgagctgattaaagtgcgcgtattcggcgacgaccgtgccgaacgtatcgaaatctgcactgccttatgtgaggcggttgatgcgcaactggttcagcatatcggaaaacttttggtattgtggcgtaagaatatcgaagcctga

SEQ ID NO: 42175 - DNA, 954 bp, Neisseria meningitidis
atgcatcaatattatgacgcagtaattttatcggttggaaatgggttgttaaaaaggttctttaagcagaatgcgcaattaaatattgcttcaaggccattgattattaccttgtttccaggtgtagtattcggtgatcaggcaagtattctatctcgtatgggggctgatattgttttatataataataagcatgattttagaattgcagaggaatataagaaacaatataaattaagttgtcaaaatatactttatggttatccaatttttcgccatgcttcgaaaggttgtcatggagagaaaatttactttattgaccaagttaaaatcccatttaaaaaagaagaaagaatttatacattaaaaaaattgattgccttggctgaaaaataccctgagaaagaatttactattttgctaagggttgcagataaagatattactgtgcatcaggataaacattcgtatatagagctggcaaagcagtttcagttgccgagtaatttgacaatagagcgaaaaagtaccgcgcaagccttccaagaaatggggtattgtttatcttattcatctactatgctttttgaagctgaatgtaagggtatccctgttggtgttgttgcagacttaggcttttctaaatcctatgcaaatcagcattttttaggtagtggggttttagtttattttgatcaaatagatttcacttccccaaaaatagcagatccggattggcttgattgctatgctactaaaaaggtgattacaactgatgagtttaataagctattaaagcaggttgtgccattgcaacatgattaccaagaatatttatctgcagtgaatagtatagaatcaactaaaactatttttttaagaaaatttaaaaagttaattagggatcctaaaaagtttttttatgattctaaatggttgagaaaggtgatttaa

SEQ ID NO: 42176 - DNA, 792 bp, Neisseria meningitidis
atgattactgtgaacacactgcaaaaaatgaaggcggcgggcgaaaaaatcgctatgctgaccgcttacgaatccagttttgccgcgctgatggacgatgccggcgtggaaatgctgctggtcggcgattctttggggatggcggttcaggggcggaaatcgacgctgcccgtcagcctgcgcgatatgtgttatcacaccgaatgtgtagcacgcggtgcaaaaaatgcgatgattgtcagcgatttgccgtttggtgcatatcagcagagtaaggagcaggcgtttgccgccgccgccgaactgatggctgccggcgcgcatatggttaaactcgaaggcggcgtgtggatggcggaaacgactgaatttttgcaaatgcgcggtattccggtttgtgcgcacatcggtctgaccccgcaatccgtgtttgccttcggcggatataaagttcaggggcgcggcggcaaggcgcaggcgttgcttaacgatgccaaggcgcatgacgatgcgggggcggcggtcgtgctgatggagtgcgtactggcggaactggcaaaaaaggtaactgaaactgtttcctgtccgaccatcggcatcggcgcgggtgcggattgcgacgggcaggttttggtgatgcacgatatgctcggcattttcccgggtaagacggcgaaattcgtcaaaaactttatgcaggggcatgatagtgttcaagcggcggttcgggcgtatgttgccgaagtcaaagccaaaaccttccctgctgcggaacatatttttgcagattga

SEQ ID NO: 42177 - DNA, 1782 bp, Neisseria meningitidis
atgccttatttcgccctgtttgacgatgccgtaagcggccgcgcaaaacgctatcaaaatcatgtggaaagccgttttttccgtcccgaagaactcgatgctttggacggcgcgctgcaatcgggctggcaaaaagggctgcattcggtgttgtttgcagactacggattcggtttgccgctgacgggggttgagtccgaacgcggcggcaatcttgccctgcactggtttgccaactgcgccgacatcgatgccgaaagctggcttgcccgacactcagacggcctccccgccggcatttccacgccgcaaccctccgtatccgaaaccgattacctcgaccgcatccgccaaatccacgaagccatccggcgcggcgacacctatcaaatcaactacaccacccgcctgcacctgcaagcctacggcaatcccgtcagcctctaccgccgcctgcgccagcccgtcccctatgccgtcttgtcccacctgcccgatgcggaggggcaatccgcgtggacgctgtgtttctcgcccgaactcttcctcaaaatcggttcggacggcaccatcagcaccgaaccgatgaaaggcaccgcgccgattttgggcgacggacaagacgaacgccgcgccgccgagttgcaagcagacccgaaaaaccgcgccgaaaacgtgatgattgtcgatttgctgcgtaacgatctcggcaaaatcgcccaaaccggcacagtatgcgtacccgaaccgtttaaagtatcgcgtttcggcagcgtttggcagatgaccagcaccatccaagcccaagccttgccgcacacctcgttcgccgacatcctccgcgccgccttcccctgcggcagcatcaccggcgcgcccaaaaaaatgagtatgcagattatcgaatcgctcgaagccgaagcgcgcggactttatacgggcagcatcggctatttgaacccgtgttccggcggcttggggtttgaaggcacgttcaacgtcgttatccgcaccttgtcgctcacgccgctttcagacggcatttatcaaggcgtgtacggtgtcggttccggcatcgtcatcgacagcgaccccgccgccgaatatcgcgaatgcggctggaaagcccgtttcctcaacgaattgcgccccgacttcggcatttttgaaaccctgcgcgcggaaaacggacgctgcaccctgctcgaccgccacctatgccgtctgaaaacctccgcccaagccctcaacctgcccctgcccgacggctgcgaaaatcaaatcaaacaatacattgccgacttgcccgatggcgcgttccgcgtcaaagccctgctcgcttcagacggcatcagcctgtcccgcgccgttttaaaccgtctgaccgacaaacaacgcgtcatcatttcgcccgccgtcctgcccgcacaaaactacctgcgccgcttcaaaaccacctgccgcgccctcttcgaccaagcgtggcaaaccgccgaaacacaaggcgcgttcgacagcctgtttttcaattcagacggcatcctgctcgaaggcggcagaagcaacgtcttcatcaaacatcgcggacaatggctcacaccctctttagatttagacattttaaacggcataatgcgccaagccgtattggacgaaccgcaaaaatatttgcaaacaaatcaagtaatcgaaacacacatcacacaaaaaacactgcaagaagccgaagaaatccgcctctccaacgccttgcgcggcgtatttgccgccgcccttgcctga

SEQ ID NO: 42178 - DNA, 771 bp, Neisseria meningitidis
atgaccacgaccgaacacgacaacgacgatgcattcctgctgcggtacagccgccacatcctcttggacgaaatcggcatcgaagggcagcagaaactttccgccgcgcatattttggtcgtcggctgcggcggtttgggtgccgccgcactgccctaccttgccgcttcgggtgtcggcacgctgaccatagccgattccgacacggtcgaactgcacaacctgcaacgccaagtcgcatttgacgagggcgatgtcggcaaactcaaaaccgaagccttggcaggccgcctgaaacgcatcaaccataccgtcaacgtccgcgccgtcaacgaaaaactcgacggctgccgcctgaccggtttggttcaagccgccgacatcgttttagactgttgcgacaactacgccacgcggcaagccgtcaaccgtgcctgcgtgcaaacgaaaacaccgctggtttcaggggcggcggtacgctttgaagggcaacttgccgtgtaccgtcccgacttgcccgactcgccgtgttacgcctgcctgtttgacggcggatcggcttcagacggcatctgttctctcttcggcgtgttctcgccgctggtcggcatcatcggcagtacccaagcggcggaggctctgaaaatcctgctggatgcgggcgaaccgtcgcacggcaggctggcggtttaccgtgccttggaagggggctggcaatatttcgacctgccgcgcaaccctgaatgcccggtttgcggcacagcgcgataa

SEQ ID NO: 42179 - DNA, 1545 bp, Neisseria meningitidis
atgtgcggcgtattaggtttggtcagtcatgaacccgtgaaccagcttctgtacgacggcttgcagatgttgcagcacagggggcaggatgcggcgggcattgcaacggcggaaggcggtaccttccatatgcacaaaggcaaaggcatggtgcgcgaagtgttccgcacacgcaatatgcgcgatttgaccggcaacgccggcatcgcccacgtccgttatcctactgcgggcaacgcaggcagcagcgcggaggcgcagcctttctacgtcagctcgccgttcggcatcgttttggcgcacaacggcaacctcaccaacactgccgaactgtatgaaaacgtgtgtaacaaacacctgcgccacgtcaacaccagctccgattccgaagtcttgctcaacgtattcgcgcacgaattacgccgcgaagtctctaaaaacgccgacccgcaccggctcaatgccgacaatattttcaacgccgttgcccaagtccaccgcctggtgcgcggcgcatacggtgtgattgccatgattgcgggctacggtatgctcgccttccgcgacccttacggcatccgcccgctggtattgggttcgcaaaccgacagcgaaggcagaaaatcctatgccgtcgcctccgaatccgtcgccttcaacgcgcttacctacgatttggaacgcgacatccggccgggcgaagcggtatttgtcggctttgacggcacaatgattgcccgccaatgcagcgaccgtgccaaactcagcccctgcctttttgaatatgtttattttgcccgccccgactctgtgattgacggcgtatccgtttaccaatcgcgcttggatatgggcgtgtcgctggcggaaaaaatcaaacgcgagctgcccgtggacggcatcgatgtcgtgatgcccattcccgacaccagccgccccagcgcgatggagcttgccgtccatctcgacaaaccctaccgcgagggtttgattaaaaaccgctatatcggccgcacctttattatgcccggacaggcgacgcgcaaaaaatccgtgcgccaaaaactcagcccgatggaaaccgaatttgcaggcaaaagcgtgttgctggtggacgactccatcgtgcgcgggacgaccagccgcgaaatcgtcgaaatggtacgcgcggcgggcgcgcgcaaagtctatatcgcctccgccgcgcccgaagtgcgctatcccaatgtgtacggcattgatatgcccacgcgcgaagagttgattgccaacgggcgcagcgcggcggaaatcgccgccgaaatcggcgcggacggcatcgtatttcaagacttgggcgatttggaagccgtcgtcaaagcactcaatccgaaaatcgaatccttcgattcgtcctgtttcaacggcatttatcagaccggcgacatcgatgatgcctacctcgaccgcctgtctgccgagaaatccggctgcggcggtctgaaaatccacccgagcaggatggaacacagcatcagcatcagcgatgcgggcgacgaagaataa

SEQ ID NO: 42180 - DNA, 747 bp, Neisseria meningitidis
atgaaaagcagcacgcaggccgttttggaacacaccgccattcccaagcatatcgccgtgattatggacggcaacggccgttgggcgaaaaaacgtttcctcccgcgcataatgggacacaaacgcggtttggacgcattggaaaatatggtgaagcattgcgccaaactgggtgtgcaatatctgaccgtgtttgccttttcaaccgaaaactggcgccgccccgaagacgaagtttcgttcctgatggggctgtttttacaggctttgcaaaaacaggtacgtcgcctgcacgaaaacaatatgcgcctgaagatattgggcagccgcgaacgcttcaaccggcagattctgcaaggcatcgaagaggcggaagcgttgacggcaaacaataccggcctgaccctgagcattgccgccgattacggcggccgctgggatattttgcaggcggcaaacaaactgattgccgaaggcgtatccgagattacggaagacacgctggcgaaacacttgatgctgggcgatgcaccggaaccggatttgttcatccgcaccggcggcgaaacgcgcatcagcaatttcctgctctggcagatggcatatgcagaactgtatttcaccgatattttgtggcccgattttgacggcaaggctttggacgatgccgtcgcttcgttccaaaaacgcgaacggcggttcggacgcacctccgagcaactgcctatcgaacagcaaaggaactga

SEQ ID NO: 42181 - DNA, 591 bp, Neisseria meningitidis
atgacgggatttaatgatgccgccggcgtggcatcctcctccgacatcaaaggcaaatatgttgagaaagttgaagtcaaaaacggcgtcgttaccgccacaatgctttcaagcggcgtaaacaaagaaatcaaaggcaaaaaactctccctgtgggccaagcgtcaaaacggttcggtcaaatggttctgcggacagccggttacgcgcaacgacaccgccaccgccaccgacgtcgccgccgccaacggcaagaccgacgacaaaatcaacaccaagcacctgccgtcaacctgccgcgatgattcatctaccggttgcatagaaacaccacgcgccgatttcaaacactttcaaaaaatcagccgttaccgagtattgcccgaatcacggcaaatggcagaaaaacttcgtcattcccgcaaaagtgggaatctagttcgttggtttcagttatttagaataaattttgaaactttaatcccgtcattcccgcgaaagtgggaatccagaacgcaaaatctaaagaaaccgttttacccgataagtttccgtaccgacagacctggattcccgcctgcgcgggaatga

SEQ ID NO: 42182 - DNA, 402 bp, Neisseria meningitidis
gtgaagattaaaccattacaattttctaacaataatcacagattttatgtggacaaaatttgtgttaccgaacaagatgtgaacattttggcatccgaccgaaattatgaattaaatattgaaatatttattgacaatataattcattttcaaataacggatgaatcttataaagtaaaattttcagaatatttatttgaaaataaagaaaaaaatgattgggatagaaatcctgctataaattattttttcgagataatagatgatagttatatggactggttgaaagaagaaagttttgatttttttgaaaagaaatattataaggcttatattttcttttttagcgattctgtaatagaagttatcagctcgacagaacctgtattttattcaaaataa

SEQ ID NO: 42183 - DNA, 1185 bp, Neisseria meningitidis
atggctaaggaaaaatttgaacgtagcaaaccgcacgtaaacgttggcaccatcggtcacgttgaccatggtaaaaccactctgactgctgctttgactactattttgtctaaaaaattcggtggcgctgcaaaagcttatgaccaaatcgacaacgctcctgaagaaaaagctcgtggtattaccattaatacctcacacgtagaatacgaaactgaaacccgtcactacgcacacgtagactgcccggggcacgccgactacgttaaaaacatgattaccggcgccgcacaaatggacggtgcaatcctggtatgttccgcagccgacggccctatgccgcaaacccgcgaacacatcctgctggcccgccaagtaggcgtaccttacatcatcgtgttcatgaacaaatgcgacatggtcgacgatgccgagctgttggaactggttgaaatggaaatccgcgacctgctgtccagctacgacttccccggcgatgactgcccgattgtacaaggttccgcactgaaagccttggaaggcgatgccgcttacgaagaaaaaatcttcgaactggctgccgcattggacagctacatcccgactcccgagcgagccgtggacaaaccgttcctgctgcctatcgaagacgtgttctccatttccggccgcggtacagtagtaaccggccgtgtagagcgcggtatcatccacgttggtgacgagattgaaatcgtcggtctgaaagaaacccaaaaaaccacttgtaccggtgttgaaatgttccgcaaactgctggacgaaggtcaggcgggcgacaacgtaggcgtattgctgcgcggtaccaaacgtgaagacgtggaacgcggtcaggtattggctaaaccgggtactatcactcctcacaccaaattcaaagcagaagtatacgtactgagcaaagaagagggtggtcgtcacactccgttcttcgccaactaccgtccgcaattctacttccgtaccaccgacgtaaccggcgcggttactttggaagaaggtgtggaaatggtaatgccgggtgaaaacgtaaccatcaccgtagaactgattgcgcctatcgctatggaagaaggcctgcgctttgcgattcgcgaaggcggccgtaccgtgggtgccggcgtggtttcttctgttatcgcttaa

SEQ ID NO: 42184 - DNA, 426 bp, Neisseria meningitidis
atgaatttccttggcgtacaaggagagttgaaggttcacgagctgcatcacagaacagcaaccctgtgctttgagtggcttggcgaagtatctgcgccgcgcagaaaagagaactacaaagacctcaagccaaatgtattgtatgactttgatggttccggtaagcattttgccaaccctgacgcaaggtatctattgcccgtcggttcaagcggcttaatcttaaaacatatccaaatcgatgacgaagacactctgttgcggctatggtgcgcacgaaatatcccaatgccacaccggctatctaaaatcccgatgcttcggcagtattatctaagcaaggcatggcacgaaatttatgctatcaaccaacacctaaggaaaacgaagctgatagttgatgtggcatacgaccccacagattaa

SEQ ID NO: 42185 - DNA, 648 bp, Neisseria meningitidis
atgaaaggcgtttacttcgtcagcggcatagacacggacatcggcaaaaccgtcgccaccggcgtgttggcaaaacaattgttgcagcagggcaaaagcgtgattacgcaaaagcccgtgcaaaccggttgccaaaacattgccgacgacatcgccgtccaccgcaaaattatgggcataccgatgcaggaagccgacaaacggcggctgactatgcccgaaatcttcagctatcccgcttcgcctcacctcgccgcccgactggatggcagggctttggacttggacaaaatccgcaccgccacacaagaattggcggcgcagtacgaagtcgttttggtcgaaggcgcgggcggattgatggttccgctgacggaaaacctgttaaccattgattatatccgtcagcaaggctatcccgtcatcctcgttaccagcggacggctcggcagtatcaaccacactttactcagtttcgccgcgctcaaacaatacggcattcgcttgcacagcctcgtgttcaaccacatccacgacagccgcgacgcacacatcgcccaagacagcctgagctacttgaaatgccgtctgaaagccgatttttccgaagcggaatggatggagttggcaaaaacagacgcggtataa

SEQ ID NO: 42186 - DNA, 423 bp, Neisseria meningitidis
atgagcatcatgcaagttgaggtggtaagtagcgagcagaaaatctattcaggcgaggcaacatttatcgttgttccgactgtacagggcgaactcggtatttatccgcgacacgagccgattatgagtttggtgcggccgggggctttgcgtttgaccgttccgggcgaggataaagaggttttggttgctgtttccggcggtgttttggaagtacagcctgataaagtaactgtcttggcggatgttgccgtccgcagtgcggagatggatcgggcacgtgcggaagaggcgaaaaaagccgcagaagcgggcatttcccaagctaaagacgataaggctttggcggaagcgcataaagtattggctgctgcgattgcacagctcaaaactttggactatatccgttcgcacaagaaataa

SEQ ID NO: 42187 - DNA, 1104 bp, Neisseria meningitidis
atggaagccgaagtaatcaaccagctcaacaataccctgaacgatttggaaaagcgcagcgaagacatccgagtttatatggattatcagggtaagaaagaccgattggaagaagttatcggtctttccgaagaccccgaactttggaacgacccgaaacgcgcccaagaaatcggcaaagagcgcaaaatcctcgaaggcatcgtgttgacgctcgacaacatcgcttcgggcatcgaagacaaccgcatgctgattgaaatgaccgtcgaagaaaacgacgaagaaggttttgccgccgtgcaggaagacgtagcggggctggaaaaacagatggcggatttggagttcaaacggatgttcaaccagcccgccgacccgaacaactgctttatcgacatcaccgcaggcgcgggcggtacggaagcggaagactgggcgggtatgctgttccgtatgtacagccgctacgccgagcgcaaaggcttcagaatcgaaatccttgaagaagacgacggcgaaatcgcaggcatcaaccgcgccaccatccgtgtggaaggcgaatacgcttatggtttgctgcgtaccgaaaccggcgttcaccgcttggtgcgttactcgccgtttgactcgaacaacaaacgccatacctcgtttgcctccgtgttcgtttaccctgaaatcgacgattccatcgaaatcgaaatcaaccccgccgatttgcgcatcgacacctatcgcgcatcgggtgcgggcggtcagcacatcaataaaaccgactccgccgtgcgcattacccacgagccgacggggattgtggtgcaatgtcaaaacgaccgttcgcaacacgccaacaaagccgctgcgatggaaatgttgaagtccaaactgtatgaattggaaatgcgcaaacgcaatgaagagaaacaggcgttggaagaaggtaaatccgatgtaggttggggcagccaaatccgttcgtatgttttggattcctcacgtatcaaagacttgcgtacaggctacgaagtcggcaacaccaaagccgtattggatggcgacttggacggcttcatcgaagccagcctgaaacagggcgtgtag

SEQ ID NO: 42188 - DNA, 585 bp, Neisseria meningitidis
atgcacatactgaccgccggcgtggacgaggccggacgcggacctttagtcggcagcgtgtttgccgccgccgtcattcttccggaaacatttgacctgcccggactgaccgactccaaaaaactcagcgagaaaaaacgcgacgcgcttgccgaaatgattaaagatcaggcggccgcgtggcacgttgccgccgcctcgcccgaagaaatcgccagcctcaacatcctgcacgccaccatgctcgcgatgaaacgcgccgttgacggtttggctgtgcgtcccgaaaaaatattcatcgacggcaaccgcattcccgaacatttgaacatccctgccgaagccgtcgtcaaaggcgacagcaaaatcatcgaaatctccgccgcatccgttttggcaaagaccgcacgcgatgcggaaatgtacgcactggcgcaacgccatccccaatacggtttcgacaaacacaaaggttacggcacgaagcagcatctggaagccctcaaacaatacggcgtgctgcccgaacatcgccgcgacttcgcccccgtcagaaacctgctcgcgcagcagacgctgttttaa

SEQ ID NO: 42189 - DNA, 2157 bp, Neisseria meningitidis
atgcccgccccccaaccttccgccccttacgaccccctgaccgccgaagcgcgtgccctgcttttccataccgcctcctacctcaagcccgaggaacaggcggagcttgaaaaagctgtcgcctatgcgtttcgcgcccacgacgggcaaacccgcaaaagcggggagccctacatcacgcatccgattgccgttgcgacgcagctcgccctttggcatatggacatacagggtctttgtgcaggcgtgatgcacgacgtattggaagatacgggcgtgacaaaaggggaaatggcggcggtgttcggcaatacgattgccgagatggtggacggtctgtccaagcttgaaaaactcaaatttgaagatcatgcggagcatcaggcggagagtttccgcaaactgattttggcaatgaccaaagatgtgcgcgtgattgtcgtcaaacttgccgaccgcctgcacaatatgcggacgctcggttcgatgcgcccggacaaacgccgccggattgcaagggaaacccttgaaatctatgcacagattgccaaccgtataggtttgaataacgcatatcaagagcttcaggatttatcgttccaaaacctgcatcccaaccgctacgagactttaaaaaaagcgatggacaagagccggaagaaccggcaggacgttgtcggcaaagtcttgcgcgcattcggccagcggctggtaggcgcgaatatagaggccaaaatcaaaggcagggaaaaaaacctgtacggcatccatcagaaaatgatggcgaaaaagctgcgctttgccgaggttatggatatttacggtttccgcgtcattgtcaacagcattccagcctgttatgccgcactcggcgcattgcacaccctctatcagcccaagcccgggcggttcaaagactatatcgccattccgaaaagcaacgggtatcaaagtctgcatacgactttggtcggcccttacggcttgccgattgaagttcagatacgtaccaaggaaatggatgctgttgccgaaggtggaatcgccggacattggagctataaatcatattctaagacggtcgatcaggcggtgcttcacacaaaccggtggctgaaaaatatcttagatttgcaggcaagcagtgccaatgccattgagtttctcgaacacgtcaaagtcgatttgtttccgaacgaaatctacatccttacgccaaaaggaaaaatcctaactttgcccaaaggggcaacgcctgtcgattttgcttatgcggtgcataccgatatcgggcacaaaaccgttgccgcacgtatcaacaatatcatgatgccgttgcgtacgaagctcaaaaccggtgattctgttgaaattatcacatccgaacacgccaaacccaatcccgcgtggttgaatttcgccgtgtcaggcagggcgcgcagcgccatacgccaatatattaaaaaccttaaccggcacgatgcggtcgttttgggagagagcctcttacaaaaagccctgtccagtttgctgcccaaagatgtcctgctttcagacggcatcaaggaaaaatatcttgccgatctcaacgacaagcagacatcgtttgaagaagtgctgtacaacgtagggatggggcataccctgcctgtttatgtcgccatgcacattgccgagttggcaggggagcatttcggcagcgaggtcaggctcagttccattaaagtcgatgggcaggaaagcgggcatattcattttgcagagtgctgccaccctgttcccggcgattccatccgtttgctgttggttaagggaaaaggcatgattatccatagggatacctgcccgacgttgttgaagtccgatcccgaacagcagctggatgcagactgggaaaatatgaacgggcagaactaccgtgtcgggcttcaagtccaatcggaagacagccacggcctgttggcattaatggcgcaagcgatttccgattccggtgcagacattgagtcggtcgaaacaccgtctaaatcccagtcgggaacggaaggttttgtcgaattcaaattcttattgaaagtcaagaatctgaatcaattgaatcagattattcaaaatctgcatagtattccatatatccgcaaagtcatcagaagttga

SEQ ID NO: 42190 - DNA, 420 bp, Neisseria meningitidis
atggacaataagaccaaactgcgcttgggcggcctgattttactgaccaccgccgttttaagcctcattatcgtattgattgtcgattcctggccgcttgccatcctgcttgccgccgtcatcgtcgccgccgctgcgggcggctttgtttggacatcccgccgacagcaacgccagtttatcgaacgcctgaaaaaattcgacatcgatcccgaaaaaggcagaatcaacgaggcaaacctgcgccgtatgtaccacagcggcggacaacaccagaaagatgcgattaccctgatctgcctgtcgcaaaaatgttcggtggacgaggcgcacgctatgttcaaaaaacgcccgacacgtcaggaaatcaatcaaatggcggcaaaacagtcgcgcggtcagaaacgtccgcaccgttaa

SEQ ID NO: 42191 - DNA, 612 bp, Neisseria meningitidis
atgggcgcgattgagcggcgtaaaacgctgaaacggaaaggaaacaccgtgcaggataaaaacaacctctgctggctcgatatggaaatgacggggctgaatcccgaaaccgaccgcattatcgaagtcgcgatgattattaccgactcggatttgaatgtgttggcgcaatccgaagtttacgccgtccaccaaagcgacgacgtgctgaacaaaatggacgaatggaacaccgccacacacggcaggacggggctgacacagcgcgtacgcgaatcgtcgcataccgaagccgaagtcgaacagaaactgctggactttatgtcggaatgggtacccggacgcgccacgccgatgtgcggcaactccatccaccaagaccggcgttttatggtcaaatatatgccgaaactggaaaactacttccactaccgcaacctcgacgtttccacgctgaaagaactcgccaaacgctggaatccgcccgttgccaaaagcgtcgtcaaacgcggttcgcacaaggcattggacgacattttggagagcatcgaagaaatgcgccactaccgcgaacactttctgatttccgccccgagagccgaagcgcaataa

SEQ ID NO: 42192 - DNA, 1203 bp, Neisseria meningitidis
atgaagaactaccacgcgcccgacgagaagggctttttcggcgaacacggcgggctttatgtctccgaaaccctgattcccgccttgcaagagctggcggatgcctataaggcagcgaaaaacgatcctgaattttgggaagcgttccgccatgatttgaaacattatgtcggcaggcccagccccgtttaccacgccgcgcggttgtccgaacatctgggcggcgcgcaaatctggttgaagcgcgaagacttgaaccacaccggcgcgcacaaagtcaacaacaccatcggtcaggcactgttggcaaaacgcatgggtaaaaaacgcgtcatcgccgaaaccggcgcgggtcagcacggcgtggcgagtgccaccgttgccgcacgcttcggtatgacttgcgacgtgtatatgggcgcggacgacatccaacgccaaatgcccaacgtgttccgtatgaaattattgggtgcgaacgtggtcggtgtagaaagcggcagccgcacgctgaaagacgcgatgaacgaagccatgcgcgaatgggtcgcccgcgtggacgacacgttctacatcatcggtaccgccgccggccccgcgccgtatcccgaaatggtgcgcgatttccaatgcgtgattggcaacgaagctaaagcgcagatgcaggaagccatcggcagacagcccgacgttgccgttgcctgcgtgggcggcggatcgaacgccatcggtttgttccacccgtatatcggcgaagaaaacgtgcgcctcgtcggcgtggaggctggcggtttgggcgtgaacacccccgatcacgccgcgccgattacttcgggcgcaccgattggcgtattgcacggtttccgcagctatctgatgcaggacgaaaacggtcaggttttgggtacgcactctgtttccgcaggcttggattaccccggcatcggcccggaacacagccatctgcacgacatcaagcgcgtcgaatacactgttgccaaagacgacgaagcactcgaagcctttgacttgctctgccgcttcgagggcatcatccccgcgctcgaatccagccacgccgttgcttgggcggtgaaaaatgcgccgaaaatgggtaaagaccaagtgattttggtcaacctctcaggtcgtggcgacaaagacatcaataccgtcgcgaagctcaaagggattaaactgtaa

SEQ ID NO: 42193 - DNA, 633 bp, Neisseria meningitidis
atggatttgcacaatattcgggaagattacagcaaacgggaattgtcggaagccgattgcgccgataatccgatcgagcagttcgagcggtggttggacgaggcggtacgcgcacaggtcaacgagccgacggcggtcaatgtggcggcggttgacggacgcggcaggcccaacagccgtatggtgctgctgaaggaagttaattctgaaggttttgttttctttacgaattatcacagccgcaaggggcgttcgctggatgctcatccatttgcggcgatgacgtttttttggccggagctggagcgtcaggtgcgcgtggaagggcgtgttgaaaggctggcggagaagttgtcggacgaatattttgagagtcgcccgtatcagagccgtttgggtgcgtgggcaagtgcgcagagcgaggttattccgaacaaggcggtattggtggcaaaggcggcggcggttggactcaaacatcctctgcatgtgccgcgtccgccgcattggggcggctatattgtgattcccgatttgcttgagttctggcagggcagaccgagcaggctgcacgaccgcatccaataccgtttgctggatggtggctggatacgcgagcggctgtcgccttga

SEQ ID NO: 42194 - DNA, 147 bp, Neisseria meningitidis
atgaagtttgtgaaaagtgggagaaatcctttaaagaaaatggaaaagaaattgaatataatcaaaaatattcaagaatttatggtgaagttcgtggagctggctttaatggcgatatcggagaaaagctacatcgttgtgccgtga

SEQ ID NO: 42195 - DNA, 933 bp, Neisseria meningitidis
atgctctcacaactggagtatggcattgcgaaggaaaatagaccgaaccggcaggcagaccgctttgccggttcggttttaccgcttgccgccagtctgacccacaagccgaacatcatgaaacccataccgaccgacacattccaacctgccatactgccccaagcctttgaaaccgaaatcaaatccacctgcacggggcgaatctatcggattcagacggcaacactcggcgaaataccgtctgaaggctatcccgtcctctttgtcctcgacggcgaagcctttttccccgcacttttcaacatcatgcagtcgctgatgaacaaccccgttacccgaagcaacgccccctgcctgattgtcggtatcggctacacgacaggcagtgtgcgcgatttggcacaacgtgccgccgactacacgccgccgcttggagacaacgccacagcagacgaacggcagcagttcggacaggcagaccgcttcgccgcctttatcgacagcgagctgaccgcctttttagaaagccgctacaccctcaaccgcaatgaaaccgccgtattcggacactcgttcggcgcactgttcggactgtattccctgctttcccaccgccgtttcagacggcattggctcgtatccccatcgatttggtggcacaacaggcggatactcgactttatgccgtctgaaaaccggctaaacggcatcgatgtctgcctcaacatcggcgcgctagaacggggtagcgattgtaaacgcagggaagaacgcgatatggcagggcaggccgaacaaatggcggcagagttagacaggcacggggccgccgtctttttccgggaatatccgaatgccgaccacggcaatgtcccgttctactcgctgaccgattgcgtcgaatatttgaggaaggcttggcagaggtag

SEQ ID NO: 42196 - DNA, 1953 bp, Neisseria meningitidis
atgcgtaaggtgtgtgcttcagcacgcacgcgttccatgatttacggctcaatgccgtctgaaaagctcacaatttttcagacggcatttgttatgcaagtaaatattcagattccctatatactgcccagatgcgtgcgtgctgaagacaccccctacgcttgctatttgaaacagctccaagtcaccaaagacgtcaactggaaccaggtacaactggcgtacgacaaatgggactataaacaggaaggcttaaccggagccggagcagcgattattgcgctggctgttaccgtggttactgcgggcgcgggagccggagccgcactgggcttaaacggcgcggccgcagcggcaaccgatgccgcattcgcctcgctggccagccaggcttccgtatcgctcatcaacaacaaaggcaatatcggtaacaccctgaaagagctgggcagaagcagcacggtgaaaaatctgatggttgccgtcgctaccgcaggcgtagccgacaaaatcggtgcttcggcactgaacaatgtcagcgataagcagtggatcaacaacctgaccgtcaacctggccaatgcgggcagtgccgcactgattaataccgctgtcaacggcggcagcctgaaagacaatctggaagcgaatatccttgcggctttggtgaatactgcgcatggagaagcagccagtaaaatcaaacagttggatcagcactacattacccacaagattgcccatgccatagcgggctgtgcggctgcggcggcgaataagggcaagtgtcaggatggtgcgataggtgcggctgtgggcgagatagtcggggaggctttgacaaacggcaaaaatcctgacactttgacagctaaagaacgcgaacagattttggcatacagcaaactggttgccggtacggtaagcggtgtggtcggcggcgatgtaaatgcggcggcgaatgcggctgaggtagcggtgaaaaataatcagcttagcgacaaagagggtagagaatttgataacgaaatgactgcatgcgccaaacagaataatcctcaactgtgcagaaaaaatactgtaaaaaagtatcaaaatgttgctgataaaagacttgctgcttcgattgcaatatgtacggatatatcccgtagtactgaatgtagaacaatcagaaaacaacatttgatcgatagtagaagccttcattcatcttgggaagcaggtctaattggtaaagatgatgaatggtataaattattcagcaaatcttacacccaagcagatttggctttacagtcttatcatttgaatactgctgctaaatcttggcttcaatcgggcaatacaaagcctttatccgaatggatgtccgaccaaggttatacacttatttcaggagttaatcctagattcattccaataccaagagggtttgtaaaacaaaatacacctattactaatgtcaaatacccggaaggcatcagtttcgatacaaacctaaaaagacatctggcaaatgctgatggttttagtcaaaaacagggcattaaaggagcccataaccgcaccaattttatggcagaactaaattcacgaggaggacgcgtaaaatctgaaacccaaactgatattgaaggcattacccgaattaaatatgagattcctacactagacaggacaggtaaacctgatggtggatttaaggaaatttcaagtataaaaactgtttataatcctaaaaaattttctgatgataaaatacttcaaatggctcaaaatgctgcttcacaaggatattcaaaagcctctaaaattgctcaaaatgaaagaactaaatcaatatcggaaagaaaaaatgtcattcaattctcagaaacctttgacggaatcaaatttagatcatattttgatgtaaatacaggaagaattacaaacattcacccagaataa

SEQ ID NO: 42197 - DNA, 456 bp, Neisseria meningitidis
atgcataaaattccaaaaggaacggcactggcattcgacttcggcgaagcgcgtatcggcgtggcacaaggagacgcggaattagggctatcccatcctttgagcaccgttaccggcggcagcaacgatgaaaagttcgcggcaatcgccaagctggttcaagaatggcagccgcgttattttgtcgtcggactgcccgtgcataccgacggcacgaaacatgaaatgacgcacctgtcgcgcaagttcggacgcaggctgaacggcaggttcaatctccccgtctattgggttgacgaacggctgtcgtccgtctatgccgaaagcctgctttcggaagcacaggtcttcggcaaaaaacgcaaatcggtgctcgaccaagtggcggcgcaagccatcttgcacggttttttcgagggcggtccggcggaatgtttcaacgggcgtgaaggttaa

SEQ ID NO: 42198 - DNA, 672 bp, Neisseria meningitidis
atgaaaaccgtttccaccgccgttgtccttgccgccgctgccgtttcactgaccggctgtgcgaccgaatcctcacgcagtctcgaggtagagaaagtcgcctcctacaatacgcaatatcacggtgttcgtaccccgatttccgtcggaacattcgacaaccgctccagcttccaaaaaggcattttctccgacggggaagaccgtttgggcagccaggcaaaaaccattctagtaacgcacctgcaacagaccaaccgcttcaacgtactgaaccgcaccaatttgaacgcattaaaacaggaatccggcatttccggcaaagcgcataacctgaaaggcgcagattatgtcgttaccggcgatgtaaccgaattcggacgcagagatgtcggcgatcatcagctcttcggcattttgggtcgcggcaaatcgcaaatcgcctatgcaaaagtggctctgaatatcgtcaacgtcaatacttccgaaatcgtctattccgcacagggcgcgggcgaatacgcactttccaaccgtgaaatcatcggtttcggcggcacttccggctacgatgcgactttgaacggcaaagttttagacttggcaatccgcgaagccgtcaacagcctggttcaggctgttgacaacggcgcatggcaacccaaccgttaa

SEQ ID NO: 42199 - DNA, 693 bp, Neisseria meningitidis
gtgcaggcggatttagcctatgccgccgaacgcattacccacgattatccgaaagcaaccggtgcaaacaacacaagcacagtaagcgattatttcagaaacatccgtgcgcattccatccacccccgggtgtcggtcggctacgatttcggcggctggaggatagcggcagattatgccagttacagaaaatggaacaacaataaatattccgtaaacacaaaagagttgcaaaaaaacaatagcagtggcatctggcaagaactgaagacggaaaatcaggaaaacggtacattccacgccgcttcttctctcggcttatccgccatttacgatttcaaactcaacgataaattcgataaattcaaaccctatatcggtgcgcgcgtcgcctacggacacgttaaacatcaggttcattcggtgagaaaagaaaccacgactactttcagtccaccagcgcaaggcgctacagtgccaggcaaaatcgtacaaggtccgaccaacaaacctgcctatcacgaaagcaacagtatcagcagcttaggtcttggtgtcatcgccggtgtcggtttcgacatcacacccaagctgactttagacaccggataccgttaccacaactggggacgcttggaaaacacccgcttcaaaacccacgaagtctcattgggcatgcgctaccacttctga

SEQ ID NO: 42200 - DNA, 855 bp, Neisseria meningitidis
atgccgcccatccctgccccatctgcaccatccgagcacactgtcgcatgggtattcggccaacccgttaccgatttgccccaggatttgtttattccgcccgatgcattgaaagtcgtattgggcagcttccaaggccctttggatctactgctgtatctgatccgcaaacagaatatcgacgtactggatattccgatggtgaagattaccgagcagtatctgcactacatcgcccaaatagaaacctatcagtttgatttggcggcggaatatcttttgatggcagcaatgctgattgaaatcaaatcgcgcctgctgctgccgcgtaccgaaaccgtcgaagacgaagaagccgacccgcgtgccgagttggtgcgccgcctgctggcttacgaacagatgaagctggcggcgcagggtttggacgcgctgccccgagccggacgggatttcgcgtgggcttacctgccgctggaaattgccgtcgaagccaagctgcccgaagtctatattaccgacttgacgcaagcgtggctgggtattttgtctcgggcaaaacacacgcgcagccacgaagtaatcaaagaaaccatctccgtgcgcgcgcaaatgacggcaatcctgcgccgtttgaacggacacggaatatgcaggtttcacgacctgttcaatcccaaacagggcgcggcttacgtggtcgtcaacttcatcgcactgttggagcttgccaaagaaggattggtcagaatcgtgcaggaagacggtttcggagaaatccgaatcagcctcaatcatgagggggcgcattcagacggcatttccggcacacgaggcgggcgcgatgtgttctaa

SEQ ID NO: 42201 - DNA, 643 bp, Neisseria meningitidis
atgagaaaaagtcgtctaagccggtataaacaaaataaactcattgaactgtttgtcgcaggtgtaactgcaagaacggcagcagagttagtaggcgttaataaaaataccgcagcctattattttcatcgtttacgattacttatttatcaaaacagtccgcatttggaaatgtttgatggcgaagtagaagcagatgaaagttattttggcggacaacgcaaaggcaaacgcggtcgcggtgctgccggtaaagtcgccgtattcggtcttttgaagcgaaatggtaaggtttatacggttacagtaccgaatactcaaaccgctactttatttcctattatccgtgaacaagtgaaacctgacagtattgtttatacggattgttatcgtagctatgatgtattagatgtgcgcgaatttagccattttagcttcgctgaaacttcgttttcgtatcaatcacagcacacattttgccgaacgacaaaaccatattaatggaattgagaacttttggaatcaggcaaaacgtcatttacgcaagtttaacggcattcccaaagcgcattttgagctgtatttaaaggagtgcgaatggcgttttaacaacagtgagataaaagttcttgttccattttaa

SEQ ID NO: 42202 - DNA, 1770 bp, Neisseria meningitidis
atgtacccgtctgccctgccaaggacggcagatatccaccaacccaccccgcaccccttggcggtgtaccgaaaagagttatatatgtctatggaaaattttgctcagctgttggaagaaagctttaccctgcaagaaatgaacccgggtgaggtgattaccgctgaagtagtggcaatcgaccaaaacttcgttaccgtaaacgcaggtctgaaatcagaatccctgattgatgtagctgaattcaaaaacgctcaaggcgaaattgaagttaaagtcggcgacttcgttaccgttaccatcgaatccgtcgaaaacggcttcggcgaaaccaaactgtcccgcgaaaaagccaaacgtgcagccgattggattgccctggaagaagccatggaaaacggcgacatcctgtccggcatcatcaacggaaaagtcaaaggcggcctgaccgttatgattagcagcatccgcgcattcctgccgggttctttggtcgacgtacgtcctgtaaaagacacttctcacttcgaaggcaaagagatcgaattcaaagtgatcaaactggacaaaaaacgcaacaacgtcgttgtttcccgccgcgccgttctggaagccactttgggtgaagaacgcaaagccctgctggaaaacctgcaagaaggctccgtcatcaaaggcatcgttaaaaacattaccgattacggtgcattcgttgacttgggcggcatcgacggtctgttgcacatcaccgatttggcatggcggcgcgtgaaacacccgagtgaagtcttggaagtcggtcaggaagttgaagccaaagtattgaaattcgaccaagaaaaacaacgcgtttccttgggtatgaaacaactgggcgaagatccttggagcggtctgacccgccgttatcctcaaggcacccgcctgttcggcaaagtatccaacctgaccgactacggcgcattcgtcgaaatcgaacaaggcatcgaaggtttggtacacgtctccgaaatggactggaccaacaaaaacgtacacccgagcaaagtcgtacaactgggcgacgaagtcgaagtcatgattttggaaatcgacgaaggccgccgccgtatctctttgggtatgaaacaatgccaagccaatccttgggaagaatttgccgccaaccacaacaaaggcgacaaaatctccggcgcggttaaatccattaccgatttcggcgtattcgtcggcctgcccggcggcatcgacggtttggttcacctgtccgacctgtcctggaccgaatccggcgaagaagccgtacgcaaatacaaaaaaggcgaagaagtcgaagccgtcgtattggcaatcgacgtggaaaaagaacgcatctccttgggtatcaaacaactggaaggcgatccgttcggcaacttcatcagcgtgaacgacaaaggttctttggttaaaggttccgtgaaatctgttgacgccaaaggtgctgttatcgccctgtctgacgaagtagaaggctacctgcctgcttccgaatttgcagccgaccgcgttgaagatttgaccaccaaactgaaagaaggcgacgaagttgaagccgtcatcgttaccgttgaccgcaaaaaccgcagcatcaaactttccgttaaagccaaagatgccaaagaaagccgcgaagcactgaactccgtcaatgccgccgccaatgcgaatgccggcaccaccagcttgggcgacctgctgaaagccaaactctccggcgaacaagaataa

SEQ ID NO: 42203 - DNA, 741 bp, Neisseria meningitidis
  misc_feature 726, 727, 728, 729, 730: 'n' is a, c, g or t
atgcgtaaggtgtgtgcttcagcacgcacgcgttccatgatttacggctcaatgccgtctgaaaagctcacaatttttcagacggcatttgttatgcaagtaaatattcagattccctatatactgcccagatgcgtgcgtgctgaagacaccccctacgcttgctatttgaaacagctccaagtcaccaaagacgtcaactggaaccaggtacaactggcgtacgacaaatgggactataaacaggaaggcttaaccggagccggagcagcgattattgcgctggctgttaccgtggttactgcgggcgcgggagccggagccgcactgggcttaaacggcgcggccgcagcggcaaccgatgccgcattcgcctcgctggccagccaggcttccgtatcgctcatcaacaacaaaggcaatatcggtaacaccctgaaagagctgggcagaagcagcacggtgaaaaatctgatggttgccgtcgctaccgcaggcgtagccgacaaaatcggtgcttcggcactgaacaatgtcagcgataagcagtggatcaacaacctgaccgtcaacctggccaatgcgggcagtgccgcactgattaataccgctgtcaacggcggcagcctgaaagacaatctggaagcgaatatccttgcggctttggtgaatactgcgcatggagaagcagccagtaaaatcaaacagttggatcagcactacatnnnnncacacacttaa

SEQ ID NO: 42204 - DNA, 711 bp, Neisseria meningitidis
gtgaagcgtggtggcagtgagcaaggcacatggctgcatcccaaactcgctattcactttgcccgttggcttaatccgaaatttgcggtttggtgcgatgagcagattgaaattttacttaacggcaaaatttcagacggcataaaaacagttacccccaaacccacccgcgcccttccggacggcttgaccggcgaacaaatcgaagccgtcaaaaaactgcacaacgccctgaccaaatccgcacccaaagaagcgcaggcgcgtatcgccattaccctttggtctgccgtcaaaagcaagttcggatgcagctacaaagaagtacctgccgaacagttccccgaagttttaagcgtgatgggccgcgtggcagttgaaaacggcgtgctgtacggcgaagtcctcgaccgcgaaccattgcccgcaccgcaacctgccctgcccatcagcggcaacgccctgtacgacctcgccgttgccgtcagatacggcgcgtgggccatccaaatgggcagagacgtttccctgccgctgaagcagctcggctgcaaacaggcggtaacgatgtggacggtctgggcggaaacacgcagccgcctcaaagccgccgcaaacgccctcgaagccttaaacgcacacgccgacgcggaacacgcggcaaaaatccgcccgatgctgcccgaaatccgcaacctgtcgtcggtttga

SEQ ID NO: 42205 - DNA, 312 bp, Neisseria meningitidis
atggcaaaccaaaaaatccgtatccgcctgaaagcttatgattacgccctgattgaccgttctgcacaagaaatcgttgaaactgcaaaacgtaccggtgcagttgtaaaaggcccgattcctttgccgaccaaaatcgagcgtttcaacattttgcgttctccgcacgtgaacaaaacttcccgtgagcaattggaaatccgcacccacttgcgcctgatggacatcgtggattggaccgataaaactaccgatgcgctgatgaagctggatttgccggccggtgttgatgtagaaatcaaagtccaataa

SEQ ID NO: 42206 - DNA, 816 bp, Neisseria meningitidis
atgccgtctgaacccccgccaaacatacaacaaacctacgcccgacaagcatccgccatgattaccatccgcaacgtcagctaccgcatcggcacacgccccatcctcgacaacgtcagcctcgacatccccgaaggcggcattaccgccctcgtcggcccgaacggcgcaggcaaatccaccctgttttcctttatggcgcggctgcgcccgcttgaaagcggcagcatcgcctaccgaggcaaaaaccttgccggcactcccaccgccgaactcgcccgcacgctctccatcctcacccaagaaaacagcatcatgagccgcatcaccgtgcgcgacctgctgatgttcggacgttacccctaccatcaaggcagaccgactgccgaatgccgccgtatcgttaacggtgcaatcgaagaattccacctgcaggacctctccgaccgctatctgaccgaactctccggcggacaacgccaacgcgccatgattgcgatggtgttctgccaaagcaccgactacgtccttttggacgaaccgctgaacaacctcgatatgtatcacgcccgctcgctcatgcagattctgcaaaagctcacgcgcgaacacaaacgcaccaccgtcgccgtattgcacgacatcaaccaggccgccgcctacgccgattacgtcgtcgccatgaaaaacggccaagtcgccatgcagggcaaacccaacgatattttcaccgccgaaaacatcaaaaccttattcgatatggacgtcaacgtcctcgattacgaaggcaaaaaattggttatccaccatatctaa

SEQ ID NO: 42207 - DNA, 1659 bp, Neisseria meningitidis
ttgaaagaaaaatgtatggacgaaattcaaatacccaaaaaagtggaattacaaaccaaactagaaaatgaaaagattgttttatcgaaaggttctaccacgattattgttggtgctaatggcacagggaaaacaagattagctgtttatattgaagaacaattaaaggaaaaagcacacagaatttcggctcatagagcattaaaattaaaccctaatgtcaataaaataccagaaaagagtgccaaaacatatctatcttatggtcagaactgggatggaatcgatgtatcaaatagaaaaaattatagatgggataataactcatatactcatttactcaacgattttgattggttattacaatatttattcgctcaacaaaataatattgcggtagcaaataatcaaaagctcaaccgtaatgaaaaagtaaccaattcaaaaacaaagctagatattttgcaagaagcatgggaaacattattaccacacagaaaattacatattacagcagatgatattcaagtctctgctgtagataatgaggaattgtattctgcctcaaatatgagtgatggagagcgagcacttttctatattcttggacaagttttgtcagtagatgacggttctgtcttaatttttgatgagcctgaattacatattcataaatcaattatttcaaatctatgggataaaattgaagaattacgacctgattgttcatttctaatcattacacacgatattgaatttgctgcaactcgagtagctaaaaaatatgttatcagaaattattatccgacccctgcttgggatatttctgaagttcctgaaagtaattttgatgaagaaacaataacgatgattttaggtagccgtaagccaatattatttgttgagggcaacaataatagtttagatattgctacttaccgctattgttatcctgattggaccatcatacccaaaggggcatgcaaagatgtcattcaatcagtatcatcgctgaaaaaattaagtaatgaaatgccattactaaacttaaaatgttcaggtattgtcgatttagatagtagggatgaaagagaaattgaacaattaaataatttgggtatttacattttacctgtatccgaaattgaaaatctttttagcttaactgatgtagcaaaagagatattgaaactaaatcaatattcagatgaagaattactcaataaacttaatggatttaaatccgaactaattaaatatatagataatgaattaaaagacgataaattagacgaatttgttgtaaaacaggttcgacgtaaaattgataattatttaaaaaatattgatttatcctccaaaataacaagtactgatatgaaaaaatcattacttaatgaaatttctactttaacagaacagaaaattgaaacatggatttcagaaattaaaaatgaaattcaaagatgtattgaacagcaagatttggataaattacttactatatatgataataaaggactcttggctaaatcagcttgtgttttaaaaggaatgcgtaacaaacatgaatttgaaagctggataatgagaacattaaaaggaaggaataaagattttattgatgcaatcagacagaaacttccaattctggattaa

SEQ ID NO: 42208 - DNA, 396 bp, Neisseria meningitidis; identical to SEQ ID NO: 37459

SEQ ID NO: 42209 - DNA, 600 bp, Neisseria meningitidis; identical to SEQ ID NO: 37200

SEQ ID NO: 42210 - DNA, 1305 bp, Neisseria meningitidis
atgaagccgtttgccgaaaatatcccccacagccttcgcggcaactgctgcgacgaagccctgccgccgcatacggtagattgtccggaatgcggctgccgcgcggatgtaccccggttggacagtggagaagcggcgttctgtccccgttgcggacacaaactcttcagggtgggcaggcatcctttttccgccccgcccgcctatgcggcggcttcgctgattttaatggcgtttgcttacggtatgacgtatatcgaggtcgggataccgggtgcggcatccgtcctttcgctgcccgagatgatgcgcctgatggtgtttcaggattatggttttttggccgaagtgatgtttgtgctgactttcggcgcgccggttctgtttctgctgctgtgcctgtatgtctatgccgcgctgatacggaaacaggcgtatcctgcgctgcgtttggcaacgcgtgtgatggtgcgcttgagacaggcgatgatggtggatgtgttttttgtttccactttggtggcgtatatcaagctctcgtctgtggcagaggttcgcttcgggccggcgttttatctgatgttcgcgctgtcagttatgctgattcggacttcggtatcggttccccagcattgggtgtattttcaaatcgggcggctgacgggggataatgcggttcagacggcatcggaaggtaaaacctgttgcagccgctgcctgtatttccgcgacagtgccgaatccccctgcggcgtgtgcggtgcggaactgtaccgccgacggccgaaaagtctgagtatttcgtcggcgtttctgacggcggcggttattttgtatttccctgccaatatcctgccgattatgatttcgtccaatcctgccgccacggaggtcaataccatccttaacggcatcgcttatatgtgggacgagggcgacaggctgattgcggcggttattttcagcgcgagtattttggtgccggtactgaagattgcggcaatgtcggttttgattgcgtccgcccgcttcgctttgccaacgggtgcaaagaaattgtcgcacctctaccgcatcaccgaagcggtcggccgctggtcgatgattgatatttttgtgattattattttgatgtgttcgttccacacttatgccgcgcgcgtcattccgggcagtgcggcagtctatttctgcctggtcgtgattctgacgatgctgtccgcctattatttcgacccgcgcctgctttgggacaaacgcgcttcagacggcattgctttcaatgaaacggaaaaacatgactga

SEQ ID NO: 42211 - DNA, 684 bp, Neisseria meningitidis
atgtttgcttttttagaagccttttttgtcgaatacggttatgcggctgttttttttgtattggtcatctgcggtttcggcgtgccgattcccgaggatttgaccttggtaacaggcggcgtgatttcgggtatgggttataccaatccgcatattatgtttgcagtcggtatgctcggcgtattggtcggggacggcatcatgttcgccgccggacgaatttgggggcagaaaatcctaaggttcaaacctattgcgcgcatcatgacgccgaaacgttatgagcaggttcaggaaaaattcgacaaatacggtaactgggtcttatttgtcgcccgtttcctgcccggtttgagaacggccgtatttgttacagccggtatcagccgcaaggtttcatacttgcgttttatcattatggatggactggccgcactgatttccgtccctatttggatttatctgggcgaatacggtgcgcacaacatcgattggctgatggcgaaaatgcacagcctgcaatcgggtatttttgttatcttgggtataggtgcgaccgttgtcgcttggatttggtggaaaaaacgccaacgtatccagttttaccgcagcaaattgaaagaaaagcgggcgcaacgcaaagccgccaaggcagccaaaaaagccgcgcaaagcaaacaataa

SEQ ID NO: 42212 - DNA, 1035 bp, Neisseria meningitidis
atgccgaattgtttcaaatttcataccgttatcgaacggcattggcaaaaaccttatccggttttgtcttttctgcttaagccgctctccgggctgtttgccaaaattgcggcaaaacggcggacggattttttatcgggaaaacggcaaagcgaaaagctgcccgtgcctgtggtcgtggtcggcaatattcacgcgggtgggacggggaaaacgccgattgttgccgcgctggtgtcgggtttgcaggaaaagggcgtcaaggtcggcatcatcagccggggctacgggcgcaagagcaaggcggttcatgtattgaatgctgagagccgagcggaagatgcgggcgatgagcctttgctgctgttccgcaaaaccggtgcgccgacggcggtgggcagcagccgtgcagaggcaggcagggcgttgctggcggcgcatcccgacatcggactgattgtggcggacgacggtttgcagcattacgccctgcggcgagatgtggaaatcgcggtgtttccggcggcggatacggggcgcacggatttggatttactgcccaacggcagtttgcgcgaacctttgttgcggctggattcggtggatgcggtcgtcgtcagcggcggcaaggcggatgcgctgtttaggccgtctgaaaatatgtttcacagccgtatcgaagcgggacggatttaccgtttgaacaatccgtccgaaatactggacacaggccgtctgaaaaatcaaaccgtcgtcgccgtggcaggtattgccaagccggcgcggttttttgattcgttgcggaatatgggcattaccgtgaagcgaaccgtcgcgctgcccgaccacgccgacatttcggcggcagatttgcccgatgcggacgcggtcattattacggagaaagatgcggtcaaattttcagacggcatttgcaccgataatgtttgggtgttgcccgtttgtgcgataatcgaacctgatttggcggcgtttgtgttggagcggttggaagatgtaccgaaggccgtctga

SEQ ID NO: 42213 - DNA, 549 bp, Neisseria meningitidis; identical to SEQ ID NO: 39055

SEQ ID NO: 42214 - DNA, 423 bp, Neisseria meningitidis; identical to SEQ ID NO: 38711

SEQ ID NO: 42215 - DNA, 1485 bp, Neisseria meningitidis
atgccgtataatcaagcccctgattttttatgcgccgacactatgcatccgacctattccgccgtacaggcgcggctgctcgaagccaaccgcctttcccccgaactgctcgccaaaagcctgtgcatcatcggcgcgcaccacgtcgattacgccgacatctactgccagcgcaccgcttatgaaagctggcatttggaagagggcatcgtcaaatcgggcagcttccaaatcaatcagggcgtgggcgtgcgcgccgtttcgggcgacaaaaccgcctttgcctacgccgacagcctgtgcatcgattcgataaaccgttccgcccgcgccgtccgcgcgattggggcggcaggcggcaaggtgtccgccaaaatgccgtctgaaacgcgcggcaagccggtttgttccgcgtccgaccccattgccggcctcgattccgccgccaaagtcgcgctgttgaacaaagtggaagcaatcgccaaagccgccgatccgcgcatcgtgcaagtgatggccggtttgacctgcgaatacgatatggtttacctcgcccgtctggacggcaaacacgccgccgacatccgcccgatggtgcgcctgaacgttaccgttatcgccaaacagggcgaacgccgcgaacagggcagcgcgggcggcggcggacgctacgacttggcttatttcgatgaaaacttggttcatcggtttgtcgatgccgccgtcaaacaggcactcaccaacctcgaatcccgccccgcgcccgccggcgaaatgaccgtcgttttgggcaacggctggccgggcgtgttgctgcacgaagcggtcggacacggtttggaaggcgatttcaaccgcaagggaaccagcgtcttttccggcagaataggcgagcgcgtcgccgccaaaggcgttaccgtcgtcgatcagggtgatattgccggccggcgcggttcgctcaacatcgacgacgaaggcaacgaaacccgccgcaccgtattgattgaagacggcattttagtcggctatatgcaggacgaaaccaatgcccgcctgacgggtacgcagtccaccggcaacggccgccgcgaaagttacgcttccgcccctatgccgcgcatgaccaatacctttatggaaaacggcagctatgagccggaagaaatcatcgcgtccatcgacaagggcatttacgccgtcaactttggcggcggacaagtggacattaccagcggcaagttcgtgttcagtgcgtccgaagcgtggtgggtggaaggcggcaggctgcaatatcccgtcaaaggcgcgaccatcatcggcaacggccccgaagtgctgaaacacgtttccatgataggcaacgatactgcgctcgacagcggtgtcggcgtgtgcggcaaagaagggcagagcgtccccgtcggcgtggggcaaccgactttgcggattgatgccggactgaccgtcggcggcagcgcaatctga

SEQ ID NO: 42216 - DNA, 885 bp, Neisseria meningitidis
atgagcagcggaaatatccacatccacagcatgaccggatttgccaacgcggcggcagagtgcggcagcaaacgcatcaatctcgacctgcgtgcggtcaaccaccgttttctagatattcaaatcaggatgcccgacgatttgcgctatttggaaagcggtatccgcgagaaaatttcatcccatatcgcacgcggcaaagtcgaatgcaaaatccaaattcaagatgcggaaaacggcagtcagtccttggaactgaatcgcgacttggtcggacagcttgccgaaatcaacaaagacctccgcaagcatcacgatttggcaaaactgggcgttgccgacatcctgcgtttccccggcgtattggcaagccaaagggaaaatacggaagaattggcaaaaagcattaccgaactgaccgaaaaagcgttaaaagactttactgccgcacgcaagcgggaaggtaagaaattaggcgagcacctgctgcaacgccttgaggctatggaagaaatcatagatgcattaagcgaactctttcctaccctgttggaaacacataaagaaaaaatccgcgcccgcctcgtcgaagcggtcggcagcatcgacaacgaccgcctgcaacaggaatttgccctctttatccaaaaatccgacatcgacgaagagttcagccgcctacgcacccacattgccgaagtgcgccgtatcgttaccgaacacaaaggcagcagcggcaaacggctggacttcctgatgcaggaattaaaccgcgaagccaacactttgggcagcaaatccattgccgccgaatgcacccaagcctcggtcgaactgaaagtcttaatcgagcagatgcgggaacaagtgcagaatatcgaataa

SEQ ID NO: 42217 - DNA, 729 bp, Neisseria meningitidis
atggcaggccatagcaagtgggcgaatatccagcataaaaaagcccgtcaggatgccaaacgcggcaaaatcttcacccgtttaatcaaagaaatcaccgttgcggcgcgtatgggcggcggcgaccccggttcaaatccgcgcctgcgcctggctttggaaaaagcagccgaaaacaatatgcccaaagacaatgtgcaacgcgccatcgacaaaggtacgggcaacttggaaggcgtggaatacatcgagttgcgctacgaaggctacggcatcggcggcgcggctttgatggtggactgcctgaccgacaacaaaacccgcaccgttgcggacgtacgccacgcgtttaccaaaaacggcggcaacttgggtaccgacggctgcgtggcgttcaacttcgttcatcaaggctatttggtgtttgaaccgggcgttgacgaagacgcgctgatggaagcggctttggaagccggtgcggaagacgtggttaccaacgacgacggttccatcgaagtcattaccgcgccaaacgattgggcgggcgtaaaatccgctttggaggcggcaggttacaaatccgttgacggcgacgttacgatgcgcgcccaaaacgaaaccgaactctccggcgacgatgccgtcaaaatgcaaaaactgattgacgcgctggaagatttggacgacgtgcaagacgtttacacttccgccgtattgaatctggactga

SEQ ID NO: 42218 - DNA, 405 bp, Neisseria meningitidis
atggcaaaccgatttcagcagcgcaaatccgcataccgccgccttagcggcaagccgttgttttcagacggcattgcggccaacctttgcggcgggcgaaaaaccttgtcctataatttatcccgtttcaaaatcagcatacggtcggaaatgcaaaaaatatctttcaatttgttgaagcctgcaaactccccgaaaatagggaaacgccgccccggtttgaacggcgcgccgcatattccgatgccctccccccgataccttccggcaagcccagaaatgcccggcaacaacatccatccggcaaaaatccgaaacaacacacccggcggcaggcagagtcaaaccgccccgcaaagcatccgccatcagaaaaacaaaccgcctccgagggcttcatcctaa

SEQ ID NO: 42219 - DNA, 1185 bp, Neisseria meningitidis
atgaccgaaccgacctcccgccgccgttttctgaaaacctgcaccgccgctgccggcgcggggctgcttcaggcttgcggcacatccgccacatccgttccgccccttccctcttcccattccgttgtgaaagcccgaaccgtgcctctccaaacgccacgccgtcaaagttcggacggcaaccttctgcgcgttgtcgcttcgtcaggatttgccgaagacaccaaccgcgtcaacacagccttaacccgcctttacaatgtcggttttaccgtaaccaaccaacaggcgggcagccgccgtttccaacggtttgccggcacggacacgcaacgtgccgccgatttccaagaggtcgcttccggccgcgtcgccacgcctaaagtgctgatgggtttgcgcggcggttacggtgcggcgcggattctgccgcatatcgattttgcttcgctcggcgcaaggatgcgcgaacacggcacgctctttttcggattcagcgacgtatgcgccgtccagctggcattgttggcaaaaggcaatatgatgagttttgccggcccgatggcttatagcgattttggcaaacccgcccccggtgcgtttacgatggatgcctttatcaagggtgcaacccaaaaccgcctgaccgttgatgttccttatatccaacgcgccgatgtcgaaaccgaaggcatattgtggggcggcaacttaagcgtcctcgcctcgctcgccggcacgccttatatgcccgacatcgacggcggcattttgttcctcgaagatgtcggcgaacagccctaccgcatcgaacgtatgctcaatacgctgtatctttcgggtattttgaagaaacagcgcgccatcgtgttcggcaatttccgtatggaaaaaattcgagatgtctatgatccgtcttatgatttttctgccgttgccaaccatgtttcgcgcacggcgaaaatccccgtgctgacgggcttcccgttcggacacattgccgacaaaatcactttccctctaggcgcgcacgcccgaatccgtatgaacggaaacagcggttattcggtcgcgtttgaaggctaccccacactcgatgcgtccgccctgactttggataccctgctcccaccgccggatttgcccatcttccccgaaagcggtgttgccgatatttcggaataa

SEQ ID NO: 42220 - DNA, 432 bp, Neisseria meningitidis
atgaaccaactcgaccaacttggcacccgtatcaacctgatttgcaatgtcttcgacaaatggatcgggcagcaggatctgaattacaacctctttgccgtactttataccctggcaaccgaaggcagccgcacgcaaaagcatatcggcgaaaagtggagcctgcccaaacagaccgtttcaggcgtatgcaaaacccttgccggacaagggttgattgaatggcaggaaggcgaacaggaccggcgcaaacggttgctgtcgttgaccgaaacaggcaaagcctatgccgcacctttaacagaaagcgcgcaggaattcagcgacaaagtatttgccacattcggcgacaagcgcacaactcggctgtttgccgatttggatgcactggctgaagtgatggaaaaaacaatctcggaaaataaaaaatag

SEQ ID NO: 42221 - DNA, 501 bp, Neisseria meningitidis; identical to SEQ ID NO: 37882

SEQ ID NO: 42222 - DNA, 1596 bp, Neisseria meningitidis
atgaaaccgttaaaaacattagaatttggatttgtggatgctgcaaactacagaagaagagaaaataaagatttatttaaccgaatatttgtaaaaggagaatatttggatgaattatgtgaaccaaatatttcgtttttaatcggagaaaagggaactggaaagacagcatatgctgtttatttaactaataacttctataaaaacatacatgccactactaagtttgttcgtgaaaccgattattcaaaatttattcagctaaagaaagcaagacacttaactgtttcagattttacaagtatttggaaagtcattttatatctgttgatatcaaatcaaatcaaatgtaaagaaaacggaatattatcttcaatatttaataaatttaaagccttagatgaggctataaatgaatattattatggcgcttttgatccggaaattgtacaagcaataactttaatagaaaattcaaaagaagctgcggaaatgatttttggaaaatttgttaaactaggtgaagaggaatcccaacaaataacttttacagaaagtaaattccaagcaaatttaggttttattgaaagaaaatttaaagatgctttatctcagttaaagctaaaagataatcatattttgtttattgatgggatagatattagaccatcacagattccatttgatgaatatcatgagtgtgtaaaaggtcttgctaacgccatatggatgttaaataatgatatcttcccttccattaaagatagtaagggaaggatgagagttgtgttattgattagacctgatatctttgattcattaggtttacaaaatcaaaataccaaacttcaagataattcagtatttttagactggaggacggattataaatcttatagaagttcaaagatttttggcgtttttgatcatcttttgagaacccagcaagaaaaacaagatagtttagaaaaaggcaactcatgggattattattttccatggaatgctcctaatttacatgatgagtataaaaatttaacttcatttattagcttcctaagaaaatcgtattatcgacctcgcgatattcttcagatgcttactttgctacaaaaaaataagaaaagtaaggaagattatgtcgtagcagaagattttgataatacttcttttcaaagagaatactcgatatatttacttggtgaaatcaaagatcatcttttgttttattatagtcaaagtgattatcaaaatttcctgaaattttttgaatttttaaacgggaaagatagatttaaatatagtgattttttaaaagcatttgaacgtttgaaaaagcacttacaaacaacatcagtggaaatacctaaatttatgagtactgctaatgagtttttgcaatttttatttgacttgaatgttattgcttatttagataacccagaagatgaaacgaaaccatatatccattggtgctttaaagatagaaattatgcaaatatttctcctaaaataaaaactgaaactgaatatttaatattttcaggattatcaaaagcccttgatgttggtactccatttaagaacaaacagtaa

SEQ ID NO: 42223 - DNA, 387 bp, Neisseria meningitidis
atgagcaacaacatcccggccgaactgaaatacgttgccagccatgaatggctgcgccttgaagaagacggtacgattaccgtcggcattacccaccacgcgcaagagctgttgggcgacatcgtgttcgtcgagctgcccgaagtcggcgcgaaccttgccgctgaagagcaagccggtgtggttgagtctgtaaaagccgcgtccgacgtgtacgcaccgattgcaggcgaagtcgttgccgtcaacgaagatttgccaagcgctccggaaactgccaacagcgatccttacggtgcaggctggttcttcaaactcaaaccggcaaacgttgccgattacgacagtctgctgactgccgaacaatacgcgggcgaagtggattaa

SEQ ID NO: 42224 - DNA, 1410 bp, Neisseria meningitidis
ttgtttgaatttaaagagaataaaatgattgttgcttctcgctggcccttgctggaaaaggtatttttacggtttggaatgcctgttgccgtggttgatttggaatcgacgggcggcaatctgtatgaagacagggtaaccgaagtggctttggtcaagtttgagcagggaagggtggtgaggcatgagtggttggttaatcctcaaaaaccgattccgcagtttgtggcggggctgacggggatttcagacggcatggttgccgatgcgcctgtttttgcagagattgccggcgagttgttttcggtattgaagggttgtgtgctggttgcacataacagccgtttcgactatacgtttttaaagcatgagtttcatcgtgcgggtatcggattttcatcgcctgctttgtgcagtgtgcagctgtcccggtgtctgtatccgcaattttacaagcacagcctggacagtatcatcgaaaggttggggattgttgtggaagacaggcatcgtgcgatggcggatgtatcggcattgtgtgattatttggaatacagtctgtcggaacacggggttgaggcatggatcaggcagtgtttccgtttgatgaatccgaaaccgctgcctgccgcgctgcccgaacggttgagggaacagttgtacggtttgcctgacggtatgggggtgctggcttgtttcgacggcggagggaaagtaaattatatcggtacgtttgaacgggtatatagcgagatttcggctttattggactccggaaaagccccgtttgattggtgcaatacggaggaagtccgtttttttcccgcattgggcagcctgcatgcatataagattaaagcggaattggtcgggcgttatcattcggattgttatgtgtctgccaaaaatctgcttaaaacatttacgaccgtcaggtttgaaaaaggttcagacggcatgttgaatgcgaaaacagcggctttgaaaaacggtgtgacggataatccgcctaccggattatttgccaataaaaaggcagcgagacgggctttgtcgtcgtgggcggaaacatacggattgtgtcctgccgcagccggtatccttccggacggttatgcagaggatgagccttgtcccgtatatgtttcaggccgatgcgataaggcgtgcggccgttctgacgaacaggttttggcgtttgcacacaagttgcctgttttggattggggaaaaatgcatgaggtggaaattaccgaaaccgatcctttgacgggggaaaaagtcgttctgcacggaatgggcggcgcattggaaatggatgacgggctttggtatttcgataaagatttaccggatgcgtttaaggcgaagtttaaaacggacaggaaaaatattaaggaaatcggttaa

SEQ ID NO: 42225 - DNA, 519 bp, Neisseria meningitidis
atgccgtctgaaacaccgttttccttgtccgaaagccgccattatgaatttgaaggaaactccactataatacggcattcagatttccagacggcatcgcgcccgtcaaaccgcacacaaaccaaaaggaaatacatgttccgtaccatgcttggcggaaaaatccaccgcgccaccgttaccgaagccgatttgaactatgtcggcagtattaccgtcgatcaagacctgttagacgcggcaggcatctaccccaacgaaaaagtcgccattgtcaacaacaacaacggcgaacgttttgaaacctataccattgcagggaaacgcggcagcggcgtgatttgtctgaacggtgctgcagccaggctggtacagaaaggcgatatcgtcatcatcatgtcttacgtccaactctccgaacccgaaatcgccgcacacgaacccaaagtcgtcttggtagacggaaacaacaaaatccgcgacatcatctcctacgagccgccgcacaccgtgctgtaa

SEQ ID NO: 42226 - DNA, 510 bp, Neisseria meningitidis
atgacaatgattttaagcattttaagcctgttttttatcatcagactgttatttttagccgtctctattaaacatgaaaaagccttgattgccaaaggggcgaaacaatacggaaaaaccaattccacgctgcttgcggcagttcatacgctttattatttggcgtgttttgtttgggtatggctttctgacactgcttttaatggcatatccttgattggtacgctgacggtgatggcttcgtttgtgatattgtcattgattattaagcagttgggggagatttggacggttaaaatctatattttaccaaatcatcaaattaatcgttcgtggttgtttaaaacattccgccaccccaattattttttaaacatcatacccgaactgattggcatcgccttattatgtcaagcgtggtatgttttattgattggcctgcccatttatttgctggtcttatttaagcgtatccgacaagaagaacaggcgatggcaacacttttttaa

SEQ ID NO: 42227 - DNA, 435 bp, Neisseria meningitidis; identical to SEQ ID NO: 40706

SEQ ID NO: 42228 - DNA, 357 bp, Neisseria meningitidis
atgttgtccgcttactttcccgtctttgtctttatcctcatcggcctcgcggccggcgtgctgtttatcctgctcggcacgattttaggcccgaaacgccactatgccgaaaaagacgcgccttacgaatgcggttttgaagcttttgaaaacgccaggatgaagttcgacgtgcgctattacctcgtcgccatcctcttcatcctgtttgatttggaggtcgcgtttatgctgccgtgggcagtcgtgttcaaagatttgggcgcgtacggcttctggtctatgctggtgtttatcgttgttctgacggtaggctttgtttacgaatggaaaaaaggtgcgctggaatgggaatag

SEQ ID NO: 42229 - DNA, 468 bp, Neisseria meningitidis
atgaagatagaaaatatcgatattatttcgccggaactgttcccgcaggaaacattcaatgaaaccgaagcattcggcgctttggtatggttgtgggcagtttcgcctatttatcagcatgccggcgtacaagaagccgccgtcaatatcttgccggtattgaaaaacgggcaatttgccttgttcagcagcaacggacaccccgtcgcctactgcacttgggcttatttcgatgaagaaaccgaatggcaatatctccaatccaatgatgttctgcgccactcggaaaactggtgcagtggaaacagaatgtggcttatcaactggttcgcacctttcggcgacagccgtatgatgaaaagaattctggtgcatctgtttccgaaacgtgaaataaggtggctgtaccaccgggggagtgaaaaaggaaaacggattatgaggtttccagcgttgtcgaaacaataa

SEQ ID NO: 42230 - DNA, 192 bp, Neisseria meningitidis; identical to SEQ ID NO: 37158

SEQ ID NO: 42231 - DNA, 2766 bp, Neisseria meningitidis
atgcgaatccgccgtcgtctgaaaaacatttatctgctggacaagaaaaaccttgcccgcaaccatgtgcaggttatcaaccagtttgagcagacgggcacgcatgcaaaccgctatgacgttaccgtgttggtaaacggcctgccgctggtgcagattgaattgaaaaagcgcggtgtggcggtgcgcgaggcattcaatcaggtgcaccgttacagcaaagagagcttcaacagcgaaaattcgctgttcaaattcctgcaaatcttcgtgatttccaacggcacggacacgcgctatttcgccaacaccaccaagcgcgacaaaaacagcttcgatttcacgatgaattgggcgcggtcggacaatcatccgattaaggatttgaaagactttaccgccacgttcctgcagaaaagcgtattgctgggcgttttgctgcattacagcgtgttcgatgcgaatgatacgctgctgattatgcggccgtatcagattgccgccgccgaacgcattttgtggaaaatcaacagctcggcgcaggcgaagaattggagcaaaccggaaagcggcggctatgtctggcacaccacgggcagcggcaaaacgctgaccagctttaaggcggcgcgtctggcgacggaatcggcatttatcgacaaggttttcttcgtggtggacaggaaggatttggactatcagacgatgaaggaataccaacgtttttcgcccgacagcgtgaacggttcggaaagcacggcaggcttgaaacgcaatttggaaaaagacgacaacaaaatcatcgttaccaccatccaaaagctgaacaacctgatgaagggcgaagataatctgccggtttaccatcagcgagttgtctttattttcgacgaatgccaccgctcgcaattcggcgaagcgcaaaaaaacctgaaaaagaaatttaaaaaattctgccagttcggctttaccggcacgccgatttttcccgaaaacgctttgggcgcggaaaccacggcgggcgtgttcgggcgggagctgcattcttatgtgattaccgatgccatccgcgatgaaaaagtattgaaattcaaagtggattacaacgacgtgcgcccgcagttcaaagccgtggaagcggaacaggacgagaagaaactgagtgccgccgaaaaccacaaagccctgctgcaccctgaacgcatccgcgaaatcacgcaatatatcctgaatcagttcaggcagaaaacgcaccggctgaatgcgggtggcaaaggctttaacgcgatgtttgccgtcagcagcgtggatgcggcgaagtgctattacgaagcgttcaaaacacaacaggcaggcagcttgcacccgctgaaagtggccaccattttttcctttgcggccaacgaagagcaaaacgccgtcggtgaaattgtcgatgagacttttgaaccggaagcgatggacagcagcgcaaaagaatttttgcaggctgccatcaacgattacaacgcctgtttcaaaaccaatttcggcacggacagcaaagcctttcaaaactactaccgagatttggcaaaacgggtgaaaaatcaggaaatagatttgctgattgtggtcggcatgtttttgacgggttttgacgcgccgacgctgaacacgttgttcgtcgataaaaacctgcgctatcacggcctgatgcaggcgttttcgcgcaccaaccgcatttacgatgccaccaaaaccttcggcaatattgtctgcttccgcgatttggagcaggcaaccattgatgcgattaccttgtttggcgacaaaaacaccaaaaacgtggtgctggaaaaaagttacgaagaatacatgaacggctataccgacagccagaccggcgaagcacggcgcggttatctggatgtggcaaaagaattgcgcgagcgtttccccgatcccgacaaaatcgaaacggaaaaagacaaaaaagattttgccaaactcttcggcgaatacctgcgggcggaaaacgtattgcagaactacgatgaatttgccgcgctgcgcgagttgcagagtgtggacgcggcggacgaagatgcgatgaaggcgtttcaagaaaaatactacctgagcgatgaagacgtgcaggaaatgcggcaagtgccgatgccgtctgaaagggcggtgcaggactaccgttccgcctacaatgacatccgcgactggctgcgccgccaaaaagcaggcgaacagaaagagcaatcaaaaatcgactgggacgatgtggtttttgaggtggatttgctcaaatcacaggaaatcaatctagattacatcctgcaactggttttcgaacaccacaaaaaaatcaaaggcaaagcggagctggtggaagaaatccgccgcatcatccgcgccagcatcggccaccgcgccaaagagggtctgattgtggatttcatcaacgatacggatttggacaaagtacccgacgttcccgccatactggaaaccttctacacctacgcgcaagaggtgatgcggcacgaagcggcaggattgattgccgccgaaggcctgaacgaaaccgccgccaaacgctatttaatcagctcgctcaaacgcggctatgccagcgaaaacggcacggaactgaccgaaaccctgccgaaaatgagtccgctcaacccgcaatatctgacgaagaaacaaagtgtttttcaaaagattgcggcgtttgtggagaagtttgccggaatagggaccgatatttga

SEQ ID NO: 42232 - DNA, 798 bp, Neisseria meningitidis
atgctgaaacaacgggtgataactgctatgtggctgctgccgctgatgctgggcatgctgttttacgcgccgcaatggttgtgggctgcattttgcggactgattgccctgattgccttgtgggaatatgcccgtatgagcggtttgtgcaaaattaaaaccaaccattacctcgccgcaaccttggttttcggcgtggttgcctatgcgggcggctggatgctgcctaatttggtttggtatgttgttttggcattttggctcgccatcatgcctttgtggttgagattcaaatggaggctcaacggcggttggcaggtttatgccgtcggttggcttctggtcatgccgttttggttcgcgctcgtatccctgcgcccgcaccctgatgatgccctgccgctgctcgccgtgatgggtttggtgtgggttgccgatgttttcgcgtatttcagcggcaaggcgttcggcaaacacaaaatcgcaccggcaatcagccccggcaaaagctgggaaggcgcaatcggcggcgcggtttgcgtggcagtgtacatgaccgccgtacgaagtgccggctggctggcattcgatacaggctggttcgataccgtgttaatcggtttggtgctgaccgtcgtcagcgtatgcggcgaccttttggaaagctggctcaagcgcgcggcaggcatcaaagacagcagcaacctgctgcccggacacggcggcgtgttcgaccgtaccgacagcctgattgccgttatcagcgtctatgcggcgatgatgtcggttttaaattga

SEQ ID NO: 42233 - DNA, 324 bp, Neisseria meningitidis
atgcaaaacgaaaccatcaacctgaaacagcaccttgccgccatcaaagaatactggcagcccgaaatcatcaaccgccacgggttccaattccacttggtcaaacttttgggcgattacggctggcatacgcacggatacagcgacaaagtgctgtttgccgtggagggcgacatggcggtggacttcgccgacggcggcagcatgacgatacgcgagggcgagatggcggtcgtgccgaagtcggtgtcgcaccgcccgcgttcggaaaacggctgctcgttggtgctgattgagttgtccgacccgtccgaggccgtctga

SEQ ID NO: 42234 - DNA, 975 bp, Neisseria meningitidis; identical to SEQ ID NO: 36944

SEQ ID NO: 42235 - DNA, 1044 bp, Neisseria meningitidis
atgattccggccacctacaccctgtcccaaatcaccgcgcggctcggcggcgaatggcgcggcgaggacatttccgttaccgccgtgcgcccgctcgcagacgcgcaggcggaacacatcagcttccttgccaatccgaaatacaaagccgaagtccacgacagcagcgcgggcgcggtcatcgtttccgccaaagcggcagacggatttgaagggcgcaacctgattgtcgccgacgacccctatctctatttcgccaaagtcgcccgcctgttttcacccgtcgtcaaagcgcgcggcggcatccatccgaccgccgtcgtcgaaccgggcgcgaccgttcccgccagctgcgaaatcggcgcgaacgtctacatcggcgcaaacaccgtgctcggcgaaggctgccgcatcttggcaaacgccgtcgtccaacacgattgcaaactgggcgacgaagtcgtcctgcatcccaacgccgtcgtttattacggctgcacactgggcagacgcgtcgaaatccacagcggcgcggtcatcggcgcggacggtttcggactcgcttttgccggcgattcatggtttaaaatcccgcaaaccggcgcggtaacgctgggcgacgacgtagaaatcggctcgaacaccaacatcgaccgcggcgcgatgagcgacaccaccgtcggcaacggcaccaaaatcgacaaccaagtccaaatcggacacaactgcaaaatcggttcgcacaccgtcatcgccgccaaaaccggcatctcaggcagcgtaaccataggcagctactgcatcatcggcggcggcgtcggtacggtcggacacatcgaaatcgccgacaaaaccaccatcggcggcggcacatccgtcacccacagcattaccgaaagcggcaaacaccttgccggcatcttcccgatgtccacccataaagaatgggcgcgcaacgccgtttacatccaccgcttaagcgaaatgaacaaacgcctcaaaacgctggaacagcagctttcagacggcaaagacacgcaataa

SEQ ID NO: 42236 - DNA, 546 bp, Neisseria meningitidis; identical to SEQ ID NO: 37730

SEQ ID NO: 42237 - DNA, 531 bp, Neisseria meningitidis
  misc_feature 516, 517, 518, 519, 520: 'n' is a, c, g or t
ttggaagacgaagattttattcgcgccgcgtccatgctcgccgaagaagttttcggtttcggtatctacaaagaatccaaaggttcgggcggtcgtttctatgagcgctgttggttgatgggttcggaagacgccctatacggtcgcgtccattttggcggccaacaaaataccattcttttcgaactgaccggcaccggttgcggcgtcgcaaaagaaggctgggaatcacgacttttcgcattcctgactaatgcaatccgcccaaaaatcacacgcgttgacatcgcaaaagactttttcaacggcgaatacagcccgaaccaagcccgtgaagaccgaaataaaggtatgtttacctgtcatcacgtcaaaccaaaaggcgaatgtttggggtcagattgggaagaagacgatgaagccaaaatgaccaaaggcaagacctatggtatcggctcccgtgaatcgtccaaatatgtccgcgtctatgaaaaagcaagcagttgggcgataaannnnncacacacttaa

SEQ ID NO: 42238 - DNA, 645 bp, Neisseria meningitidis
gtgacccgccccgccaaaatcaatacttacacacgcatcatcgacgccagccttgcgcttttcaacgaggaaggcgagcgcaacatcagcaccaaccatattgccgcccacttgggcatcagtccgggcaacctctattaccacttccgcaacaaagacgaaatcatcgtccaactgttcaaacgttacagcgaagccctgctggcatacctgaatgaagccgtgttgccgtctgatgtggaagactccatcaattatatggccggtatttatgatgtgatgtgggaataccgcttcctattcagcgacgtgaacaccctgcttgcacgcagtgccgaattgttgggcgaacacaataccttcacccaagccaaagtctccccgctcttggtcaacctgctcacccaactcaacggtctgaacatcatccaagccgaccaaaccgccatgaacgatctcgccgtcaatatgtggatggtcacgaaatactggttcgacttcgacagctccctgcgcggccgcaccaagctgaccgaagactccaaagcacgcggcatccgccgcaccttaagcctccttcgtccttatcttttgcccgaacaccgcaagaaatacgaccggaaaatcggcaacggcaacccgtaa

SEQ ID NO: 42239 - DNA, 837 bp, Neisseria meningitidis
atgaaaaacaaaacctcatcacttctcttatggcttaccgcaatcatgctgaccgcgtgttctccgagcaaagacgataaaaccaaagaagtcggtgcatccgctgcttcgtcctccgcgtcatcagctccttcccaaaccgatttgcaaccgaccgcatccgcccctgataacgtcaagcaggcagaaagcgcgccgccgtcaaattgcaccagcctgcaccccgccaccggcattgacgatctcatgcagcaaatcgccgaacacattgactcggactgtctgtttgccctttcccatcacgaactggaaacccgtttcggcttacccggcggtggctatgacaacatacagcggctgctgtttcccgacatccgccctgaagatcccgactaccatcagaaaatcatactggcaattgaagacttgcgttacggaaagcgcacgatcagccggcaggcacaaaatgccttgatggaacaggaacgccgcctccgagaagcgacgctgttgctgatacagggcagtcaagaaacccgcggacaaggcgaggagccgaaacgcacgcgttattttgaagtttcggcaacccctgcctattcgagccggcacaacaacggacttggcggcaatttccaatacatcagccaattgcccggctatctgaaaatacacggagaaatgcttgaaaaccaatcactcttccggctgtccaaccgtgaacgcaatcccgacaaaccgtttttagacatccattttgacgaaaatggcaaaatcacgcgtattgtcgtttacgaaaaaaacatctacttcaatccaaacacggggcgaatataa

SEQ ID NO: 42240 - DNA, 906 bp, Neisseria meningitidis
atgcttaccttccaacaaatcatcttcaaactgcaaacattctgggcagacaaaggctgcaccgtcatccaacccttcgacatggaagtcggtgccggcacatcccatcccgccacctgcctgcgcgcactcggccccgagccttggtttgccgcctacgtccaacccagccgccgccccaaagacggccgctacggcgacaaccccaaccgcctgcaacactattaccaattccaagtcgccctcaagcccgctcccgccaatatccaagacctctatctcgactctctgcgcgaattgggcatcgatcccaaagtccacgacatccgctttgtcgaagacgactgggaaaaccccaccctcggcgcgtggggtttgggctgggaagtctggctcaacggcatggaagtaacccagtttacctatttccaacaagtcggcggcatcgactgcacgcccgtactcggcgaaatcacctacggcatcgaacgcttggcgatgtacttgcaaggtgtagaaaacgtctacgacctcgtttgggcaaaaacgctcgacggcaacaccgtcacctacggcgacgtgtaccaccaaaacgaagtcgagcaatccacctacaacttcgaatacagcgatgccgactggctgctgcgccagttcaacgactacgaagcgcaagccaaacgcctgcttgccgaagaaaacgccgccctcgccctgcctgcctacgagcttgtcctcaaagcggggcatacgttcaaccttttagacgcacgcggcgcgatttccgtaactgagcgggcaacttatattggacgtattcgtgcattgagccgcgccgtggcgcaaaaatatgttgaaagccgcgaaaaactgggcttccctttaatgaaggcaaacgccgcctaa

SEQ ID NO: 42241 - DNA, 843 bp, Neisseria meningitidis
atgttagtctgcaacccctacgaagtcgtcatccacggcacaacgagttccggcaagattttccgtcccagcgactgggcggaacgcctgtgcggcattctgtcctcgttcaccaaagaccacaggctttcctattcgaaatgggtgcgccccatactggtggacaacatccgctgcgtcgccgtcgataaaaaactggaaaccgacaatccccaaatgttccgcttcctgatggactttgccgccgacaacgacctgcgcgtcatcgactgcaaagccctgctcgaagaacgcgaacagggcggacaaaacaaccctgccgacgaacacgtcatgctggcacaggcaatcgaagaaaaacacgccgccgagaaagcacaggaacagaccgcctcgggcgcatcctacgttttgcgcgaaatcggcgcggacgacaccgccaccgcctttgcagccttgagcgttttgcgttccgccctgaccgacatcaaccgctttaccgaacagatcaacaaagtccaacgcccccaaggctaccgcctgctgggtatttttgaagaaggcaaacacaatgccgtcgccgtctgcggcttccgcgaagcctgcaccctcgccagcggccgccacatccacatcgatgacatcgttaccctgccgcaaagccgccgcaaaggctacgcctcgcgccttttggaagaagtccgcaaaatcggcgcggaaacaggggtaaccaaaatccacctcaacgtccacgtcaaccacgaccgtgccgacgcgcaccgcctgtatttcaaaaacggttttgaaatctgcgcataccacttccgttgcgaccccaaatga

SEQ ID NO: 42242 - DNA, 1035 bp, Neisseria meningitidis
ttggaagacgaagattttattcgcgccgcgtccatgctcgccgaagaagttttcggtttcggtatctacaaagaatccaaaggttcgggcggtcgtttctatgagcgctgttggttgatgggttcggaagacgccctatacggtcgcgtccattttggcggccaacaaaataccattcttttcgaactgaccggcaccggttgcggcgtcgcaaaagaaggctgggaatcacgacttttcgcattcctgactaatgcaatccgcccaaaaatcacacgcgttgacatcgcaaaagactttttcaacggcgaatacagcccgaaccaagcccgtgaagaccgaaataaaggtatgtttacctgtcatcacgtcaaaccaaaaggcgaatgtttggggtcagattgggaagaagacgatgaagccaaaatgaccaaaggcaagacctatggtatcggctcccgtgaatcgtccaaatatgtccgcgtctatgaaaaaggcaagcagttgggcgataaaacaagcacatggacgcgatttgaaattgaattcaaagcaaaagacatcgttatccctttcgaagttttgcagaatccgggcgaatatttcggcggcgcatatccgatttgcgaacgattcgcccaaaaggcaacgcgcatacacgcggttaaggaagataaggtcatttcagccgaccgctaccttgaatgggtaaaaaaacagttcggacgtgcggcaaacggtctgaaattcatttttcccgaattggacaaagccaaactgtttgaactgattgagccgagtcatcacaagctgcccaagtctttggctcccgaagcctacgactgcgcctttttgaaagctcaagccattcatgaacagcccgcattcaaaccgtacaaagacccttactatatgtacgaatattacgagaatcttgaaaaacagcttgaacagcaaaaacacgtcaacaatgaagaaagctataacaacttcatttacgacaaattcgcaagactaccgatttcatgggcttaa

SEQ ID NO: 42243 - DNA, 501 bp, Neisseria meningitidis
atgaatgcaatgccccaaaccgccgcacaaaacgaaaccctgcacacttgtagcattattgtcgatgatgcacaggatttttcccccatgcttctcgatgcagggcgggacgacacacttatcagcgaatcgatgattccgcaaatccgcaccgttgccgccctgatagccgccgaacggcacgacttcagccgcagcagccccgccgagtttaccgatgccgccgatttttttgccgcacggattctcgtattgggcgtgcgacgcttccatctggacgtatcgctgcttcagattttgaaaaccgccaacagccgcgcccgccgctttgccgaaaaacaccgcctgtttttcacacccgcacaagccgaattgagcctgaacaaacacaaaaaccgccgcctgctgaccgtagaaaccgaacacgaagtcgaaaacaaaggcaacccagtcgccaacagcctcgcatttgtccgcaaattgcacaccctgcccctgtaa

SEQ ID NO: 42244 - DNA, 594 bp, Neisseria meningitidis
atggaacactatttgagcctcttcatcaaatccgtcttcattgaaaatatggcactatccttctttttgggtatgtgcacgtttttggcggtatccaaaaaagtatccaccgcattcggtttgggtgtggcggtaattttcgtactcgggctgtccgtccctgtcaaccaactcgtttactcgctgctcaaagacggcgcgattgccgaaggcgtggatttgacctttttgaaattcatcaccttcatcggcgtgattgccgctttggtgcagattttggaaatgttcttggataaattcgtccccgccctctataacgcattgggcatctacctgccgctgattaccgtgaactgcgcgattttcggcgccgtatcgtttatggcgcaacgcgaatacaacttcggcgagtccgttgtatacggcttcggcgcgggcttgggctggatgttggcgattgtcgctttggcgggcattaccgaaaaaatgaaatattcggacgctcccaaaggcctcaaaggcttgggcattacctttatcgccgccggcctgatggcgatggcgtttatgtcgttctctggcatccagttataa

SEQ ID NO: 42245 - DNA, 900 bp, Neisseria meningitidis
ttgccgtctgaaaagaaaatgtgtatcgagatgaaatttatattttttgtactgtatgttttgcagtttctgccgtttgcgctgctgcacaagattgccgacctgacgggtttgcttgcctaccttctggtcaaaccgcgccgccgtatcggcgaaatcaatttggcaaaatgtttttccgaatggagtgaggaaaagcgtaaaaccgtgttgaaacagcatttcaaacacatggcgaaactgatgttggaatacggtttatattggtacgcgcctgccggacgtttgaaatcgctggtgcgctaccgcaataagcattatttggacgacgcgctggcggcgggggaaaaagtcatcatcctgtatccgcacttcaccgcgttcgagatggcggtgtacgcgcttaatcaggatatcccgctgatcagtatgtattcccatcaaaaaaacaagatattggacgaacagattttgaaaggccgcaaccgctatcacaacgtcttccttatcgggcgcaccgaagggctgcgcgccctcgtcaaacagttccgcaaaagcagcgcgccgtttctgtatctgcccgatcaggatttcggacgcaacgattcggtttttgtggattttttcggtattcagacggcaacgattaccggattgagccgcattgccgcgcttgcaaatgcaaaagtgatacccgccattcccgtccgcgaggcagacaatacggttacattgcatttctaccctgcttggaaatcctttccgggtgaagacgcgaaagccgacgcgcagcgcatgaaccgttttatcgaagacagggtgcgcgaacatccggaacaatatttttggctgcacaagcgttttaaaacccgtccggaaggcagccccgatttttactga

SEQ ID NO: 42246 - DNA, 126 bp, Neisseria meningitidis
atggtgtacagggaaaatatccgcaacgacaagattatgaaggcaatccattgccaaataatcatcatcattctggatattttgtcaaatgaaaaaaaatatttttcacaatgtaagcctttatga

SEQ ID NO: 42247 - DNA, 405 bp, Neisseria meningitidis
atgaatctcgtgaaactgctggcgaataactggcaaccgattgccattatcgcgcttgtcggcacgggcttggctgtgtcgcaccatcaaggctacaagtcggcatttgcgaagcagcaggcggtcatcgacaagatggagcgcgacaaggcgcaagccctgctgttgtcggctcaaaactatgcgcgcgaactggaactggcacgcgcggaagctaaaaaatatgaagtcaaggcgcacgctgtcggcatggctttggcgaaaaaacaggcggaagtcagccgtctgaaaacggaaagagacctttgcaaaattcctttccctcccgacagccgaaacccaaacacaggttttcggctgttttcgccccaaataccgcctaattttacccaaatacccccttaa

SEQ ID NO: 42248 - DNA, 174 bp, Neisseria meningitidis
atgcggttctcaaggtttgagctaagaggccgtctgaaaacagaaaaactgtttcagacgacctttcttttaaccagttgccacagcaaccggacaaaagcagcctacctccacatccatataggcaatacaggggagatattttgtaaattctacgaatattttacctgctaa

SEQ ID NO: 42249 - DNA, 492 bp, Neisseria meningitidis
atgcgtgcggtcatacagaaaacggtaggtgcaaaggtggatgtcgtgtccgaagccggcacggaaacctgtggcaaaatcgacggcgggtttgtcgtgttactcggcgtaacgcatagcgacacagaaaaagatgcacgctatatcgccgacaaaatcgcccatttgcgcgtgtttgaagacgaagcgggcaagctgaacctgtctttgaaagatgtcggcggcgcggtgctgctggtgtcgcagtttacgctttatgccgacgcggcaagcgggcggcggccttcgttttcccaagccgcacctgcagaacaggcgcagcagctttacctgcgaacggcggaactgttgcgcggacacgggattcatgtcgaaacagggcgtttccgcacgcatatgcaggtgtcgctctgcaacgatgggccggtaaccatactgctggactctttcatgacgcggatttccccaaaaatgaaggttgttccggattga

SEQ ID NO: 42250 - DNA, 1260 bp, Neisseria meningitidis
atgctgcccgtgcgctttacaagagtttcagacggcatcaaacgtttaactcccgccagcaatcaaacagctttttatcacccattcgaaaatccgttttgccggtactcgtctttttattggagtattgccattatgaccgcaaccactgcgtcttcagccaaaccttatctcaaaatccaaggtttggtgaaaaagtttggtgacaattacgctgtcgataacatcgacttggacatttatcaacacgaaatcttcgcccttttgggcagttccggcagcggaaaatctacactgctgcgtatgctggcgggtatggaaagtcccaatcagggaaaaattatccttgatggtcaggatattaccaaacttgcaccctatgatcgccccatcaatatgatgttccaaagttacgcgctttttccgcatatgaccgtagaacaaaacattgccttcggtctgaaacaggacaaaatgcctaaaggcgaaatcgccgcgcgcgtcgaagaaatgctccgcctggttcagatgaccaaatttgctaaacgcaaaccgcaccaattgtccggcggtcagcagcagcgcattgctttggcacgcagtctggcaaaacgtccgaaaattctactgctggatgagcccctcggtgcattggacaaaaaactgcgccaacaaacccagcttgagttggtcaatacgctggaacaagtcggcgtaacctgtattatggttacgcacgaccaagaagaggcgatgacgatggcgacccgcatcgccattatgtctgacggtcagttgcagcaagtcggcacacccagcgacgtgtacgactatcccaacagccgcttcactgccgagtttatcggcgaaaccaacatctttgacggtgtggtgattgaagatcatgccgactatgccgttatcgaatgcgaaggtttggaaaaccacgtccgcatcgatcacggtttgggtggtccgagcgagcaggacctttgggttagtattcgaccagaggatattgatttatataaagaaaaacccgaatatttgggcgactacaactgggcgaaaggcacggtaaaagaaatcgcctatttgggcagcttcgccatttaccatatcaagctcggcaacgggcgcgtcgtcaaaagccaagtccccgccccttactggtatgtgcgcaacattacaccgccgacttgggacgaaaccgtctatatcagctggccggaaaaccaaccgactccgttgttccgttga

SEQ ID NO: 42251 - DNA, 765 bp, Neisseria meningitidis
ttgcagcggaaaatacgtccggcagaaaatccgccgttgcaggagcaggcaggaaaacatcggcaaccgcccccgaaacgccgtacccgcgcattgcaagcggttgccggaacaggcgcgttatcgcgcggcacaggcgcatttccaccgatatttcagtataatgccacccccgacctgccccaatccaaaggaaacgcgatgaaactcatcattctcgaccgcgacggcgtcatcaatcaggaccgcgacgacttcgtcaaatccgttgacgagtggatacctgtcgaaggcagcatggatgcggtggcatttctgacgcaggcaggctacaccgtcgccgttgccaccaaccaatccggcatcgggcgcaaatattttaccgttcaaaaccttaccgaaatgcacgccaaaatgcaccgcctcgtccgtcaggcaggcggcgaaatcaacggcatctggttctgcccgcacaccgatgccgacaactgcaactgccgcaagcccaaaccgggtatgattgaagacatcatcggacgcttcaacgcccaagcctcggaaacctggctggtcggcgacagcctgcgcgatttgcaggcaatcgatgccgtcggcggcaaacccgcgctggttctgaccggaaaaggcaaaaaaacgctctcccaacacggacacgaattgcccgaacacacacaggttttcgataccctgctcgatttctcacaatacatcatgcaggaaaacaccgcaccgcaagccgactga

SEQ ID NO: 42252 - DNA, 453 bp, Neisseria meningitidis
atgcaaattattctgttagaaaaaatcggcggtctgggcaacttgggcgacatcgtaaccgttaaaaacggctacgcccgcaactttctaattcccgcaggtaaggcaaaacgtgcgaccgaagcgaatatgaaagagtttgaagcacgccgcgcagaactggaagccaaacaggctgaaattttggcagatgcccgagtccgtcaggaaaaattggacggtcaaaccgttaccgttgctcaaaaagctggtgtggacggtcgcctgttcggttccgttaccaatgccgacattgctgctgcaatcgttgctgccggcatcgaagccgtgaaagcaaatgtacgtctgccgaacggtcctctgaaagccgttggcgagtacgaagtggaagtggctttgcacactgatgccgttgctaaaattaccgttgccgtcgttgccgcaaccgagtaa

SEQ ID NO: 42253 - DNA, 354 bp, Neisseria meningitidis
atggataaacatacaacccgactccgtcgtgcacgcaaaacccgtgctcgtattgcggacttgaaaatggtaagattatgtgtgttccgaagcaataatcatatttatgctcaagtaattagtgctgaaggtgataaagtattggctcaagcctctacattggaagctgaggtgcgcggtagtctgaaatctggaagcaatgttgaagcagctgcaatagttggtaaacgtatcgctgaaaaagctaaagcagcaggtgtagaaaaggttgcttttgatcgttcaggtttccaatatcacggtcgtgtgaaggctttggctgaagctgctcgtgaaaatggtttaagcttctaa

SEQ ID NO: 42254 - DNA, 1518 bp, Neisseria meningitidis
atggtgatttccaacccccgcgaacttgaaaaactcaaagaccggattcccaatctgatcaacatcatccgcgtcgccatcgtttttccgctgatgattatgcacatcctcgggctggaaaccggcagccgtgcgaacctgcacgcttcgtggacggcgtgggcgttttatgtttggctcgccattgcctgctggctgattttcttttccattatccatccgcattggcaatggcagtcgctgaaaatgccgcgtttcagcgcggtagcggacatcacgatgatcggcgtgctgacctacctgttcggcggcatcgattccggcttcggcatcctgatcctgcccttcgtcgtctgctcctgcctgctcagctacgggcgctaccccctgctctattccagctacgccgccatcctgctgatattcaacgccattgccgacggcgatatcggcaaatacccgctcatatcggatgcccgaaccgcctcggcaaccttcatccttgtcgccgcctcctatctttccgccatcttcacctcactgtcggtcaaatacatcgaccgtgccggaaaactcgcctacgacagccatatcgcctaccaccgcatcaaaggcttgagccaaaccgtactcgaacgcgttcaggaagctgtcgtcgtcatcaatgccgaagggctggcggtgctgttcaaccggaaggcgaaagaccttttccccgcgctcgaaatcggacggcgcgccggtctgtccgattctgccgccgaactgtgggatcaagcctctccgcacactttcgaatacgtcctcggcacacccggcctgaacgccggcatccgcgccgttccggtcaacaaagggtcggacaagctgctcatcctctacatccgcccgcaaagcgaaattcaggcagaagccctgtccgtcaaacttgccgcgctcggacaactgaccgccaacctcgcccacgaaatccgcaacccgatgtccgccatccgccacgccaacgacctgctgcgcgaaaatatggaagcgggggcggcagatccgttcaacgccaaattgtgcaaaatcatcgacggcaacatctgccgcatcgacaaaatgctcgaagacatttcctcgctcaacaagcgcaacaaaaccgaacgcgaaaccatcggcctgataccgttttgggaagaattcaaacaagagttcctgctcggccatcccgatgccgccgactgcatccgtccggacattcaaggcggcagcccgaccgcctatttcgatcccgcccacctgcggcaaattatgtggaacctcgccaacaacgcgtggcggcacagccgcaaacagcccggctcgatttccgtcaccatccgccccgcgcaaaaaaacaccgtctgtatcctctttgccgaccgcccgaagtgcaggaacacctgttcgaacccttttacaccacggcggaaaacggcaccggcctcgggctgtatgtcgcccgcgaactggcgcacgccaatttcggcgatttga

SEQ ID NO: 42255 - DNA, 3918 bp, Neisseria meningitidis
atgacctaccccatccccaaaccccgtgaaaaatcccgttggcccaatctttcgcaaggctcgctgcccttggctttggcgcgttatctgccgcacaagcggctcaaggtcgtgctgacccaagatgcggaacaggcgttgcgccttcagacggcatggcggtttttccgtccgcacgacacggcggtgttcctgccggactgggaaacgctgccttacgagcgtttttcgccgcatcaggatttggtgtcggagcggctgtcggcgttgtggcagattaaaagcggcgcggcggatgtgttgttcgtgccggttgccacggcgatgcagaagctgccgcccgtgccgtttctggcagggcgcacgttttggctgaaaacggggcagactttggatataggccgtctgaaaagtgatttggtggatgcgggctacaaccatgtttcccacgttgtcgcggcgggcgaatttgccgtgcgcggcggtatagtcgatttgttcccgatgggcagcgaaatgccgtaccgcatcgatttgtttgacgatgaaatcgacagcatcaaaaccttcgataccgaaacgcaacgcaccatttcccccgtttccgaaatccgcctgctgccggcgcacgagttccccaccgacagcgaggcgcaaaaaatcttccgcagccgcttccgcgaggaagtcgatggtaatccgaacgatgcggctgtgtacaaagccgtcagcaacggtcatttcggcgcgggcgtggaatactacctgccgctgttttttgaaaacgagttggaaacgctgtttgactatatcggcgaagatgcgctgtttgtctctttagacgatgttcatgccgaggcaaaccgtttttggagcgatgtcaaatcgcgttacgcgatggcgcagggcgacgaaacctatccgcctttgcttccacagtatttgtatctctctgccgatgtgttcgcaggccgtctgaaaaactacggacaggtgctgcccgatgtttccggcaaggaatacaccctgcccgaccttgccgtcaaccgccaagcagatgagccgttgcaggcattgaaggattttcagacggcgtttgacggacggattttgctgtgcgccgaaagtttgggacggcgcgaaactatgctcggtttcttgcagcaaaacggtttgaaagccaaacccgtgtccgactggcagggctttttatcggcacacgagccgctgatgattacagtggcgccgttggcatacgggttcaaactgggcggactgcaatcgccgaaccaacagcaacctactccctcccccgtgggggagggttggggagagggcaaagcagttgccgctcaaactgaattttccgcagccgcaataaaccctctccctagccctctcccacaggagagggaacaaagtgcagccgccgtttcagacagtctgaaagcagccgccgtttcaaccgaaagcagcctgcccctcggtacaagtaatctgcacgggcaaatccgacagcaacctgccccttcccccgtgggggagggttggggagagggcaaagcagttgccgctcaaaccgaatttcccgcatccgcaacaaaccctctccctagccctctcccacaggagagggaacaaagtgcagccgccgtttcagacgacctgaaaaccaaaagcagcctgcatcccgtcgcaaataatctgcacgggcaaatccgacagcaacctactccctcccccgtgggggagggttggggagagggcaaagcagttgccgctcaaagtgccatcgccgtcatcaccgaatccgatctctaccaatacgtcgcccgttcgcgcatccacaaccgccgcaagaaacacgccgccgtttcagacgggctgttgcgcgaccttgccgaaatcaatatcggcgaccccgtcgtgcacgaagaacacggcatcgggcggtatatgggcttggtaacgatggacttgggcggcgaaaccaacgaaatgatgttgctcgaatacgcaggcgaagcgcagctttatgtgcctgtttcgcaactgcatttaatcagccgctactccggtcaggcgcatgaaaacattgccctgcacaagctcggcagtggcgcgtggaacaaggcgaagcgcaaagccgccgaaaaagcgcgcgacaccgccgccgaattgctcaacctctacgcccaacgcgccgcccaatcgggacacaagtttgaaatcaacgagttggactatcaggcgtttgccgacggcttcggctacgaggaaaccgaagaccaggccgccgccatcgccgccgtgattaaagatttgacgcaagcgaagccgatggatcgccttgtgtgcggcgatgtcggcttcggcaaaaccgaagtcgccctgcgcgccgcgtttgtggcggtgatgggcggcaaacaggtcgccgtacttgctccgaccacgcttttggtcgagcagcacgcgcaaaacttcgccgaccgtttcgccgatttccccgtgaaagtcgccagcctttcgcgtttcaacaacagcaaagccaccaaagccgcgctggaaggcatggcagacggcacggtcgatattgttatcggtacgcacaaactggtgcaggacgacatcaaattcaaaaacttaggtttagtgattatcgacgaagaacaccgcttcggcgtgcgtcagaaagagcagctcaaacgcctgcgcgccaatgttgatatccttaccatgaccgccacgccgattccgcgtactttaagtatggcgttggaaggactgcgcgacttctcgctgattaccaccgcgcccagccgccgcctcgccgtcaaaacctttgtcaaaccctttagcgaaggcagcgtgcgcgaagccgtgttgcgcgaactcaaacgcggaggacaggtatttttcctgcacaatgaagtagatacgattgaaaatatgcgcgagcggctggaaaccctgctgcccgaagcccgcatcggcgtggcgcacggacaactgcgcgagcgcgagctggaacaagtcatgcgcgactttttgcagcaacgatttaacgtgttgctctgttccaccatcatcgaaaccggtatcgatatccccaacgccaacaccatcatcatcaaccgcgccgacaaattcggactggcgcaactgcaccagcttcgcgggcgcgtcggccgcagccatcaccaagcctacgcctacctgctcacgcccgaatacatcactaaagacgcagaaaaacgcctcgatgccattgcggcggcagacgaactcggcgcaggttttaccctagccatgcaggatttggaaatccgtggtgcaggcgaaatccttggcgaaggacaatccggcgaaatgatacaggtcggcttcacgctctacaccgaaatgctcaaacaagccgttcgcgacctcaaaaaaggccgccagcccgacctcgacgcaccgttgggcatcaccaccgaaatcaaactgcacagccccgccctgctgcccgaagattactgccccgacatccacgaacggctcgtcctctacaaacgcctcgccgtctgcgaaaccgtgcaacaaatcaacaccatacacgaagaactcgtcgaccgcttcggcctgcccgaacaacccgtcaaaacccttatcgaaagccaccacttacggcttatggcaaaagaattgggtatcgatgccattgatgcggccggcgaagcggtaacggtaacctttggtaaaaacaataatgtcgatccaaccgaaatcatcctgctgattcagaacgacaaaaaataccgccttgccggcgccgataagctgcggtttaccgcagagatggaaaatatcgaggtcagaatcaacaccgtaaaaaacgttttaaaaaccttgcaaaacagatgcctgcccaaataa

SEQ ID NO: 42256 - DNA, 669 bp, Neisseria meningitidis
atgaaccacgacatcactttcctcaccctgttcctactcggtttcttcggcggaacgcactgcatcggtatgtgcggcggattaagcagcgcgtttgcgctccaactccccccgcatatcaaccgcttttggctgatcctgctgcttaacacaggacgggtaagcagctatacggcaatcggcctgatactcggattaatcggacaggtcggcgtttcactcgaccaaacccgcgtcctgcagaatattttatacacggccgccaacctcctgctgctctttttaggcttatacttgagcggtatttcttccttggcggcaaaaatcgagaaaatcggcaaaccgatatggcggaacctgaacccgatactcaaccggctgttacccataaaatccatacccgcctgccttgcggtcggaatattatggggctggctgccgtgcggactggtttacagcgcgtcgctttacgcgctgggaagcggtagtgcggcaacgggcgggttatatatgcttgcctttgcactgggtacgctgcccaatcttttagcaatcggcattttttccctgcaactgaaaaaaatcatgcaaaaccgatatatccgcctgtgtacgggattatccgtatcattatgggcattatggaaacttgccgtcctgtggctgtaa

SEQ ID NO: 42257 - DNA, 567 bp, Neisseria meningitidis
atgtccgccctcctccccatcatcaaccgcctgattctgcaaagcccggacagccgctcggaacttgccgcctttgcaggcaaaacactgaccctgaacattgccgggctgaaactggcgggacgcatcacggaagacggtttgctctcggcgggaaacggctttgcagacaccgaaattaccttccgcaacagcgcggtacagaaaatcctccaaggaggcgaacccggggcgggcgacatcgggctcgaaggcgacctcatcctcggcatcgcggtactgtccctgctcggcagcctgcgttcccgcgcatcggacgaattggcacggattttcggcacgcaggcagacatcggcagccgtgccgccgacatcggacacggcatcaaacaaatcggcaggaacatcgccgaacaaatcggcggattttcccgcgaatccgagtccgcaaacatcggcaacgaagcccttgccgactgcctcgacgaaataagcagactgcgcgacggcgtggaacgcctcaacgaacgcctcgaccggctcgaacgcgacatttggatagactaa

SEQ ID NO: 42258 - DNA, 696 bp, Neisseria meningitidis
atggctaaagtatctaaacgcttgaaagctcttcgctcttctgtggaagccaataaattatatgcaattgatgaagcaattgctttggtaaaaaaagcagcgactgctaaatttgacgagtctgttgacgtatctttcaacttgggcgttgatccgcgtaaatctgaccaagttatccgtggttcggtcgttctgcctaaaggcaccggtaagataacccgtgtggctgtatttactcaaggtgcaaatgcagaagctgctaaagaagctggtgcagatatcgtcggtttcgaagatttggctgctgaaatcaaagcaggcaatctgaactttgatgtcgttattgcttctcccgatgcaatgcgtattgttggtcagttgggtactattttgggtcctcgaggcttgatgccaaaccctaaagtaggtacggttactcctaacgttgctgaagcagttaagaatgcaaaagcaggtcaagtacaataccgtacagataaagcaggtatcgttcatgcaacgattggtcgtgcttctttcgctgaagctgatttgaaagagaactttgatgcgttgctggatgctatcgttaaagccaagcctgctgccgctaaaggtcagtatctgaaaaaagttgctgtgtctagcaccatgggtttgggtattcgcgttgatacatcaagcgtaaataactaa

SEQ ID NO: 42259 - DNA, 291 bp, Neisseria meningitidis
atgccattacttgccggtctgattccacttttaggcatacttctgaaaatgctgattgtcagaataatccttgcaacaggtctgacatttgtaacctatgccgggtatctcatcgcgctggaaaagttcaaagactacacgtcaaatgcgatcaattccatgccttccgacatactgaaccttcttttaatttcgggattcggtcaggggttgggctacctgttcggcgcattctcgttcttcattggtatgcacgcattcaaaaaactgacgtttgtctttccaggatga

SEQ ID NO: 42260 - DNA, 258 bp, Neisseria meningitidis
atgaaagagtttcccgatttagaaaaacgcctgatcatgctggaagtcgccgttcaagacttggaagacaggtcacttgccgattctttcgtactttcctggctgctccagcggattacccgtcaagagccgacttcgattgagcaggttcgcagtttccttcaagcgcaggcaaaaacgtttgagcctgattccgttcagcgggaacaccttgaatctttgcttgagctcgttgaatccgcccaagagctcgcttga

SEQ ID NO: 42261 - DNA, 237 bp, Neisseria meningitidis; identical to SEQ ID NO: 39540

SEQ ID NO: 42262 - DNA, 990 bp, Neisseria meningitidis
atgaaaattaccgttatcggcgcaggttcgtggggtacggcgctcgccctgcatttttcccaacacggcaaccgcgtatccctgtggacgcgcaacgcagaccaagtccgtcaaatgcaggaagcgcgtgaaaacaaacgcggactgcccggcttttcctttcccgaaaccttggaagtgtgtgcggatttggcagacgcgctcaaagacagcggacttgtccttatcgtaacctccgttgccggattgagaagcagcgcagagctgctcaaacagtacggcgcgggacacctccccgtcctcgccgcctgcaaaggattcgagcaggataccgggctgctgacctttcaagtcttgaaagaagtattgcccgacaataagaaaatcggcgtactttccggcccgagttttgcacaggaactcgccaaacaactgccctgcgccgtcgtccttgcctccgaaaaccaagagtggattgaagaactcgtaccgcagctcaacacgaccgtcatgaggctttacggcagtaccgatgttatcggcgtggcggttggcggcgcggtaaaaaatgttatggcgattgccaccggattgtccgacggcctagagtacgggcttaacgcccgtgccgcactggttacgcgcggattagctgaaatcacccgccttgcctccgcaatgggcgcacagcccaaaaccatgatggggctggcaggcatcggcgacctcatcctcacctgcaccggcgcactttcgcgcaaccgccgcgtcggcttgggtttggcagaaggcaaggaactgcatcaggtgctggtcgaaatcggacacgtttccgaaggggtcagcacgatagaagaagtcttcaatactgcctgtaagtaccaaatcgacatgccgattacccaaactctgctgcaactcatccgcaaagaaatgaccccgcaacaggttgtcgaaagactgatggaacgcagcgcgcgttttgaataa

SEQ ID NO: 42263 - DNA, 1236 bp, Neisseria meningitidis
atgactatttcgacaatggcacagacacacgatactcgattacaaaaaactttgctctttcccagtcaacaaggttggaaatctaaaacttttcttaaacctgattcacatattagattagcaaccgtattcagcgggattggtgcggttgaacaggcattccaccgattaaatttaaaccataccattgttttttcaggagatattgatccatacgttaaaaaaagttatcttggaaactataaattaaatgaagatttttggcataacgacattactcaatttgatgcgagaaagtttagaaatcaagttgatattttagttggaggcagtccttgccaagcattttccatggttggcaaacgtgcaggattagaagatacacgaggaacattattctatgaatttgctcgcgttgtggatgaagtccaaccaaagatatttatttatgaaaatgtaaagggcttgcttaatcatgataatggaaaaacttggaaagttgtaaaaagtgttttttattcacttggttatgacttatatttccaaataatgaatagtaaggattatgggattcctcaacatcgtgagcgtatttttgttgttggctttcatacccctcctataaatggttttcagtttcctgaaaagattgaattagaacatactatgcaagattttttggaggactatactgatagcaaatattttttacgtgaaaagggtgcgaaatttgttaccagttctaaaaatagacaaaaacgttatacacagattaatggagaaattgccttatgccaaaaagcaaatcaacaatttaattggcatggtgattttatttttcaggcagcccgcgaatctgaatttgatgactttatttttgatgtaaataacgttgaggaaaaatattatctttctgaaaaaatcaaaaattatgttttggcaggaggaacaaaaaattttaaaaccagtacggaaactgatttgcctgtagctcgcccattattgcaaactatgcataaaatgcatcgtgccggggttgataattatgttactcataatcgtggacgtattcgtaaattaacacctagggaatgtttgcggctaatgggttttagagatgattttaaaattttagttagtgatactcaaatgtatcgccaagcgggaaacagtattgttgttgatgtattaatcgctatattaaaacaaatggatattacgctttatggagagtaa

SEQ ID NO: 42264 - DNA, 939 bp, Neisseria meningitidis
atggatgcctaccccgaagccgaagccccgccgcaaagcatcgtcgagctggttcccgtattgattgccgttaccgacggcggcctgcgggtattgaccgtcgcccaaggcatgctcctgcccaacggcccgctctcccccctgcgcaattccttgcaggcaggcgtaaaactgtgggtcgccaagcagacttcgcagcctatgggctatgtggaacagctttacacctttgtcgatacccaccgccgcaacgaacacggcatgcccgtgctgtacgtcagctatttggggctggtgcgcgaggcagccgacagcatcctgcacccggatgcgaaatggcaggactgctacggctatttcccgtgggaagacttgcgcaccgacggcgggcagcgcgacgccgtcgtcggccgcctgcgcatttgggcaaactcggcggacacggaggaagtgcgccaaaagcggctcaagcgcattcatttgtgctggggggtcgaaccggaaaactggtcggaagaatacgttttgcaacgctatgaaatgctgtatgaaagcggcctgatagcggaagccgccgagccgcaggcaaacttcgacttcgcgcttacggggcagcccatgcgccacgaccaccgccgcgtactggcgaccgccctgtctcgcctgcgcgccaaaatcaaataccgccccgtgatttttgaactgatgccgcccgaattcacgctgctgcaactgcaaaacagcgtcgaagccatcagcggcagattgctgcacaagcaaaacttccgccgccagattcagcagcaaaacctcatcgagccgtcggataccggcgtatcgggcagcaaaggccgtcccgcgcagctttgccgcttccgcgacgacgtcctgcccgacaggctgatttcggacatcggactgccgctgggcagccgttag

SEQ ID NO: 42265 - DNA, 1143 bp, Neisseria meningitidis
atgaaggtttttaaacaacagcttgaacaactcggcgcgcaaaaccaatatcgttcgattccggatttgattcatcaagggcggtatattacgcgggaaaaccgcaaaatgctgaatatgtcgtctaatgattatttgggtttggcatcagatgaaaacttgcgccggtcttttttgcagcaatacggcggtaattttccctcttttaccagttcttcatcgcgtttattaacgggcaactttcctatttataccgatttggaagagcttgtcgcacaacgtttccaacgggaaagcgcgttattgttcaacagcggctatcacgccaatctcggtattttgcctgctttgacgacgacgaaaagtttgattttggcagataaatttgttcacgccagtatgattgacggcatccgtttgagccggtgtgcgtttttccgttatcgtcataatgattatgaacatttgaaaaatctgcttgaaaaaaacgtcggaaaatttgaccgcacttttatcgttaccgaatctgttttcagtatggacggcgatgtggcggatttgaaacagcttgtccaattaaaaaaacagtttcccaatacttatctttatgtggatgaagcccacgcaatcggtgtttatgggcaaaacggattggggattgccgaacgggataatttgattgccgagattgatttattggttggcactttcggtaaagccttagcctcggtgggggcgtatgccgtctgcaaccaagtattgaaagaatgtttgattaatcaaatgcgcccattgattttttcaaccgcattgccgccgtttaatgtggcttggacttattttatttttgaacgattgccgcaattctcaaaagaaagaagccatcttgagcagttaagcgcatttttacggcgggaagtggcgcatcggacgcaaataatgccgagccaaacctgtatcgtcccctatattttaggcgggaatgaagccacccttgccaaagcggaatacctgcaaaggcagggttattattgcctgcccatcagaccgtcgacagtacccaaaaacacatccagaatccgcctgtctttaacggcagatatgacaacggatgaagtgcggcagtttgcggcgtgcctgtaa

SEQ ID NO: 42266 - DNA, 2172 bp, Neisseria meningitidis
atggcaaacgggaacatgaaactgtcgttggtgttaaccgcccgagatgacggagcgagacggctactggctgatactcaacgacaattagatcgtaccgcgaaatcgcgggcgcaacttgaacggcaaagccatacttatgcgttgaccggcatccgctcagaaaaacagattcaacgcgaaatcatgctgacacaggctgcgtttaaccgtttggcgcgcagcggcaaggcatcacaaaatgatttggcacgggcggcggtcgctacgcgtaaccgaattcgcgagctgaacgcggaactgaaacagggcacgggatttgcggacaagatgggaaaaatcggaagattcggtgcagctgcggtggctggtggcgcggcagcgtatacggtgcttaagcctgctatggacaacagaaagcagcttgatgagaacatcaaccgcgtgtccagacaggcatttattgaggataacagtaaatcggcagcgtggattgcaactgaaggtgcgcaacagatcaaggatttggcacttgaacttgtcgagaaaaatggcgggacccacgataaggctttggatttaatcagcggcatgatgaccaccggtctgaattttgcccaaaccaagaatgaagcgcaggcggcatatgcttttgcacttgcctcagaaggcagtggcgaggatacggcaaaactgattaaaaccctgaaagatggcggcatgagcggtaaagacctgcaactcgggcttgagcacgtcttgcaatcgggtttagacggcactttcgaggtgcgggatatggttcgggagctgccgagcctgctctctgccgcgcaacaggcagggatgaatggtgtcggcggtttggactacctgctctcactcttacaatctgcggcgaataaatcgggcagtcctgccgaagcggcgactaatgtgcaaaatcttttgagtaaaactctgtcgcctgacacgataggtcgtctgaagaagatggcaaatccgaatgacccgaagaaaggtgtcgattggataggctcggttgtgcaaggcaagcaaaacggcgaaaacgcagtgcaggtgttgtcccgtcttgccgatgccatgctagtaaaggataagcaataccaagattataagaaacgcgcggctgcaggcgataagacggcggcggagcaggcaaatatgcttaagggcgcgcttttggcgcaactgctgcctgatttgcaggcaaaacaaggtttgctggctgcaacggatatgacgcaaatccgtgaatatatggcttcgttggctggcgtaacgttggataacggaaaaattgctaagaacaacgaggcgcgaatgttgtcggcagcggcgcaacaagagcaacaggaatcgctggcaatgttgcgggaaagtctgacgggaacattggtggatatggaaacctcgtttaaaaagctggcagcggaataccctaatgccactctagccctgcaagcattgacgacggcggcaacagcggcgtctgccgcaatgttattaaccgccggtggcggtaaaggtgcaggctttctgaaagatgtaggtagtaaagcgttgggatggggtaaggcttccgcaggcggcgtggcagcaggtgccacagcggcaggcggtaagttgctgtcatggggaaaatctgccggtagcgggctcatgaataatccagcgttagttaaacgggcgggtttgttaggtatgttgctgtattccgagtctttgggtgacggcacattgccaaagggtttgcgtggtaccaagacaactcctgaaatgattaatcgtctgaaaaacaacggtatccgatttgaacctgcgccgaagcgggaacaggcgcggggtggtgtccctcagtatttggctgctccgtcagcgcagcctaccgataagatgttgtctccgttgttttcaactcagacggcggcgtatcaggcagccattcagcagcagacggcggcgtatcaggcagcattggcgcaggatacggctgcagttacaacaggtttggcacaagtgcaaagtgcgatggcgtcggcaagtcagaccatcaataccaatgtgagcctgaatatcgacggacgtgttatcgcgaatgaggtatcgcggtatcaagtggccatgttcggccgtggagcgggtcaataa

SEQ ID NO: 42267 - DNA, 1149 bp, Neisseria meningitidis
atgaatactcctccttttgtctgttggattttttgcaaggtcatcgacaatttcggcgacatcggcgtttcgtggcggctcgcccgtgttttgcaccgcgaactcggttggcaggtgcatttgtggacggacgatgtgtccgccttgcgtgcgctttgccctgatttgcccgatgttccctgcgttcatcaggatattcatgtccgcacttggcattccgatgcggcagatattgataccgcgcctgttcccgatgtcgtcatcgaaacttttgcctgcgacctgcccgaaaatgtgctgcacattatccgccgacacaagccgctttggctgaattgggaatatttgagcgcggaggaaagcaatgaaaggctgcatctgatgccttcgccgcaggagggtgttcaaaaatatttttggtttatgggtttcagcgaaaaaagcggcgggttgatacgcgaacgtgattactgcgaagccgtccgtttcgatactgaagccctgcgagagcggctgatgctgcccgaaaaaaacgcctccgaatggctgcttttcggctatcggagcgatgtttgggcaaagtggctggaaatgtggcgacaggcaggcagcccgatgacactgttgctggcggggacgcaaatcatcgacagcctcaaacaaagcggcgttattccgcaagatgccctgcaaaacgacggcgatgtttttcagacggcatccgtccgcctcgtcaaaatccctttcgtgccgcaacaggacttcgaccaactgctgcaccttgccgactgcgccgtcatccgcggcgaagacagtttcgtgcgcgcccagcttgcgggcaaacccttcttttggcacatctacccgcaagacgagaatgtccatctcgacaaactccacgccttttgggataaggcacacggtttctacacgcccgaaaccgtgtcggcacaccgccgtctttcggacgacctcaacggcggagaggctttatccgcaacacaacgcctcgaatgttggcaaaccctgcaacaacatcaaaacggctggcggcaaggcgcggaggattggagccgttatcttttcgggcagccgtcagctcctgaaaaactcgctgcctttgtttcaaagcatcaaaaaatacgctag

SEQ ID NO: 42268 - DNA, 828 bp, Neisseria meningitidis
atgcaaaaccacgttatcagcttagcttccgccgcagaacgcagggcgcacattgccgataccttcggcaggcacggcatcccgtttcagtttttcgacgcactgatgccgtctgaaaggctggaacaggcaatggcggaactcgtccccggcttgtcggcgcacccctatttgagcggagtggaaaaagcctgctttatgagccacgccgtattgtggaagcaggcattggacgaaggtctgccgtatatcaccgtatttgaggacgacgttttactcggcgaaggtgcggaaaaattccttgccgaagacgcttggctgcaagaacgctttgacccggataccgcctttatcgtccgcttggaaacgatgtttatgcacgtcctgacctcgccctccggcgtggcggattactgcgggcgcgcctttccgctgttggaaagcgaacactgggggacggcgggctatatcatttcccgaaaagcgatgcggtttttcctggacaggtttgccgccctgccgcccgaagggctgcaccccgtcgatctgatgatgttcagcgattttttcgacagggaaggaatgccggtttgccagctcaatcccgccttgtgcgcccaagagctgcattatgccaagtttcacgaccaaaacagcgcattgggcagcctgatcgaacacgaccgcctcctgaaccgcaaacagcaaaggcgcgattcccccgccaacacattcaaacaccgcctgatccgcgccttgaccaaaatcagcagggaaagggaaaaacgccggcaaaggcgcgaacagttcattgtgcctttccaataa

SEQ ID NO: 42269 - DNA, 303 bp, Neisseria meningitidis; identical to SEQ ID NO: 37201

SEQ ID NO: 42270 - DNA, 969 bp, Neisseria meningitidis
atgaaactcaccctcgccattccctcgctcaatttggatgaagacgaaatccgaatacctctatgcctgcacgctttcaacaaaatcctgcaatacggctcgctgcaccgccaaagctgcacggcttcggcattttacgcgcgttatttgtggtgcggcagactggtggaacgcgcggcgcaaagcctgaatatgccgtctgaagccgtcgcgctcgccacgcccgtctggcaaaagatggggatgcatcaggcaaatgtgctaacggcggaatatctgaacgtcggtacggatgaagcggaacggatctgccgcgacctgtcggcgttttacggcgacattccatggcgtttcgttcccgtcctgcccgaattatggctggtttcccttccttgcgcgtaccgctggggcgcgaagcccgttttggacttgggcggattgttgggcgctgacgatcagccggacggagaagatgcgttggaatggctgcgcgtccaaaccgaaatccaaatgtggctggcggcgcaccccgtcaaccataaccgcaagaaacgcgggctgcccgagttgaacggcttatggctttgggacggcacaaacggcggcgcgcaaggcggcacgcttttcgccgatacggtttggagccgtttccactccgaccgccgcgcattacccgacaacttccgcgcctatgaagaaacggcggcacacctgcccgacacgcaccatatcctgtttatggacgatttgcgcctgaccgccctgacaggggacagggagcggtatgcggcaatattgcagcagtgggaagaacgctggttcgcaccaatctacgaagccgtccgcaccggcaaaatcaaacggctggacatcaccacggacggacaacacggcggtacgctgaccttcaaacccgccgacaggtggaaattttggcgcggcgcgaaaacctttgacggaatctggtga

SEQ ID NO: 42271 - DNA, 1479 bp, Neisseria meningitidis
atgttcagcaagttaacccctttggctgaaaccggcatcccgactctgtcgtgtgcaaacgcggcagggcgtttgttgcattcagacagccgccaaatcaaacaaggcgatattttcgttgcctgtccgggcgaatatgccgacggacgcagttatatccccgccgccgttgccaacggcgcggcttttgttttttgggacgacgacggcaaatttgcgtggaatcccgaatggaaagtccccaatcaaggcatcaaagatttgaaacaccgtgccggcatattggcggcgcaagtttacggcaacgtttcagacggcctcaaagtttggggcgtagccggaaccaacggcaaaacctccatcacacaatggctggcgcaagctgccgatttgttgggcgaaaaaaccgccattgtcggcacggtcggcaacggcttttggggtgcattggaagaaaccacgcataccacacccgcccccgtcgatgtccaaaccctgctctaccgtttccgtcaacaaggcgcaacagtcgccgcgatggaagtctccagccacgggcttgaccagtcgcgcgtcaacggcgtgtcattccgcagcgcaatctttaccaacctcacccgcgaccacctcgactaccacggcacgatggaagcctacggtgccatcaagtcgcgcctgttttactggcacggcttgaaacacgcagtcatcaacgtggatgacgaatacggcgcggaactcgtaggtcgtctgaaaaaagactgtcccgatttggccgtttacagctatggtttcagcgaacacgccgacatccgcattaccgactttaccgcctcttcagacggcatagcagccgtattccaaaccccgtggggcgaagggaaatgccgcacgcgcctgctcggacggttcaacgcgcaaaacctcgccgcctgcatcgccttgctgtgcgccaacggctatccgcttgataaggtattggatgtgctggcaaaaatccgtcccgcttcagggcgcatggactgcatcatgaacagcggcaagcccttggtcgttgtcgattatgcccacacgcccgacgcattggaaaaagcactcgccaccttgcaggaaatcaaaccgcagggtgcggctttatggtgcgtattcggttgcggcggcaaccgcgatcgcggcaaacgcccgctgatgggcgcggcagccgtacagggcgcggataaagtcgtcgtcaccagcgacaacccgcgtttggaaaatccgcacgacatcatcaacgacatcctgcctgccgttcccgcgcccgaatgcgtcgaagccgaccgtgccgccgccgtccgttatgcggttgaacaagccgccgcaaacgacatcatcctgattgccggcaaagggcatgaaaactatcaggatgtacaaggcgtgaagcaccgtttttccgatcttgaaatcgtcggacaggctttgttaactcgtaaataa

SEQ ID NO: 42272 - DNA, 738 bp, Neisseria meningitidis
atgggcggacaaaaaacgcatttcgggttcagcacggtcaacgaagatgaaaaagccggcaaagtggcggaagtgttccactccgtcgccaaaaactacgacattatgaacgatgtgatgtcggcagggctgcacagggtgtggaagcatttcaccatcaacacggcgcacctgaaaaaaggcgataaagtgttggacattgcgggcggtacgggcgatttgtcgcgcggttgggcgaaacgggtcggcaaggaaggcgaggtttggctgaccgatattaattcctctatgctgaccgtcgggcgcgaccgtctgttgaacgaaggcatgattttgcccgtatcgcttgccgatgcggaaaaactgcctttccccgacaattatttcaacttggtttccgtggcgttcggcttgcggaacatgacgcataaagatgccgcgctgaaagagatgtaccgtgttttgaaaccgggcggcacgttgctggtgttggagttttccaaaatctacaaacctttggaaggcgcgtatgatttctattcgttcaagctgctgccggtcatgggcaggctgattgcgaaagatgcggagagttaccagtatcttgccgaatccatccgtatgcaccccgatcaggaaactttgaaacagatgatgctggatgcgggcttcgacagcgtggattatcacaatatgagtgcgggcatcgtcgcgctgcataagggcgtgaaattttaa

SEQ ID NO: 42273 - DNA, 1794 bp, Neisseria meningitidis
atgaaaaatatccgaaatttctccatcattgcccacatcgaccacggcaaatcgacgcttgccgaccgcttcatccaatactgcggcggtttggatttgcgcgaaatgagtacgcaggtgctcgattccatggacatcgaaaaagagcgcggcattaccatcaaagcgcaaaccgccgcgctcaactataaagcacgcgacgggcaggtgtatcaactcaacctgattgacacgccgggacacgtcgacttctcttacgaagtttcccgttcgctgtcggcttgcgaaggcgcgcttttggtcgttgacgcgtcgcaaggcgtggaagcgcaaaccgtggcgaactgctacaccgcgattgatttgggcgtggaagtcgtgccggttttgaacaaaatcgacctgcccgccgccgaccccgaacgcgtggaacaggaaatcgaagacatcatcggcatcgatgccgtcggcgcggtgcaatgttccgccaaaagcggcatcggcgtggaagacgttttggaagaaatcgttgccaaaatccccgcaccgaccggcgacgaaaacgcgccgctgcaagcggttatcgtcgattcgtggtttgacaactatgtcggcgtggttatgctgattcgagtgaaaaacggcaccatcaaactgaaagacaaagtgcgctttatgagcaccaaggcggaaacgcaggtcgagcagctgggcgtattcacaccgaaatcagttcaaaaacaagaactaaaagccggcgaagtgggctttttgattaccggcgtaaaagaattgggacaggcgaaagtcggcgatacggttactttggttgccaaccctgccactgagccgctgcccggtttccaagaggtgcaaagccaggtattcgccggactttatcccgtagaaagccacgactacgaagctttgcgcgatgctttggaaaaattgcagcttaacgatgcttcgttgaaatttgagcctgaggtttcccaagcattgggtttcggcttccgttgcggcttcttgggtctgttgcacttggaaatcgtgcaggaacgcttggagcgcgagttcgatatggatttgattaccaccgcgccgacggtgatttatgaagtcgtgttgaaaagcggcgaaaaaatcgaagtcgaaaatccgtccaaactgcccgacatcggcagcatcgaaaccatactcgagccgattattaccgcgaccatccttgtgccgcaggaatacgtcggcaacgtcatgactttgtgtaaccaaaagcgcggcgtgcaggtcaatatgcagtacatgggccgccaagtgatgctgacttacgatttgcccatgaacgaagtggtgatggactttttcgacaaactcaaatccacttcgcgcggctatgcttcgttggattatcatttcaaagagttccaaccgtctgatttgattaagctggatattatggtcaacggcgaaaaagtcgatgccttaagcctgattgtgcaccgtcaaagcgcggttcaccgaggccgcgagctagcatcgaaaatgcgcgagctgattccgcgccaaatgttcgacattgccgtccaagccgccatcggcagccagattatcgcccgcgaaaacgtcaaagcactgcgtaaaaacgtcttggcgaaatgttacggcggcgatattacgcgtaagaaaaaactgcttgaaaaacaaaaggcaggtaaacgccgtatgaaacaagtgggcaatgtggaaattccgcaaagcgcgttcttggcgattttgcaggtgagcgacaaataa

SEQ ID NO: 42274 - DNA, 1410 bp, Neisseria meningitidis
atgacagcacaaaccctctacgacaaactttggaacagccacgtcgtccgcgaagaagaagacggcaccgtcctgctctacatcgaccgccatttggtgcacgaagttaccagccctcaggcatttgaaggcttgaaaatggcggggcgcaagctgtggcgcatcgacagcgtcgtctccaccgccgaccacaacaccccgaccggcgattgggacaaaggcatccaagacccgatttccaagctgcaagtcgatactttggacaaaaacattaaagagtttggcgcactcgcctattttccgtttatggacaaaggtcagggcatcgtacacgttatgggccccgaacaaggcgcgaccctgcccggtatgaccgtcgtctgcggcgactcgcacacttccacccacggcgcattcggcgcactggcgcacggcatcggcacttccgaagtcgagcacacgatggcgacccagtgcattaccgcgaaaaaatccaaatccatgctgattgccgttgacggcaaattaaaagcgggcgttaccgccaaagacgtggcactttacatcatcgggcaaatcggcacggcgggcggtacaggctacgccgtcgagtttggcggcgaagccatccgcagcctttctatggaaggccgcatgactttatgcaatatggcgatcgaagccggtgcgcgctcaggcatggttgccgtcgaccaaaccaccatcgactatgtaaaagataaacccttcgcacccgaaggcgaagcgtgggacaaagccgtcgagtactggcgcacgctggtgtctgacgaaggtgcggtattcgacaaagaataccgtttcaacgccgaagacatcgaaccgcaagtcacttggggtacctcgcctgaaatggttttagacatcagcagcaaagtgccgaatcctgccgaagaaaccgatccggtcaaacgcagcggtatggaacgcgcccttgaatacatgggcttgaaagccggtacgccattaaacgaaatccccgtcgacatcgtattcatcggctcttgcaccaacagccgcatcgaagacttgcgcgaagccgccgccatcgccaaagaccgcaaaaaagccgccaacgtacagcgcgtgttaatcgtccccggctccggtttggttaaagaacaagccgaaaaagaaggcttggacaaaattttcattgaagccggttttgaatggcgcgaaccgggctgttcaatgtgtctcgccatgaacgccgaccgcctcgcaccggggcaacgctgcgcctccacctccaaccgcaattttgaaggccgtcaaggcaacggcggacgtacccacctcgtcagccccgctatggcagccgccgccgccgttaccggccgctttaccgacatccgcatgatggcgtaa

SEQ ID NO: 42275 - DNA, 378 bp, Neisseria meningitidis
atgagcgacgctacctatgccgacgcggtgattatggagatgaacggccgcgatatcgagattgtgagcatcaagccgcaaaccactacaggccgcaagccggtcaaaacgatgaaccgcaacggccgagtcaacggttattgtgacggcgtaaccgaacacaaattaagcgttaccgccgccattccgatcgacggtacggaaatcgactgggacaacatcaccaaggcgaaaatcacgatttaccccatcaacgacgaagatcgccgcacttcctacctcgactgctttaccgtcgataccggcgagcaatatgaagtcgataacgaggcacgcatcgacattgagatgattgctttgcacaaaatcaaggagtaa

SEQ ID NO: 42276 - DNA, 1137 bp, Neisseria meningitidis
atgaaaaacatatctctttctccgcccgccatgctcggcattcttggcggcggacaattaggcagaatgtttactgttgctgccaaaaccatgggctacaaagtaaccgtactcgatcccaacccgaatgcgccggcagcggaatttgccgaccgccatttgtgtgcgccgtttgacaaccaaaccgctttggaagaattggcaaaatgtgcggctgttacgaccgagttcgaaaacgtcaatgccgatgcgatgcgttttctcgccaaacataccaatgtttcccccagcggcgactgcgttgccatcgcgcaaaaccgcattcaggaaaaggcatggatacgcaaagcaggcctgcaaaccgcgccgtatcaagcaatttgcaaagccgaagacatcactgaagaaagcatacaatttctgcccggcatcctgaaaaccgctacattgggctatgacggcaaaggccaaatccgcgtcaaaacggtggatgaactcaaagccgcgtttgccgaacaccgcggcgtggattgcgttttggaaaaaatggtggacttgcgcggcgaaatttccgttatcgtatgccgtctgaacaatgacaacgtgcaaactttcgatcctgccgaaaacattcacgaaaacggtatcctcgcctactccatcgtcccagcccgactgagtgccgacattcagcaacaggcgcgacaaatggcgcagcgtttggccgatgaattgaactacgtcggcgtattggcggtagaaatgtttgttgtcggcgacacgcatgaattggtcgtcaacgaaatcgcgccgcgtccgcacaattccggccaccataccgtcgacgcctgcgcggcagaccaattccagcaacaggtccgcctgatgtgcaacctgccacctgctgacaccaaattgctgagttcttgctgtatggcgaatattttgggcgacgtttggcaggaagacggcggcgaaccggattggtttcccctgcaaagccggccggacgcgcacctgcacctttacggcaaaaaaaccgcgcacaaagggcggaaaatgggacactttaccgttttaagcaccgattcggacaccgcatttcaagaagcaaaaaaactgcatcagtccctataa

SEQ ID NO: 42277 - DNA, 1170 bp, Neisseria meningitidis; identical to SEQ ID NO: 38149

SEQ ID NO: 42278 - DNA, 360 bp, Neisseria meningitidis
atggcatcatatgtttccataaaaggatggattgaatgctctgacgatgatataaaaatcatccaagaaaacattaataatttttggaataattgtccctttaatatcgaagagaaagaatctgcaaaaatatataaaagcgggtgggttttcccgacaaatagttttaattggagcagctatattttttttggtgcatgcgtaaaatcttatttcattatttattttgaaaaatgtattaaaacaataatggaattggatattgaaatatcaggtttttttgaattagattattatgaagataattataaagtaaattggaaaataaataatggaaatttgatacaaacgactaattaa

SEQ ID NO: 42279 - DNA, 1206 bp, Neisseria meningitidis
ttgaagccttgcgatacgggcggtaaaatcgcggtttatccggttcgagaaaccggcgacagcaaggactttcccatgattaaaatcagcacccgcttcgatgccggctcggtcgtcgtcaaagacctgaccgatccttccaacatccgcctcgccctgcgtcccgacaacgcctccgattttgcacaatggttctacttccggctgcaaggcgcggcatatcaaaactgcatcatgcattttgaaaacgcggcagaagccgcctacccgaaaggctgggaaggctatcaggcgtgtgcctcatacgaccgccgcaactggttccgcgtaccgacttcctacgaaaacggcgtactgaccgtcaatcatactccgctgtccaacagcgtgtattacgcctatttcgaaccttactccgaagaacagcatttaaacctcctcggcgacgcgcaaggcagcggcctgtgccgcatcgacgacttgggcagcaccgtgcaagggcgcgacatcaatctgctgaccataggcaatcaggtcgaaagcgatttgaaaatctggattaccgcccgccagcatccgggagaaaccatggcggaatggtttatcgaggggctgctcggcagattactcgacccgcaagaccctaccgcccgcgccttgctcgaccgcgccacgttctatatcgtccccaatatgaaccccgacggttcggcactgggcaaccttcgtaccaacgccgccggcgcgaacctcaaccgcgagtgggaaaacccgacggtagaaaaaagcccggaagtgttcttcgtgcgcgaaaaaatgctggaaaccggagtggatttgtttttggacatccacggcgacgaagggctgccctttgtctttgtcgcaggtacggaaggcgtgccgaactacaatccgcgcatcgccgcgttggaagcgcagtttaaaaatgcccttttaaacgccagccccgatttccaagacgaatacggttacgaaaaagatgcgccgggcgaagcgaatatgaccttggcgaccaactgggtcggcaaccgtttcaactgccttgcctatacgctggaaatgccgttcaaagacaatgccaatctgcccgacgacgacttcggctggaacggtcagcgttctttacggctgggcgaagccgcgttgtccgctatcctcaacgtcatcggcgatttgcgctga

SEQ ID NO: 42280 - DNA, 558 bp, Neisseria meningitidis
atgttttggctggttctgccttatgcggttacgattaaccgaccgatgccgtctgaaagggtttccgcttcagacggcatcgcgccggaacagggaggggatatgaaaaaaccgaaaatcctttttgtctgcctcggcaacatctgccgttcgccgatggcggaatacattttgcgccgccgcgccgccgaagcgggcattccccttgaagcggacagcgcggggacatcgggctggcacgacggcgaagatatgcaccgcgagacggcaaagatattgaaaaaacacggtatcgatgcttcaggctttaccagccgcaaaatccgccaaagcgatgcggcggcgtttgactgcatcatcgcgatggacggcaagaatttgtccgaattggaaagaaccttcggcaggcggccggaaaaaatattcaagctgaccgacctgatacccgaaagcggttacgaccatgtccccgatccgtggtatacgggcgattttgaagaaaccttcaggcttgcggatgcgggctgtcgggcattgttggaaaagatttccaaataa

SEQ ID NO: 42281 - DNA, 690 bp, Neisseria meningitidis
ttgccgggaagccggggcattcgggcaaacggcacgcagttcgcacgcgttttgcacggcacgccgaacccatcggccggcaggatggcatccgttaaggaaattctgatgaaacacaccgtatccgcatcggtcatcctgcttttgaccgcttgcgcgcaattacctcaaaataacgaaaacctgtggcagccgtccgaacacatcagcagttttgcagcagaagggcggttggcagtgaaagcggaagggaaaggttcgtatgcaaatttcgattggacataccaaccgcccgtggaaaccatcaatatcaatacccctttgggcagtacgctcgggcagttgtgtcaagacagggacggcgcattggcagtggacggcaaaggaaatgtctatcaggcggaaagtgcggaagaattgagcaggcagctggtcggtttcaaactgccaatccaatatctgcatatctgggcagatggcaggcgtgtggcgggcgcgccttaccgcatcctgccggacggcatattggaacaatacggttggactgtcggcagaaccgccgacagtggggggcaagtccgaacgttgcaactgaataacggaaatttgaacatcaggctggttttcaccgaaatcggtatgccgtctgaaaccgaaaccccggaacgctgtgcggcgcgcacgagataa

SEQ ID NO: 42282 - DNA, 996 bp, Neisseria meningitidis
gtgaacctgaaaaaccgccattttctgaaacttttagacttcacgccggaagaaatcaccgcctacctcgaccttgccgccgaattgaaagccgccaaaaaagcagggcgcgagattcagcggatgaaagggaaaaacatcgccctgatttttgaaaaaacctctactcggacgcgctgcgcgtttgaagtcgccgcgcgcgatcaaggcgcgggagtgacttatttagagccgtccgccagccaaatcgggcataaggaaagcatcaaagacaccgcccgcgtgttgggcaggatgtacgatgccatcgaatatcgcggtttcggtcaggaagttgttgaagaattggcgaaatacgcgggcgtacccgtgttcaacgggctgaccaacgagttccatcccacacaaatgcttgccgacgcactgactatgcgcgaacacagcggcaaacctttgaaccaaaccgcgtttgcctacgtcggcgacgcgcgttacaacatgggcaattccctgctgattttaggggcaaaattggggatggacgtgcgtatcggcgcaccgcaaagcctgtggccgtctgaaggcattattgccgccgcacacgccgccgccaaagaaaccggcgcaaaaattaccctgaccgaaaacgcgcatgaagccgtgaagaatgttgattttattcataccgatgtgtgggtcagcatgggcgagccgaaagaagtctggcaggaacgcatcgatttgctgaaagattaccgcgttacgcccgaactgatggcggcatcgggcaatccgcaagtcaaattcatgcactgcctgcccgccttccacaaccgcgaaaccaaagtcggcgaatggatttacgaaaccttcgggctgaacggtgtggaagttacagaagaaatattcgaaagccccgccagcatcgtgttcgatcaggcggaaaaccgtatgcacacgattaaagcggtaatggtcgcggctctgggcgactga

SEQ ID NO: 42283 - DNA, 606 bp, Neisseria meningitidis
atgatgaccctctattccggcattacctgccccttcagccaccgctgccgcttcgttttgtacgaaaaaggtatggattttgaaatcaaagacgtcgatatttacaacaaacccgaagacctcgccgtcatgaatccgtataaccaagttcccgtgctggtcgagcgcgatttggtgctgcacgagtccaatatcatcaacgaatacattgacgaacgcttcccccatccgcagctgatgcccggcgatcccgttatgcgcggtcggggccggctggtgctgtaccgtatggaaaaagaattgttcaaccacgtccaagtgttagaaaaccccgccgccaccaacaaggaacaggcaaaagcgcgcgaagccatcggcaacggtctgaccatgcttgccccttcgttcagcaaaagcaaatacatcctcggcgaagatttttctatgattgatgtcgcccttgctccgctgctgtggcggctcgaccactacgatgtcaaactgggcaaaagtgccgcgccgctgctcaaatacgccgagcgcatcttccagcgcgaagcctttatcgaagcactgacacccgccgaaaaagccatgcgcaaataa

SEQ ID NO: 42284 - DNA, 1014 bp, Neisseria meningitidis; identical to SEQ ID NO: 36441

SEQ ID NO: 42285 - DNA, 1851 bp, Neisseria meningitidis
atgtacctaccctctatgaagcattccctgccgctgctggcggccctggtgcttgccgcgtgttcttcgacaaacacactgccagccggcaagaccccggcagacaatatagaaactgccgacctttcggcaagcgttcccacccgccctgccgaacccgaaagaaaaacgctggcagattacggcggctacccgtccgcactggatgcagtgaaacagaaaaacgatgccgccgtcgccgcctatttggaaaacgccggcgacagcgcgatggcggaaaatgtccgcaacgagtggctgaagtctttgggcgcacgcagacagtggacgctgtttgcacaggaatacgccaaactcgaaccggcagggcgcgcccaagaagtcgaatgctacgccgattcgagccgcaacgactatacgcgtgccgctgaactggtcaaaaatacgggcaaactgccttcgggctgcaccaaactgttggaacaggcagccgcatccggcttgttggacggcaacgacgcctggaggcgcgtgcgcggactgctggccggccgccaaaccacagacgcacgcaaccttgccgccgcattgggcagcccgtttgacggcggtacacaaggttcgcgcgaatatgccctgttgaacgtcatcggcaaagaagcacgcaaatcgccgaatgccgccgccctgctgtccgaaatggaaagcggtttaagcctcgaacaacgcagtttcgcgtggggcgtattggggcattatcagtcgcaaaacctcaatgtgcctgccgccttggactattacggcaaggttgccgaccgccgccaactgaccgacgaccaaatcgagtggtacgcccgcgccgccttgcgcgcccgacgttgggacgagctggcctccgttatctcgcatatgcccgaaaaactgcaaaaaagcccgacctggctctactggctggcacgcagccgcgccgcaacgggcaacacgcaagaggcggaaaaactttacaaacaggcggcagcgacgggcaggaatttttatgcggtgctggcaggggaagaattgggtcggaaaatcgatacgcgcaacaatgtgcccgatgccggcaaaaacagcgtccgccgcatggcggaagacggtgcagtcaaacgcgcactggtactgttccaaaacagccaatctgccggtgatgcaaaaatgcgccgtcaggctcaggcggaatggcgttttgccacacgcggctttgacgaagacaagctgctgaccgccgcgcaaaccgcgttcgaccacggtttttacgatatggcggtcaacagcgcggaacgcaccgaccgcaaactcaactacaccttgcgctatatttcgccgtttaaagacacggtaatccgccacgcgcaaaatgttaatgtcgatccggcttgggtttatgggctgattcgtcaggaaagccgcttcgttataggcgcgcaatcccgcgtaggcgcgcaggggctgatgcaggttatgcctgccaccgcgcgcgaaatcgccggcaaaatcggtatggatgccgcacaactttacaccgccgacggcaatatccgtatggggacgtggtatatggcggacaccaaacgccgcctgcaaaacaacgaagtcctcgccaccgcaggctataacgccggtcccggcagggcgcgccgatggcaggcggacacgcccctcgaaggcgcggtatatgccgaaaccatcccgttttccgaaacgcgcgactatgtcaaaaaagtgatggccaatgccgcctactacgccgccctcttcggcgcgccgcacatcccgctcaaacagcgtatgggcattgttcctgcacgctga

SEQ ID NO: 42286 - DNA, 2310 bp, Neisseria meningitidis
atgaataccaaactgacaaaaatcatttccggtctctttgtcgcaaccgccgcctttcagacagcatcggcaggaaacattacagacatcaaagtttcctccctgcccaacaaacagaaaatcgtcaaagtcagctttgacaaagagattgtcaacccgaccggcttcgtaacctcctcaccggcccgcatcgccttggactttgaacaaaccggcatttccatggatcaacaggtactcgaatatgccgatcctctgttgagcaaaatcagtgccgcacaaaacagcagccgtgcgcgtctggttctgaatctgaacaaaccgggccaatacaataccgaagtacgcgggaacaaagtttggatattcattaacgaatcggacgataccgtgtccgcccccgcacgccccgccgtaaaagccgcgcctgccgcaccggcaaaacaacaggctgccgcaccgtctaccaagtccgcagtatccgtatccgaaccctttaccccggcaaaacaacaggctgccgcaccgtttaccgagtccgtagtatccgtatccgcaccgttcagcccggcaaaacaacaggcggcggcatcagcaaaacaacaggcggcagcaccagcaaaacaacaggcggcagcaccagcaaaacaacaggcggcagcaccagcaaaacaaaccaatatcgatttccgcaaagacggcaaaaatgccggcattatcgaattggctgcattgggctttgccgggcagcccgacatcagccaacagcacgaccacatcatcgttacgctgaaaaaccataccctgccgaccacgctccaacgcagtttggatgtggcagactttaaaacaccggttcaaaaggttacgctgaaacgcctcaataacgacacccagctgattatcacaacagccggcaactgggaactcgtcaacaaatccgccgcgcccggatactttaccttccaagtcctgccgaaaaaacaaaacctcgagtcaggcggcgtgaacaatgcgcccaaaaccttcacaggccggaaaatctcccttgacttccaagatgtcgaaatccgcaccatcctgcagattttggcaaaagaatccggaatgaacattgttgccagcgactccgtcaacggcaaaatgaccctctccctcaaggatgtgccttgggatcaggctttggatttggttatgcaggcgcgcaacctcgatatgcgccagcaagggaatatcgtcaacatcgcgccccgcgacgagctgcttgccaaagacaaagccctcttacaggcagaaaaagacattgccgatttgggtgcgctgtattcccaaaacttccagttgaaatacaaaaatgtggaagaattccgcagcatcctgcgtttggacaatgccgacacgaccggaaaccgcaacacgcttatcagcggcaggggcagcgtgctgatcgatcccgccaccaacaccctgattgttaccgacacccgcagcgtcatcgaaaaattccgcaaactgattgacgaattggacgtacccgcgcaacaagtgatgattgaggcgcgtatcgtcgaagcggcagacggcttctcgcgcgatttgggcgttaaattcggcgcgacaggcaagaaaaagctgaaaaatgatacaagcgcattcggctggggggtaaactccggcttcggcggcgacgataaatggggggccgaaaccaaaatcaacctgccgattaccgctgccgcaaacagcatttcgctggtgcgcgcgatttcctccggtgccttgaatttggaattgtccgcatccgaatcgctttcaaaaaccaaaacgcttgccaatccgcgcgtgctgacccaaaaccgcaaagaggccaaaatcgaatccggttacgaaattcctttcaccgtaacctcaatcgcgaacggcggcagcagcacgaacacggaactcaaaaaagccgtcttggggctgaccgttacgccgaacatcacgcccgacggccaaatcattatgaccgtcaaaatcaacaaggactcgcctgcgcaatgtgcctccggtaatcagacgatcctgtgtatttcgaccaaaaacctgaatacgcaggctatggttgaaaacggcggcacattgattgtcggcggtatttatgaagaagacaacggcaatacgctgaccaaagtccccctgttgggcgacatccccgttatcggcaacctctttaaaacacgcgggaaaaaaaccgaccgccgcgaactgctgattttcattaccccgaggattatgggtacggccggcaacagcctgcgctattga

SEQ ID NO: 42287 - DNA, 1227 bp, Neisseria meningitidis
atgaataccgataacctgcacgacatcttggacgaaatggttcaagtgtattctcaaaaaaaacaaagccgatccgaaaccccggccgaaatcggcgcacacttccacccgctgctcgaccgcctgtgcgaaaccgcagaagcacaaaacgcgtccgacatccttatcagcaaaggattcccgccctcgttgaaaatcaacagcgcattaaccccgcagccgcaaaaggcgctgacgggcgaggaaaccgccgccatcgccgcatcgacgatgaacgccgaacaatcggaaatattccggcgcgacggcgaaatcaactactccgtccagtcgcgcagcggcacgcgctaccgcgccaacgcctaccacagccaaggcagcgcaggtttggttttgcggcgcatcaaccacgtcatcccgcaaatgcaggaattaggcctgcccgaaaaactcaaagacctcgccgtcgcaccgcgcgggctgctgattatcgtcgggcctaccggttcgggcaaatccaccacgatggcgactatgctcgaacaccgcaacaaaaccctgcccagccatatcgttaccatcgaagacccgattgagtttatctacaaaccgcgccgctgcatctttacccagcgcgaaatcggcgtcgacaccataaactggcagacggcggtacaaaacgctatgcgccaatcccccgacgtggtctgcatcggcgaagtccgcagcagggaaagtatggaatacgcgatgcagctcgcccaaaccggccacctgtgcatttttacgctccacgccaacaccgcgccgcagtcgctcgaacgcatactcaacttctaccccaaagaacagcacaaccaaatactgatcgacatcgccctcaacctgaccggcatcatctgccaacgcctcgccctcaaacaagacaaaacgggcaggacggcggttgtcgacttgctcatcaacacgcccgccatccaagacttcatcctgaagggcgacctgatgaacatcagtaaaatcatggaaaccgccaaaaccgacggaatgcagacgatggatcaaaaccttttcgaactgtaccgtcacggcatcatcagttacgaagaagccctgcgccagtccgtttccgccaacaacctgcgattgcacatccaactgcacaaagaaggcaaaacgcccgaactcctttacgacagggtcaacggtctcaacctcatttcctga

SEQ ID NO: 42288 - DNA, 1260 bp, Neisseria meningitidis
atgagtatggcacttgcccaaaaacttgccgccgacagcattgcggcggttgccgaaggacgtaaccttcaggacgtgttggcgcaaatccgcaccgcgcatcccgaccttatggcgcaggaaaacggcgcgttgcaggacatcgcctacggctgccagcgttatttgggcagtttgaaacatatgctcgcgcagatgctgaaaaagccgattggcaatccgcagctcgaaagcctgcttttggcggcgttgtaccagctgcattacacgcgcaacgcgccccacgccgtggtcaatgaggcggtggaaagcatcgcgaaaatcggacgcgggcagtaccgttcgtttgccaacgcggttttgcgccgctttttgcgcgaacgcgacaagcttgtggcttcctgtaaaaaagacgatgtagcgaaacacaacctgccgctgtggtgggtggcttacttgaaaaaccattatccgaaacactggcacaacatcgccgccgcgctgcaatcccatccgccgatgactttgcgcgtcaaccgccgacacggcaatgccgaaagctatttggaaaaactggtggcggaaggtatcgcggctaaggcgttggacgaatatgcggttacgttggaagaagccgtgccggtgaaccgcctgcctggtttttcagacggcattgtttcggtacaggacttcggcgcgcagcaggcggcgtatttgttaaacccgaaagacggcgaacggattttggacgcgtgcgccgcgccgggcggcaagacggggcatatcttggaactggcggattgccgtgttaccgccttggacattgatgcaggccgtctgaaacgggtggaagacaatatcgcgcgtctgggctttcagacggcatcgacggcgtgtgccgatgcacaggacctgtcggcatggtatgatgggaaaccgtttgatgccgtccttgccgacgtgccgtgtaccgcctcgggcgtggcgcggcgcaatcccgacgtgaaatggctacgccgtccgaccgacgcgctcaaaaccgcccgccagcaggaagccctgctagatgcattgtggcaggtgctgaaaagcgggggaaggatgttgatcgctacctgttccgtgttcgtcgaggaaaacgacggacaattgcaaaaattcctcaaccgccatgccgatgcagaactgatcgaatcgcgggtactcttaccgaacaaacaccaagatggcttttattacgcgcttattcaaaagcagtaa

SEQ ID NO: 42289 - DNA, 1005 bp, Neisseria meningitidis
atgagcattaaagtagcgattaacggtttcggccgcatcggccgcctcgcattgcgtcaaattgaaaaagcccacgacatcgaagtcgtcgccgtcaacgacctgacccctgccgaaatgctgctgcaccttttcaaatacgacagcacacaaggccgtttccaaggtactgccgaattaaaagacgatgccatcgtggtaaacggcaaagagatcaaagtttttgccaatccgaatcccgaagaattgccttggggcgagttgggtgtggatgtcgtcctcgaatgtaccggcttctttaccaataaaaccaaagccgaagcacacatcagggccggcgcgcgcaaagtcgtgatttccgcacccggcggcaatgatgtgaaaaccgtcgtatatggcgtaaaccaagacattttggacggcagcgaaaccgttatctccgccgcttcctgcaccaccaactgccttgccccgatggcggcagtcctgcaaaaagagttcggcgtagtcgaaggtctgatgaccaccatccacgcctacaccggcgaccaaaacacccttgacgcgccgcaccgcaaaggcgatttgcgccgcgcccgagccgccgcgctcaacatcgtgcccaacagcaccggtgccgccaaggccatcggtctggttatccccgaattgaacggcaaactcgacggctccgcccaacgcgtccctgttgccagcggctcgctgaccgaattggtttccatcctcgaacgccctgtaaccaaagaagaaatcaacgccgcgatgaaagccgccgccagcgaatcttacggctacaacgaagatcaaatcgtttcttccgacgttgtcggcatcgaatacggctcgctcttcgatgcgacccaaacccgcgtgatgaccgtgggcggcaaacaattggtgaaaaccgttgcctggtacgacaacgaaatgtcctacacctgccaactcgtccgcactttggaatacttcgcaggcaaaatctaa

SEQ ID NO: 42290 - DNA, 687 bp, Neisseria meningitidis; identical to SEQ ID NO: 36558

SEQ ID NO: 42291 - DNA, 1464 bp, Neisseria meningitidis
atgcgtatcgtagaaaaagcctatactttcgacgatgttttgttggttcccgcacattcgaccgtgctgccgcgagacgttaaacttcaaaccaagctcacccgcgaaatcacactcaacctccccctgctttccgccgcgatggacactgttaccgaggcgcgcctcgccatttcgatggcacaagaaggcggcatcggcatcatccataaaaacatgccgcccgaaatgcaggcgcgcgccgtttccaaagtgaaacgccacgaaagcggcgtggtcaaagaccccgtaaccgttgcaccgacaacgctcatccgcgaagtcttggaaatgcgtgcgcagcgcaaacgcaaaatgtccggcctgcccgtcgttgaaaacggcaaagtcgtcggcatcgtaaccaaccgcgacctgcgttttgaaaaccgcgtcgatttgcccgtttccgccattatgaccccgcgcgaacgtctggttaccgtccccgaaggcacaagcatagacgaagcgcgcgaactgatgcacacgcacaaagtcgagcgcgttttggttctgaacgaaaaagacgaactcaaaggtctgattaccgtcaaagatattttaaaaaccaccgagtttcccaatgccaacaaagactccgaaggccgtctgcgcgtcggtgcggcagtcggcaccggcggcgacaccgaagagcgcgtcaaagccttggttgaggccggcgtggacgtgattgtcgtcgataccgcccacgggcacagccaaggcgtgatcgaccgcgtgcgttgggtcaaagaaacctatccgcacatccaagtcatcggcggcaacatcgccactgccaaagccgctttggatttggtcgccgccggcgcggatgccgtcaaagtcggtatcggtccgggatcgatttgcaccacccgtatcgtggcaggtgtcggcgtgccgcaactgaccgccattcacaacgttgccgaagccctcaaaggcacgggcgttccgctgattgccgatggcggcatccgcttctccggcgacatcgccaaagccctcgccgcaggcgcgtacagcgtcatgctcggcggtatgtttgcaggcacggaagaagcgccgggcgaaatcgaactctaccaaggccgctcatacaaatcctatcgcggtatgggttccttgggcgcgatgagccaaggttctgccgaccgctacttccaagacaaaaccgacagcaccgacaaatacgtccccgaaggcatcgaaggccgcgttccttacaaaggcccgattgtgaacatcatccaccaactgaccggcggactgcgctccagcatggggtatttgggttgcgccaatattgccgaaatgcacgaaaaagcagaatttgtggaaatcacttccgcaggtatgagcgaatcgcacgttcacgacgttcaaattaccaaagaagcaccgaactaccatcgctga

SEQ ID NO: 42292 - DNA, 729 bp, Neisseria meningitidis; identical to SEQ ID NO: 37361

SEQ ID NO: 42293 - DNA, 612 bp, Neisseria meningitidis; identical to SEQ ID NO: 40567

SEQ ID NO: 42294 - DNA, 483 bp, Neisseria meningitidis
atgggaatagaaggcgttttgaaaaaaggtttcatcaccaccagcgcggatacggtgctgaactatatgcgtaccggttcgttgtggccggttactttcggcttggcctgctgcgccgtggaaatgatgcacgcgggtatggcgcgttacgaccttgaccgtttcggtattattttccgtccgtccccccgtcaggccgacctgatgattgtggcgggtacgctcaccaataaaatggcgcccgccctgcgccgagtgtacgaccagctcgccgagccgcgctgggtattgtctatgggctcatgtgccaacggcggcggctattatcactattcttattccgttgtgcgcggtgccgaccgcgtcgtgccggtagatgtttatgtgccgggttgtccgccgactgcggaagccctgatttacggcctgattcagctccaacaaaaaatcaagcgcacttccaccattgcgcgtgacgagtaa

SEQ ID NO: 42295 - DNA, 216 bp, Neisseria meningitidis
gtgtttaagctcggcgtttatgcctgtctcggactgtttgccggctgggtgctgctgctgattgtgcaactctggttttcttttctcgaagcggaattgttcttcaaaatcacactgactatggcggggctgtttgtcatcatcctcgccgccctgctggtattcggccagtatttttccgaaaagaaaatgaaagacgacgggtttatcaactga

SEQ ID NO: 42296 - DNA, 969 bp, Neisseria meningitidis
atgactgccaaacctttttccctcaacctgaccaacctcctgctgctggcggtgttgtttgccgtcagcctgtcggtcggcgttgccgatttccgctggtcggatgtgttttcgctgtcggacagccagcaggttatgttcatcagccgcctgccgcgcacgtttgcgattgtgctgacgggcgcgtcgatggcggtggcggggatgattatgcagattctgatgcgtaaccgttttgtcgaaccttctatggcgggcgcgggtcagagtgcggctttgggtttgcttctgatgtccctgctgctgcctgccgcgccgctgccggtcaaaatgtcggttgccgccgttgccgcgttaatcgggatgctggtgtttatgctgctgatccgccgtctgccgccgacggcgcaactgatggtgccgctggtggggattattttcggcggcgtggttgaggcagtggcgacgtttatcgcgtatgaaaacgaaatgctgcaaatgctcggcgtgtggcagcagggcgatttttcgagcgtgctgctggggcggtacgagctgctttggattacgggcggtttggcggtgtttgcctatctgattgccgaccggctgacgattttggggctgggcgagacggtcagcgtgaatttgggtttgaaccggacggcggtgttgtggtcggggctgattattgtggctttgattacgtcgctggttatcgttacggtcggcaatatcccgtttatcgggctggtcgtgccgaacatcatcagccgcctgatgggcgacaagctgcgacaaagcctgcctgcggtggccttgctgggcgcatctttggtgttgctgtgcgatattgtcggacgcgtgattgtgtttccgtttgaaattccggtctctacggtttttggcgtgatggggacggctttgtttttgtggcttttgttgaggaaacctgctcatgccgtctga

SEQ ID NO: 42297 - DNA, 792 bp, Neisseria meningitidis
atgtccgaataccgagtcaaccatgaacccgtttttatgctggcatcttcgccctggcgcgaaagcagcctgtgggttgaagcattcagccgccgttacgggcgtgtggctttgctggcgcgcagcgcgcgcaaaaggcagagcgagctgcgcggcgtattggtgccgttcgtgcccgtcagcgtgtcgtggtacggcagtcaggaactcaaaaccctacaccgcgccgaatgggtcggcggttggcggcagcctcagggcagggcgttgttcggcggattgtatgtgaacgagttggtgttgaaactgaccgcccgcgaagacccggtgcccgagttatacgacgcgttggcggaagtgatggaggcggtgtgctgcaaagccgcttatatcgacgacttgcgccgtttcgagtggcggctgctgaacctgttgggcgttgcccccgatttgaaccgcgacggggacggcgggacgattgcggcaggcggcacataccttgtccgcccggaaacagccgtcttccccgtcggaaaaggatttgccgtaccgccgcacgccgccggcgttgtcgcccccgggcagagcctgatcgatttgcgcgaaggcagtttccgcactgccgaaagcctgcaacaggcattgaaaatcacacggctttttatccgccacctgttgcccgaggggctgaaatcgcggcaggtgttggaacagatacggcagtttgaccgcaaagaaaccgcccgggaaaccgtcccgacttcggacggcacggcttcaaatgccgtctga

SEQ ID NO: 42298 - DNA, 435 bp, Neisseria meningitidis
gtgaaatatgaatttaccctgccttcgagcagcggtgcggattttcattcggcagaacatctgcctttggtcgtgtatttttatccgaaagacagtacgctgggctgtacgacggaaggcttggatttcaatgcgcgtttggaacagtttgaggcattgggttataccgtggtcggtatttcccgcgacggcgtaaaggcgcatcagaatttttgcgccaagcagggtttccggttcgagctgttgagcgacaaggatgaaacagtgtgccgcctgtttgatgtcatcaaattgaagaaactgtacgggaaagagtcgttaggtatcgagcgcagtacgttcgtcttgaataaggatggagaaatcgcccatgaatggcggaaagtcaaagtggcgggtcacgcgcaggaagtattggaaacgctttcccgataa

SEQ ID NO: 42299 - DNA, 267 bp, Neisseria meningitidis
atgaatcaagctgttgcacaatttgctcctttagtgttgattatggtggtgttctacttcctgatcatgcgtccgcagcaaaagaaattcaaagcgcatcaggcaatgcttgccgccttgaaagtcggcgacaaagtggtcttggcggcaggtttcaagggtaaggtaaccagagtcggcgaacagttttttaccgtggatatcggacagggtacaaaaatcgaggtcgaagtggaacgcaatgcgattgccgcaaaagtcgattga

SEQ ID NO: 42300 - DNA, 444 bp, Neisseria meningitidis
atgagcgaagaactgcaacccgtattcagcatcgagcgactgtatgtcaaagacttgtctttggaagtgccgcacgcgccgcaaatctttttggaacagggcgagcccgaagtggagatgcgcgtttccaccggcagccaaaagctggaagacggctactacaacgtggatgtaaccgttaccgtaaccgccaaattggataacgagcgcacgatgtttttgaacgaagtaacccaaagcggtattttccgtttggaaaacatccccgaagaagatgccgacctgctgctcggcgtggcgtgtccgaacatcctcttcccttacgcgcgcgaagccgtttccggtacggtaacgcgcgccggcttcccgcccgtcctgctcgcgccgattaattttgaggcgatttaccaacaacagcaggaagccgaagccgccggggcttga

SEQ ID NO: 42301 - DNA, 876 bp, Neisseria meningitidis
atgaatctctacgacctgctccttgccccctttgcagaattcgactttatgcgctacgccctcgcatccgtcttctgcctgtccctcagtgccgcacccgtcggcgtattcctcgtcatgcgccgtatgagcctgataggcgacgcattgagccacgccgtcctgcccggtgccgccgtcggctacatgtttgccggcttgagcctgcccgccatgggtttgggcggcgtagccgcaggcatgctgatggcactgcttgccggactcgtcagccgcttcaccaccctgaaagaagatgccaactttgccgccttttatctcagcagcctcgccatcggcgtagtcctcgtcagcaaaaacgggagcagcgtcgatttgctccacctccttttcggctctgtacttgccgtcgatattcctgccctgcagctcatcgccgccgtctccagcctcacgctcattacccttgccgtcatctaccgcccgctcgtactcgaaagcatcgaccccctgtttctcaaatccgtcggcggcaaaggcgggctttggcacgtcctctttctcgtcctggtcgtcatgaacctcgtatccggctttcaagccctcggcacactcatgtccgtcggactcatgatgctgccagccattaccgcccgcctgtgggcgaagcatatgggcgcactcatcctcctatccgttctgacagccctgctgtgcggcttgagcggactgctcatttcctaccacatcgaaattccttccggtcccgccatcatcctctgttgcagcgtcctttatctcttttccgtcatactcggcaaagaaggcggcattctgaccaaatggctcaaaaaccaccgccaccacaccacctga

SEQ ID NO: 42302 - DNA, 1242 bp, Neisseria meningitidis
atgagtaaattcttcaaacgcctgtttgacattgttgcctccgcctcgggactgattttcctctcgccagtatttttgattttgatatacctcatccgcaagaatctaggttcgcccgtcttcttctttcaggaacgccccggaaaggacggaaaaccttttaaaatggtcaaattccgttccatgcgcgacgcgcttgattcagacggcattccgctgcccgacggagaacgcctgacaccgttcggcaaaaaactgcgtgccgccagtttggacgaactgcctgaattatggaatatcttaaaaggcgagatgagcctggtcggcccccgcccgctgctgatgcaatatctgccgctgtacgacaacttccaaaaccgccgccacgaaatgaaacccggcattaccggctgggcgcaggtcaacgggcgcaacgcgctttcgtgggacgaaaaattcgcctgcgatgtttggtatatcgaccacttcagcctgtgcctcgacatcaaaatcctactgctgacggttaaaaaagtattaatcaaggaagggatttccgcacagggcgaagccaccatgccccctttcacaggaaaacgcaaactcgccgtcgtcggtgcgggcggacacggaaaagtcgttgccgaccttgccgccgcactcggccggtacagggaaatcgtttttctggacgaccgcgcacaaggcagcgtcaacggcttttccgtcatcggcacgacgctgctgcttgaaaacagtttatcgcccgaacaatacgacgtcgccgtcgccgtcggcaacaaccgcatccgccgccaaatcgccgaaaaagccgccgcgctcggcttcgccctgcccgttctggttcatccggacgcgaccgtctcgccttctgcaacagtcggacaaggcagcgtcgttatggcgaaagccgtcgtacaggcaggcagcgtattgaaagacggcgtgattgtgaacactgccgccaccgtcgatcacgactgcctgcttaacgctttcgtccacatcagcccaggcgcgcacctgtcgggcaacacgcatatcggcgaagaaagctggataggcacgggcgcgtgcagccgccagcagatccgtatcggcagccgcgcaaccattggagcgggcgcagtcgtcgtacgcgacgtttcagacggcatgaccgtcgcgggcaatccggcaaagccgctgccgcgcaaaaaccccgagacctcgacagcataa

SEQ ID NO: 42303 - DNA, 783 bp, Neisseria meningitidis
atggaatcactgactgccataaataaatcgcgcattcggcaggctttccaaaaagcattaaacgattatgaccggcacgccttaatccaacaaaaaatgacgattaatttaatgacgcatttgcaagattatttgccggatatgccattggaaaacgtgttggaattgggctgcggctcaggaatgttgagtgccttgctgcaaaaacagatttcagcgaattattggttatttaatgatttgtgcaatgtgcagccccaactggctgaaaaactgccgcaatcctttgatttttattgcggcgatgcggaaaactttccttttcaacgacaatttgacttaatcgcaagcgcatctgccgtgcaatggtttcatcaacccgacgcttttatcacccattgcaaaacaggcttgaaaacaaacggattattggcggttgcaacctttggcaaagacaatttaaaagaagtccgccaaattacaaatataggcttaaattacccgactttatcccaatggcaggcttggttagccaaagattttgagcttttatggtgtgaggattttacggtaatactagactttgatacgccgtcagatgtactcaaacaccttaaatatacaggcgtaacagccacgaaccaaaaaaattggacaagaaaaaatctcaatggatttattggcgattacttgtcggcgttcggtatgccgtcgggcaaagtgcgcctgacttatcatccgttattttttatcgcgcgctactctgcggcgggcaggcaataa

SEQ ID NO: 42304 - DNA, 474 bp, Neisseria meningitidis
atgtcccgcaacaacgaagagctgcaaggcatctctcttttgggcaatcaaaaaacccaatatccgaccggctacgcgcctgaaattctcgaagcattcgacaacaaacatcccgacaacgactatttcgtcaaattcgtctgtcccgagttcaccagcctctgccccatgaccgggcagcccgacttcgccaccatctacatccgctacattccgcacatcaaaatggtggaaagcaaatccctgaaactctacctcttcagcttccgcaaccacggcgattttcatgaagactgcgtcaacatcatcatgaaagacctcattgccctgatggatccgaaatacatcgaagtattcggcgagttcacaccgcgcggcggcatcgccattcatccgtttgccaactacggaaaagcaggcaccgagttcgaaacattggcacgcaaacgcttgtttgagcacgacgcacaataa

SEQ ID NO: 42305 - DNA, 591 bp, Neisseria meningitidis
atgtcggaaaagataatactgccggtcttgtcgttgggcggcgttcgtctcgaaccgttggatgtgcatcatgaaacgggtttgcgcgaggcggtttgcgatggggaggtttggaagctgggggtaacgtccgcgccccatccggatagggtggcagactatatcgggacagcattggcaacgcgtttggcgtttgcggttgtcgatgaagaggcgggcagggtggtcgggacaacggcgtattatcattttgaaccgcagattccgcgtttggatatcggattcacatggtatgcggcatcggcacggcggacacggataaacacctgttgcaaaatcatgctgttggattccgcatttgatgttttggcttgccgttgcgtgggatggcgcacggatattctgaaccttgcctcgcaacgtgccatcgaacggctgggtgcggaaaaagacggcgtgctgcgtatgcatatgctccgtaaagacggcagtgtgcgcgatacggtcgtgtacagtatgctgagggaagattggtgcaaaaacagggaaatcctgaccggcaggttggcagggtatggcgtgcaggtgtga

SEQ ID NO: 42306 - DNA, 1269 bp, Neisseria meningitidis
ttgactaacagggggggagcgaaattaaaaaccaattccaagagtagtgaacgaatgagtgaagttgaatatttctcacactttatatcggacggaaaagggaagcttttagaaattccgcagcgaagaggtaagcaagacggggtttttgttgattggatttcattcacattccatgaagatactttactgaaagtttccggttgccctttattttctgatgctgaatacatgtatgtattaagcagaaagctggaagaaattctaggttttggcataacgcgcaaatgcaaatcaaggggcaacaaattctatgaatccatgtataggttaggttcggatgatgttgattatggagaggtgcatttcggaggtcagcgcaatactgttttagttgagttgaaaggtactggttgcagcgttgcaagtccgggttgggagttgaggctaaagcagtttctcgatgattcgataaggacaagaataacgcgaattgacctagcacttgatttttttgatggagagtacacgccggatcaggcgttgttagatcacgataatggtttttttgataacagcaatcaaaggccgaaatctgaaacgatcggtacggcttggcggaatgaggacgggagcggcaagacattttatgtaggtcgcaagaaaaattctcgttttgttcgtgtttatgagaaaggcaggcagcttggagataaagaaagcaaatgggtaaggttcgagatccagtttaattatggagatatagaaatacccttggatattttaataaatcagggttcgtatttctgtggagcttttccaatttgtagaaaatttaaaaatatgccggttcccgaaaggtttgatcagagaaagaaaaagcttaatttaactttcgagcataaattgcattacgcgaaaaacgcggttggaaaactggtcaatttcatgattgaaatgggttttgataatagcgaaattgtggaatctttaaaggcagattcgggatttcccaaaggattagaacctgaaaaatatgctctggaaatgttaagggacggtttgaaacacggttttattcatgaacagccggatattgatttggaaattgaacttgatgaattgggggttattgcttttaaaaattctgacaaattcgatagggaaaaaaggctttttagtcctgattatgatgtcgagaaagaaaggaaatatcaggaatatttaagtaaagtttatcatcaaaatgtagattatgattatttttaa

SEQ ID NO: 42307 - DNA, 1245 bp, Neisseria meningitidis
atgaccctattttgcgaacaagtcccctacccccgccttgctgaagcattcggcacaccgctttatgtgtacagccaatccgcgctgaccgaagcatttgaacactaccaaaccgcgtttgccgctttgaacccgctcgtctgttacgccgtcaaggcaaacggcaatctgagcattatcaaacacttcgcctcgctgggcagcggttttgacattgtgtccggcggcgaattggcacgcgttttggcggcaggcggcgacgcggcaaaaaccatattttcaggcgtaggcaaaagcgaggcggaaatcgagttcgcgctgaatgcaggcgtgaaatgcttcaatatggaaagcatccccgaaatcgaccgtattcagaaagttgccgcacgtttgggtaaaaccgcgcccgtctccctgcgcatcaaccccgatgtcgatgcaaaaacccatccctacatctccacaggtctgaaagccaacaaattcggcatcgcctacgccgacgcgctcgaagcctaccactatgccgcacaacagcccaatttgaaaatcatcggcatcgactgccacatcggttcgcaactgaccgacttaagcccgctggtcgaagcctgcgagcgcattttgattttggttgacgcgcttgccgccgaaggcattgttttggaacatttagacttaggcggcggcgtcggcattgtttaccaagacgaaaatgtgcctgatttgggcgcgtatgcccaagccgttcaaaaactgatcggcacacgccgtctgaaactcattcttgagcccggccgcagcctggtcggcaacgcaggttcgctgctgacacgcgtcgagtttgtcaaatacggcgaagagaaaaactttgtgatggtcgatgcggcgatgaacgatttgatgcgcccggcgctttatgatgcctatcatcacatcgaggcggtcgaaaccaaagacatcgcgacgctgaccgccaacatcgtcggtccgatttgcgaaaccggcgacttcctcggcaaagaccgcaccatcgcctgcgaagaaggggatttgctgcttatccgcagcgcgggcgcatacggggccagtatggcgagcaattacaacgcgcgcaaccgtgcggcagaggtgttggtggacggcaacgaataccgactcatccgccggcgcgaaaccttggaacagcaaatggcaaacgaactcgcctgcctgcaagccgaacatcaaaatgccgtctga

SEQ ID NO: 42308 - DNA, 453 bp, Neisseria meningitidis
ttggttatgtatgtagtaaaatcagccaatgatggaggtaattccctatttttaagttcatcagatattgtcaatcagttatctaaaacagaaaccggtaaaaaacacttaaaaacattaacgggcaatttatatccatttaaaacaccagcatcatttgataaaaaacaaggtgtgagatggggtaatatcttatcggtcaatactcaaatgattagatttagaagtgattgtatctataaaggtattgaagaaaatagaaataaagtatcaaaggaaatggtacttgcacttgattatcttataaatgttataaaaaatgcgagtgatattcaagaattttctgcacaagatgatggtttgattattattgacaatgtcaatggcttgcatgccagaactgattatacggataaaaacaggcattatattagagcaagaattactgtataa

SEQ ID NO: 42309 - DNA, 924 bp, Neisseria meningitidis
atgccgtccgaacacccgttttcagacggcattcccacacccaaccccaaagaaaccatgaacgacaccgcccaaattaccgccagctacggccgccgctacattgtccgcacgcccgacggcacaacctacgaagccagcacccgcaaaaaacgcgtcgatttcgcctgcggcgaccgcgtccgcatcagccccgtcaacgccgaacaagttgtgattgaagattttttaccgcgccaaagcctgctctaccgccaagacgcgtggaaaaccaaactcatcgccgccaacgttacccaactcctcatcgtaaccgccgccgtcccgagtccgagcgtgcggctgctgcaacgcgccctgcttgccgccgaagccgccggtattgaagccgtcatcgtcctgaacaaagccgacctgcccgaaaccgccctttggcgcgaaaaactcaaattctacgaaacgctgggttatcccgtcatcgaaacccgcgcactggaaaacgccggcagcctgcgccccgccctgcaagggcacagcaacatcctgctcgggcagagcggtatgggcaaatccaccctgaccaacgcccttttgggcagccaaaccgcccgcaccggcgacatttccgccgcactcgactcgggaaaacacaccaccacccacgcccggctttatgatttgaacggcgaaacccaactcatcgactccccgggtttgcaagaatttggtttacaccacctccaagccgccgatttgccgcgctatttccccgatttccgccaccttgtcgggcaatgccgcttccacaactgcacccaccgcgccgaacccggctgcgccttcaaagccgccgcgcaaaccggggcggcaagccccgaacgcctcgcctttttgcagggcatcaccgacgaactgcccgggtaa

SEQ ID NO: 42310 - DNA, 303 bp, Neisseria meningitidis
ttgtggtcaaccatcaaagacttttccagcgattttgaggaaaaaactgaagcgttctttattcttttcaaagagctgctgcgcagaggtcatctgaaactgcaacgcgacgggcaaattatcgggcatacgcccgaagaatgggaacaaatatttagggaagtatggcctgaatatgaaatcgaacccaatccacttcccggctatgccccatttgatattggaatgtggcttacggtcgaggctcctgcctacgccgtatggatagatcccgaagacggtagcgaatactgggcgggataa

SEQ ID NO: 42311 - DNA, 1269 bp, Neisseria meningitidis
  misc_feature 1246, 1247, 1248, 1249, 1250: 'n' is a, c, g or t
atgtttattatcctagggcgaaattttttaaagattatcctatgctttagtttttttgtatctaaatttgcattggcatcagtaaatgctccgggtaaatttgatagggttgaagtttatgatgatggcagatatttaggtattcgaggttcagatgacaaaagaagaagaatttggaaaggtgtatttgatagagaatcgggaagatatttaacttcagaagctcaagatttaaaagttaggcatgtatctactggagcatcaagtacgggtaaagttagttcggttgtatcttcatcagtttcccgcgctggcgtattggcgggggtcggcaaacttgcccgcttaggcgcgaaattaagcacaagggcagttccttatgtcggaacagcccttttagcccatgacgtatacgaaactttcaaagaagacatacaggcacaaggctaccaatacgaccccgaaaccgacaaatttgtaaaaggctacgaatatagtaattgcctttggtacgaagacaaaagacgtattaatagaacctatggctgctacggcgttgacagttcgattatgcgccttatgtccgatgacagcagattccccgaagtcaaagaattgatggaaagccaaatgtataggctggcacgtccgttttggaattggcataaagaagaactgaataaattaagttctttggattggaataattttgttttaaatagttgcacatttgattggaacggcggagattgtgtggtcaataaaggtgatgattacagaaatggggctgatttttcccttattcgcaattcaaaatacaaagaagaaatggatgccaaaaagctggaagagattttatcgttgaaagtcgatgccaatcccgacaaatacataaaggaaaccggttatcccggttattccgaaaaagtagaagtcgcacccggaacaaaagtgaatatgggtcccgtcacggacaggaacgggaatcccgttcaggttgtcgcaacattcggcagggattcgcaaggcaacaccacggtggatgttcaagtaatcccgcgtcccgacttgacccccggaagcgcggaagcaccgaacgcacagccgctgcccgaagtatcgcccgccgaaaaccccgcaaacaacccgaaccccaatgagaaccccggcacgagccccaatcccgaacccgaccccgatttgaatcccgatgcaaatcccgatacggacggacagcccggcacannnnncacacacttaattaattaa

SEQ ID NO: 42312 - DNA, 504 bp, Neisseria meningitidis
atgtcagaccctaatttgattgacccgaaagttttcgccgccgaagggcggagcctgcaaggcggcttcctgctcgaagaattggacgaacgcgtcagttcgcacgattatcccgccgacaaacagacacgcgtgtcgtttacactgaccggcggtcgcgaccggctgcaacgcctgttcctcgacctgaacgtcaaagccgatatgcccctggtttgccagcggtgcattgcgcccctgccgttccggctcgacgaaaccgcccgcatcgtcttgttttccgacgagaaagacttggacgaagcgatgcttgccgatgaagaattggaaggtatgctgctcgaaaaagagcttgacgtgcggaccctggtcgaagaccaaatcctgatgtcgctccccttctccccccggcacgaagactgcggcggtaacgggacaccggaaaaaaccgatcgggacaaaccaaaccccttcgccgttttggcaggtttgaaaagcaattga

SEQ ID NO: 42313 - DNA, 693 bp, Neisseria meningitidis
atgaaacgcttcacctatactctttccgacggtttgtgcatcgaaatcgaactcaaacgcagtgccaagaaaaatctgattctgcgccccgtcaatatgcagacggtcagcatcaacgtcccacccttttttcaagaccacgcgttagcaaactggctggcggcaaacgaaacgattttgcggaacacgcttgccaaaacgcccgtgcatcctgtttcccacccaaacttacccgagtggatttggtatcggggaataaagaccaagctggatacccacagccaaagccatatccgtatcacgtcgtctgaaatcctgcttccccgaaaagaaaccgccgcacaaatcgaccacctgcgccgcctgttgaacgaacgcgcccgcgaatacctgctgccccgccttgaaaaacacgcagccgaaacaggactgacgcccaccgccacagacctgagcaacgccaaaaccttttggggcgtatgccgcccgcacaccggcatccgcctcaactggcggctgatcggcacgcccgaatacgtcgccgactatgtctgcatccacgaactctgccacctccgccaccccgaccacagtccgcgcttttggcatttggtgaacacgctgacgccgcataccgacaatgctaaaagttggctgaaggcgcacgggcgggaattgtttgtgctggggtaa

SEQ ID NO: 42314 - DNA, 1542 bp, Neisseria meningitidis
atggttttcgataataattatcattacaatgcaatgccggttcgtttgcttgtgaacattcaagatgccgactctgacggcattcagacagcatctgaaaacaataacggcacaaggatggggtacaatcgccctatggaaaaaaacaccctatccgcccgcgcaccatccccttggctgccgcttctgctggcaattgccatttttatgcagatgttggatgcgaccattttaaataccgcactgcctgaaattgccgccgacctgaatgagtcgcctctggatatgcaactggcagttatttcctacacgctgacggttgccctgctgattcctttgagcggttatttggcggacaggttcggaacgaaaaaagtctttttcggttcgattgccgtttttatgctcggatcggcattgtgcgccgcatcgggttcgctgtttgaattgacgctttcccgtgtcgttcagggcatcggcggttcgatgctggttccgataccgcgtctgaccatcttgcgtgtgtacgacaagtccaagctgctcaatgccatcaattatgcggttatgcccgcattaatcgggccggttttagggcctttggcgggcggttatttggtcgaatacgcttcgtggcactggattttcctgctcaacctgcccatcggtctgctgggtttcatattgggacgcaacatcatgcccgatattaaaggcagtaatatctctttagacttcaaaggttatctgattttttctgccgccgcgtgcctcttgttactttcggcagaaagcctgtcgcacgcgctgcctccgtattttgcactgttgccgctgtgcggcggactgctgtttgcacgccgttatttccgacatatgaaaaccgcgtccaaaccgatttattccgccgacctgtttctgatacgcactttccgtctgggactggcgggcaatctgttcagccgtctcggcatcagctcgattccttttctgatgcccctgatgtttcaaatcgctttcggcttcggcgcaagcctgtcgggttggctggtcgcacccgtcgccctgtcttcgctgctggtcaaaccgctgattgcaccgctcatgaaacgtttcggctaccgcacggtactgctttggaacaccaagctgcttgccgccttcatcatgctgctcgccctgcctgacggaaactcgccgctgtggatttgggttttcctctcgctggcgatcggcgcgtgcaactccctacagttttctgccatgaacacactgaccctcgccgatttgcgcccgcaacaaacaggcagcggcaacagcctgatggcggtcaaccaacagcttgccatcagcatgggcattgttgccggcgcattaatccttaaaaactggacatttctgataccggcttcttcaggtctgcattccgccttccgtatgaccctgctcagcatcggcggcatcacccttgcatcatcgctggttttcaaacggctgcacgtttcagacggcaccaacctgacacggaacacaccgtcctga

SEQ ID NO: 42315 - DNA, 2214 bp, Neisseria meningitidis
atgtgtaaaccgaattatggcggcattgtcttgttgcccttacttttagcatcttgtatcggcggcaatttcggcgtgcagcctgttgtcgaatcaacgccgaccgcgtaccccgtcaccttcaaatctaaggacgttcccactccgccccctgccgggtcttcggtagaaaccacgccggtcaaccggcccgccgtcggtgcggcaatgcggctgccaaggcggaatattgcttcctataaacaagacggtacggaaattcccgacaagcatcaggcagaggagcatctgccgcttaaagagaaggatatcctgtttttagacggtacgctgaaagaacaggctgacaaacttaaaaagaaaatcaacgaacggtattctgatgtgagggttatcacatcgaaaaaagaagaagaaaaatatcaatatcaatttgtccgtgcgggctatgtgtttaccagggcggaaggaaaggataatgaaaaagaaaagacttctgatggtaaggagtttgttaaccgatttagttatgacggttttgtatattattccggagaacgtccttcccaatctttaccgagcgcgggaacggtgcaatattccggtaactggcaatatatgaccgatgccaaacgtcatcggacaggtaaggcggtttccagtacggatttgggttataccacatattatggtaatgaaattggggcaacttcttatgaggctagggatgccgacgacagggaaaagcatcctgccgaatatacggttgattttgataacaaaaccctgaatggcaagctgattaaaaatcagtatgtgcaaaataaaagtaatccaaatgagcccaaaaaaccgctgaccatttacgacattaccgcaacattggacggcaaccgctttaccggcagtgccaaagttagcaccgaggtgaagacgcaacacgctgataaagaatatttgtttttccataccgatgccgatcagcggcttgagggcggttttttcggcgataacggagaagagcttgccggacggtttatcagcaacgacaacagcgtattcggcgtattcgcaggcaaacaaaaaacagagacagaaaacgcagcagatacaaaacctgccctgtcgtctggaaaacacaccaaaatcttggattctctgaaaatttccgttgacgaggcaagtgataaaaatccccgtgagtttgccatttcctctatgcccgattttggtcatcccgacaaacttcttgtcgaagggcgtgaaattcctttggtaaacaaagaacaaaccatcgagcttgccgatggtaggaaaacgacaatccgaacctgctgcgattttctgacctatgtgaaaatcggacggatgcaaaccgaacgtcccgccgccaaaccgaaggcgcaggacgaagagagggacgaagaggatacaggcgttgatagcgtcgaagaaggcgaagacgaaatcgacgatgaagaaggcaccgaagacgcagccgtaaaagacgaaggcagcgaagaagacgaagccgtagaaggtgaagatgaagctgaagaacccgaagaagaatcgccgacagaagaaggcggcagcggttcagacggcatcctgcccgctccggaagcccctaaaggcaggaacatcgaccttttcctgaaaggtatccgcacggcggaaacggatattccgaaaactggagaagcacactataccggcacttgggaagcgcgtatcggcaaacccattcaatgggacaatcaggcggataaagaagcggcaaaagcagtatttaccgttgatttcggcaagaaatcgatttccggaacgctgacggaggaaaacggtgtagaacctgctttccatattgaaaacggcaagattgagggcaacggtttctacgcgacagcacgcactcgggagaacggcatcaatctttcgggaaatggttcgaccgaccccaaaaccttccaagctagtaatcttcgtgtagaagggggattttacggcccgcaggcggaggaattgggcggtattattttcaataatgatgggaaatctcttggtataactgaaggtactgaaaataaagttgatgttgaagctgaagttgatgctgaagttgatgttggcaaacagttagaatctgaagttaaacaccaattcggcgtggtattcggtgcgaagaaagatatgcaggaggtggaaaaatga

SEQ ID NO: 42316 - DNA, 903 bp, Neisseria meningitidis
atggataccgcaaaaaaagacattttaggatcgggctggatgctggtggcggcggcctgctttaccattatgaacgtattgattaaagaggcatcggcaaaatttgccctcggcagcggcgaattggtcttttggcgcatgctgttttcaaccgttgcgctcggggctgccgccgtattgcgtcgggacaccttccgcacgccccattggaaaaaccacttaaaccgcagtatggtcgggacgggggcgatgctgctgctgttttacgcggtaacgcatctgcctttggccactggcgttaccctgagttacacctcgtcgatttttttggcggtattttccttcctgattttgaaagaacggatttccgtttacacgcaggcggtgctgctccttggttttgccggcgtggtattgctgcttaatccctcgttccgcagcggtcaggaaacggcggcactcgccgggctggcgggcggcgcgatgtccggctgggcgtatttgaaagtgcgcgaactgtctttggcgggcgaacccggctggcgcgtcgtgttttacctttccgtgacaggtgtggcgatgtcgtcggtttgggcgacgctgaccggctggcacaccctgtcctttccatcggcagtttatctgtcgtgcatcggcgtgtccgcgctgattgcccaactgtcgatgacgcgcgcctacaaagtcggcgacaaattcacggttgcctcgctttcctatatgaccgtcgttttttccgctctgtctgccgcattttttctgggcgaagagcttttctggcaggaaatactcggtatgtgcatcatcatcctcagcggtattttgagcagcatccgccccactgccttcaaacagcggctgcaatccctgttccgccaaagataa

SEQ ID NO: 42317 - DNA, 291 bp, Neisseria meningitidis
atgaacatccaacttcaaggccacatcgtcggcgttaaaaaaatcaacggacaaatcgaaggcaagagcttcgactattgctgcctgattgtcgccacacccttagacagctcccaaggcaacgcattgggcagctctactactgaatacgatttcggcggctctgccaatttcgagcagttccgaaacgcccaatttccgatcgaagcaaacctgaacgtagaaatcgtcactacgggcaaaacccaaaaactgaaagtcatcggttttcaactcgtgaagaaaggctga

SEQ ID NO: 42318 - DNA, 264 bp, Neisseria meningitidis; identical to SEQ ID NO: 40271

SEQ ID NO: 42319 - DNA, 450 bp, Neisseria meningitidis
atgaaaatcggaacaacttggcagacggcatccgctatgctggttttgcgtctgtttgccgcatatgaatttttggaatcgggtttgcaaaaatggaacggggagaattggttttccgaaatcaacgatcagtttccattcccgttcaacttgctgccggacgcgttaaactggaatctcgccatgtatgcggagcttttgctgcccgtattgttgcttttgggtttggcaacgcgtctgtcggcattggggctgatggtcgttaccgccgtcgcttgggctgcggttcacgccggttcgggttacaatgtctgcgacaacggttataaaatggctttaatttatatcgtggtattaatcccgctgcttttccagggtgcgggcggatggtcgctggatacgctgctgaaaaaacggttttgcccccgatgccgtctgaaacaagattga

SEQ ID NO: 42320 - DNA, 750 bp, Neisseria meningitidis
atgaaagcactggtcgcagtaaagcgcgtagtggactacaacgtcaaagttcgtgtaaaagccgatggttcggatgtggatatcggcaatgtcaaaatgtcgatgaatccgtttgacgaaatcgctgtggaagaagctgtccgtttgaaagaagccggaaaagtaagcgaaatcgtagcggtttctttgggtgagaaaaaatgcgaagaaaccttgcgtacagctttggcgatgggtgccgaccgtgccattcatgttgaaaccgatactaaactggagtctctggccgttgctaagttgctgaaagccgttgcggacaaagaaaatccgcaaattttctttttgggcaaacaagcgattgatgatgatgccaatcaagtggcgcaaatgctggcagctttgctgaatgcggcgcaaggtacgttcgcgtccaaagtacaaattgaaggcgacgaagtgcagattgtgcgggaaatcgatggcggcgaagaaaccatcgcattgaaactgcctgctgttatcagcgcggatttgcgtttgaacgagccgcgctttgtcaaactccccaatattatggcggcaaagaaaaaacctttggaaaaactgactcctgacgatttggttgccgacatttcacctcgtttgaaaacggtgaaatttgccgaacctaaggcgcgtcaggcaggcgtaaaagtagcaagcgttgccgaattggttgaaaaattgaaaaacgaagccaaagtgatttga

SEQ ID NO: 42321 - DNA, 195 bp, Neisseria meningitidis
atggttctcttcaagtcaatcaaacaggaaagtatttcttttctgtctgaagatttgaaaaaggactggatgtttcacaaggttaaaactggggaaaaagatggatatggttcagatgaaatgctgagcgtaccccgtgtctatttggaaatgatgtcgcggaaaacgggagtcccctactccagtattctttaa

SEQ ID NO: 42322 - DNA, 1482 bp, Neisseria meningitidis
gtggcattctaccaaactatccaaaatttgactaacatcataaaaccgcacacacacaccatgaaaatcattcagatacagaacaatcacaatgtaaacgatgaccgccccgagtttgaccgcgcgctgattgccagcctgcccgccagcggcccgcgctacacttcctaccctaccgccgaccgtttccatgacggtttccgcgaaggcgaatatatcaaagctttacatttgcgcggtatgggcgcgttaaacaaaccgctttccctttacattcacattccgttctgcaacaccatctgctactactgcggctgcaacaaaatcatcaccaaagacaaaagccgcgccgatgcctacatcgaatatcttgaaaaagaaatggaactgctcgctccacatctgaacggacggcaccagcttgcccaactgcacttcggcggcggcacgccgacctttttgagcgacgaacagatcgaacgtgtcttccgcatgatacgcaaacatttcgagttaatccccaccggcgaatactccatcgaaatcgacccgcgcaaagtcagccgcgacaccgtcctcatgctcggcagactcggcttcaaccgcatgagcatcggcattcaggatttcgaccccaaagtgcaggcggcggtcaaccgcatccaaagttacgaagaaaccaaagaagtcatcgatgcggcgcgcgaagcggggttcaaatccgtcagcgtcgatttgatttacggcctgccgcaccagacttcggaaagcatcaaaaccaccatcgataccgttttgtcgctcgatcccgaccgcctcgccctttatcactacgcccacctgccgcacgtgttcaaaccgcaacgccgcatcgataccgccgccgttcccgacagcgaagagaagctcgatatgctgcaatactgcgtccaaaccctaaccgaacgcggctacgtcttcatcggcatggatcatttcgccaaacctgacgacgaactctccatcgccctcaaagaaggcttcctccagcgcaacttccaaggctattcgacctacgcggattgcgatttggtcgccatcggcgtgtcgtccatcggcaaaatcggcagcacctattcccaaaacgaacgcgacatcgatgcctactatgccgccatcgacgaaggcagactgcccatcatgcgcggctaccagctcaatcaggacgacatcctgcgccgcaacatcattcaggatttgatgtgccgtttcgcgctcgactatcggatttacgaaagtatgttcggcatcccgttcgaccgctacttcaaagacgaactggcggatttggaaaaactcgccggtttgggattggtgcgcctgaacagccacgggctgaccgttaccccgaaaggacgcttcctcatccgcaacatcgccatggtcttcgattaccacctgcgccataaagaaaccaaggcgaaatattcgcaaacagtgtga

SEQ ID NO: 42323 - DNA, 855 bp, Neisseria meningitidis
atggaaacccaagaaaacatgattaaaaccgccttacaagcagctcaaaaacctttttttgagtttgcaccgaacaatactccgcttgtattcacaccagaccaagacggtggctggagatacaaatcacaccccgaattgatgcaaaacccgtaccgcaagtgcggcaaattcctcatgcacgataccgccagtcttattaagtttgtacaaaaacacaaacaggacggcacacaaatctacattgatgccgatttcaaatcagggcgtattgatgtcaccgccgtcatcaatggccatacgcaacaagctccgggctggctcgatttttatgccgtatacaccccgcaacacactacatcggcatccaactggctgaacaacaatgcgcaccgcatgaatcagatggagttttcccatttcctgaccaacaatgcccgcaacatcgtatccaaaaatcccggtaacgaaaattccgtttacccgaccgccgccgaagtattggatttcgcgctcaatctcgagtacaccgaaaaaaccaccttcaaacaaggctatcgtgaacaggacggcagaatcaactttaccttccaatccgaagactcagggcaaacagagaaaaacctcaaaatgtttgaacgtttcggcatcgagttcaccccgcatcaaggcggtgcatcctactttgttgaagccctgttgaaattccgcatcgacaaaaacagcggcgcactcgtcctgtggtacgaattgcagcaaatcgatgctgtaatcgaacaagcggcaaaagacatttccgaagccgtacaaaaagccttccctgaaatcgacatctatttcggcgtaatcgcctaa

SEQ ID NO: 42324 - DNA, 1467 bp, Neisseria meningitidis
atgatgaaattgggtttcaaaccgatacccctcgccattgccgcagtattgtgcgccctggttttggcactgcccgtacccgacggggtcaagcctcaggcttggacgctgctggccatgtttgtcggtgtgattgccgccattatcggcaaggccatgccgttgggcgcgctgtcgattattgccgtcgggttggtcgcagtaaccggcgtaaccgccgacaaaccgggcgcggcgatgagcgatgcgttgagtgcgttcgccaatccgttgatttggctgattgccatcgcagttatgatttcgcgcggtttgctcaaaacagggctggggatgcgtatcggatatttgtttatcgccgtttttggaagaaaaacgctgggcatcggttacagtctcgctctttccgaactgctgctggctcccgttaccccttccaataccgcgcgcggcggcggcattatacatccgattatgcagtcgattgccggcagttacggctccaatcccgcaaaaggcacagaaggcaagatgggtaaatatttggctttggtcaactatcattccaatcccatttcgtcggctatgtttattactgcaactgcccccaaccctttaatcgtcaacttgattgccgaaaatttaggcagtagtttccgtctttcttggggggcgtgggcgtgggcaatggctgttcccggcgttatcgcctttttcgttatgcctttgattttatattttttgtatccgcctgaaattaaagaaacgcccaatgccgttcaatttgccaaagaccgtctgagggagatgggtaaaatgtcggcagacgaaatcattatggcggtcattttcggtatcttgctgctgttgtgggcagatgttcccgcccttattaccggcaatcacgcttttagtatcaacgccaccgccaccgcatttatcggattaagcctgcttttgctttccggtgtattgacttgggacgatgttttgaaagaaaaaagcgcgtgggatacgattatttggtttggcgcattgattatgatggccgcatttttaaataaactcggactgattaaatggttctccggagtgttggcggaaagtgtcggcggtttgggcgttagcggcacggctgcgggcgtaatcctcgtgcttgcttatatgtatgcgcattatatgtttgccagtactactgcacatattaccgctatgttcggcgcatttttcgctgctgccgtttcactgaatgccccggcgatgccgaccgcgctgatgatggcggccgcatccaacattatgatgaccctcactcattatgcgaccggtacttcgcctgtgattttcggttcgggctacaccacaatgggagaatggtggaaggcgggttttatcatgagcgtagtcaattttctgatttttttcgttatcggcagcatttggtggaaagttctggggtattggtaa

SEQ ID NO: 42325 - DNA, 864 bp, Neisseria meningitidis; identical to SEQ ID NO: 37464

SEQ ID NO: 42326 - DNA, 267 bp, Neisseria meningitidis
atgacggaatcccatggttacctatcaaataatttacctgttaaaatcataaatgatattatttatgcaacccagttagtcgaagatttggttttaggaaaaataaaaattgttgattttttaaaatcatataacaatttttattgttggcttggttttgatgagttgcctcaatctgagaaaataaaattcctaagctatcttaatatattaagtattcataaagaaatacaagatgaaactgtgaatagggtttataccgattga

SEQ ID NO: 42327 - DNA, 966 bp, Neisseria meningitidis
atgaaccttaataaactgaaaaacaaactgttccgccgtccggggcagcgtgcggtgattgccgtaccgtatatttggcttttggtgctgtttctgattccgttcgccatcgtgctgaaaatcagctttgccgaacaagaaatcgccatcccgccgtttactcctttaacgacgatagatgaggatttgggtcgtctgaatattgctgtcagctaccaaaattatgcagacatcttccaaaatttttggagtacgctcaatccgttcggcgacggtgaaaacagcaatatctatctgatgacttattggtcttcaattaagactgcgctgactacgacggtaatttgtctgttggtcggttatccgaccgcctatgcgatttctcgtgccaatccttctgtccgcaatggtttgctgcttgccattatgctgcccttttggacatcgttcctgttgcgcgtctatgcgtggatgggtctgctcgggcataacggcattgtaaacaacctgttgattaaaatgggtattatcagcgagcctttggatttgttctacaatgccttttcgctcaatttggtgatggtttacgcctatctgccgtttatgattctgccgctatacacgcaactggtgaaactcgacaaccgcctgcttgaagcggcttccgatttgggcgcggggccggtcaaatcgttcttgacgattaccctgcctttgtcgaaaaccggcattattgcaggctccatgctggttttcgtccctgctgtcggcgagttcgtcattcccgagctggtcggcggttcggaaaacctgatgattggtaaagtcttgtggcaggcgttcttcgatcaaaacaactggccgctggcttccgccgtcgccgtcgtgatggtcgcgctgctggtcgtgccgattgccctgtttcagcattatgaaaaccgcgaattggaagaaggagccaaataa

SEQ ID NO: 42328 - DNA, 423 bp, Neisseria meningitidis
atgaaatatatgattagttttctaaaaaaaacatttgaattaatgagttgggtgttagtcatactaataattgggacattttatgactattatcaaataaggcaatatgctgaattagaaaagaaatctatatcaaatatcttgctatatgcccaaaaagaaaaatttcgcttagagagtaaagataaatacatgcgaggaggatatacaaaatataaatttattttttcagaatatagtaatactacttttttaaatttcataaatgacctgaaaaaagataattatttaccacttgacggctatggacatggttttctatgtagaaaaggagagtctatatcaatcaatatataccctgaaattaataaatttattttagtatggggataccctgaaaatctttgcgctgattctaattaa

SEQ ID NO: 42329 - DNA, 873 bp, Neisseria meningitidis
ttgcgaccatctgaatcattgggacaaaccatgtgtcaactgctgggcatgaactgcaatacgccgaccgatattatgttttcctttgaaggcttccgccgcaggggcggcattaccgaccaccatgccgacggtttcggtatcggctttttcgaaggcaaaggcgtgcgcctgttccacgacgacaagccgagcgcaaattcccccgtcgccgacctcgtgcgtgcctaccaaatcaaatcggaaaacgtcatcgcacatatccgcaaagcatcgcaaggacaaacctcgctggcgaacacccatccctttatgcgtgaaatgtggggcggctactggctgtttgcccacaacggacatttgattgattttttccccgaacagggcgaatttttccaccccgtcggcacaaccgattccgaacgcgcgttctgccacatcctcaaccgcctgcgcacccgctttgccgcccgtcccgacgacgacacgctgtttgacgcgattgcggggctgacgcacgaaatccgcaagttcgggctgtttaactttatgctttcagacggcattgccctgtttgcccacgccagcacgctgctgcactacatcgtccgccaagccccgttcggcaaggcgcgcctgctcgacgacgacgtgatggtcgattttgccgaagtaaccacgccctccgaccgcgtcgccgttatcgccaccctgccactgacccgcgacgaatcatggtcccaacttgccgtggacgaactggtcatgttccgcgaaggcaacatcgtccgacacgaccgtcccgaaaaccccgtctatatgagtgccgaagaaggtctggaaatcgcccgcgccgccggcgtcgccgtctga

SEQ ID NO: 42330 - DNA, 1437 bp, Neisseria meningitidis
ttggaaaactcattaattatcggtttggcactggcggtattgctgatgcttttggttatgcgtgcgaagcagggtaagaaaacaccgaagcgcaaatcccaaggtgtcggcaatacgcaggggcagacacccggaagcaatgattcggactgggtcgatcagattggacaatcggtttcagacggcacgcaacccgactggtcttggaacgaaagtgccgagaccgcatccgccgccgtatccgcgcaagaagtcgatccgcttacggagtatcaggtttataagcaattcggttatcagggcaaggctgccgaatctttggctgcctatctggacggcattccggatggtgaagcgaaacctgaaaaccttatccgcgagctgctcgatatcaatctcgaagtgggggatgtcgatgttttggcagacaatctgcaaaaatacggcaaactgattctttccgaacttttggcaaaatatatcgaacaggcattacagcgcgattcaaaccatttgcgtatccgcgtcttggcggaagaaggtttgggatggggtactcaggagattgaaaaacgtgcggaaggcggttctgcgacggcagcttccgcatcgcccccgccggatgccggcggtaaggcttatgaagccgaagaaatcaagcgcatcccgattgtgcggggcaaaaaagacgtgtccggaatcagtcaagaggaaatcggtgcgattgccggtttggtccgtgccgatcaaggtgcgaaaatccttaaagacaaagtcagctatgaaacggcatcgaaacaatacgaccgtgccatccaaacttccgaaaaacctgcaaacctgattatcgatgcgttgaaactcgattaccaacacgcggacatagaccgttttgccggacatttgtggaaactttaccaaacgttgggcaactacggcaggcaggttaaagagcggatgctggggtgggggtacagcttgggttaccatgaagttttcgatgatttggaaaaagggccgaacgaccggcaaatcaaagacatcggtatggggcacgggtatctgccgaaaaatatacagaaattcaaatcgcaacatcgggatttggtgcttcaagattcttcgttgattaacaccggttcgtctccggcagacgatgcggttaaggaagtagagtcgttgctgatgtatggtcagattgaagcggcaatggatgtgttggagcaggcggtattgaaatatcccgacgagtcccagctttatattacgttgatcgatatttatgaacgtactgaagattgggataggttggggcagtttttaagggtattgagggaacgtgcggacaggcttcctgaagaggtcgttatgctgatgagccggctgctgcagcgtatgaatcaaaatattaaaaaaataaaacggtacggaaaataa

SEQ ID NO: 42331 - DNA, 345 bp, Neisseria meningitidis
ttgcgtactcactttgtcatttccaatgttccaagtacacctgctccgctaagaggaagaaaacttacaggaaaacttattttagaagttcctgctcaggtcaatccaattccacaatctgtattaagggcggcacaagaagaaaatgttatcattagagatacaacaggaaggatttacaataggtggtggtttagtattaggtggttgtgcaggtgcacatcttgcaagaaaagaatcattgatactaacagggaaaacaggggcaggtgcgtcagcaattgcaaatgcaagcattggatatcaatggactgtcaatttgtcaaagccaaaagaaggagctaa

SEQ ID NO: 42332 - DNA, 975 bp, Neisseria meningitidis
atgaggcggcgcgtgaatatgccgtctgaacatatggatacgaaagcaaatatggatattgaaaccttccttgcaggggaacgcgccgccggcggataccgttgcggcttcgtagcgattgtcggccgtccgaacgtgggcaaatcaacgctgatgaaccatctcatcggtcagaaaatcagtattaccagcaaaaaggcgcagacgacgcgcaaccgcgtaacggggatttataccgacgataccgcgcagttcgtgtttgtcgatacgcccggctttcaaaccgaccaccgcaacgcgctcaacgacaggctgaatcaaaatgttaccgaggcgctcggcggcgtggatgtggtggttttcgtcgtggaggcgatgcgctttaccgatgccgaccgcgtcgtgttgaaacaactgcccaagcacacgccggtcattttagtggtcaacaaaatcgacaaggacaaggcgaaagaccgttacgcgctggaggcgtttgttgcccaagtgcgcgccgaatttgaatttgcggcggcggaggcggtcagcgcgaaacacggattgcggattgccaacctgttggagctgattaagccgtatctgcccgaaagcgtgccgatgtatcccgaagatatggttacggacaaatcggcgcgttttttggcgatggaaatcgtgcgtgaaaaattgttccgctatttgggcgaggaattgccttatgcgatgaacgtcgaagtggagcagtttgaagaggaagacggtttgaaccgcatctatatcgccgttttggtcgataaggaaagccaaaaggcaattttaatcggtaaaggcggagaacgtttgaagaaaatttccaccgaagcgcggttggatatggaaaaactgtttgataccaaagtatttttgaaggtctgggtcaaagtcaaatccggttgggcggacgacatccgcttcctgcgcgagctgggtttgtag

SEQ ID NO: 42333 - DNA, 498 bp, Neisseria meningitidis
atgactgcgcttacccttccggaagacatccgccaacaagagccatccgccctgctctataccctcgtttccgcctacctcgaacacaccgcccaaaccggcgacgaatccctctcctgcctgtccgacgaccagcacacgctgaccgcattctgctacctcgacagccaagtcgaagaaggcggcttcgtgcaactcatcgcatccggttacggcgaatatattttccgcaacccgcttgccgacagcctgcgccgctggaaaatcaaagccgtgccgaaagtcttggacaaagccaaagccctctacgaacaacacggcaaaaccatcgaaacgctcgccgacggaggcgcagacatcccttccctgcgcaaacagttccccgaatttgaagaatgggacggcgcatactacgaagccgccgaacaagacctgcccctgcttgcagaacacatacagtcaaactgggaaaccttcgcccatatcgggcaggcgtga

SEQ ID NO: 42334 - DNA, 132 bp, Neisseria meningitidis
atgggacagcagcctgttttaattacagggctgttaatcgggacggttatcggggtggcatttatgggcggtatccctgtcgggccgctgattgcggccggcatcttgtcttttgtcgtcggaaagggttaa

SEQ ID NO: 42335 - DNA, 306 bp, Neisseria meningitidis; identical to SEQ ID NO: 36883

SEQ ID NO: 42336 - DNA, 510 bp, Neisseria meningitidis; identical to SEQ ID NO: 36289

SEQ ID NO: 42337 - DNA, 606 bp, Neisseria meningitidis
atgacaataatgaatatcaatacttccgaaaataaagatgctgttgccgaacacaccggacaatggttggaaaaagccgtcatcggtctgaacctgtgtccctttgccaaagccccccacgttaaaaaccttgtccgcatcgcgatcagcgaagccaaacaccttgacggttttttggaagacttggacgaagaactgcagcgactgggcaatacacccgccaccgaactggaaaccaccctgctggttcacccgaccctattccccgatttcgacgtattcaacgatatgctcgacattgccgatgccgccgttgtcgaaaacggcttagaaggcatcgtccaaatcgccccgtttcatcccgatttccaatttgaaggcacggattcagacgacattggcaactacaccaaccgttctccctatccgacgctgcacctcatccgcgaagacagcattgccaaagccgcacaagcctttcccgacgcttcggcaatattcgaacgcaatatcgccctgctggaaaaaatgggacatgaaggctgggcaaaactcggtatcacatcctgcccttatccgcacaataagaaaaatatttcaaaatga

SEQ ID NO: 42338 - DNA, 1509 bp, Neisseria meningitidis
atgaccaccacccccgcaaacgtcctcgcctccgtcgatttgggttccaacagtttccgcctccagatttgcgaaaacaacaacggacaattaaaagtcatcgattcgttcaaacagatggtgcgcttcgccgccggactggacgaacagaaaaatctgagtgccgcttcccaagaacaggctttggactgtctggcaaaattcggcgaacgcctgcgcggcttccgccctgaacaggtacgcgccgtggcaaccaacacattccgcgttgccaaaaacatcgcagatttccttcccaaagccgaagcggcattgggtttccccatcgaaatcatcgccgggcgcgaagaggcgcggctgatttataccggcgtgatccacaccctccccccgggcggcggcaaaatgctggttatcgacatcggcggcggttcgacagaatttgtcatcggctcgacgctgaatcccgacattaccgaaagcctgcccttgggctgcgtaacctacagcctgcgcttcttccaaaacaaaatcaccgccaaagacttccaatctgccatttccgccgcccgcaacgaaatccagcgtatcagcaaaaatatgaggcgcgaaggttgggatttcgccgtcggcacatcgggttcggcaaaatccatccgcgacgtgcttgccgccgaaatgccccaagaggcggacattacctacaaaggcatgcgcgccctcgccgaacgcatcatcgaagccggttcggtcaaaaaagccaaatttgaaaacctgaaaccggaacgcatcgaagtttttgccggcggacttgccgtgatgatggcggcgtttgaggaaatgaaactcgacaggatgaccgtaaccgaagccgccctgcgcgacggcgtgttttacgatttgatcgggcgcggtttaaacgaagatatgcgcggacaaacggttgccgagttccaacaccgctaccacgtcagcctcaatcaggcgaaacgcaccgccgagaccgcgcaaacctttatggacagcctctgccacgctaaaaacgttacagttcaagagcttgccttgtggcaacagtatctcggacgcgccgccgcgctgcacgaaatcggtttggacatcgcccacaccggctatcacaagcattccgcctacatcctcgaaaacgccgatatgccgggtttctcacgcaaagaacagaccatacttgcccaactggtcatcggtcatcgcggcgatatgaaaaaaatgagcggcatcatcggcaccaacgaaatgttgtggtatgccgttttgtccctgcgccttgccgcactgttctgccgttcgcgccaagacctgtctttcccgaaaaatatgcagttgcgcacggatacggaaagctgcggcttcatcctgcgtattgacagggaatggctggaacgccatcccctgattgccgacgcattggaatatgaaagcgtccaatggcaaaaaatcaatatgccgttcaaagtcgaggccgtctga

SEQ ID NO: 42339 - DNA, 936 bp, Neisseria meningitidis
atgagtgtattgattattgtcgaacacgacaacaaacagttgaatcctaccactttgcatgctgttaccgctgccgccaaactgggcaaagtcgatttattggttgccggaaacggcgcatctgctgtagtggaattcgcgaagcaagtagcgggggtgaaaaaagttttggttgcagatgctgctcattatgccgaaggtttggctgaagagttggctccgctggttgttaaattggcggccgattaccgctatgttgcagcaacggcaaccacattcggtaaaaaccttttgccccgcgtagcagccttattagacgtaccgcaaatttctgatttgaccgaaattgtggataacacgacttttgtgcgccccatttatgcgggtaatgcatttgaaaccgtgcaagctgattcagaaaaattggtgctgaccttccgtgcgacggtttttgacgcagtggcggcgcaaggtggtaatgctgaggtaattaatgttgaagcaacccctgcccaaaacctgagtcgttttgttaaccgtcagctttcccattccgatcgtcctgaactgactcaggcaaaagtgattgtttccggtggtcgtgcgttgggtagtgcggaaaaattcaatgaagtgctgacaccgttggcggatgttttaggtgcggcaatcggtgcatcccgtgcagcagttgatgccgaatatgcgccaaacgatgctcaagtcggacaaaccggtaaagtggttgcgccgcaactctattttgcaatcggtatttcaggtgcaattcaacacgttgccggtatgcaagacagtaaggtgattgttgcaatcaataaagatgctgatgcgccgattttcaatgtagccgattacggattggttggcgatttatttgaaatcgttccacaattaacagaagtattgaaaaattga

SEQ ID NO: 42340 - DNA, 795 bp, Neisseria meningitidis
atgaccttacctatgcaggaaacccgtttttccatactgctagacgaattggcggcaaaacaggaggcagccatcgccccccacctgcttgccgacggaaccaaggtatggatacgcaaagcaggcaggcacaatgcacgatggcgttacgcgctgctcggtatggttgcccgatatttgaaactgggggtgttgaagccggttcccagcctcggcggcgagcctgccattgcaaccgaatcaaaacgcctgtacgaattgcgctcggcggggatagccgttcccgaattgctcgccgtcaggaaaaatgcccttatgttcggcaatttggaaggcatcccgctcgatgcgcaaatccgccaagaagccgaggctggaaagtcggacgcttggcttgccggtttggaagccattgcacgcgtgcataaaaaacagcagttcctcagtcaggcgtttgcacgaaatatgatgtgggacggaaaaaacatcagctttttggattttgaagacgatccttccgaagtcctgaccatagcgcaatgccaagcccgcgattggctctgctacattcattctaccgcgctaatattgaaaaacggcggactgctggaagctgctgcggaaaaatggggcggcgtattgtcggatcagcctgccgaaatacaaaagctgattgccgccaccgtcaaaccgatcctcccgatacgcaggctggaacacccccgctggggacgggacgcgctcaggctggcagcctcgatttccctgatttcccttgccgatatgccgccataa

SEQ ID NO: 42341 - DNA, 1500 bp, Neisseria meningitidis
gtgttcaaaaaataccaatacctcgctttggcagcactgtgtgccgcctcgctggcaggctgcgacaaggcaggcagctttttcggtgcggacaaaaaagaagcatccttcgtagaacgcatcgaacacaccaaagacgacggcagcgtcagtatgctgctgcccgactttgcccaactggttcaaagtgaaggtccggcagtcgtcaatattcaggcagcccccgccccgcgcacccaaaacggcagcggcaatgccgaaaacgattccgacccgattgccgacaacgacccgttctacgaatttttcaaacgcctcgtcccgaatatgcccgaaatcccccaagaagaagcagatgacggcggattgaacttcggttcgggcttcatcatcagcaaagacggctacatcctgaccaatacccacgtcgttaccggcatgggcagtatcaaagtcctgctcaacgacaagcgcgaatataccgccaaactcatcggttcggatgtccaatccgatgtcgcccttctgaaaatcgacgcaacggaagagctgcccgtcgtcaaaatcggcaatcccaaagatttgaaaccgggcgaatgggtcgccgccatcggcgcgcccttcggcttcgacaacagcgtgaccgccggcatcgtgtccgccaaaggcagaagcctgcccaacgaaagctacacacccttcatccaaaccgacgttgccatcaatccgggcaactccggcggcccgctgttcaacttaaaaggacaggtcgtcggcatcaactcgcaaatatacagccgcagcggcggattcatgggcatttccttcgccatcccgattgacgttgccatgaatgtcgccgaacagctgaaaaacaccggcaaagtccaacgcggacaactgggcgtgattattcaagaagtatcctacggtttggcacaatcgttcggtttggacaaagccggcggcgcactgattgccaaaatcctgcccggcagccccgcagaacgtgccggcctgcaggcgggcgacatcgtcctcagcctcgacggcggagaaatacgttcttccggcgaccttcccgttatggtcggcgccattacgccgggaaaagaagtcagcctcggcgtatggcgcaaaggcgaagaaatcacaatcaaagtcaagctgggcaacgccgccgagcatatcggcgcatcatccaaaacagatgaagccccctacaccgaacagcaatccggtacgttctcggtcgaatccgcaggcattacccttcagacacataccgacagcagcggcggacacctcgtcgtcgtacgggtttccgacgcggcagaacgcgcaggcttgaggcgcggcgacgaaattcttgccgtcgggcaagtccccgtcaatgacgaagccggtttccgcaaagctatggacaaggcaggcaaaaacgtccccctgctgatcatgcgccgtggcaacacgctgtttatcgcattaaacctgcaataa

SEQ ID NO: 42342 - DNA, 1809 bp, Neisseria meningitidis
atgcgtaccaactattgcggcctgatcagtgagcaatacttagaccaaaccgttaccgtcaaaggctgggtacaccgtcgacgcgaccacggcggtgtgatttttatcgacctgcgcgaccgcgaaggcatcgtccaagtcgtgatcgatcccgacacgcccgaagcgtttgccgctgccgattcctcccgcaacgaatacgttttgagcattaccggccgcgtacgcaaccgtcccgaaggcacgaccaacgataaaatgatttccggcaaaatcgaaatccttgccaaagaaatcgaagtcttgaacgccgccgccacgccgccgttccaaatcgacgatgaaaacatcagcgaaaacgttcgcctgaccaaccgcgttatcgacttgcgccgtccggtgatgcaacgcaacctgcgcctgcgttaccaagttgctatgggcgttcgccgctacttggacgcgcaaggtttcatcgacattgaaaccccgatgctgacccgctccacgcctgaaggcgcgcgcgactacctcgtgccgagccgcgttcatccgggcgagtttttcgcgctaccgcaatcgccgcaattattcaaacaactgttgatggtggcgggtttcgaccgttactaccaaatcaccaagtgcttccgcgacgaagacctgcgtgccgaccgccagcccgaatttacccaaatcgacttggaaacctcgttcttaaacgaggatgaaatcatggacatcactgaaggcatggccaaacaagtcttcaaagatgctttaaatgtagatttgggcgacttcccacgcatgccttactctgaagccatgttctactacggctctgacaaaccggatatgcgcatcaacttgaaatttaccgagttgaccgacctgatgaaaacggaagaattcaaagtcttccgtggcgcagccgacatgaaaggcggccgcgtggtcgctctgcgcgtgccgaacggcgcagaattcagccgcaaagaaatcgacgaatacaccaaatttgtcggcatctacggcgcgaaaggtctggcatacatcaaagtaaacgatgtcagcaacctttccaacggcgaagacagcggcctgcaatctccaatcgtgaaatacctgtccgaaaacgccctgaaagaaattatcgcgcgtaccggcgcgcaaaacggcgacatcatcttcttcggcgcagacaaagccaaagtcgtgaacgaagccatcggcgcactgcgtatcaaagtcggcttggagcacggcaaagacaacggctatttcacagacgaatggaaacctttgtgggtcgttgatttcccaatgttcgaatacgacgaagaagccgaccgctacgttgccgtacaccatccgtttaccgcgccaaaagaaggtcatgaagacctgatggtttccgacccggcaaattgtttggcacgcgcctacgatatggtattgaacggctgggaaatcggcggcggctctatccgtattcaccgcgcagacgtacaagagaaagtgtttgccgcgctgaaaatcagccctgaagagcaacaagagaaattcggcttcctcttggacaacctgaaattcggcgcacctcctcacggcggtcttgcattcggcctcgaccgtctggtaacgctgatgaccggtgccgaatccatccgcgacgtgattgccttcccgaaaacacaacgcgcccaatgcctgctgaccaacgcgcccaacagcgtggacgacaagcagttgcgtgaattaagtttgcgtttgcgccagaaggcaaccgaaactaaagaagtataa

SEQ ID NO: 42343 - DNA, 1104 bp, Neisseria meningitidis
atgaatacgacagcaaacccttccaatatcatcgtcgggctctccggcggtgtcgattcttccgtaaccgccgccctgctcaagcagcagggttatcaagtgcgcggtgtgttcatgcagaactgggaagacgacgacaacgacgaatattgcagcatcaaacaggattcgtttgatgccatcgccgttgccgatattgtcggcatcgacatcgacatcgttaatttcgccgcgcaatataaagacaaagtctttgcttattttcttcaggaatacagtgcggggcgcacgccgaatcccgatgtgttgtgcaacgccgaaatcaaattcaaatgctttttggattacgccgtagggcagggcgcggataccatcgccaccggacactatgcgcgcaaagaagtccgcaacggcgtgcattacctgctcaaaggtttggatcgaaacaaagaccaaagctatttcctctaccgcctcaagcctttccaactcgagcgcgcgatttttccgttgggcggtttggaaaaacccgaagtgcgccgccttgccgccgagttcaaactgccgaccgccgccaaaaaagacagcacgggcatctgcttcatcggcgaacgcccgtttcgcgagttcctgcagaaatacctgccgaccgacaacggtaaaatggttacgcccgaagggaaaaccgtcggcgaacacgtcgggctgatgttctacacgctcggacagcgcaaaggtttgggcattggcggcgcgggcgaaccgtggtttgttgcggctaaagatttgacgaaaaacgaactgattgtcgtgcaaggacacgaccatccgctgctctatacccgcagccttgtgatgaacgatttgagtttcacgctgcccgaacgcccgaaggcaggacgctatacctgcaaaacgcgttaccgtatggcggacgcgccttgtgagttgcgctatttggatgatgaaaccgccgagctggtgtttgacgaaccgcaatgggcggttacgccgggtcagtccgccgtgctgtacgacggcgatatctgtttgggcggcggtatcatccaaacgaccgacaaacccgtcatcatcacacgataa

SEQ ID NO: 42344 - DNA, 1383 bp, Neisseria meningitidis
atggcaaatattgcccgcgacatcttcaaagcctacgacatccgaggcattgtcggcaaaaccctgactgacgatgccgcctatctcatcggcagggccatcgccgccaaagccgccgaaaaaggcatgacccgcatcgcgctcggacgcgacggacgcttgagcggtcccgaactgatggagcacatccaacgcggctttaccgacagcggcatcgacgtcctcaacgtcggtatggtcgccacgcccatgctctattttgccgctatcaacgaatgcggcggcagcggcgtgatgattaccggcagccacaatccgcccgattacaatggtttcaaaatgatgctcggcggcgacacgctcgcaggcgaagccattcaagaacttttagccattattgaaaaagacggttttgttgccgccgacaaacaaggcaacgtaaccgaaaaagacatctccggcgaataccacaaccacatcgtcggccacatcaaactcaaacgccccatgaaaatcgccatcgacgcaggcaacggcgtaggcggcgcattcgcaggcaaactctacaaaggcttgggcaatgaagttaccgaacttttctgcgaagtggacggcaacttccctaatcaccaccccgacccttccaaaccgaaaaacctgcaagacctcatcgtcgagctcaaaaacggcgaggccgaaatcggcttagcatttgacggcgatgccgaccgcttgggcgtggttaccaaagacggcaacatcatctatccggaccgccaactgatgcttttcgcgcaagacgtgttgagccgcaatcctaaagccaaagtgattttcgacgtcaaatccacccgtctgcttgcgccttggattaaagaacacggcggcgaacctgtgatggaaaaaaccggccacagctttatcaaatccgccatgaaaaaaaccggcgcgccggttgccggcgaaatgagcggacacatcttcttcaaagaacgctggttcggcttcgacgacggtctgtacgccggcgcacgcctcttggaaatcctgtctgcctccgataatccgtccgaagtgttaaacaacctgccgcaaagcatttccacgcccgaactcaacatcgccctgcccgaaggcagcaacggccatcaggttatcgacgaactcgccgccaaagccgaatttgaaggcgcaaccgaaatcatcaccatcgacggtctgcgcgttgaatttcccgacggcttcggtctgatgcgtgcttccaataccacgccgattctggtgttgcgttttgaggcggatacgcaagaagccatcgagcggattcaaaaccaattcaaagccgtcatcgaaagcaatccgaatctaatctggcctctgtaa

SEQ ID NO: 42345 - DNA, 3204 bp, Neisseria meningitidis
atggctaaattttttatcgaccgccccatttttgcgtgggttatttcgattttcattattgcggcgggtattttcggcatcaaaagcctgccggtttcgcaatatccgtccgtcgccgccccgaccatcaccctgagggccacttatccgggcgcgtccgcgcaggtaatggaagacagcgtgctttccgtgatcgagcggaatatgaacggcgtggaaggtttggattatatgtccacttccgccgattcgagcggcagcggcagcgtgagcctgacctttacgcccgataccgacgagaatctggcgcaggtggaagtgcagaacaagctttccgaagtattgagcacgctgccggcaactgtccagcaatacggcgtaaccgtatccaaggcgcgttccaatttcctgatgattgtgatgctttcgtcggatgtgcagtcaaccgaagagatgaacgactacgcgcagcgtaatatcgttcccgagttgcagcgtatcgaaggcgtggggcaggtacgcctgttcggcgcgcaacgcgcgatgcggatttgggttgatcctaagaaactgcaaaactacaatttgtcgtttgccgatgttggcagcgcgctgtccgcccagaacgtccagatttcagcgggttctatcggttcgcttcccgccgttcgcggacagacggttacggctaccgtaacggcgcaagggcagttgggtacggcagaagaattcggcaacgtcatcctccgcgccaataccgacggttctaatgtttacctgaaggatgtggcaagggtcggactgggtatggaagactattcttcctcaacccgtctgaacggtgtaaataccaccggtatggcggtgatgctgtccaacagcggcaatgcgatggcgacggcaaaggcggttaaagaacgcatggcgacgttggaaaaatactttcctcagggtatgagctggaaaaccccttacgatacttccaaattcgtcgaaatttcgattgaaaaagtgattcacactttaatcgaagcgatggtgctggtgtttgtcgtaatgtatctcttcctgcaaaacatccgttatacgctgattccgaccatcgtcgtaccgatttcgctgttgggcggtttcgccttcatctcttatatgggcatgtcgattaacgtactgaccatgtttgcgatggttttggtcatcggcatcgtggtcgatgacgcgattgtggtggttgaaaacgtcgagcgcattatggcgggtgaaggcttgccgcccaaagaagcgaccaaaaaagcgatgggtcagatttcgggcgcggtcatcggtattaccgccgttctgatttccgtgttcgtaccgttggcgatgttcagcggggcgacgggcaatatttacaaacagtttgccctgacgatggcgtcatcaatcgcattctccgccttccttgcgctgacccttacccctgctttgtgtgccacaatgttgaagacaatcccgaaagggcatcacgaagagaaaaaaggtttcttcggctggtttaacaagaaattcaacagttggacgcacggttacgaaggccgggttgccaaagtgctgcgtaagactttccgcatgatggttgtctatatcggcttggcggttgtgggcgtgttcctgtttatgcgcctgccgacttcattcctgccgaccgaagaccaaggcttcgtcatggtcagcgtgcaactgcctgcaggagcgacccaagagcgcaccaatgcgactttggcgcaagttacccaactggcgaaaagcattcctgaaatagaaaacatcattaccgtttccggcttcagcttttcgggcagcggtcagaatatggcgatgggttttgccatattgaaagattggaacgagcgtaccgcgcccggcagcgatgccgttgcgattgccggcaagctgacgggtatgatgatggggacgcttaaagacggttttggcatcgccgtcgtcccgcctccgattctggagttgggcaacggttcgggtctgagcatcaacctgcaagaccgcaacaataccggccataccgcattgctggcgaagcgcaacgagttgattcagaaaatgcgtgccagcggtttgtttgaccccagcaccgtccgtgctggcggtttggaagactcgccgcagttgaaaatcgacatcaaccgtgccgcggcggcggcgcaaggcatttcgtttgccgacatccgcaccgcattggcaagcgcgctgagttcgtcttatgtcagcgacttcccgaaccaaggccgtctgcaacgcgtgatggtgcaggccgacgaggatgcccgtatgcagcctgccgatattttgaacctgaccgtgccgaacaaatccggcgtcgccgtaccgctttccaccattgctactgtttcttgggaaaacggtacggaacagagcgtacgcttcaacggttatccttcgatgaagctgtccgcttcgcctgcaaccggcgtttccaccgggcaggctatggcggcggttcaaaaaatggttgacgaattgggcggcggttacagcctggagtggggcggacagtcgcgcgaagaggcaaaaggcggctcgcaaaccctgattttgtacggtttggcggttgcagccgtatttttggtacttgccgcgctttatgaaagctggtcgattccgctggcggtcatccttgtgattccgttgggtttgatcggtgcggctgcgggcgtaaccgggcgcaacctgtttgaaggactgttgggcagcgttccctcgttcgccaacgacatctactttcaagtcggtttcgttaccgtgatgggtttgagtgcgaaaaatgcgattttgattatcgaatttgccaaagaccttcaagcgcaagggaaaagcgcggttgaagccgctttggaagccgcccgcctgcgtttccgtccgattatcatgacctcgttcgcctttattttgggcgtggttcccctgtatattgccggcggtgcaagttctgccagccagcgcgccatcggtacaaccgtattctgggggatgctcatcggcacgctcttgtccgtgttccttgttccgcttttctatgtggtggtgcgcaaattcttcaaagaaaccgcgcacgaacacgaaatggcagtaaaacacgccgccgaagcgggcatcaccggttcggacgacagccaacattaa

SEQ ID NO: 42346 - DNA, 687 bp, Neisseria meningitidis
atggaaacctttaaagacagactggtttttttatggaaaagcgaagcgaggcaggcaaaaatcgcatccgatattgaaatgacgattgcgggcttcagcaggatatggaatgaaggcggtctgccaaagtctgaaacattgaaaaaaatcaagcagttgaaggggtgtagtatcgattggctgctgaccggggagggtaatccgtttccggatgaagccccaaaaaaatcccttgcttacgatactttgggcaatgaagtcgatacggacgagtttgtcttcgtgccgagatatgatattcgggcggctgcgggatacgggcagtttgtcgatcatgaggaaccggtatttacaatggcgttcagacggcattggattgagaattatgttacccgcgatacgaaaaacctgtctgtaatttccgtcaagggggattcgatggagggggttttgaatgacggcgattcgattttggtcaatcatggtgaaaatacgccgagggacggtctgtatgtgttgcggattaatgaaaatctgctggttaaacgtttacagattgtaccgggcgggattatcaatgtgatttctgcaaacgaggcttatcctgcttttgaaatcaatttgaacgatttgaccgatgatgtggagattatcgggcgtgtcgagtggttcggcaggacgatttga

SEQ ID NO: 42347 - DNA, 171 bp, Neisseria meningitidis
ttgggtctaggctcaacctgcgtttgctgcatctttggaagaaatagtggattcgaaaaaataggaagaattctgattaatggtatgcgaggtgtagcagtggggactgttgctggtggcataaatggttatgcaggttctacgggtaagaacactgacattcgccgttaa

SEQ ID NO: 42348 - DNA, 276 bp, Neisseria meningitidis
atgaatgagggtgaagttgttttaacaccagaacaaatccaaaccttgtatggttatgcttcccgtggcgatacctatggcggttggcgttatttggctaatttgggtgaccgttatgcggataatgctgccgcaattgtcggtaaggatgcaaacttaaatggtttgaatttatggatgaaaaaaggggtggaaaacctatgggatgatacggtcggtaaaaagatccgtttaatgtgtatttccgttttttggattgtggttttcaatttgtag

SEQ ID NO: 42349 - DNA, 1854 bp, Neisseria meningitidis
atgaaccgttatcctttatggaaatatctgctgattgtgttcacgattgcggttgccgcagtgtattcgctgcccaacctattcggcgaaacacccgccgtgcaggtatcgaccaaccgacaagccatcatcatcaacgaacagactcaattcaaagtggatgccgcgctgaaaaacgcaggtattcagaccgacgggatgtttgttgtggacaattcactgaaagtgcgtttcaaagacacagaaacgcagcttaaagcgcgcgacgtcatcgaaaacactttgggcgaagggtatattaccgcgctcaacctgttggcggacagccccgaatggatggcgaaaatcaaagccaatccgatgtttttgggtttggacctgcgcggcggcgtgcatttcaccatgcaggtcgatatgaaagcggcgatgcagaaaacgtttgaacgttattcgggcgacatccgccgcgaactgcgccgcgaaaaaatccgcagcggcacggtgcgtcaggctggaaacagcctgaccgtccctttgcaggatgcaggtgatgtgcaaaaggctctgccgcagttgcgcaagctgtttcctgaagcaacgctgaattcagacggcagcaatatcgtcttgacgctttcggaagaggcggtcaataaagtgcgttccgatgcggtcaaacagaacatcactaccctgcacaaccgtgtgaacgagttgggcgtggccgagcccgtcatccagcagtccggtgcagaccgtatcgtcgtgcagcttccgggcgttcaggatactgccaaggcaaaagacatcatcggccgtaccgcgactttggaattgcgtatggtggaggacgatcctgccaagttgcgcgaggcattggaaggcaacgtgccgagcggttatgagctgctttcaagcggcggagatcgtcccgaaattctgctgatcagcaaacaggtcgagctgacgggcgacaacatcaacgatgcgcaaccgagtttcgaccaaatgggcgcacctgccgtcagtctgagcttggacagcgcgggcggcagcattttcggcgaactgactgccgcaaatgtcggcaaacgcatggcgatggttttgatcgaccaaggaaaatccgaggttgtaaccgcgccggttatccgtactgccattaccggcggacgcgtggaaatttccggaagcatgacgacagccgaagccaatgatacgtctttgctgttgcgtgccggttctcttgccgcaccgatgcagattgtcgaagaacgtaccatcggtccgtctttgggtaaggagaacatcgaaaaaggcttccattcgactttatggggttttgccatcgttgctgcattcatggtggtttactatcgtctgatgggtttcttttctaccattgcattgagtgccaacatactgttcctaatcggtattttgtctgccatgcaggcaacgttgacgttaccgggtatggccgcgctggcgttgactttgggtatggcaatcgactccaacgtcttgattaacgaacgtatccgcgaagaattgcgtgccggcgtgccgccgcagcaggcaatcaatctcggtttccaacacgcatgggcgaccattgtcgattcgaacctgacttcgctgattgccggtatcgcgcttttggtattcggttccggcccggtacgcggttttgcggtcgtacactgtttgggtattctgacttcgatgtattcatccgtcgtcgtattccgtgcgttggtcaatctgtggtacggacgcagacgcaaattgcagaatatttccattggttcggtgtggaagccgaaagccgaaatggcaggaggcaaggagtaa

SEQ ID NO: 42350 - DNA, 183 bp, Neisseria meningitidis
atggaaagtttggtgcaaagacgaatttgttataaagcggttggcagtttctcaagcgggcgcgatgttttaaaatatagtggattaactttaaatcaggacaaggcgacgaagccgcagacagtacaaatagtacggcaaggcgaggcaacgccgtactggtttaaatttaatccactataa

SEQ ID NO: 42351 - DNA, 966 bp, Neisseria meningitidis
atgagctacacgcaactgacccaaggcgaacgataccacatccaatacctgtcccgccactgcaccgtcaccgaaatcgccaaacagctgaaccgccacaaaagcaccatcagccgcgaaatcagacggcaccgcacccaagggcagcaatacagcgccgaaaaagcccagcggcaaagccagactatcaaacagcgtaagcgacaaccctataagctcgattcgcagctgattcagcacatcgacccccttatccgccgcaaactcagtcccgaacaagtatgcgcctacctgcgcaaacaccaccagatcacgctccaccacagcaccatttaccgctaccttcgccaagacaaaagcaacggcagcacgttgtggcaacatctcagaatatgcagcaaaccctaccgcaaacgctacggcagcacatggaccagaggcaaagtacccaaccgtgtcggcatagaaaaccgacccgctatcgtcgaccagaaatcccgtatcggcgattgggaagccgacaccattgtcggcaaaggacagaaaagcgcattattgaccttggtcgaacgcgttacccgctacaccatcatctgcaaattggatagcctcaaagccgaagacactgcccgggcagctgttagggcattaaaggcacataaagacagggtgcacaccattaccatggataacggcaaagagttctaccaacacaccaaaataaccaaagcattgaaagcggagacttatttttgtcgtccttaccattcttgggagaaagggctgaatgagaacaccaacggactcatccggcaatacttccccaaacaaaccgatttccgtaacatcagtgatcgggagatacgcagggttcaagatgagttgaaccaccgaccaagaaaaacacttggctacgaaacgccaagtgttttattcttgaatctgttccaaccactaatacactag

SEQ ID NO: 42352 - DNA, 360 bp, Neisseria meningitidis; identical to SEQ ID NO: 36598

SEQ ID NO: 42353 - DNA, 717 bp, Neisseria meningitidis
atgttgttccgtaaaacgaccgccgccgttttggcggcaaccttgatgctgaacggctgtacgttgatgttgtggggaatgaacaacccggtcagcgaaacaatcacccgcaaacacgttgacaaagaccaaatccgcgccttcggtgtggttgccgaagacaatgcccaattggaaaagggcagcctggtgatgatgggcggaaaatactggttcgtcgtcaatcccgaagattcggcgaagctgacgggcattttgaaggcagggctggacaaacccttccaaatagttgaggataccccgagctatgctcgccaccaagtcctgccggtcaaactcgaatcgcctggcagccagaatttcagtaccgaaggcctttgcctgcgctacgataccgacaagcctgccgacatcgccaagctgaaacagctcgggtttgaagcggtcaaactcgacaatcggaccatttacacgcgctgcgtatccgccaaaggcaaatactacgccacaccgcaaaaactgaacgccgattaccattttgagcaaagtgtgcctgccgatatttattacacggttactgaagaacataccgacaaatccaagctgtttgcaaatatcttatatacgcccccctttttgatactggatgcggcgggcgcggtactggccttgcctgcggcggctctgggtgcggtcgtggatgccgcccgcaaatga

SEQ ID NO: 42354 - DNA, 648 bp, Neisseria meningitidis
atgaaagcattacttttaggcgcgccgggcgcgggcaaaggcactcaggcgcaattcatcaccgcagcgttcggcattccgcaaatctctaccggcgacatgctccgtgccgcgattaaggcaggcacgcccttgggtttggaagcgaaaaaaatcattgacgaaggcggcttggtgcgcgacgacatcattatcggcatggtcaaagaacgcatcgcgcaagacgactgcaaaaacggtttcttgtttgacggtttcccgcgcacattggcacaagccgaagcgatggttgaagcaggcgtggatttggatgcagtcgttgaaatcgatgtgcctgacagcgtgattgtcgaccgcatgagcggccgccgcgtgcatttggcttccggccgtacttaccacgttacctacaacccgcccaaagttgaaggcaaagacgacgtaaccggcgaagatttgattcagcgcgacgacgacaaagaagaaaccgtgaaaaaacgccttgccgtttaccacgagcaaaccgaagttttggtcgatttttacagcaaactggaaggcgaacacgcgcctaaatacatcaaagttgacggcacccaagcagtagaagccgtgaaagccgaagtattgggcgcattgggcaaataa

SEQ ID NO: 42355 - DNA, 729 bp, Neisseria meningitidis
gtgaatgaaaagacagatcaaaaagcagtaagtgcgcaacaggctaaagaacaaaccagtttcaacaatcccgagccaatgacaggatttgaacatacggttacatttgattttcagggcaccaaaatggttatcccctatggctatcttgcacggtatacgcaagacaatgccacaaaatggctttccgacacgccagggcaggatgcttactccattaatttgatagagattagcgtctattacaaaaaaaccgaccaaggctgggttcttgagccatacaaccagcaaaacaaagcgcactttatccaatttctacgcgacggtttggatagcgtggacgatattgttatccgaaaagatgcgtgtagtttaagcacgactatgggagaaagattgcttacttacggggttaaaaaaatgccatctgcctatcctgaatacgaggcttatgaagataaaagacatattcctgaaaatccatattttcatgaattttactatattaaaaaaggagaaaatccggcgattattactcatcggaactatcataggtatggagagaacgattacagcactagcgtaggttcctgtattaacggtttcacggtacggtattacccgtttattcgggaaaagcagcagctcacacagcaggagttggtaggttatcaccaacaagtagagcaattggtacagagttttgtaaacaatccaagtaaaaaataa

SEQ ID NO: 42356 - DNA, 2397 bp, Neisseria meningitidis
atgattaaaaagattttaacgacttgttttggtttggtttttgggttttgtgtatttggagtgggtttggttgccattgctattttggtaacgtatccgaaactgccgtctttggattctttgcagcattaccagcctaaaatgccgttgactatttattcggcggatggggaagtcatcggtatgtatggggagcagcggcgcgaatttacaaaaatcggcgatttcccagaggtgttgcggaatgcggttatcgccgccgaggataaacgcttttaccggcattggggggtggatgtttggggtgttgcccgcgctgccgtcggcaatgtcgtgtccggcagcgtgcagtcgggtgcgagtacgattacgcagcaggtggcgaaaaatttttatttgagcagtgaaaaaacgttcacacgcaaattcaatgaggtgttgcttgcctataaaatcgagcagtctttaagcaaagacaaaatcctcgagttgtatttcaatcagatttacctcggtcagcgcgcctatggttttgcatctgccgcgcaaatctatttcaataagaatgtccgagatttgactttggcggaagccgccatgcttgcgggactgcccaaggctccgtctgcctataatccgattgttaatccagaacgtgccaagttgcgccagaagtatattttgaacaatatgctcgaggagaagatgattaccgtgcaacagcgcgatcaggcgttgaatgaggaactgcattacgagcggtttgttcggaaaatcgatcagagtgcgttatatgtggcggaaatggtgcgtcaggaactgtatgagaaatacggtgaagatgcctatacgcagggttttaaggtttataccacggtccgcgccgatcatcagaaggtggcaaccgaggcattgcgcaaggctctacggaatttcgatcgcggcagcagctaccgcggtgcggaaaactatatcgatttgagtaagagtgaagatgtcgaggagactgtcagccagtatctgtcgggactctataccgtcgataaaatggttcccgccgttgtgttggatgtgactaaaaagaaaaatgtcgtcatacagctgcccggcggcaggcgggttacgcttgacaggcgcgccttgggttttgcggcccgcgcggtcaataatgaaaaaatgggggaggaccgtatccgcaggggcgcggtcatccgtgtcaaaaacaacggcgggcgttgggcggtggttcaagagccgttgctgcagggggctttggtttcgctggatgcaaaaaccggagctgtgcgcgcgctggtcggcggttatgattttcacagcaaaacattcaatcgtgccgttcaggcaatgcggcagccgggttcgacctttaagccgtttgtctattcggcggcattatctaaggggatgaccgcgtccacagtggttaacgatgcgccgatttccctgccggggaaagggccgaacggttcggtttggacacctaaaaattcagacggcagatattccggctacattactttgagacaggctctgacggcttccaagaatatggtttccatccgtattttgatgtctatcggtgtcggttacgcgcaacagtatatccggcgtttcggcttcaggtcgtccgagctgccggcaagcctgtctatggctttaggtacgggcgagacaacgccgttgaaagtggcggaggcatatagcgtatttgcgaacggcggatatagggtttcttcgcacgtaatcgataagatttatgacagagacggcaggttgcgcgcccaaatgcaacctttggtggctgggcaaaatgcgcctcaggcaatcgatccgcgcaatgcctatattatgtataagattatgcaggatgtggtccgtgttggtacggcaaggggggcagctgcgttgggaagaacggatattgccggtaaaacgggtacgaccaatgacaataaggatgcgtggtttgtcggttttaaccctgatgtggttactgccgtatatatcggcttcgacaaacctaagagtatggggcgtgtcggctacggcggtacgattgcggtgccggtttgggtggactatatgcgttttgcgttgaaaggaaagcagggcaaggggatgaaaatgcctgaaggtgtggtcagcagcaatggcgaatactatatgaaggaacgtatggtaaccgatccgggcttgacgctggacaacagcggtattgcgccgcaaccttcccgacgggcaaaagaagatgacgggggcgcggcagaaggcggacggcaggcggcggatgacgaagtccgccaagatatgcaggaaacgccggtgcttccgagtaatactggttccaaacagcagcagttggattctctgttttaa

SEQ ID NO: 42357 - DNA, 246 bp, Neisseria meningitidis; identical to SEQ ID NO: 39751

SEQ ID NO: 42358 - DNA, 594 bp, Neisseria meningitidis
atggccgacggtatgggcaatctgattggctgggaaaaaacggggcttgttgtcggtaagcagtggataaccgcaaaagacgacaaggtgtccgatgtctgcaatgccaacggcgagatgggcgtaatcgggctttacgagcctttctcacacggcgcattgacgatacccggtcatccgaactgccgatgcgaggttgtttccgtatcgggtggcgaattgggggaatttgccgaaaaaaaggagcttcgtaaagcggctatgcagtatgcgcgggataactttatcggcaaaagctatgtcaataaaaacagcgggcatgaactgaaggtaacttggcaaggtgtgaaacacgctgcgtcaaaggcaaatcaggcggaattatccatcatgacaaaacttgatgacttattgcgctacgcaaaatatgagggttcttattcggataggaaaggtcatcctaatattattgcagcacataagtatcgtgccgttgccaaggttgggaatgagtctttaaatatcggtgtgattgtaagggaatttccagacgaccataaacattacgaccatttcatcttgaaggatgaataa

SEQ ID NO: 42359 - DNA, 201 bp, Neisseria meningitidis; identical to SEQ ID NO: 38240

SEQ ID NO: 42360 - DNA, 582 bp, Neisseria meningitidis
atgaacctgcgcgatgatttgcaactgatttacgaccggatacccgaaggcagccgcgtcttggacttgggctgcggcgacggcgaactgcttgccgcattggtcgaacacaaaaaatgcagcggctacggcatcgaaatcgacacaaatagcgtcatcgccgcgatgtcgcgcggcgtaaatgttatccaagccgatttggaagaaggtttaaccgcattcaacgatcaaagttttgatgtgattgtgttgagccaaaccatccaagcgatgcagaataccgaaaaaatcctgcgctgcctgatgcgcgttgccaaacaggcgattgtcagcttcccgaatttcggctactggcgcaaccgcgtccaaatcgcactcggcggacatatgccggtttccgaacgtatgccctaccattggtacgacacgcccaatatccattggtgcacgctcaaagactttgatttattgtgcgccaaaaacaacatccgcatcctcgagcgcgccgtgatgacgggcaacagacaggtcaaacatttccccaaccttttgggcagcctggcgttttaccgcgtcgggtaa

SEQ ID NO: 42361 - DNA, 411 bp, Neisseria meningitidis
atgacaacttataccattccaagaaaagattatcaatttctgtatataattgaagggtctctattaagctatactttgaaaaatgatgagttccatatcatcgtccagaatgtggattatccggactttcctcaagagattcctacaccaaattatatagactgggtaaaaattaaattcaagcagttcagctatctgaaatttatctatggatacgctacaaagagccaagataaagatatcgataatatattggagcttggcgaattaaagcaggatgatgaaatcttggattatggaggtacgctggaattgataggcggtagatgtgatcttctaactggttttagtatagatatagtttgccgggaaatagagttagaatttttagatcaggagagtttcaattaa

SEQ ID NO: 42362 - DNA, 1434 bp, Neisseria meningitidis
atgtctcaatatgatgtagtagtgattggtgcaggcccgggtggatacgttgccgccatccgtgccgcgcaactgggtttcaaaaccgcttgcgtcgatgcaggcgttaacaaagcaggcaatgcccctgcattgggcggtacttgcttgaacgtaggctgtatcccttctaaagccctgttgcaatccagcgaacatttccacgctgcgcaacacgagtttgccgaacacggtatcactgtcggcgacgtaaaattcgacgcggccaaaatgattgagcgcaaagatgccatcgtgaccaagctgaccggcggcgtcaaattcctgttccaaaaaaataaagtaaccagcctgttcggtacggcttcctttgccggtaaaaatggcgatgcttaccaaatcgaagtcgataacaaaggcgagaaaaccgttatcgaagccaaacacgtcatcgtagccaccggttccgtaccgcgtccgctgccacaagtcgctatcgacaatgtgaacgtattggacaacgaaggtgcattgaacctgaccgaagtacctgccaaactcggcgtgatcggttccggcgtgattggtttggaaatgggttccgtatggaaccgcgtgggtgcggaagttaccattcttgaagccgcgccgactttcctggctgccgccgaccaacaaatcgccaaagaagccttcaaatacttcaccaaagagcaaggtctgagcatcgaattgggcgtgaaaatcggcgacatcaagtctgaaggcaaaggtgtttccgttgcttacgaaactgctgctggcgaagccaaaaccgaagtattcgacaaactgatcgttgccatcggccgtattccaaacaccaaaggcctgaacgcggaagccgtaggcttggaaaaagacgagcgcggctttatcaaagtagatggcgaatgccgtaccaacctgcctaacgtatgggcaatcggcgacgtggttcgcggcccgatgttggcacacaaagccagcgacgaaggcgttgccgttgccgaacgcattgccggtcaaaaaccgcatatcgacttcaacaacgtaccgttcgtgatttacaccgatcctgaaatcgcttgggtgggtaaaaccgaagagcagctcaaagccgaaggcgtggagtacaaaaaaggtacttcaggttttggtgcgaatggtcgcgcattggcaatgggcaaagccaaaggtacggttaaagtgttggcagatgccaaaaccgaccgcatcttgggcgtacacatgattggtccggttgtcagcgaattggttaccgaaggcgtgactgcgctcgaattcttcgccagcagcgaagacatcgcccgcattatccatgcccacccaaccttgtccgaagtggttcacgaagctgcattggcggccgacaaacgcgctttgcacggttga

SEQ ID NO: 42363 - DNA, 642 bp, Neisseria meningitidis
atgaccgatttccgccaagatttcctcaaattctccctcgcccaaaatgttttgaaattcggcgaatttaccaccaaggcaggacggcggtcgccctatttcttcaatgccggcctctttaacgacggcttgtccacgctgcaactggcaaaattttacgcacaatccatcattgaaagcggcatccgattcgatatgctgttcggtcccgcctacaaaggcattattttggcggcggcaaccgcgatgatgctggcggaaaaaggcgtgaacgtcccgtttgcctacaaccgcaaagaagccaaagaccacggcgaaggcggcgtgttggtcggcgcgccgcttaaagggcgcgtgctgattatcgacgacgtgatttccgccggcacatccgtacgcgaatcgatcaaactgattgaagcggagggtgcaacccccgccggtgtcgccatcgcgctcgatcgcatggaaaaaggcacgggtgaattgagcgcggttcaggaagtggaaaaacaatacggtctgcccgtcgcccccatcgccagcctgaacgatttgtttattctgttgcaaaacaaccccgaattcggacagttcctcgaacccgtccgagcctaccgtcggcagtacggcgtagaataa

SEQ ID NO: 42364 - DNA, 648 bp, Neisseria meningitidis
atgagaatagagatcacaccaatcagcgaatccgctttggtctaccgactgaatgcgccttccgaactgggcaaacagcaaaagttgtgggcgtttgccgctgcgctcgggcagcacgacaggattgaggaagtggtggtcggcatgaacaatctgaccgtgtttacccgtttcgataccgatttggcgacgcttgccgatgaattgcaatatgtgtgggaacacaccgccgttacagaccatcagggcaaactggtggaaattcccgtctgctacggcggcgaatacggcccggatttggcggaagtcgctgctttccatcagacggttatttccgaaatcgtccgccgccatacggcgcaaacttataccgtatttatgatgggcttccagcccggtttcccttatctgggcggcttgcccgaagcattgcacacgccccgccgtgccgtgccgagaacgtccgttcctgccggttcggtcggtatcggcggcagtcagaccggtgtgtatccgttcgcttcgcccggcggctggcagattatcggcagaaccgaattacccttgttccgagccgatttgaatccgccgaccctgctggcggcgggtgaccaagtccgctttgttgcagaaaggattgagccatga

SEQ ID NO: 42365 - DNA, 552 bp, Neisseria meningitidis; identical to SEQ ID NO: 40497

SEQ ID NO: 42366 - DNA, 1068 bp, Neisseria meningitidis
atgggcggtaaaacctttatgctgatggcgggcggaacgggcggacatattttccccgcgctggcggtggcggattcattgcgcgcgcgcggccatcatgtgatttggctgggcagcaaggattcgatggaagagcgtatcgtgccgcaatacggcatacgcttggaaacgctggcgattaaaggcgtgcgcggcaacggcatcaaacgcaaactgatgctgccggttactttgtatcaaaccgtccgcgaagcgcagcggattatccgcaaacaccgtgtcgagtgcgtcatcggcttcggcggcttcgttaccttccccggcggtttggcggcgaagctattaggcgtgccgattgtgattcacgagcaaaacgccgtggcaggtttgtccaaccgccacctgtcgcgctgggcgaagcgggtgttgtacgcttttccgaaagcgttcagccacgaaggcggcttggtcggcaaccccgtccgcgccgatattagcaacctgcccgtgcctgccgaacgcttccaagggcgtgaaggccgtctgaaaattttggtggtcggcggcagtttgggcgcggacgttttgaacaaaaccgtaccgcaggcattggctttgctgcccgacaatgcgcgtccgcagatgtaccaccaatcgggacggggcaagctgggcagcttgcaggcggattacgacgcgctgggcgtgaaagccgaatgcgtggaatttattaccgacatggtgtccgcctaccgcgatgccgatttggtgatttgccgtgccggcgcgctgacgattgccgagttgacggcggcgggattgggtgcgttgttagtgccgtatcctcacgcggttgacgatcaccaaaccgccaacgcgcgttttatggtgcaggcggaggcgggattgctgttgccgcaaacccagttgacggcggaaaaactcgccgagattctcggcggcttaaaccgcgaaaaatgcctcaaatgggcagaaaacgcccgtacgttggcactgccgcacagtgcggacgacgtggcggaagccgcgattgcgtgtgcggcgtaa

SEQ ID NO: 42367 - DNA, 408 bp, Neisseria meningitidis
atgacttatactactgccaaagccgccgaaaaaataggcatctccgcccacaccctacgtttttacgacaaagaaggtttgttgcccaatatcggacgtgatgaatacggtaaccgctgttttaccgataacgatttgcaatggttgggcttattgcaatgcttgaaaaatacgggaatgagcttaaaagacatcaaacgctttgcggaatgtaccgtcattggcgacgataccattgaagaacgcctttccttgtttgaaaatcaaatagaaaatgtgaagtgtcaaattgccgaattaaaacgctatttagatttgcttgaatacaaattggcgttttaccaaaaagcgaaagcattaggctcggtaaaagctgtaaatttgccgcaaattcctgaaacggcttag

SEQ ID NO: 42368 - DNA, 1914 bp, Neisseria meningitidis
atgaacccaagccccctactcgacctgattgacagcccgcaagatttgcgccgtctggacaaaaaacagctgccgcgccttgccggcgagttgcgcacctttctgctggaatctgtcgggcagaccggcgggcatttcgccagcaatttgggcgcggtcgaactgaccatcgccctgcactatgtgtacgacacgcccgaagacaagctggtgtgggatgtcggacaccaaagctatccgcacaaaatcctgacaggcaggaaaaaccagatgcacaccatgcgccaatatggcggtttggcgggttttccgaaacgttgcgagtccgagtacgacgcgttcggcgtggggcattcctccacctccatcggcgcggcgttgggcatggcggcggcagacaaactcttgggcagcgaccgccgcagcgtcgccatcatcggcgacggcgcgatgacggcggggcaggcgtttgaagccttgaattgcgcaggcgatatggatgtggatttgctggtcgtcctcaacgacaacgaaatgtcgatttcccccaacgtcggcgcgctgccgaaataccttgccagcaacgtcgtgcgcgatatgcacggcctgttgagtaccgtcaaagcgcaaacgggcaaggtattagacaaaatacccggcgcgatggagtttgcccaaaaagtcgaacacaaaatcaaaacccttgccgaagaagccgaacacgccaaacagtcgctgtctttgtttgaaaacttcggcttccgctacaccggccccgtggacggacacaacgtcgaaaatctggtggacgtattgaaagacttgcgcagccgcaaaggccctcagttgctgcacgtcatcaccaaaaagggcaacggctacaaactcgccgaaaacgaccccgtcaaataccacgccgtcgccaacctgcctaaagaaagcgcggcgcaaatgccgtctgaaaaagaacccaagcccgccgccaaaccgacctatacccaagtgttcggcaaatggctgtgcgaccgggcggcggcagattcccgactggttgcgattacccccgccatgcgcgagggcagcggcttggttgagtttgaacaacgattccccgaccgctatttcgatgtcggcatcgccgagcagcacgccgttacctttgccggcggtttggcttgcgaagggatgaagcccgtcgtggcgatttattccacctttttacaacgcgcctacgaccaactggtgcacgacatcgccctgcaaaacctacccgttttgtttgccgtcgaccgcgcgggcatcgtcggcgcggacggcccgacccatgccggtctgtacgatttgagctttttgcgctgcgtgccgaacatgattgtcgccgcgccgagcgatgaaaacgaatgccgcctgttgctttcgacctgctatcaggcagacgcgcccgccgccgtccgctatccgcgcggcacgggtacgggcgcgccggtttcagacggcatggaaaccgtggaaatcggcaagggcattatccgccgcgaaggtgagaaaaccgcattcattgccttcggcagtatggtcgcccccgcattggcggttgccgaaaaactgaacgccaccgtcgccgatatgcgcttcgtcaaaccgatagacgaagagttgattgtccgccttgcccgaagccacgaccgcatcgttacccttgaagaaaacgccgaacagggcggcgcaggcggcgcggtgctggaagtattggcgaaacacggcatctgcaaacccgttttgcttttgggcgttgccgataccgtaaccggacacggcgatccgaaaaaacttttagacgatttgggcttgagtgccgaagcggtggaacggcgtgtgcgcgcgtggctgtcggatcgggatgcggcaaattaa

SEQ ID NO: 42369 - DNA, 843 bp, Neisseria meningitidis
atggatattaaaatcaacgacatcaccctcggcaacaactcgcccttcgtcctattcggcggcatcaacgttttggaaagcttggattccaccctccaaacctgcgcgcattacgtcgaagttacccgaaaactcggtattccctatatctttaaagcctctttcgacaaggcaaaccgttcctccatccattcttatcgcggcgtaggcttggaagaaggcttaaagatttttgaaaaagtcaaagcagagttcggcatccccgtcattaccgacgtacacgaaccccatcagtgccaacccgtcgccgaagtgtgcgatgtcatccagcttcccgcctttcttgcgcggcagaccgatttagtggttgccatggcaaaaactggcaacgtcgtcaacatcaaaaaacctcagttcctcagcccctctcaaatgaaaaacattgtggaaaaattccacgaagccggcaacgggaaactgattttatgcgaacgcggcagcagcttcggctacgacaacctcgttgtcgatatgctcggtttcggcgtgatgaaacagacttgcggcaacctgccggttattttcgacgttacccattccctgcaaacccgcgatgccggttctgccgcatccggcggtcgtcgcgcacaggctttggatttggcacttgcaggcatggcaacccgccttgccggtctgttcctcgaatcgcaccccgatccgaaactggcaaaatgcgacggccccagcgcgctgccgctgcaccttttagaagattttttaatccgcatcaaagcattggacgatttaatcaaatcacaaccgattttaacaatcgagtaa

SEQ ID NO: 42370 - DNA, 963 bp, Neisseria meningitidis
atgaatatccccagtaaaatcagcagctttatcggaaaaacattttccctctgggccgcgctctttgccgccgccgcttttttcgcgcccgacaccttcaaatgggcggggccttatattccttggctgttgggcattattatgttcggtatgggtttgacgctcaaaccttccgacttcgatattttgttcaaacatcccaaagccgtcatcatcggcgtaatcgcacaattcgccattatgccggcaaccgcctggctgctgtccaaactgttgaacctgcctgccgaaatcgcggtcggcgtgattttggtcggctgctgcccgggcggtacggcttccaatgtgatgacctatctggcgcgcggcaatgtggctttgtcggttgccgttacgtctgtttccaccctgatttccccattgctgactcccgccatcttcctgatgcttgccggcgaaatgctggaaatccaagcggccggtatgttgatgtccatcgtcaaaatggttttgctccccattgttttgggtttgattgtccataaggttttgggcagtaaaaccgaaaagctgaccgatgcgctgccgctggtttccgttgccgccatcgtgctgattatcggcgcggttgttggggcaagcaaaggcaagattatggaaagcggcctgctgatttttgcggttgtcgtactccacaacggcatcggctacctgctcggcttctttgccgccaaatggaccggcctgccttatgatgcacaaaaaacgctggccatcgaagtcggtatgcaaaactcgggcctggccgccgcgcttgccgccgcacactttgccgctgcgccggtcgttgccgttccgggcgcattgttcagcgtgtggcacaatatctccggctcgctgctggcaacttattgggcggccaaagcccgtaaacataaaaaccctaaacgcctttcatcataa

SEQ ID NO: 42371 - DNA, 1839 bp, Neisseria meningitidis
atgcgtaaggtgtgtgcttcagcacgcacgcgttccatgatttacggctcaatgccgtctgaaaagctcacaatttttcagacggcatttgttatgcaagtaaatattcagattccctatatactgcccagatgcgtgcgtgctgaagacaccccctacgcttgctatttgaaacagctccaagtcaccaaagacgtcaactggaaccaggtacaactggcgtacgacaaatgggactataaacaggaaggcttaaccggagccggagcagcgattattgcgctggctgttaccgtggttactgcgggcgcgggagccggagccgcactgggcttaaacggcgcggccgcagcggcaaccgatgccgcattcgcctcgctggccagccaggcttccgtatcgctcatcaacaacaaaggcaatatcggtaacaccctgaaagagctgggcagaagcagcacggtgaaaaatctgatggttgccgtcgctaccgcaggcgtagccgacaaaatcggtgcttcggcactgaacaatgtcagcgataagcagtggatcaacaacctgaccgtcaacctggccaatgcgggcagtgccgcactgattaataccgctgtcaacggcggcagcctgaaagacaatctggaagcgaatatccttgcggctttggtgaatactgcgcatggagaagcagccagtaaaatcaaacagttggatcagcactacattacccacaagattgcccatgccatagcgggctgtgcggctgcggcggcgaataagggcaagtgtcaggatggcgcgataggagcggcggtcggtgaaatcctcggcgaagccctgctggacggcagagacccgggcagcctgaatgtgaaagaccgggcaaaaatcattgctaaggcgaagctggcagcagggacggttgcggcgttgagtaagggggatgtgaatgctgcggcgaatgcggctgctgtggcggtagagagtaatgcgcttagcaaggaaagaatggataaattgacaaaatgcctttccggtaaaacttgttctactacgatggaaaaagtaaatgccatcaaaaaggatgaacaatttagcaaagtaattgatacggaaattcaaaaagtctgttctaggaacccattgggcgatggttgcagaaacggcattaatatgtctattaaatatattgccatgcctgctgcgtggaagtatatgcctacggatgtatcacgggttgccaaagaagtttttggctatttatataactcacaaggggcatctacaagatttgacaagtatttcaacaccattgacaatcgtgcagatttctttgctgccagcaatctttatgagcaaaatttgggttcaaaagcacgatggtttggtggagctgattttgtatcgcgtgctgctataactgggttaggggcagacggagaagcttcttatataacttttgcggcaggtaaagttgttggtaatcctccaatttatgaatggagggctgcgtcaggcaatgcactgatagtaaatggattttataattttagagacttgttcaataaaaaaactaatcctagggagtgggatattcaacagttgaaaagcgagcaaaagttattacagcctattcaccaaaaatatttgagtaatgagaaggattatttgtcattgattaaaggggtaacatcaaataagatattttcaataattccaaatcctttagatgagaggaaaaaaatagaggatggaattaatatgttagattacaaatctagaattaaatatggttgtaagcttatgggatattctgagaaacagggatgcaagccatga

SEQ ID NO: 42372 - DNA, 1428 bp, Neisseria meningitidis
atgaacgagaactttaccgaatggctgcacggctgggtcggcgccatcaacgatccgatgtggtcatacttggtttatatgcttttgggtacggggcttttcttcaccgtaaccacgggctttgtccaattccgcctgttcgggcgcagcatcaaagaaatgctcggcggccgcaaacagggggacgaccctcacggcatcacgccgtttcaggcatttgtaaccggccttgccagccgcgtgggtgtgggcaacatcgcgggcgtggcaatcgccatcaaagtcggcgggccgggcgcggtgttttggatgtgggtaaccgccttaatcggtatgagttcggcgtttgtcgaatcttcgctggcgcagctctttaaagtccgcgactacgacaaccaccatttccggggcggccccgcctactacatcactcaagggctggggcagaaatggctgggcgtgttgttcgccctgagcctgattttctgtttcggctttgtgtttgaagcggttcagaccaataccatcgccgataccgtcaaagcggcatggggttgggagcctcattatgtcggcgtcgccctggtgattttaaccgcgccgattatcttcggcggcatcaggcgcatatctaaagcggcggaaatcgtcgtccccctgatggcggttttgtacctctttatcgcgcttttcatcattttgaccaatattccgatgattccggacgtgttcggtcagattttttcgggcgcgttcaaattcgacgcggcagcaggcggcttactcggcggtctgatttcgcaaacgatgatgatgggcatcaaacgtggcctgtattccaacgaggcgggtatgggttccgcgccgaacgccgccgccgccgccgaagtgaaacaccctgtttcgcaaggtatgattcaaatgctgggcgtgtttgtcgataccatcatcgtttgttcttgcaccgccttcatcatcttgatttaccaacagccttacggcgatttgagcggtgcggcgctgacgcaggcggcgattgtcagccaagtggggcaatggggcgcgggcttcctcgccgtcatcctgtttatgtttgccttttccaccgttatcggcaactatgcctatgccgagtccaacgtccaattcatcaaaagccattggctgattaccgccgttttccgtatgctggttttggcgtgggtctatttcggcgcggttgccaatgtgcctttggtctgggatatggcggatatggcgatgggcattatggcgtggatcaaccttgtcgccatcctgctgctctcgcccttggcgtttatgctgctgcgcgattacaccgccaagctgaaaatgggcaaagaccccgagttcaaactttccgaacatccgggcctgaaacgccgtatcaaatccgacgtttggtaa

SEQ ID NO: 42373 - DNA, 171 bp, Neisseria meningitidis; identical to SEQ ID NO: 36504

SEQ ID NO: 42374 - DNA, 288 bp, Neisseria meningitidis
atgaagattgaatttgactccgaaaaaaatcaacgcaatatcgaagagcggaatttgccctttgaatcagtcgggcaaatacgctggacaacggccgttattgtgcccgatgtccgctttgattaccccgaaccgcgttatgttgccgctgcttatctaggcgatacgcaacgcctgcacattgtctgttttacgccgataaaagacggcatccgtgtcatcagttttcgcaaagcgaataaaagagaggttaaaaaatatgcaacgtcaatccttaacaaacgctga

SEQ ID NO: 42375 - DNA, 621 bp, Neisseria meningitidis
atggaattgaaagtaattgacgctaaaggacaagtttcaggcagtctgtctgtttctgatgctttgttcgcccgcgaatacaatgaagcgttggttcatcagctggtaaatgcctacttggcaaacgcccgctccggtaaccgcgctcaaaaaacccgtgccgaagtaaaacactcaaccaaaaaaccatggcgtcaaaaaggtaccggccgtgcccgttccggtatgacttcttctccgctgtggcgtaaaggtggtcgcgcgttcccgaacaaacccgacgaaaacttcactcaaaaagtaaaccgcaaaatgtaccgtgccggtatggcgactattctgtcccaattgactcgtgacgagcgtttgtttgcgattgaggcgttgactgccgaaactcctaaaaccaaagtttttgccgaacaagtgaaaaatctgggtctggagcaagtgttgtttgtaaccaaacagctcgacgagaatgtttacttggcttcacgcaacttgccaaacgtgttggttttggaagctcaacaagttgatccttacagcttgctgcgttacaaaaaagtaatcatcactaaagatgcagttgcacaattagaggagcaatgggtatga

SEQ ID NO: 42376 - DNA, 771 bp, Neisseria meningitidis
atgaacttcaccgacacccactgccatctcgctgatcccgccctgcgcgaaaacctgccgcacatcctgaccgcagcgcggaaagttggggtgaagcggtttatcgttcccgcgacgcgcccgcaggattggcaggacgtggcggatttggcggaaatgccgtccgaacacggtcaaatccgtattgcactgggcattcatccttggttttcagacggcattgccgagcgggatttcgtccgcctggaaacgatgttggcacattatccgcaggcatgggtcggcgaaatcggcttggatttttacgataaaacccaaacgtcgcagcagcgcgaacggcaaattcaagttttcgtccgccagcttgaaattgcgcaaaccctgcgccgccgcgtgattatccataatctcaaagccaccgccgacatcgccgccgccgtcaaacagacaggctttgcccaaggcggcatcgttcacgccttctccggcagcgcggaagaagcgcgtgtgttgacgaaactgggtttcaaaatcggcatcggttcgctgctgctcaatccgaacgcgcgtaaagtgcgcgatacgcttaaagccttgaacgacggggatttcgtattggaaacggatagcccgtttatgctgaaaaaagagattaatacgcctgccaatattccgggtattgcaaagattgctgcggaaatccgcggaacctgtgtagaagagattgcaaaggtaacggagcgcaatgccgatgccctgttgggacggtag

SEQ ID NO: 42377 - DNA, 1059 bp, Neisseria meningitidis
atgatgataggggcttctttgttttcgagtgcagggattgcagaaacctacttgcataatgcgggtattaagattatagctgcaaatgaattggtgccagaacgtgctaatttatataaagctctatatcccgaaagtaaaatgattataggtgatatacttcatgaggaagtgtttcaaaatttaatacagagcgtgccgaatcgattagattttttaattgcttctcctccttgtcaaggcatgagtgttgcagggaaaaatcgtaacattcaagagatggctaatgataaacgtaatcatttaatattcagagtaatcgaatttattttattaaaacgcccaacttttgttttgattgaaaatgttccattttttttaaaaattaagttaccttataaggggacattacaaacagtagaagtaattttgcaagatttatttggttgcgaatattatattcaaactcatatttttgattctgccgattatggtgttgcacaacatcgtaaacgagctattattcgtatgaataaacattcaactatttggggaatgccggaaaaagttacaaaaaccatttctgttcgtgatgctattagttttttgcctagtattgagtctggacaaaagtctaatgtgaaatggcattttgcacgtacacatgctccggagcacattatatggctaaaaaatacgccaacaggacgatctgcttttgataatatagaacattatccaaagaaaaaaaatggtgaaaaaattaaaagttataatacaacttatcgccgtatggagtgggatgctcctgccccaactattactattcgtaatgacgctatcagttcacaattaaatgttcatcctggacggtctatgcctgatggaacatattcagatgcaagagttttaacaccattagagttaatgcttttaacatcattacctattgattggaatattcccgacgatacatcagaattattaattcggcaatgtattggtgaatctattcctccattgttaattaaaaaaattgtagagagaataggaaaatag

SEQ ID NO: 42378 - DNA, 426 bp, Neisseria meningitidis; identical to SEQ ID NO: 39813

SEQ ID NO: 42379 - DNA, 279 bp, Neisseria meningitidis; identical to SEQ ID NO: 36597

SEQ ID NO: 42380 - DNA, 1458 bp, Neisseria meningitidis
atgaaaccaaccatcgcgcttgttggtcgccccaacgtcggcaaatctactttattcaaccgtttgacgcgcaccaaagacgcgctcgtgcatgacctgcccggtctgacgcgcgaccgccattacggacacggcaaagtcggcagcaaaccttatttggtcatcgataccggcggtttcgagccggttgtggacagcggcattttgcacgaaatggcaaaacaaaccttacaggctgtcgatgaagctgatgcagttgtgtttttggtggacggccgtaccggtttaacaccgcaagacaagattattgccgaccgtttgcgccaaagtccgcgccctgtttatttggccgtgaataaaggcgaggggggcaatagggctgtacttgccgccgagttctacgaacttgctttgggcgacccttatgttatttcaggtgcacacggcgatggtgtgtattatctgattgaagatattttggaaaaattccccgagccggaagccgaagaagccgatgcaagacatcctgtttttgccgttatcggtcgtccaaacgtcggcaaatctacgctggttaacgccattctcggcgaagagcgcgtcatcaccttcgatatggcaggtacgacgcgcgacagtatccatatcgatttcgagcgcgaaggcaaaccgtttaccatcatcgataccgcaggtgtgcgccgtcgcggcaaagtggatgaagcagtggaaaaattctccgttatcaaagcgatgcaggcggttgaagcggcaaacgtcgctgttttggtattggacgcgcagcaggacatcgccgaccaagatgcgacgattgcaggtttcgctttggaggcaggccgtgctttggtggtggcggtcaataaatgggacggcatcagcgaagaacgtcgcgagcaagtgaaacgcgatatcaaccgcaaactgtatttcctcgattttgccaagttccactttatttccgcattgaaagagcgcggtatagacggtttgtttgacagcattcaggctgcctacaacgcggcgatgattaagatgccgacgccgaaaatcacgcgcgtattacaaagcgcgatcgagcgtcagcaaccgccgcgtgccggcttggtgcgtccgaaaatgcgttatgcccaccaaggcggcatgaaccctcccgtaattgtggtacacggcaattcgctgcacgcgatttccgacagctatacgcgctatctgacccaaacgttccgcaaagccttcaatctgcaaggcacgccgctcagaattcaatacaatgtttcggaaaacccgtatgaaaatgcggaagacaaaccgaagaaaaaaccgctgcgccgcgtcagcctgagcaaccgtattgagaaacgcgaaggccgaaaggaagagaaaaaccgcttcaagaagaaaaccaaagtcagtgtgaaaaaacaattcagcaaataa

SEQ ID NO: 42381 - DNA, 279 bp, Neisseria meningitidis
ttgcgcggcaaaaccaaagtgatgacgacccagatgggtgcttcccgcgatgtcagcaaaagcgccaaaggttggagtgtcggtatcggtctgaatgtaggcaaacagttgaccgacagcgtcggtctcgagtttgatccatactaccgtcacaaaacaatctacaaaccccgtgagattgtcttggacggtgacaaaaccaaaatgggccgctccaaatccaacgagtacggcttccgcgtagccgcaacgttctatagtcaattaaaatcaaaatag

SEQ ID NO: 42382 - DNA, 1413 bp, Neisseria meningitidis
atgctgctgctgcctttattggcaagcgcggcatatgccgaagaaacaccgcgcgaaccggatttgagaagccgtcccgagttcaggcttcatgaagcggaggtcaaaccgatcgacagggagaaggtgccggggcaggtgcgggaaaaaggaaaagttttgcagattgacggcgaaaccctgctgaaaaatcccgaattgttgtcccgcgcgatgtattccgcagtggtctcaaacaatattgccggtatccgcgttattttgccgatttacctacaacaggcgcagcaggataagatgttggcactttatgcacaagggattttggcgcaggcagacggtagggtgaaggaggcgatttcccattaccgggaattgattgccgcccaacccgacgcgcccgccgtccgtatgcgtttggcggcagcattgtttgaaaacaggcagaacgaggcggcggcagaccagttcgaccgcctgaaggcggaaaacctgccgccgcagctgatggagcaggtcgagctgtaccgcaaggcattgcgcgaacgcgatgcgtggaaggtaaatggcggcttcagcgtcacccgcgaacacaatatcaaccaagccccgaaacggcagcagtacggcaaatggactttcccgaaacaggtggacggcacggcggtcaattaccggctcggcgcggagaaaaaatggtcgctgaaaaacggctggtacacgacggcgggcggcgacgtgtccggcagggtttatccggggaataagaaattcaacgatatgacggcaggcgtttccggcggcatcggttttgccgaccggcgcaaagatgccgggctggcagtgttccacgaacgccgcacctacggcaacgacgcttattcttacaccaacggcgcacgcctttatttcaaccgttggcaaaccccgaaatggcaaacgttgtcttcggcggagtgggggcgtttgaagaatacgcgccgggcgcgttccgacaatacccatttgcaaatttccaattcgctggtgttttaccggaatgcgcgccaatattggatgggcggtttggatttttaccgcgagcgcaaccccgccgaccggggcgacaatttcaaccgttacggcctgcgctttgcctgggggcaggaatggggcggcagcggcctgtcttcgctgttgcgcctcggcgcggcgaaacggcattatgaaaaacccggctttttcagcggttttaaaggggaaaggcgcagggataaagaattgaacacatccttgagcctttggcaccgggcattgcatttcaaaggcatcacgccgcgcctgacgttgtcgcaccgcgaaacgcggagtaacgatgtgttcaacgaatacgagaaaaatcgggcgtttgtcgagtttaataaaacgttctga

SEQ ID NO: 42383 - DNA, 216 bp, Neisseria meningitidis
gtggtaatcggctacgatgaaatcaaagcgaagaatcacagcttgtcggcggggcagtatttcgaggtaaagattgattatgtggatatttccgccgacgaatttgcgcaaaaaatggcgggattttcagcggatttggataaacttttcgccgaatctgccgaattggaaaaagagattaaggatagattggcgatgttgaaattcaattcataa

SEQ ID NO: 42384 - DNA, 234 bp, Neisseria meningitidis; identical to SEQ ID NO: 39683

SEQ ID NO: 42385 - DNA, 1008 bp, Neisseria meningitidis
atgagcaccttcttccagcaaaccgcacaagccatgattgccaaacacatcaaccgcttcccgctattgaagttggatcaagtgattgattggcagccgatcgaacaatacctgaaccgtcaaaaaacccgttaccttagagaccaccgcggccgtcctgcctatcccctgctgtccatgttcaaagccgtcctgctcggactatggcacagcctctccgatcccgaactcgaacacagcctcattacccgcatcgatttcaacctgttttgccgttttgacgaactgagcatccccgattacagcaccttatgccgctaccgcaaccggctggcgcaagacaataccctgtctgaactgttggaactgattaaccgccaactgaccgaaaaaggtttaaaagtagagaaagcatccgccgccgtcattgacgccaccattattcagaccgccgacggcaaacagcgtcaggccatagaagtcgatgaagaaggacaagtcagcggccaaaccacacggagtaaggacagcgatgcgcgttggataaagaaaaacggcctctacaaactcggttacaaacaacatacccgtaccgatgcagaaggctatatcgagaaactgcacattacccccgccaatgcccatgagtgcaaacacctgtcgccgttgttggaaggtctgcccaaaggtacgaccgtctatgccgacaaaggctatgacagtgcggaaaaccggcaacatctggaagaacatcagttgcaggacggcattatgcgcaaagcctgccgcaaccgcccgctgtcggaagtgcaaaccaagcgtaaccgatatttgtcgaagacccgttatgtggtcgaacaaagcttcggtacgctgcaccgtaaattccgctatgcccgggcagcctatttcggactgattaaagtgagtgcgcaaagccatctgaaggcgatgtgtttgaacctgttgaaagccgccaacaggctaagtgcgcccgctgccgcctaa

SEQ ID NO: 42386 - DNA, 369 bp, Neisseria meningitidis
atggcggcaatcggcatcggcatgactgttttggtgtacggaatcgttgccgtcatcgtcaaactcgacgacttaggcatgctgctgatgcgccgcccacaaaccttttcgcgcagtttggggcaaatgctgactgcctttatgccttgctttatgcgcggtttgagcgtggtcggcacgcttgccatgtttcttatcggcggcgtactggtcgcccacaacctcggccttctgcacgatttcctgcacgcgcaacactgggacgctggctgggcggagtacttcgccaacctcgttgtcgggctgctttccggttcgattgcctgcgcccccgccttgccgctgatgaatcgtttcggcaggcattga

SEQ ID NO: 42387 - DNA, 1176 bp, Neisseria meningitidis
atgctgaacactttcctttccccgtggccctgcttcacccaagaagaagccgatgccgtttccaaagtcctgctgtccaacaaagtcaactactggacgggcaacgaatgccgcgaatttgaaaaagaatttgccgcctttgccggcacgcggtacgccgtcgcccttgccaacggcacgctggcactcgatgtcgcgctcaaagcaatgggcataggcgcgggcgacgatgtgattgttacctcgcgcaccttcctcgcttccgcgtcctgcattgtgaacgcgggcgcaaaccccgtgtttgccgatgtggatttgaacagccaaaacatcagcgcggaaaccgtcaaagccgcgctgacaccgactaccaaagccgtcatcgtcgtccacctcgccggtatgcccgccgaaatggacggcattatggctttggcaaaagaacataatctttgggtaatcgaagactgcgcccaagcgcacggcgcaaaatacaaaggcaaatccgtcggctctatcggacacgtcggcgcgtggtcgttctgccaagacaaaatcatgaccaccggcggcgaaggcggtatggttacgaccaacgacaaaaccctgtgggaaaaaatgtggtcgtacaaagaccacggcaaaagctacgatgccgtgtacaaccacgaacacgcgcccggtttccgctggctgcacgaaagtttcggcacaaactggcgtatgatggaaatgcaggcggtcatcggacgcatccagctcaaacgcctgcccgaatggacggcgcgccgccgagaaaacgccgccaagctggcggaaagtttgggcaaattcagcagcatccgcttggttgaagtcgccgactacatcggacacgcgcaatataagttctacgccttcgtcaaacccgaacacctcaaagacggctggacgcgcgaccgcatcgtcggcgaactgaacgcgcgcaaagtcccctgctatcaaggcagctgctccgaagtctatttggaaaaagccttcgacaacacgccgtggcgaccgaaagagcgtttgacaaatgctgtcgagttgggcgacaccagcctgatgttcttggtgcacccgacgctgaccgacgacgaaattgcgttttgcaaaaaacacatcgaagccgtcttgaccgaagccgcacgataa

SEQ ID NO: 42388 - DNA, 1194 bp, Neisseria meningitidis
ttgttgacaattgcggcagaacagggcaaattcggcggcacaaggcggcaaacgagacaggacaaaccaacaaggacggaaacaatgaaatacaaaagaatcgtatttaaagtcggcacatcttcgattacccattcggacggcagtctctcgcgcggcaaaatccaaaccatcacccgccagcttgccgcattgcatcatgcgggacacgagctggtcttggtgtcttccggcgcggttgcggcagggttcggtgcgctgggtttcaaaaaacgtccggtcaaaatcgccgacaaacaggcttccgccgccgtcgggcaggggctgctgatggaagaatatacggcaaacctgtcttcagacggcatcgtgtccgcacaaatcctgctcagccgcgccgactttgccgacaaacgccgctaccaaaatgccggcggcgcactttccgtgctgctgcaacgccgcgccgtccccatcatcaatgaaaacgatacggtttcggttgaggaattgaaaatcggcgacaacgacacattgagtgcgcaagtggcggcgatgatacaggcagacctcttggtgctgctgaccgacatagacggtctttacaccggcaacccgaacagcaatcccgatgccgtacggctggacaaaatcgaacacatcaaccatgaaatcatcgaaatggcgggcggctcgggttcggcaaacggcacaggcggtatgctgactaaaatcaaagcggcgacgattgcgaccgagtccggcgtaccggtctatatctgttcctcgctcaaacccgatgcacttgccgaagcggcagataatcaggcggacggctcgtttttcgtcccccgtgccaaaggtttgcggacgcagaagcaatggctggcgttctattccgaaagcaggggcggcgtttatgtggacgaaggtgcggaacacgctttgtccgaacagggaaaaagcctgctgatgtcgggcattgccggaatcgaagggcatttttcccgtatggacaccgtaaccgtgtacagcaaggcaaccaaacagcctttgggcaaagggcgagtcctgttcggctctgccgccgccgaagacctgctcaaattgcgtaaggcgaaaggcgtgttcatccatcgggacgactggatttccatcacgcccgaaatacgcctgcttctgaccgaattttag

SEQ ID NO: 42389 - DNA, 1407 bp, Neisseria meningitidis; identical to SEQ ID NO: 38418

SEQ ID NO: 42390 - DNA, 261 bp, Neisseria meningitidis
atgaaatacttgatccgcaccgccttactcgcagtcgcagccgccggcatctacgcctgccaaccgcaatccgaagccgcagtgcaagtcaaggctgaaaacagcctgaccgctatgcgcttagccgtcgccgacaaacaggcagagattgacgggttgaacgcccaaatcgacgccgaaatcagacaacgcgaagccgaagaattgaaagactaccgatggatacacggcgacgcggaagtgccggagctggaaaaatga

SEQ ID NO: 42391 - DNA, 483 bp, Neisseria meningitidis
atgacacaacaacgccaactgccttcgcacgaactcattatgtccgaactgatgatgccggacaccgccaatttcagcggcaacgtacacggcggcgaactcctgctcctgctcgaccaagtcgcctattcctgcgccagccgttacagcggcaattattgcgttaccctgtcggttgacaaagtcctgtttaaagaacccatccatgtcggcgacctggttactttctacgccagcgtaaactacacggggcgtacctctatggaaatcggcatccgtgtcgaagcacaaaacatccgtacgggagaaatccgccataccaacagctgctacttcaccatggttgcagtcaaagacggcaaacccgtccctgtccctccgctggaaatcctgaccgaccgccaacgctgccgctacgaaaaagccaaaaaacgcagagacatcagcctgcaagcctccggagacgtgtcctgcggctgctga

SEQ ID NO: 42392 - DNA, 849 bp, Neisseria meningitidis
atggacttcaaacaatttgattttttacacctgatcagtgtttccggttgggagcatctggctgaaaaggcgtgggcgttcgggctgaaccttgccgccgcgctgcttatttttttggtcggaaaatgggcggcgaaacgcattgtcgctgtgatgagggcggcgatgacgcgcgcgcaggtcgatgccacgctgattagttttttgtgtaatgttgccaatatcggcttattgattttggtgattattgccgcattgggcagattgggcgtttccacaacatccgtaaccgccttaatcggcggcgcgggtttggcggtggcgttgtccttgaaagaccagctgtccaattttgccgccggcgcgctgattatcctgttccgcccgttcaaagtcggcgattttatccgcgtcggcggttttgaaggatatgtccgagaaattaaaatggtgcagacttctttgcggacgaccgacaacgaagaagtcgtgctgcccaacagcgtggtgatgggcaacagcatcgtcaaccgttccaccctgccgctgtgccgcgcccaagtgatagtcggcgtcgattacaactgcgatttgaaagtggcgaaagaggcggtgttgaaagccgccgtcgaacaccccttgagcgttcaaaacgaagagcggcaggccgccgcctacatcaccgccttgggcgacaatgccatcgaaatcacattatgggcttgggcaaacgaagcagaccgctggacgctgcaatgcgacttgaacgaacaagtggtcgaaaacctccgcaaagtcaatatcaacatcccgttcccgcaacgcgacatacacatcatcaattcttaa

SEQ ID NO: 42393 - DNA, 129 bp, Neisseria meningitidis
atgcagataaacaaggtaatgccgtctgaagggctttcagacggtattttgcgctattttgcgaaggtagggatgacggttcgggtattcctgacagggtggattttcaaggtgttgtatagggtgtag

SEQ ID NO: 42394 - DNA, 381 bp, Neisseria meningitidis
atgaatatcaggtttttcgcgctgaccgtaccggttttgtctttggcggcctgtgccgtgccggaggcgtatgatgacggcggacgcgggcatatgccgcccgttcaaaaccaagccggcacggacgattttcgggcgttttcctgcgagaacggtttgtctgtgcgcgtccgccatttggacagcggcaaagtcgcgttgcggctggacggcaggcgtgccgtcctctcttccgacgttgccgcatccggcgaacgctataccgccgaacacggtttgttcggaaacgcaaccgagtggcaccagaaaggcggcgaagcctttttcggctttaccgatgcctacggcaattcggtcgaaacttcctgccgcgcccgttaa

SEQ ID NO: 42395 - DNA, 870 bp, Neisseria meningitidis; identical to SEQ ID NO: 36835

SEQ ID NO: 42396 - DNA, 1722 bp, Neisseria meningitidis
atgccgtctgaagccatctgttcaaagaaaactatgctcaataaagaccaatttgcggacaaccattttatccgcaccatcatcgaagaagacctcgaaagcggcaaacatacagctgtccaaacccgtttcccgcccgaacccaacggctacctgcacatcggacacgccaaatccatctgcctgaacttcggtttggcgtatatttacgacggcttgtgcaacctgcgttttgacgataccaaccccgaaaaagaaaacgacgaatacgtcaacgccatcaaagaagatgtcgagtggctcggtttccattgggcgggcgagccgcgtttcgcttccaactatttcgaccagctttatgactacgccgtcggtttgattaaagacggcaaagcgtatgtcgatgatttgacgcccgaagaaatgcgcgaataccgcggtacgctgaccgaagcgggtaaaaacagcccttaccgcgaccgcagcgtcgaagaaaacctcgacctgttcacacgcatgaaaaacggcgagttccccgacggcagcaaaaccctgcgcctgaaaatcgacatggcatcgggcaacatcaatatgcgcgaccccgtcatctaccgcatccgccgcgcccatcaccacaacaccggcgacaaatggtgtatctacccgatgtacgactacacgcattgcatctccgatgccatcgaaggcatcacgcattccttgtgtacgctcgaattcgaagcacaccgtccgctgtacgactgtgtgttggacaacattcctgcgccgcatgccacccgtccgcgccaatacgagttttcccgtttggagcttttgtacaccattacctccaaacggaaattgaatcagttggttgtggaaaaacacgtttccggctgggacgatccgcgtatgccgaccatttccggtatgcgccgacgcggctacacgcccgaagggctgcgcctgtttgccaaacgcgccggtatttccaaatctgaaaacatcgtcgatatgagcgtgttggaaggcgcgattcgcgaagagttggaaaattccgccccacgcctgatggcggtgttgaacccgctcaaagtgaccctgaccaactttgaaaccggcagaacccaaagccgccgtgccgcgttccatccgaaccacgaggaaatgggcgagcgcgaagtacctatttcccaaaccatctatattgaagccgacgactttgccgaaaatccgcccaaaggcttcaaacgcctgattcccggcggcgaagtacgcttgcgccacggctatgtcatcaagtgcgatgaagtcgtcaaagacgaagcaggcaatgtggttgaactcaaatgcagcatcgaccacgacaccttgggcaaaaatccagaaggccgtaaagttaaaggcgtgattcattgggtttccgccgaacacgccgccgaaatcaaagtccgtctgtacgaccgcctctttaccgtcgagcgtcccgatgccgtgcgcggcgaagacggcgaatacctgccgttcaccgatttcctcaatccggaatccgtcaaggaaatcaccgcctacgccgaacctgccgccaaagatttgccggcagaaagccgttggcagttcgagcgtatcggctacttcgtaaccgaccgtaaagaccacggcaaagacacgccggtgtttaaccgcacggtaacgctgaaagactcttggcagcctaagtaa

SEQ ID NO: 42397 - DNA, 981 bp, Neisseria meningitidis
ttgccgttttccactttattccgcctgaaaccaatgaccgacatcacaccgtttgccaaccgcttgggcaaaaacatcaaacaccttatgaaatgggcgaaacgcaacggcatcgaagcctggcgcatttacgaccgcgacatcccccaattcccctttgccgccgatgtttacggcgatcgaatccaccttcaggaatacgataccggctggctgatgcggcccgaagaatacgaagcgtggcttgccgaagtcttggaagccgtcgctttcgttaccggttttgcgcccgaacaaatccgcctcaaacgccgcgaacgccaaaaaggtttgcagcagtacgagaaaaccggcaaggcgggcgacgatttcgtcatcaccgaaaacggccgcaagttttgggtcaaccttgataagtatttggatacggggctttttttggatcatcgaaacacgcgcaaaaaagtcggcgaaacggcggcgggcaaacgttttttaaacctgttttcctacaccggcagcttcaccgtctatgccgccaccggcggcgcggcatccagcgaaaccgtcgatttgtccaacacatatcttgattgggcgaaacgcaattttgaattgaacggcatcgatacggaacgacacaaaatcgtccgcgccgacgtgttccaatatcttcagacggcatatggggaaggcaggcggttcgacctcattgtgatggacccgcccagtttttccaacagcaagaaaatgtccgacatcctcgacatccagcgcgaccacaaaaagctgattgacggcgcggtgaagctgctcgcttcagacggcattttgtacttttccaacaacctgcgcagcttcgtcttagacgacttggtatcggaacaatacgccgtcaaagacatttccaaacaatccgttcccgaagatttccgcaacaaaaaaatccataggtgctgggaaatccgccacaaatcttaa

SEQ ID NO: 42398 - DNA, 1596 bp, Neisseria meningitidis
atgtgggggcttttgggtacaatcgcaacatcagtgtttcaagtggggaaggcgatggatggacggcgttgggtggtatggggtgcttttgccctgctgccttcggcttttttggcggtaatggtcgttgcgcctttgtgggcggtggcggcgtatgacggtttggcgtggcgcgcggtgctgtcggatgcctatatgctcaaacgtttggcgtggacggtatttcaggcagcggcaacctgtgtgctggtgctgcctttgggcgtgcctgtcgcgtgggtgctggcgcggctggcgtttccggggcgggctttggtgctgcgcctgctgatgctgccttttgtgatgcccacgttggtggcgggcgtgggcgtgctggccctgttcggggcggacgggctgttgtggcgcggcaggcaggatacgccgtatctgttgttgtacggcaatgtgtttttcaaccttcctgtgttggtcagggcggcgtatcaggggtttgtgcaagtgcctgcggcacggcttcagacggcacggacgttgggcgcgggggcgtggcggcggttttgggacattgaaatgcccgttttgcgcccgtggcttgccggcggcgtgtgccttgtctttctgtattgtttttccgggttcgggctggcgctgctgctgggcggcagccgttatgccacggtcgaagtggaaatttaccagttggtcatgttcgaactcgatatggcggttgcttcggtgctggtgtggctggtgttgggggtaacggcggcggcagggttgctgtatgcgtggttcggcaggcgcgcggtttcggataaggcggtttcccctgtgatgccgtcgccgccgcagtcggtcggggaatatgtgctgctggcgtttgcggcggcggtgttgtctgtgtgctgcctgtttcctttgttggcaattgttgtgaaagcgtggtcggccggcgaatcgtggcgtgtgttaatggaaagtgaaacgtggcaggcggtgtggaatactttgcgcttctcggcggcggcggtgtatgcggcggcggttttgggtgtggtgtatgcggcggcggcgcggcggtcggcgtggatgcgcgggctgatgtttttgccgtttatggtgtcgccggtttgtgtttcggcgggcgtgctgctgctttatccgcagtggacggcttcgttgccgttgctgctggcgatgtatgcgctgctggcgtatccgtttgtggcaaaagatgttttatcagcctgggatgcactgccgccggattacggcagggcggcggcgggtttgggtgcaaacggctttcagacggcatgccgcatcacgttccccctcttgaaaccggcgttgcggcgcggtctgactttggcggcggcaacctgcgtgggcgaatttgcggcgacattgtttctgtcgcgtccggaatggcagacgctgacgactttgatttatgcctatttgggacgcgcgggtgaggataattacgcgcgggcgatggtgctgacattgctgttggcggcgttcgcgctgggtattttcctgctgttggacggcggcgaaggcggaaaacagacggaaacgttataa

SEQ ID NO: 42399 - DNA, 1476 bp, Neisseria meningitidis
atgatcagcaaacaagaataccaagcccaagccgcccaaggctacaaccgcatcccgctcgtgcaagaactccttgccgatttggatacgccgctttccctctatctcaaactcgccaaccgcccctatacctacctgctcgaatccgttgtcggtggcgaacgtttcggccgctattcttttatcggcctgccttgcagccactatctcaaagccagcggcaaacacgtcgatgtttatcaaaacggcgaaattgtcgagcaacacgacggcaaccccctgccctttatcgaagccttccacaaccgcttcaaaacacccgaaatcccaagcctgccgcgctttaccggcggactggtcggctacttcggttacgaaaccatctacaattttgaacacttcgcccaccgcctgaaaaacaccaccaaagccgacccgctcggcacgcccgacatcttgctgatgctgtcgcaagaattggcggtgatcgacaatttgagcggcaaaatccatctcgtcgtttacgccgatccgtcgcagcccgacggctacgaacgcgcccgcgaacgcctcgaagacatccgcacccagttgcgccaaagctgcgccatcccgctctcgctcggcagcaaacacaccgaagccgtcagcgaattcggcgaagagccgttcaaagcctgcgttaacaaaatcaaagactacatcttcgcaggcgactgcatgcaggttgtccccagccagcgcatgagcatggaattcaccgacagcccgctcgccctctaccgcgccctgcgtacgctcaacccttcgccttatctcttttactacgatttcggcgatttccacatcgtcggctcctcgcccgaaatcctcgtccgccgcgaacgcgacgatgtcatcgtccgccccatcgccggcacgcgcctgcgcggcaaaacccccgccgaagaccttgccaacgaacaagatttgttaagcgatgccaaagaaatcgccgaacacgtcatgttgattgacttaggacgcaacgacgtcggccgcatcagtaaaaccggcgaagtcaaagttaccgacaaaatggtgattgaaaaatactcccatgtaatgcatatcgtttccaacgtcgaaggccgtctgaaagacggcatgaccaacatggacatcctcgccgctaccttccctgccggcacactctccggcgcacccaaagtccgcgccatggaaatcatcgaagaagtcgaaccgagcaaacgcggcatctacggcggtgccgtcggcgtatggggtttcaacaacgacatggatttggcaatcgccatccgcaccgccgtagtaaaaaacaacacgctatacgtccaaagcggcgcgggcgtggttgccgactccgatccggcctccgaatggcaggaaacacaaaacaaagcccgagccgttatacgcgccgcgcagatggtgcaggaagggttggataaatga

SEQ ID NO: 42400 - DNA, 318 bp, Neisseria meningitidis
atgcaaaaacgtattgatgaaatccaaagcaaataccgcgaatggtgtcatttactaccgcaactggaagaagacatccgccgttggaaacatgtcgtcactttaattcgcgacatggacaatttctatacccacgagtatcaggcgtgtcatcaggctattgaagacggggtagaactggatttgagtacggaaggcgaatacagcattatgagtgaagatgcgctatggaacgcgctgggcgaattccatcaattggcttggttatatttgcgctccagcgtcgatgccttagacaaatatacacaagaagattag

SEQ ID NO: 42401 - DNA, 903 bp, Neisseria meningitidis
atggacagcctgatgacgttgctttcggtattgataccgatgtttgccggattttttatccgtgtgcccaagccttacctgcccgctttggataaggtgctatcggtcttggtgtatgctgtgctgctgctgatcggcgtctcgttgtcgcgcgtggaggatttgggttcgcggttggacgatatggcgttgacggttctgtggctgtttgtttgtacggtcggggcgaacctgcttgctttggcagtgttgggaaagttattcccgtggcggataaaggggaaagggaagggcgtttcggtcggcgtgtcgggcagtgtggggcagctcggatgcgtgctgctcggatttgcattcggcaaactgatgcgcgatatttggatgccgtctgaaagcgcgggcatgtattgtctgatgctgctggtgttcctcatcggcgtacagctcaaaagcagcggcgtatcgttgcggcaggttttggtcaaccgcaggggtattcggttgtcggtctggtttatgctttcatctctttcgggcgggctgctgtttgccgcatcgacagacggtgtgtcgtggacgaaaggtttggcgatggcttccggcttcggttggtattccctctcgggtttggtcatgaccgaggcttacggcgcggtatggggcagcatcatgctgctgaacgatttggcacgagagctgtttgcactggcatttatcccgctgctgatgaagcgttttccagatgcggcggtgggggttggcggtgcgaccagtatggattttacattgcccgtgattcagggtgcgggcggtttggaagtcgtgccggtagcggtcagcttcggcgtggtggtcaatatcgccgccccgtttctgatggtggtgttttccgctttgggttga

SEQ ID NO: 42402 - DNA, 288 bp, Neisseria meningitidis; identical to SEQ ID NO: 36767

SEQ ID NO: 42403 - DNA, 1296 bp, Neisseria meningitidis
atgagcgtcatccaagacctgcaatcgcgcggccttatcgcgcaaaccaccgacatcgaagccttagacgctttgttgaacgaacaaaaaattgccctttattgcggcttcgacccgaccgccgacagcctgcacatcggacacctgctgcccgtattggcattgcgccgcttccaacaggcggggcatacgccgattgctttggtgggcggcgcgaccggtatgatcggcgaccccagcttcaaagccgccgaacgcagcttgaattccgccgaaactgttgccggctgggtggaaagtatccgcaaccaattaacccctttcttgagctttgaaggcggaaatgccgccattatggcgaacaatgccgactggttcggcagcatgaactgccttgacttcctgcgcgacatcggcaagcatttctccgtcaacgccatgctgaacaaagaatccgtcaaacagcgcatcgaccgcgacggcgcaggcatttccttcaccgagttcgcctattccctgctgcaaggttacgacttcgccgagttgaacaaacgccacggcgcggttttggaaatcggcggctccgaccaatggggcaatatcaccgccggtatcgacctgacccgccgcctgcaccaaaaacaagtattcggtctgaccctgcctttggtaaccaaatcagacggtaccaaattcggcaaaaccgaaggcggcgcggtatggctgaacgcgaaaaaaacctcgccctatcagttctaccaattctggctgaaagtcgccgatgccgatgtgtataaattcctgaaatactttaccttcctgtccatcgaagaaatcgatgccatcgaagccaaagacaaggcaagcggcagcaagcccgaagcgcaacgcatcctcgccgaagaaatgacccgcctgattcacggcgaagaagcccttgccgccgcgcaacgcatttccgaaagcctgtttgccgaagaccaaagcagcctgaccgaaagcgacttcgagcagctcgccctcgacggcctgcctgcatttgaagtttcagacggcatcaatgtcgtcgaagccttggtaaaaaccggtttggcatcctccaataaagaagcgcgcggctttgtgaacagcaaagcggttttgctcaacggcaaacctgccgaagccaacaaccccaaccacgccgccgaacgccccgacgatgcctgcctgctgaacggcgaacacaaacgtttcggcaaatacactatccttcggcgcggcaaacgcaaccacgcgcttttggtttggaaataa

SEQ ID NO: 42404 - DNA, 456 bp, Neisseria meningitidis
atggcatactctgcggacttaagaaacaaagctttaaactatagtggattaaatttaaatcaggacaaggcgacgaagccgcagacagtacaaatagtacggcaaggcgaggcaacaccgtactggtttaaatttaatccactatattacgaacaatgcaaaaacatcagccaaaccgcagcaacgtttaacttgtcaagaaacacgctttacctgtggattcgccttaaaaaacaaacaggcagcctaaaacatcaagttaccggtctaaatgccgtcaaatcggataggcaaaaaccggctcaatatgttgggcaacacccggatgcctatctgcatgaaatcgccaaacattttgattgtacggcagccaccatttgctatgcactcaaacagatggggataacgcgcaaaaaaagaccaccacttacaaagaacaagacccggccaaagtaa

SEQ ID NO: 42405 - DNA, 378 bp, Neisseria meningitidis; identical to SEQ ID NO: 36526

SEQ ID NO: 42406 - DNA, 999 bp, Neisseria meningitidis
gtggcggcacatatcggacgcattgatacggacgcgcctttgaaacccctgtacgtcatccacggcgaggaagaactgttgcgtatcgaggcattggacgcattgagggcggcggcgaagaaacaaggttaccttaatcgggaagtttatacggcagacaatgccttcgattggaacgaactgttgcaaaccgcaggcagtgcgggtctgtttgccgatttgaagctgttggaactgcatatccccaacggaaaacccggcaaaaccggcggcgaggcgttgcaggattttgccgcccgcctgccggaagatacggtaacgctggttttgctgcccaaactggagaaaacccagctccagtccaaatggtttgccgcattggcggcaaagggggaagtgtgggaagccaaaccggtcggcgcggcggccttgccccaatggatacgcggacggctggacaaaatcggtttgggtatcgaggcagacgcattggcactgtttgccgagcgcgtggaaggcaatttgttggcggcgcgtcaggaaatcgacaagctcgcgctgctgtatccgaaagggcataccgtcaatatcgatgaggcgcaaaccgccgttgccaatgttgcccgctttgacgtttttcagcttgccggcgcatggatgaagggcgatgtcccgcgcgtatgcaggttgttggacggattgcaggaggaaggcgaagaaccggtactgcttctgtgggcggttgccgaagacgtgcggacgctgattcggcttgccgctgtcctgaaacaggggcagggtgtccaatccgtacgcaacagtctcagactttggggcgacaagcagacgctcgcgccgcttgcggtcaagcggatttccgtcgtccgcctgcttgacgcgctcaaaacctgcgcccaaatcgaccgaatcatcaaaggcgcggaagacggcgacgcatggacggtattcaaacggcttgtcgtgtcgctggcggaataa

SEQ ID NO: 42407 - DNA, 516 bp, Neisseria meningitidis
atgaaatcaaaactcctcttaatcctaatcaacttttccctgatttcaagcccattgggtgcgaatgcggccaaaatctacacctgcacaatcaacggagaaaccgtttacaccaccaagccgtccaaaagctgccactcaaccgatttgcccccaatcggcaactacagcagcgaacgctatatcccgccccaaacgcccgaaccggtatcatcaccgtcaaacggcggacaggttgtcaaatataaagccccggtcaaaacagtatccaagccggcaaaatccaatacgccgccgccgcaacaagcaccctcaaacaacagcagacgctccattctcgaaacagaattgagcaacgaacgcaaagcattggttgaagcccaaaaaatgttatcacaagcacgtctggcaaagggcggcaacatcaaccatcaagaaataaatgcattacaaagcaatgtattggacaggcagcaaaatattcaagccctgcaaagggaactggggcgtatgtaa

SEQ ID NO: 42408 - DNA, 759 bp, Neisseria meningitidis
atgaaaaaagtcagcgtattgattgttgccaaaaacgaagcaaaccacattcaggaatgtattgaaagttgccgtttcgataaagaagttatcgttatcgacgactacagcaccgacaatactgccgaaattgccgagggtttgggcgcaaaagtcttcagacggcatttgaatggggatttcggagcgcaaaaaacatttgccatcgaacaggcaggcggagaatgggttttcctgattgatgcagacgaacgctgcacgccggaactatctgatgaaatctcaaaaattgtccaaaccggcgattatgccgcctattttgtcgaacgccgcaaccttttccccaaccatcccgccacacacggcgcgatgcgtcccgacagcgtatgccgtctgatgccgaaaaaagacagttcggtgcaaggcaaagtacacgaaaccgtacaaaccccctaccccaaacgccgtctgaagcattttatgtaccattacacgtacgacaactgggaacaatatttcaacaagttcaacaaatatacttccatttcagccgaaaaataccgagagcagggaaagcccgtgcgtttcgttagggacattatcctccgcccgatttgggggtttttcaaaatttatatcctgaacaaagggtttcttgatggaaaaatgggttggattatgtccgtcaaccacagctattacacgatgattaaatatgtcaaactatattatctgtacaaatccggcggaaaattttaa

SEQ ID NO: 42409 - DNA, 237 bp, Neisseria meningitidis
atgtcaaacatcgaacaacaagttaaaaaaattgttgctgaacaactgggcgtaaacgaagccgacgtgaaaaacgaatcttccttccaagacgacttgggcgcggattctttggacaccgtggagctggttatggctttggaagaagcattcggctgcgaaatccccgacgaagatgccgaaaaaatcaccaccgtccaactggctatcgactacatcaatgcccacaacggctaa

SEQ ID NO: 42410 - DNA, 909 bp, Neisseria meningitidis
atgaatcaaaccgccatcaaccgcgccgatgtgcgtacccgctttatcttcgacgatatgcccgtgcgcgggctgcacgtccgtctggaaaacgtgtggcagcacattgtaaaacagaaaaactatcccgccgccatccgccgcgccttgggcgagctgttggctgccggtgttctgctgtcgggcaacctcaaaaacgaaggcacgctgattgtgcaggttcaggggcaggggcggctgaaaatgctggttgcggaagcgacttccgaccgtaccgtccgtgcgaccgcgcggtgggacgaaaccgcagaaatagccgatgacgaaagcctcggcgatcttttgggcgagggcggcgtattcgtgctgacgctgcagcctaaagacggcgaaccctggcagggtgtagtgcctttggaaggcgacggtatcgcgcaaatgttggtgaactatatgaaacgttccgaacagcttgatacgcacatcgtcctgtctgcaagcgacgaagcggcgggcggtctgctggtgcagcgtctgcctgaagaggtattggatgaagaggcatgggaacacgtcagtacgctggcgcgcacgctgacggcggaggagctggcaggactggacgcgcaacacgttttataccgcctgttccacgaaacgccgccgcgcgtgttcgagccggaaacgtttgaattttcatgcacctgttcgcgcggcaaagtcagcgatatgctgttgatgctgggcggggaagaagtcggcggcgtggtggtggaacaaggcagcatcgaagtcgattgcgatttctgccacagcaaatatgtgtttgacgaaaccgatgtcaacgcgctgttcggggaggatgtggtcggcgttgccaaagggctgccccggcataccgtccaataa

SEQ ID NO: 42411 - DNA, 1281 bp, Neisseria meningitidis
atgaaatccctttttattcggctgctcctgttgggttcggcggccggcgttttctatcatacccaaaaccaatccctgcccgcgggcgaacttgtctatccgtccgcaccgcaaatcagggacggcggcgatgcgctgcactacctcaaccgcatccgcgcccaaatcggtttgcacaagctggcacacgcgccggttttggaaaattccgcccgcaggcacgcacgctatctcacgctcaatcccgaagacggacacggcgaacaccatcccgacaatccgcactacaccgcacaaaagctgaccgaacgcacacgccttgccgggtatctctacaacggcgtgcatgaaaacatcagcacggaagaggaagccgccgaatcgtccgacagcgacatccgcacgcagcaacgccaagtggacggattaatgagcgcaatctaccaccgcctttccctacttgaccgccatacggatgaggcaggagcggcatttgtgcgcgaaaacggtaaaaccgttctcgtattcaatcagggcaacggcaggtttgagcggcattgcgcccaaggcagaaatcagccggaagcaggacggaaatattaccgcaacgcctgccataacggtgcggtcgtgtacaccgacgaagccatgcccgcacaggagctgctctatacagcctatcccgtcggcaacggcgcactgccttatttccacggcgagcgtccagaccccgtgccggaatatgaaatcacgggcaatcctgccagcattgatttttccgaggcggcaggcaaaattacgatgaaaagtttcaagctgtatcagggtaaaaacgaaatccgccccgtcagggttttaaccgccggcaacgaccccaacggcaggctgaccgcgtaccaattcgcgctttttccgctcaagcctttggaatacggcacgctttatacggcggtattcgactatgtccgcaacggacggcgagcgcaggcgaaatggcagtttagaacccgaaaacccgattacccttattttgaggtaaacggcggcgagacacttgcggttagaaaaggcgaaaaatatttcatccactggcgcggacgctggtgtttggaagcgtgtacccgttatacctaccggcagcgacccggcagccgcctgtccataggaaggcacgaggcgggcggcatcgtcttcagcgttgacggaatggcgggcagccgcatcacgcttgcaccggaaggagaaacggaacgaggcgtaaccctttatttacaggattga

SEQ ID NO: 42412 - DNA, 933 bp, Neisseria meningitidis
atgaaaattgcaaacagcattaccgaactaatcggcaacacgcctttggtcaaactgaaccgtctgaccgaaggtttgaaggcagaggttgccgtgaaactggaatttttcaatccgggcagcagcgtcaaagaccgcattgccgaagcaatgattgagggtgccgaaaaagcgggcaaaatcaacaaaaacaccgtcattgtcgaagcaaccagcggcaatacgggtgtcggtttggcaatggtatgtgccgcacgcggctacaagctggcgattaccatgccggaaagcatgagtaaggagcgcaaaatgctgttgcgcgcgtttggtgcggagctgattctgacccctgccgccgaaggtatggcgggcgcgattgccaaagcgaaatccttggtggacgcgcatcccgacacttattttatgccgcgccagttcgacaatgaggcaaaccccgaagtccaccgcaaaacaaccgccgaggaaatttggcgggatacggacggcaaagtcgatgtcttcgttgccggcgtcggcacgggcggtacgattaccggcgtgggcgaagtgttgaaaaaatacaaacccgaagttaaagtggttgccgtcgagcctgaagcttcacccgtattgagcggcggcgaaaaaggcccgcacccgattcaaggcatcggcgcaggctttattccgaccgttttgaataccaaaatttacgacagcattaccaaagtgtcgaacgaagcggcttttgaaaccgcccgcgcaatagcggaaaaagaaggcattttggtgggtatttcttccggtgcggcggtttggagtgcgttgcagcttgccaaacagcctgaaaacgaaggcaagctgatagtcgtgctgctgccttcttatggcgaacgctatctctctacgccactttttgcagatttggcataa

SEQ ID NO: 42413 - DNA, 774 bp, Neisseria meningitidis
atgaaaccgaaaatccaaaggcacggagagattttaagccttgtccgccggcatcagtttatgtcggtggacgagcttgccgccgcattggacgttaccccgcagacgatacgccgcgacatccgcgagttggaggaggtcggcagcctgaaacgccatcacggcggcgcatcttcgggcggaaacttgccggagggcctgcccgccgaccgccaaacccggtgtcaaaacgaaaaaaacgccattgcccggctgattgcggaacacatccccgacggttcgtcgctgtttgtcagtatcggcacgacgatggaggccgtggtgtcggagctggtcaggcggcgcggcagcctgagggtgattaccaacaatatccacgccgcctcgattgcttcggcgcggacggattatacggtcatcatcacttccggagtcgtccgccctttggacggcggtattaccggcgtggcaaccgtcgattttatcaaccagttcaaagtcgattatgccgtgatgagtacgcacggcgtggaaagcgacggttcgcttttggacgacgactacaaagaagtcagcgtgatgcaggcgatgattgccaatgcgcgcgtccgcttcctcggcgtggaccacagtaaattccgcagcaacgcgctggtcaggctcggcgacattacggcgtttgacaaagtatttaccgaccggctgcccgataccgcgatgcagaagatgctgaaagaggcgggggtggaatgcttgattgccgatgccgtctga

SEQ ID NO: 42414 - DNA, 618 bp, Neisseria meningitidis
atgcttgccaaaattcccgacggcgatacaataaaaccgattttccacccaaacaggacacacatgaaaaaaatcatcgcctccgcgcttatcgcaacattcgcactcgccgcctgccaagacgacacgcaggcgcggctcgaacagcagcagaaacagattgaagccctgcaacagcagctcgcacagcaggcagacgatacggtttaccaactgactcccgaagcagtcaaagacaccattcctgccgaagcacaggcaaacggcaacaacgggcaacccgttaccggtaaagacgggcagcagtatatttacgaccaatcgacaggaagctggctgctgcaaagcctggtcggcgcggcggcaggcgcgtttatcggcaacgcgctggcaaacaaattcacacgggcaggcaaccaagacagtcccgtcgcccggcgcgcgcgtgcagcctaccatcagtccgcacgccccaatgcgcgcaccagcagggatttgaacacgcgcagcctccgtgcaaaacaacaggcggcgcaggcgcagcgttaccgcccgacaacgcgcccgcccgccaattaccgccgccccgctatgcgcggtttcggcaggaggcggtaa

SEQ ID NO: 42415 - DNA, 204 bp, Neisseria meningitidis
atgccgtctgaggggctttcagacggcatgcctgcccggacagacgctgcttggagcggctgtcggtttgaaggtgtgtttaatgcgaagggcaatctgtcgtatgatgtgtttgcggcaggggctttgaagaagcccggtattttaggacgaagcgcgcggctgccggggtcaatatccgctatttattccaaaccttattaa

SEQ ID NO: 42416 - DNA, 1128 bp, Neisseria meningitidis
atgagcaactggaaacccaatattccctataacgatttaccacccctgccgccaaaacaggatattgaaagcaaaaccatcctgaaacgttgtatagccgcccgtgcatcccttgcccgtttaaagcaggcggcagaattgataccgaatcaagccatgctgattaacacccttcctgttatggaagcccgtgcaagttcggaaattgaaaacatcgtaaccaccacggacaagctgtttcaatccctgcaaatggatacggaacggcaagaccctgccacgaaagaagccctgcaataccgcaccgccctgtttgcaggctatgaatcactgacgagccgccctttatgcacacaaaccgccatcatggtctgcaacgccatcaagcacccctacgaaatggccatccgcaaaacaggcggcacagccctaaaaggaggcaacagcggaaatgttgtctataccccgcccgaaggagaagaaaccatacgcggcaagctggcaaattgggagcggtttattcacgaaagcggcgatttagacccgcttatcatcatggcggcggcacattaccaatttgaagccatccatccgtttacggacggcaacgggcggacggggcgcatattgaacagcctgctattgattgaaaaagggcttttggatttgcctattttgtatttgagccgctacatcatcgaaaacagggcggactattaccgcctgcttttaggcgtaaccgaacggcaggactgggaaagctggataatctacatcttagacggcgtagctgacaccgccgattggacggtatcgaaaatagatgcgatacgccgcctgttcgagcagacacggcaacacatacggacacacgcacaaggaatctacacgcacgaactggtaaatcttctgtttgagcagccatatacacgcattgccaacctagaagcggcagggatagccaaacggcagacggcctctaagtacctgaaagagctttcagacataggtgtgctgcaagaaatcgtcatcggcagggacaaactattcattcatccgcgcctaatggaactattgcggggagagggcaacagctttacctcattccaatccctcgttaaagcatag

SEQ ID NO: 42417 - DNA, 492 bp, Neisseria meningitidis
atgcgacatatcttatctgttctgattgaaaacgaatcaggtgcgatgagccgcgtggtcggtttgttctctgcacgcgattacaatatcgattctttggcggttgcgccgaccgaagacaaaaccctgtcacggatgaccatcgttacccacggcgacgagcaggtcatcgaacaaattaccaagcaactcaataaattgattgaagtgattaaagtggtcgatttgaatgaaagccgttttgtcgaacgcgaactgatgttggtaaaagtccgtgccgccggcaaagaccgcgacgaatttttacgcttgaccgaaatctaccggggcagcatcatcgacgtaaccgaccgcagctatacgattgaaattaccggctcgacagacaagctggattcctttttggaaacggtcggacgcgcccaaattttggaaaccgtacgcacaggcgcggccggcatcggtcgcggtgagcgtattttgaaaatttaa

SEQ ID NO: 42418 - DNA, 957 bp, Neisseria meningitidis
atgaatataatcgggctggacatctcaaaggacaccatagacgcaacattgcataaaacaaacggaagtatccattacattaaatttaagaataatgatgatggattaaaacagtttagattgtggataaagggaaacagaatcagaaaagtctatatcggcatggaggcaacaggcatctattacgaaaaggcagcagatatgctttcttcctactatactgtttacgttattaatcccttaaaaatcaaggactacggaaaaagcaggtttaaccgtaccaaaaccgacaaagcagattcaaacctgatagcagactacataaaaaggcatcaagatacattgataccgtatcagatacccaaaaacaaagcactgcaaaaactgattaaccttaaaaatcaattacatcaacatcagaagcaaattaaaaaccgtcttcatagcactgaagaagacttcataaggaacatacatcaagacttgatagataccatacaggacaagatggaacaggtaaaaatagccatatccgaacaaatcaaaaaacaaacggacaataaccattaccgcaatcttcaaaccatcccgagcataggcaaagacaccgcatcagttctttatgcgcaactgacagaaaaacattttaaaaccgcaaaccagtttgtatcctatgccggattaaatcccgccatcatacaatcagggacaagcgtaagaggtcggggcagattgagccgatacggaaacagacgattaaaaagtacgctgtatatgcccgccctttgtgcttaccgttttaacgcatttccgaaattaataaataatctgaaaaaagcgggtaagccaaagatggtaatcatcgttgccatcatgcgcaaactggcgaagctcgcctattacattgttaaaaccggccagccttacgatgcggaaagacaccgattgaatcaataa

SEQ ID NO: 42419 - DNA, 450 bp, Neisseria meningitidis
atgagtatttatgccgtcgcgcacatcgttcatctgtattgcgctattgcctttgtcggcggcgtgttttttgaagtgctggttttgtccgtcctgcatacgggacgggtgtcgcgcgaggcgcggcgcgaagtggaaaaggcaatgtcttaccgcgccgtcagggtgatgccgtttgtggtcggactgctgttcgccagcggcatcgtgatggcggcaaaccgctatctttctatattgggcgaaccgtttgccacttccttcggtacgatgctgacgctgaaaatcctgttggcgttcagcgtattggcgcacttcgccatcgccgtcgtcaaaatggcgcgttccacactgacggtcggttggtcgaaatacatacacgccgtcgtctttacccatatgctgctgattgtctttttggcaaaagcgatgttttatatcagctggtaa

SEQ ID NO: 42420 - DNA, 2580 bp, Neisseria meningitidis
atgcgatacgacaaattaaccgccaaattccaacaagcccttgcagaagctcagagtttggcgttggctgcggacggcagctatctggaagcgggctttgtgttaaaagccctgcttgacgaccaaaacagcggagccgccgcgctcttggctcatgcgggcgtgaacgtgccgcaggtgaaacagcgtttgcagcagcatttaaacagcctgccgaaagtgtccggtcagggcggcgatattctgcccagccgagaattgcaggcggtgttgaacctgatggacaaagctgccaccaaacgcagcgatgcctatattgccagcgaacttttcctgcttgccttggtacagcagaacgatgcgaccggcaaaattttgaaagaagccggcgcgaccgaacaaaacatcaatgccgcgattgacgcagtacgaggaggacaaaacgtgaacgatgccaatgccgaagaccaacgcgatgctttgaaaaaatatacgcttgacctgacccagcgcgcccgcgacggcaaacttgaccccgttatcggtcgtgacgacgaaatccgccgcgcgattcaggtattgcaacgccgtaccaaaaacaaccctgtgctgattggtgagccgggtgtgggtaaaaccgccattgttgaaggcttggcgcaacgtatcgtcaacggcgaagtacctgaatccctgcgtaacaaacgcttgctggttttggatttggcggctttgattgccggcgcgaaataccgcggcgaatttgaagaacgcttgaaaggcgtgttgaacgatttggcgaaagacgacggcaacactctgattttcattgatgaaatccatactttggtcggcgcgggcaaaaccgacggcgcgatggacgcgggcaatatgctgaaaccggctttggcacgtggcgaattgcactgtatcggcgcgaccactttggacgaataccgccaatacatcgaaaaagatgcggcactcgaacgccgcttccaaaaagtattggttggcgagccaagcgtggaagacaccatcgctattttgcgcggtttacaggagcgttatgaaatccaccatggtatcgatattaccgaccctgctatcgttgccgcagcggagttgagcgaccgctacattaccgaccgcttcctgcccgataaagcgattgatttgattgacgaagccgccagccgtgtcaagatggaaaaagaaaccaagccggaagcaatggacaaaatcgaccgccgtctaattcagcttcggatggaaaaggcgcacgttgaaaaagaaaaagacgatgccagcaaaaaacgtttggaactgatagacgaggaaatcaacggtctgcaaaaagaatacgccgatttagacgaaatctggaaagccgaaaaagcaatttcagacggtgctgctaatattaagaaacaaattgacgaagtcaaaattaaaatcgaacaggcaaaacggcaaggcgatttggcactggcttcaaaattgatgtatgaagatttggagcatttggaaaaacagcgtgcagccgccgaacgggcagatacggacagcacaaaaccggcaaacaaactcttgcgtaataatgtcggcgcagaggaaatcgcagaggtggtttcccgtatgaccggcattcccgtatccaaaatgatggaaggcgaacgcgacaaactgctgaaaatggaagaagtattgcaccgccgcgtggtcggacaggacgaagccgtgcgtgccgtgtccgacgctatccgccgcagccgctccggtcttgccgatccgaacaagccttacggcagcttcctgttcttgggcccgaccggcgtgggtaaaaccgagttgtgtaaagccctggcaggctttctgttcgacagcgaagatcatctgattcgcatcgatatgtccgaatatatggaaaaacacgccgttgcccgcttaatcggcgcgcctccgggctatgtcggctacgaagaaggcggctacctgaccgaacaagtgcgccgcaaaccgtacagcgtgattctgctggacgaagtggaaaaagcccatcccgatgtgttcaacatcctgctgcaagtattggatgacggccgcttgaccgacggacaaggtcgcaccgtggacttcaaaaataccgttatcgtgatgacttccaatattggtagccaacatatccaacaaatgggcattcaggattacgaagcggtgaaagaagttgtgatggaggatgtgaaagaacatttccgccccgaaatgatcaaccgcatcgacgaagtggtcgtgttccacggactggatcaggataatatccgcaacattgcgaaaatccagctcaaaggcttggaaaaacgtttggaaaaacaaaacctgcgcctggctgtttccgatgccgcactggacatcatcgccaaagccggtttcgacccgatttacggcgcacgtccgctcaaacgcgccatccagtcggaaatcgaaaacccgctggcaaaagccctgcttgccggaaactatgcgcccgaaagcgaaatcagggtggaagccgacggcgacagactgaaatttgcctga

SEQ ID NO: 42421 - DNA, 279 bp, Neisseria meningitidis
  misc_feature 6, 7, 8, 9, 10: 'n' is a, c, g or t
gtgtgnnnnnggctgcccgagtccaatccggcagaagatttaaatctgccgtctgaaaccgtcaatgtagagtttcagaaatcaggaatctttcaagattccgcacagtgtcccgcacctgtcactttcacagtgactgtgcttgattcaagcaggcagttcgcgttcagctttgagaacgcatgtaccatagccgaacggctaaggtacatgcttctcgcccttgcttgggcggttgccgcctttttttgtatccgcacagtatctcgtgaagtctag

SEQ ID NO: 42422 - DNA, 987 bp, Neisseria meningitidis
atgtcttctacgccgaataaacaagccggatatccccgactggtcgccgatatcggcgggacgaatgcacgctttgcgctggaaaccgcgccgcgcgtcattgaaaaagccgccgtgcttccgtgtaaagactacgatacggttaccgatgcggtgcgtgcctatctgaatcaaagcggtgcaacagccgtacggcacgcggcatttgccatcgccaacccgattttgggcgactgggtgcagatgaccaaccaccattgggcgttttccatcgaaaccacccgtcagactttggggctggacaccctcatccttttgaacgactttaccgcgcaggcattggcggtaacgcagacttcaagcaaagacctgatgcaggtaggcgggcaaaagcctgtcgaatttgcccccaaagccgttatcggccccggtaccggcctgggcgtgagcggattggtgcacagccacgcaggctgggtggctttggcgggcgagggcgggcataccagtttcccgccgtttgacgatatggaagtgctgatttggcagtacgccaaaaacaaatacggccatgtttccgccgaacgctttttgagcggcgcgggcttgagcttggtttacgaggctttggctgcaaaacagaaagccaaacccgccaaactgatgccgtctgaaatcacggaaaaggctttgagcggcacgtcgcctttgtgccgtcagactttggacatcttctgcgccatgctcggcacggttgcttccaacctcgccctgacgctgggcgcgcgcggcggcgtgtacctgtgcggcggcattattccccgcgtgttggaatacttcaaaacttccccgttccgcagccgtttcgagaacaagggcaggtttgaagcatatcttgccgcgattcccgtgtatgtcgtcttgagcgagtttcccggaatttccggtgcggctgcggctcttgacaaccatttgagaaacgtttaa

SEQ ID NO: 42423 - DNA, 1182 bp, Neisseria meningitidis
atgattattgatgtaaaagtacctatgttgtctgaaagcgtatctgaaggcacgctcttggaatggaagaaaaaagttggcgaagccgttgcccgtgacgaaatcctgatcgatatcgaaacggacaaagtggttttggaagtaccttctccacaagccggcgtattggttgaaatcgtagctcaagacggtgaaaccgttgttgccgaccaagttttggcgcgcgtcgatacagctgctactgccgctgctgaagccccagccgccgctcctgcagaagctgccccagctgccgctcctgctgctacacaaaacaacgccgctatgcctgctgccgccaaactggctgccgagaccggtgttgacgtgaacgcattgcaaggttccggccgtgacggtcgcgtattgaaagaagacgtacaaaatgccgctgccaaacctgccggagccgctgctcctgctgttgcacttcctgccggcgcacgtcctgaagaacgcgtaccaatgagccgcctgcgtgcccgtgttgcagaacgcctcttggcttctcaacaagaaaacgccattctgactacattcaacgaagtcaacatgaaaccaatcatggacttgcgtgcgaagtacaaagaaaaattcgagaaagaacacggcgtgaaactgggctttatgtccttcttcgttaaagccgctgttgccgccctgaaaaaatacccggttgtgaatgcttctgttgacggcaaagacatcgtgtaccacggctacttcgacatcggtatcgcaattggcagcccacgcggtttggttgtgccaattctgcgtgatgccgaccaaatgagcattgccgacatcgaacaagcaattgttgattacgcgaaaaaagccaaagacggcaaaatcgctatcgaagatctgaccggcggtacattcagtattaccaacggcggtactttcggttctatgatgtctaccccgatcatcaacccacctcaatctgcgattttgggtatgcacgccactaaagagcgcgctgtggttgaaaacggccaagttgttgtccgtccgatgatgtatctggctctgtcttacgaccaccgtatcattgacggccgcgaagctgtattgaccttggtagccattaaagacgcgttggaagacccggcccgcctgttgttggatctgtaa

SEQ ID NO: 42424 - DNA, 888 bp, Neisseria meningitidis
atgccctaccaacaaatcaccgtcaacgtcaacgatgccgtcgccgaacgcctcgccgacgcgctgatggaacacggcgcactctccgccgccatcgaagatgcctacgccggcacgcaaaacgaacaggcgattttcggcgaacccggtatgcccgccgaacaaatctggcagcagagcaaagtcatcgccctgttcggcgaacacgacgaagccgccgccatcatccaaaccgccacacaagaatgcgggttaaaagacttggcatacaccggcgaaaccatcgaagaccaagactgggtgcgtctcacgcaatcgcaattcgaccccatccggatttccgaccgcctgtggattaccccctcttggcacgaagtccccgaaggcagtgccgtcaacctccgcctcgaccccggactcgccttcggcaccggcagccacccgaccacgcgcctctgcctcaaatggttggatacgcaactcaaaaacggcgaaagcgtcctcgactacggctgcggttcgggcatcctgaccatcgccgccctcaaactcggtgcaggtttcgccgtcggcgtggatattgacgaacaggccgtccgcgccggcaaggacaacgccgcgcaaaacaacgtcgatgcacaattcttcctgcccgacggtctgcctcaagggcaattcgacgtagttgtcgccaacatcctcgccaaccctttgcgtatgcttggcgaaatgctcgccgcccgcaccaaacagggcggacgcatcgtgttgtccggtttgttggacgaacaggccgaagaactcggcggcatttacagccaatggttcgacctcgacccggcggaaaccgaggaaggatgggcgcgattgagcggcgtaaaacgctga

SEQ ID NO: 42425 - DNA, 384 bp, Neisseria meningitidis; identical to SEQ ID NO: 38550

SEQ ID NO: 42426 - DNA, 1314 bp, Neisseria meningitidis
ttgccatgccgtctgaaagccgtttcagacggcatttgcattctcatccgacttgaaagcatcatagaacaggcgcaaaatattaacaaattaaacaacgggcgcacgctccgttgccgaacggacaaaaccgaggaatcaccgatgagcaaaaaactccatccgcaaacgctcgccatacgcggcggcaaagaacaaaccgaataccgcgaacacaatcaggcattgtttctgaccagcagcttcatgtgggacaacgcccaacacgctgccgatttgttttcaaaaaaaatcaaagggttcacttatacccgtaccgccaacccgaccacagccgcctttgaaaaacgcatcgccgctttggaaggtgcggaacgcgcggtcgccacttcggcgggtatgtctgcgattcaggcggcgtttttcacctttttgcaggcgggcgaccatgtgatttccagccgcagcctgttcggcacgaccgtcggctttatcaataacatcgttgccaaattcggcatcgaagtgagccacgtgtcgccgactgatataaacgaatggaaagccgccgtcaaagccaataccaaactgctgtttttggaaacgccgtccaaccccttaggcgaagtggccgacttggaagccttggcggaattggcgcacggcatcggcgcgctcttggtggtggacaacagcctgctgtcgcccgtcggctcgcagcctttgaaacacggtgcggatatttccgtttcctccgcgaccaaagccatagacggacacgggcgtgtgatgggcggcgtgttggcgggttcggaagagttgttggcgcaggtcgccatgtattgcaactcttgcgggctggcgatgtcgccgtttaatgcgtggcagttgttgagcggcgtggaaaccctgtcgctgcgtatggaaaaacagttcgacaacgccctgaaaatcgcacaatggctgcaagcgcagccgcaggttcaagccgtgtactacaccggattgtccgaccatcctcaggcggcgcttatccgcaaacagcaaaacggcggcggcatcgtcatcggctttgaagttgccgatcaagaagcggcgtggaaagttgtggacggcgtggaactcttttcccgcaccgccaacctcggtgacgtgcgctcgaccattacccacccgtggacaaccacgcacggcaggatgcagcccgaagaaaaactcgccgccaacatccgccccggattggtgcgcctgtcggtcggtttggaatatgttggcgatttgattgacgatttgaaacaggcactcgcacgctga

SEQ ID NO: 42427 - DNA, 318 bp, Neisseria meningitidis
atgaacaagccgtttatcactcaggcgcagttggcactttataaatatcagccgtccagcaagtattttgggcaatcgatggcggttatagcgcaatctgaatttgttgaatttgcgaagattaataagtctgaaaatgttattgattgtttctcttttttctggaatagaagaattaaacatgatatttggctaatctcattttctgataattcagaaatggtaattaaagaatccctgaaagatggtcataaaatatacaaatttgaattttgcgaaattgtcgataattgcaattttgatgatgtattcgtttga

SEQ ID NO: 42428 - DNA, 708 bp, Neisseria meningitidis
atggaaaaaatgagttttgaaatttaccgttacaacccggatgttgatgccaagccttatatgcagcgttacgagttggaattggaaccgaccgacgtgaaacttttggatgctttggtacgcctgaaagcacaagacgataccttgtctttccgccgctcctgccgcgaaggcatttgcggatcggacggtatgaacatcaacggcaaaaacggcttggcgtgtttgaccgatctgcgtggcttgaaacagccagttaaaatccgtcctctgccaggtctgcctgttatccgcgacctgattgtggatatgacccagttcttcaaacaataccattccgtcaaaccttatgttgtcaacgataatccgattgatgcggacaaagagcgtctgcaaactcaggaagagcgtaaagagttggacggtttgtacgagtgtattttgtgcgcctgctgttcgactgcctgcccgtcattttggtggaaccctgataaattcgtcggtccgtccggtttgctgaatgcttaccgtttcattgcggacagccgtgataccatcactaatgagcgtttggataatctgaacgacccataccgtttgttccgttgccacaccattatgaactgcgtagacgtatgtcctaaacacttgaatccgacccgagccatcggtaagattaaagagattatgttgaaacgggccgtttaa

SEQ ID NO: 42429 - DNA, 411 bp, Neisseria meningitidis
atgattgaatttgtccgagccaaaaaacggctgctttgggcatttgtgcttttgcttgtgtggacgtgcggttaccgatacgccgccgacaaggccgaagcgaaacaaaccgccctgattgccacctatcggcattcttctatggttgcggcggaacaatatgccttgcagcttaaaaaagcgcaggacgaaaggcagcggtggtacgacttttcccaaaaacaaggaagaaagcccgtgaaaaaacagtatccgccgcaaacgaaaaaagccggctatctgaaaaccaaggaagaactgcttgcggaattggcttgccttaaagcggaaatggttgccctaaaaaagcccgatgccttaatccatgggaaagaagtgcggcagaaagaacgcaactcgtcgcagggttaa

SEQ ID NO: 42430 - DNA, 696 bp, Neisseria meningitidis
atgatgaaggatttgaatttgagcaacagcctgttcaaaggctacaacgacaaacatggcttaatgatttgtggctatgaatggggttggagtaaagccgatgaggctgcttatgtagcaggtgaatacaaactccctgaaaacaaaatcgaccatacatttgcaaacaaatccctctatttcggagagcaggcaaaaaagtggcgttacgacaatacgataaaaaattggtttgaaatgtggggacaccccttagacgaaaatggattgggcggtgcatttgaaaaatccctggttcaaaccaactgggctgctacacagggcaacactatcgacaatcccgacaagttcacacaacccgagcacatcgataattttctctaccacatcgaaaaactgcgtccgaaagtcatcctcttcatgggcagcaggttggcggattttctgaacaaccaaaatgtactgccacgcttcgagcagttggtcggtaagcagaccaaaccgctggagacggtgcaaaaagaatttgacggtacacgtttcaatgtcaaattccaatcgtttgaagattgcgaagtcgtctgctttccccatcccagtgccagtcgcggtctatcttacgattacatcgccttgtttgcgcctgaaatgaaccggattttatcggactttaaaacaacacgcggattcaaataa

SEQ ID NO: 42431 - DNA, 828 bp, Neisseria meningitidis
atgaaaaaaaccgcctatgccttcctcctgctgatcgggttcgcttccgcccctgcatttgccgaaacccgccccgccgacccttatgaaggctacaaccgcgccgttttcaaattcaacgaccaagccgaccgctacattttcgcccctgccgcgcgcggctaccgcaaagttgcgccgaaacccgtccgcgccggcgtgtccaatttttttaacaacctgtgcgacgtggtcagcttcggcagcaatatcttgcgcttggacatcaaacgcgcaagcgaagaccttgtccgcgtcggcatcaacaccactttcggtttgggcgggcttatcgacatcgccggcgcgggcggcattcccgacaataaaaacaccttgggcgacacgtttgcctcgtggggatggaaaaacagcaattatttcgtgttgcccgtcttagggccgtccaccgtccgcgacgcgctcggcacgggtattacctccgtttattcgcccaagaatatcgtcttccgcacccctgtcggacgctggggcacgactgccgtatccgccgtcagtacgcgcgaaggcctgctcgatttgaccgacagtctggacgaagccgccatcgacaaatacagctacacgcgcgacctctatatgaaagtccgtgcgcggcagaccggtgcaacacctgccgaaggtacggaagataacatcgacatcgacgaattggtcgaaagtgccgaaaccggcgcggcggaaactgccgttcaagaagattccgtatccgaaacacaggcagaagcagcaggggaagccgaaacgcaacctggaacacaaccttaa

SEQ ID NO: 42432 - DNA, 627 bp, Neisseria meningitidis; identical to SEQ ID NO: 37626

SEQ ID NO: 42433 - DNA, 198 bp, Neisseria meningitidis; identical to SEQ ID NO: 36305

SEQ ID NO: 42434 - DNA, 666 bp, Neisseria meningitidis
atgactttcactgcagtcctatttgacctcgacggcgtcatcaccgacaccgccgaataccactaccgcgcatggaaaaagctcgccgaagaactgggcatcagcattgaccgcaagtttaacgagcagctcaaaggcgtgtcgcgcgacgattcgctcaaacgcatcctcgcgcacggcggcaaaaccgtcagcgaagccgagttcgccgaactgacccgccgtaaaaacgacaactacgtcgagatgattcaggcagtcaaacccgaagacgtgtatcccggcattttgcccctgctggaagcattgagggcaaacggcaaaaaaatcgcccttgcgtccgccagtaaaaacggcccgttcctgctggaacgcatggggctgacccacttcttcgacgccattgccgaccctgccgccgtcgcacattccaaacccgcccccgacatcttcctcgcagcagccgagggcgtagatgcggacatccgccaatgcatcggcattgaagacgccgccgccggcgtcgccgccatcaaagccgccggcgccttgcccatcggcgtgggcaaagccgaagacttgggcagcgacatcgcgctggtctccggcaccgccgagctgacctacgcctacctgcaaagcgtgtgggaacagtcgggcaggtaa

SEQ ID NO: 42435 - DNA, 510 bp, Neisseria meningitidis
atggatattttattgaaatactggaagccggtaggtgtattgctgctaatcgtcctgatttttaccgcatggcatttcgaccgtgccgaaaaataccgcatgggacgggaggctgctgctgccgaaatctcgaatcgtctgaaagacggctatatcgagcaggcaaagcaggcgcgttctgccgagcagaaggccgctgccgcgtttgccgaacgacaaaccaaattagaagaggaaaaacaaaatgctgaaaaaactgttgccgctatgcgtcttgagcttaaccgcctgcgccactacgccgccgcccaaaatcgcaacagaaacctgcccgcaaccgctaccgccgccaccgcatctgatggcgcgtcagattcccaaggctggctattattcggacagtgcgctgaaaaatatgcaggactggcagaaacagccgacggacatgcagccgatttaagggaatggcaggcatatggtcatgcagtaagcagtcagcgtgccgaataa

SEQ ID NO: 42436 - DNA, 2214 bp, Neisseria meningitidis
atgaccgccatcagcccgattcaagacacgcaaagcgcgactctgcaagaattgcgcgaatggttcgacagctactgcgccgctctgccggacaacgataaaaacctcatcggtaccgcatggttgctggcgcaggaacattaccccgccgatgccgccacgccgtatggcgagccgctgcccgaccacttcctcggcgcggcgcaaatggttcatgaactcgacctgctccccgatgccgtcgccgccaccctgcttgccgacatcggacgctacgtccccgactggaacctattggtttccgaacgctgcaacagtaccgtcgccgagctggtcaaaggtgtggacgaagtgcagaaactcacccacttcgcccgggtggacagcctcgccacgccggaagaacgcgcccagcaggcagaaactatgcggaaaatgctgctggcgatggttaccgacatccgcgtcgtgttaatcaaactggcgatgcgtacgcgcaccctgcaatttttaagcaacgcccccgacagccccgaaaaacgcgccgtcgccaaagaaaccctcgacatcttcgccccgctcgccaaccgtttgggcgtgtggcagctcaaatggcagctcgaagatttgggcttccgccatcaaaagcccgaaaaataccgcgaaatcgcgctgcttttggacgaaaaacgcaccgaacgcctcgaatacatcgaaaacttcctcaacatcctgcgcggtgaactcaagaaatacaatgtccatttcgaagtcgccggccgcccgaaacacatctactccatttacaaaaaaatggtgaagaaaaaactcagcttcgacggcctctttgacatccgcgccgtgcgaattctggttgataccgtccccgagtgttacaccacgctgggtatcgtccacagcctctggcagcccattcccggcgagttcgacgactacatcgccaatcccaaaggcaacggctataaaagtttgcacaccgtcatcgtcggcccggaagacaaaggcgtggaagtacaaatccgcaccttcgatatgcaccaattcaacgaattcggtgtcgccgcccactggcgttacaaagagggcggcaagggcgattccgcctacgaacagaaaatcgcctggttgcgccaactcttggactggcgcgaaaacatggcggaaagcggcaaggaagacctcgccgccgccttcaaaaccgagcttttcaacgacacgatttatgttttgaccccgcacggcaaagtcctctccctgcccacgggcgcgacccccatcgacttcgcctacgccctgcacagcagcatcggcgaccgttgccgcggtgcgaaagtcgaagggcagattgtgccgctgtccaccccgctcgaaaacggacagcgcgtcgaaatcattaccgccaaagaagggcatccttccgtcaactggctttacgaaggctgggtcaaatccaacaaggcaatcggcaaaatccgcgcctacatccgccagcaaaacgccgacaccgtgcgcgaagaaggccgcgtccaactcgacaaacagcttgccaaactcacgcccaaacccaacctgcaagagcttgccgaaaatctcggctacaaaaagccagaagacctctacaccgccgtcggacaaggcgaaatttccaaccgcgccatccaaaaagcctgcggcacgctgaacgaaccgccgcccgtacccgtcagcgaaaccaccatcgtcaaacagtccaaaatcaaaaaaggcggcaaaaacggcgtgctcatcgacggcgaagacggtctgatgaccacgcttgccaaatgctgcaaacccgcgccgcccgacgatattatcggcttcgttacccgcgagcgcggcatttcagtgcaccgcaaaacctgcccgtctttccaacacctcgccgaacacgcgcccgaaaaagtgctggacgcaagctgggcggcattgcaggaaggacaagtattcgccgtcgatatcgaaatccgcgcccaagaccgctccgggcttttgcgcgacgtatccgacgcgctcgcccgccacaaactcaacgttaccgccgtgcaaacccagtcccgcgacttggaagccagcatgaggttcacgctcgaagtcaaacaagtcaacgacctcccgcgcgtcctcgccagcctcggcgacgtcaaaggcgtattgagcgttacccggctttaa

SEQ ID NO: 42437 - DNA, 588 bp, Neisseria meningitidis
atggaacataagctgccgcaactgccttatgaactggacgcattgtccccgcatctgagcaaagagactttggagttccactacggcaaacaccatcaaacctacatcaccaacctgaacaatcaaatcaaaggcaccgaatttgaaaacctgcctttggaagagattgtgaaaaaatcttcaggcggcgtgttcaacaacgcggcacaaacttggaaccacaccttctactggctgggtttcacgtccaaaggtcaaggcaaacctgccggcgaactggccgccgccatcgacgcgaaatggggcagcttcgagaaattccaagaagcgttcaatgcctgcgcggccggtactttcggctccggttgggcgtggctggtaaaaacccctgccggcggattggatttggtttctacttccaacgccgctacgccgctgaccactgaaaacacgccgctgctgacctgcgacgtgtgggaacacgcctattacatcgactaccgcaacagccgtcccaactacctgaaaggtttttgggaaatcgtcaactgggacgaagtcgccaaacgttttgccgccttgtcctga

SEQ ID NO: 42438 - DNA, 2202 bp, Neisseria meningitidis
gtgctagaatacgccgcccgagaccgccgttcagacggcattccgacgcaccgacagaaacatcacgaccgaaaccaagagaaaaacatggcctatcaagttctcgcccgaaaatggcggcccaaaacctttgccgacttagtcggtcaggaacacgtcgtcaaagccctgcaaaacgccctggacgaaggcaggctgcaccacgcctacctgctgaccggcacgcgcggcgtaggtaaaaccaccatcgcccgcatccttgccaaaagcctcaactgcgaaaacgcgcaacacggcgaaccttgcggcgtatgtgaaagctgtacgcagatcgatgccggacgctacgtcgacctgctggaaatcgacgccgcctccaacacaggcatcgacaacatccgcgaagtcttggaaaacgcccaatatgcaccgaccgccggaaaatacaaagtctatatcatcgacgaagtgcatatgctttccaaaagcgcgttcaacgctatgctcaaaacgctggaagagccgcccgaacacgtcaaattcatcctcgccaccaccgatccgcacaaagttcccgttaccgtcttgagccgctgcctgcaattcgtcttacgcaatatgaccgcgcaacaggttgccgaccacctcgcccacgtcctcgacagcgaaaaaatcgcctacgaacccgccgccctgcaacttttgggacgtgccgccgccggatcgatgcgcgatgccttgagcctgctcgaccaagccatcgccctaggttcgggcaaagttgccgaaaacgatgtccgccaaatgatcggcgcggttgacaaacaatacctttacgaactgctgacaggcatcatcaaccaagacggcgcagccctgaccgccaaagcgcaggaaatggcggcgtgtgccgtcggctttgacaacgccttgggcgaacttgccatactgctgcaacacctcgccctgatacaggcagtgccgaatgccttggcgcacgacgaccccgattccgatattttgcaccgcctcgcccaaaccataagcggcgaacaaatccagctttactaccaaatcgccgtccacggcaaacgcgacctcagcctcgcccccgacgaatacgccggctttatgatgaccctgctgcgtatgctggcgtttgcgcccttggcggcagcatcgtgtgatgcaaatgccgtgattgaaaataccgaactaaaatccccatcggcacaaaccgccgaaaaggaaaccgccgcaaaaaagccccaaccgcgccctgaagcggaaaccgcccaaacacccgttcagacggcatccgcagcagcaatgccgtctgaaggcaaaactgccgaacccgttaccaatcaagaaaacaacgatattccgccttgggaagacgcgccggacgaaaccgcagccggcacggcgcaagcatcggcaaaaagcattcagacggcatccgaagccggaacgccgcccaaaaaccaagtttccaagaacgaagcagccgacaacgaaaccgatgcccccttgtccgaagtgccgtctgaaaaccccattcaggcaacaccgaataatgaagcccttgaaacagaagcatttgcacacgaagctcctgcaaaacctttcaacggttacagctttccgaatgatgactacctcgtagaagacggcgcagaaatcccaccgcccgattgggaacacgccgcccctgccgatgcggaagaagaaaacaacgccgacgaaagcagcaacaacgaagaccacacgccatacgccccgccgcccgaattttccaccgaaaactgggcagccatcgtccggcacttcgcccgcaaactcggcgcggcgcaaatgccggcgcaacactccgcgtggacggaataccatcccgacaccggtctgatggttttggcaatgaccgccgaagcacgcgccaccgccgacaaaaaacgcctcgacaaaatccgcgacacccttgcccaagcctacgggctgcaactcaccctgcaaacccaagactggcgtgacgaagccggccgggaaacccccgcgatgcaggacaagcgcgtccaagccgaagacaggcaaaaagcacaagcattgctcgaagccgaccccgccgcacaaaaaatcctccaagcattcggcgcgcaatggcagcccgaatcactggaattggcggcaaaccggccataa

SEQ ID NO: 42439 - DNA, 786 bp, Neisseria meningitidis
atgagcagaatccggcaggcttttgccgctttggatggcggaaaggcattgattccctatattacggtgggcgaccccgatattcggacaactttggcattgatgcacggcatggttgcaaacggtgcggatattttggagttgggtgtgccgttttccgatccgatggcggatgggccggttattcagcgtgcggcggagcgggcgttggcaaacgggatttcgctgcgcgatgtcttggatgtcgtcagaaaattccgtgaaaccgacacgcaaacgccggttgttttgatgggatatttgaaccctgtacataagatgggttatcgggagtttgctcaggaagccgcaaaggcgggtgtggacggcgtgttgacggtggattcccctgtcgaaaccatcgatccgctctatcgcgagctgaaggataacggggtcgactgtattttcctgattgcgccgacgacgacggaagaccgtattaaaaccattgccgagctggcaggcggatttgtctattatgtttcgctcaagggcgtaacgggcgcggcaagtttggatacggatgaggtttcgcgtaaaatagagtatttgcatcagtatatcgatattcccatcggtgtcggtttcggcatcagcaatgcggaaagtgcacgcaaaatcggccgggttgccgacgcagttattgtcggcagccggattgtgaaagaaatcgaaaacaatacaggcaacgaggctgccgccgtcggtgctttggtaaaagagttgaaggatgccgtgcgctga

SEQ ID NO: 42440 - DNA, 339 bp, Neisseria meningitidis
atgaaaaaaatcgaggcgattgtcaaaccgttcaaactcgacgacgtgcgcgaggcgttgacggaaatcggcattacgggcatgaccgtcagcgaggtcaaagggttcggcaggcagaaggggcatacggaaatctatcgcggcgcggaatacgccgtcgatttcctgcccaaaatcaaaatcgagctggtgttggcggatgatgctgtggaacgcgcgattgacgtgattgtcgaggtggcgcgttcgggaaaaatcggcgacggcaagatttttgtgctgccggttgaggaggcaatccgtatccgcacgggcgaacgttcggacgcggcagtctga

SEQ ID NO: 42441 - DNA, 126 bp, Neisseria meningitidis
atgcaggttctgtcttcactcaaaaccgccaaacaacgccaccgcgactgccaaatcgtcagacgcaggggcaaagtttacgtcatctgcaaaagcaatccgcgttttaaagcacgccaacgctga

SEQ ID NO: 42442 - DNA, 531 bp, Neisseria meningitidis
atgcagggttttgaactcgaagatttgacgctttggctgatacgcgatgccggagaggatcagatgtggatagaccgttgggcgatcagttatcccgtcgtgcagatgtccgaagcgtcggccggtcaaagcataggggaatggcaggcagggcttcagacggcatttgaacgcatacgcggcaaatacgtcgccgttgtcgcacacggtgcgggcgcggccgcatttttggcgtggctgtatcaggcagacatcctgacacggaagaaaattgccaacatcatccttgtaccgcagcgtcccgatatttttcccgacgatgcggaacacgctttccaacgcgtccgctgtccctgccgtgccgcattggttgtacccgaacacggcggcgtgccgcacggttgggcgcaaaaacaggcggatttgtggaacgcccgcctgttggtttccccgcattcgggcagtttgaacggcatgctcggcggctggcagtggggtatgaagctgatgcaggaaatgttgctggcgtga

SEQ ID NO: 42443 - DNA, 861 bp, Neisseria meningitidis
atggcaaaagtaaaaggcggattggggcgcggcttggattcgctgctcgccaacggcgcggacaacagcagcggcgaccgattgaccacggttgcggttaaagatatccggcccggccgctatcaggcgcgtgttcaaatcgatgacgaagccttgcaggaactggcagattcgattaaggcgcaaggcgtgatacagcccgtcatcgtgcgcgaacacggactgtcccgatacgaactgattgcaggcgaacgccgttggcgcgccgcacagattgccggcctgaccgaaatccccgccgttatcaaaaccatcagcgacgaaaccgcattggcaatgggtttgatcgaaaacctccagcgcgaaaacctcaaccccatcgaagaagcacaaggcttgaaacgccttgccgacgagttcgggctgacccacgaaaccatcgcccaagccgtcggtaaaagccgaagcgcgatttccaacagcctgcgccttttaagcctgcccgaacccgtgcaggaaatgctttaccaacgccgcctcgaaatggggcacgcccgcgcattgctgaccctgcccgtcgtcgaacagctcgaattggcgcaaaaggccgtcaaaaacggctggtcggtgcgcgaagtcgaacgccgcagccaggccgcccttcaaaacaaacgtcccgagcccaaaaagactgccgccgccgacatcggccgcctgaatgatttgctgactgaaaaactgggtgtcaacgctgaagtcaaaaccgccaaccacaaaaaaggcaggattgtcctgtatttcgatacgcctgaaacgttcggccacctgctggagcagttgggcatagattaccggccttaa

SEQ ID NO: 42444 - DNA, 279 bp, Neisseria meningitidis; identical to SEQ ID NO: 36778

SEQ ID NO: 42445 - DNA, 915 bp, Neisseria meningitidis
atgcagaattttggcaaagtggccgtattgatgggcggtttttccagcgaacgagaaatctcgctggacagcggcaccgccattttgaatgctttaaaaagcaaaggcatagacgcatacgccttcgatcctaaagaaaccccattgtctgaattgaaggcacaaggttttcagacggcattcaacatccttcacggtacttacggcgaagacggggcggttcagggtgcattggaactgttgggcattccctataccggcagcggtgtcgccgcatccgccatcggcatggacaaataccgctgcaaactgatttggcaggcattgggattgcccgttcccgagttcgccgtcctgcacgacgacactgatttcgatgccgtcgaagaaaaattgggcctgccgatgtttgtgaaaccggcggccgaaggcagcagcgtaggcgtggtaaaagtcaaaggaaaaggccgtctgaaaagcgtttacgaagaattgaaacaccttcagggcgaaatcattgccgaacgttttatcggcggcggcgaatattcctgccccgtcctgaacggcaaagggctgcccggcatacacatcattcccgcaaccgagttttacgactacgaagccaagtacaaccgcgacgacaccatttatcaatgtccttcggaagatttgaccgaagccgaagaaagcctgatgcgcgaactggcggttcgcggcgcgcaggcaatcggtgcggaaggctgcgtgcgcgtcgatttcctcaaagataccgacggcaaactctatctgttggaaatcaacaccctgcccggtatgacgagccatagtttagtaccgaaatccgctgccgttacgggcgtgggttttgccgatttatgtattgaaattttgaagaccgcacatgtgggataa

SEQ ID NO: 42446 - DNA, 1356 bp, Neisseria meningitidis
atgtcggaatatacgcctcaaacagcaaaacaaggtttgcccgcgctggcaaaaagcacgatttggatgctcagtttcggctttctcggcgttcagacggcctttaccctgcaaagctcgcaaatgagccgcatttttcaaacgctaggcgcagacccgcacaatttgggctggtttttcatcctgccgccgctggcggggatgctggtgcagccgattgtcggccattactccgaccgcacttggaagccgcgtttgggcggccgccgtctgccgtatctgctttatggcacgctgattgcggttattgtgatgattttgatgccgaactcgggcagcttcggtttcggctatgcgtcgctggcggctttgtcgttcggcgcgctgatgattgcgctgttagacgtgtcgtcaaatatggcgatgcagccgtttaagatgatggtcggcgacatggtcaacgaggagcagaaaggctacgcctacgggattcaaagtttcttagcaaatacgggcgcggtcgtggcggcgattctgccgtttgtgtttgcgtatatcggtttggcgaacaccgccgagaaaggcgttgtgccgcagaccgtggtcgtggcgttttatgtgggtgcggcgttgctggtgattaccagcgcgttcacgattttcaaagtgaaggaatacgatccggaaacctacgcccgttaccacggcatcgatgtcgccgcgaatcaggaaaaagccaactggatcgaactcttgaaaaccgcgcctaaggcgttttggacggttactttggtgcaattcttctgctggttcgccttccaatatatgtggacttactcggcaggcgcgattgcggaaaacgtctggcacaccaccgatgcgtcttccgtaggttatcaggaggcgggtaactggtacggcgttttggcggcggtgcagtcggttgcggcggtgatttgttcgtttgtattggcgaaagtgccgaataaataccataaggcgggttatttcggctgtttggctttgggcgcgctcggctttttctccgttttcttcatcggcaaccaatacgcgctggtgttgtcttataccttaatcggcatcgcttgggcgggcattatcacttatccgctgacgattgtgaccaacgccttgtcgggcaagcatatgggcacttacttgggcttgtttaacggctctatctgtatgcctcaaatcgtcgcttcgctgttgagtttcgtgcttttccctatgctgggcggcttgcaggccactatgttcttggtagggggcgtcgtcctgctgctgggcgcgttttccgtgttcctgattaaagaaacacacggcggggtttga

SEQ ID NO: 42447 - DNA, 729 bp, Neisseria meningitidis; identical to SEQ ID NO: 40848

SEQ ID NO: 42448 - DNA, 714 bp, Neisseria meningitidis
ttgggcgcgtgcagcacttcctaccgcccctcgcgggcagaaaaagccaatcaggtttccaatatcaaaacccagttggcaatggaatatatgcgcggtcaggactaccgtcaggcgacggcaagtattgaagacgccctgaaatcggaccctaaaaacgagcttgcctggctggtccgtgccgaaatctatcaatacctgaaagttaacgacaaggcgcaggaaagtttccggcaagccctctccatcaaacccgacagtgccgaaatcaacaacaactacggttggttcctatgcggcaggctcaaccgccctgccgaatctatggcatatttcgacaaagctctggccgaccccacctacccgaccccttatattgccaacctgaataaaggcatatgcagcgcaaaacaggggcaattcggattggcggaagcctatttgaaacgttccctcgccgcccagccgcagttcccacccgcatttaaagaactggcgcgcaccaaaatgctggccgggcagttgggcgatgccgattactactttaaaaaataccaaagcagggtagaagtccttcaggccgatgatttgctgctaggctggaaaattgccaaagccctcggcaacgcacaggcggcatacgaatatgaagcacaattgcaggcgaatttcccctactcggaagaattgcaaaccgtcctcaccggtcaataa

SEQ ID NO: 42449 - DNA, 942 bp, Neisseria meningitidis
atggcaatccaatggtttcccggccatatgaacaaggcgaaaaaagccatcgccgagcgtgcaaaaagcgttgatatggtgattgaaatgctggacgcgcgtatgcccgcctccagcgaaaaccccctgcttgcccagctttccaaaggtaaacccaaacttaaaatcctcaacaaacaagatcttgccgaccccgagcgcaccaaaatctggctcgaacactataacagccgccccgacacctgcgccatcgccctcgattcctccgaaacaggcgcacacggcaaaattacccaagcctgtcgtgccatgattccccaccgccaaggcatagataaacccctgcgcgtcctcatctgcggcatccccaacgttggcaagtccaccctcatcaacggcatgataggcaaaaaatccgccaaaaccggcaacgaacccggcatcaccaaagccgaacaacgcctcttcctcgccgatgacttctggctctacgacacccccggaatgctatggccgaaaatcatcgtcgaagaaggcggctacaaccttgccgccggcggcgcagtcggacgcaacgcgttggacgaagaagaagtcgccctcgaacttttagactacctccgccgccactacctccctatgttgcaagaacgctaccaagccgacaaagaccccagcagccactgggacgaaaacgtttggctcgaatggatagccaaaaaacgcggcgcagtcctcagcggcggacggatcaactaccaaaaagccgccgaaaacatcctcaccgacttccgtgaaggcaaaatcggcagaatcaccctcgaaacgccgaaccaatgggaaacttggctcaaaaaagcccgtcagaaagaagccgaactcaaagccatacgcgaagccagaaaagcagagcgtaaagggcagaagccttcggaagcataa

SEQ ID NO: 42450 - DNA, 651 bp, Neisseria meningitidis; identical to SEQ ID NO: 37550

SEQ ID NO: 42451 - DNA, 1296 bp, Neisseria meningitidis
ttgttgacaaaacaaatgtatctatttgtcgcgtgcatgatttttatgtttgtaaatcaatatattgatattattttccgtgttcgggcggcatggaatcgggcggaggacaggtattttccatccttgcacaaagcctgctgcaagcctaaaatcgggcgggttattgttcagaatcaaggctgcatcatgtctctttatccgatttacaatttttccgccggccctgccgtattgcccgaagccgtgttggaaacggcgcggcaggaaatgttggactacaacggtacgggttttcctgtgatggcaatgagccaccgttcggaaatgtttttgagcatcctgcatcatgcggaacaggatttgaggcagcttttgaaagtgcctgacaactataagatattgtttctgcagggcggagcaacaacccaatttaatatggcagccatgaatctggcacacggtttccgcactgccgacgcggtggtaacgggcaactggagccgtatcgcttatgaacagatgagccgtttgaccgatacggaaatccgtttggcggcgcatggcggcgagcagttcgactatctcgacctgccgcctgtggaaacgtgggatgttgcacccgattcggcgtttgtccattttgccgtcaatgaaacggtcaacgggctgcaataccgtgaagtgccgtgcctttcagaaggcatgccgccgctggtgtgcgatatgtccagcgagattttgtcgcgcgagtttgatgttgccgactacggactgatttacgcaggcgcacagaaaaacatcgggccggcaggagttacggtggtgattgtgcgtgaggatttgctcgagcgttgtccgaacgatattcccgatgtgttcaactaccgttcgcacatcaaccgcgacggtatgtacaacacgccgtcaacttacgcgatttatatgtcggggctggtgttccgctggctacaggcgcagggcggtgtgaaaaaaattgaagcggtcaatcggctgaaggcgcaaaccttgtatgagacgatagacggcagcgatggtttttatatcaaccgtatccgtccgaatgcgcgttctaaaatgaatgtcgtgttccaaacgggggatgaggagcttgaccgccgttttgtgctggaagccgaattgcagggcttgtgcctgcttaagggctataaaaccgtcggcggtatgcgtgccagcatttataatgcgatgccgcttgaaggcgtgcgggctttggcagattttatgcgcgatttccaacggcgttacggttga

SEQ ID NO: 42452 - DNA, 780 bp, Neisseria meningitidis
atggcagcctcgcccgaagcaaaattcaccgaagaaaagattttgtgggtcaaacaccacacgccgaaactcatcactttcgccatcagccgtcccgaatcctaccgctttaaagccggacagttctcccgactcggtttctacgaaggggaaggtttcatttggcgtgcctattccattgtttccgcagaatatgccgacacgctcgaatattttgccgtactcatccaagacggccccatgtcggcccgtttcgccaaaatgcaacagggcaacaccatcctgctcgataaaaatgccaccggcttcctcctgcccgaacgcttccccgacggcaaggatttggtgatgctctgcaccggctcgggcatcgcccccttcctttccattctcgaacaacccgaaatccgtcaacgtttcgataccgtcaacctgatacattccgtatcttttcccgaagaattgattttcaacgaccgactcgccgcattgactgaacatcccctggtaggcgaatacggacactctttccgtttcgtccctgttaccacccgtgccgccaacccctcgggcttaagcggaaaacgcattccggaactcttaaaaaacaacagcatcgaacaggcgctgcataccaagttcaccccggaatccacacggtttatgatttgcggcaacccggaaatggtcaaagacactttccaaacgctgctcgacatgggttacgccatgcaccgcaaccgcattcccggtcaaatcatgatggaaaacggcttctaa

SEQ ID NO: 42453 - DNA, 132 bp, Neisseria meningitidis; identical to SEQ ID NO: 38518

SEQ ID NO: 42454 - DNA, 225 bp, Neisseria meningitidis
atgaggctggcaaccaaggatttggcggaagccattaggaaaggacaggttcgcaaatcaagctttaacacagaacaattaagggcaattgaaaaaggagaatctaaaataccggattacacttggcatcatcatcaagatacaggaaggatgcaattgattcgtgaaggcttgcatcatgataccggccatattggttgggaagcaatgaacaaaggaaggtaa

SEQ ID NO: 42455 - DNA, 1392 bp, Neisseria meningitidis
atgcaagtgtttttagacaatcccaaagccttttttgaaaccgtcagcggctgggtttggggacctttgatgctgatgctgctggtcggcacgggtattttgctgactgttttattaaaaggtttgcagttcacgatgttgggttatgcgctgaaacaggcgtttatgccgccaaagaagcataaaagcggcgaaggccacgaaggcgatatttcccattttgcggcgttgatgaccgcgctgtccgccaccatcggcacgggtaacatcgccggcgtggcgactgcggtggtaaccggcggcccgggcgcggtattttggatgtggatgaccgccattttcggcatggccaccaaatacggcgaaggcgtgttggcggtgaaataccgcgtcaacaattccaaaggcgaaatgtccggcggcccgatgtattacatcgaaaaaggcttgggcaaaaactggaaatggatggccgtcgcgtttgcgctgttcggcacattcgcttccttcggtatcggcagctcggtgcagtccaactcggttgcacaggcggtgcaaaccagcttcggtatcgaacctgcctataccggcattacgttgaccgttctgactgccgttgtcgttttaggtggtattaaaggcatcgccaaagccgcttctttcatcgtgcctgctatggcggtgttttatgtgttgggcggtctttccattatcgcgattaattccgatgcactgatgcctgccgtcaagctgattttctccgatgcgttcagcgcgcaggcagtggcgggcggtgctatcggtacggtcatccgctacggcgtggcgcgcggcgtgttctccaatgaggcaggtatgggttctgcgcctattgccgccgcagccgcgaaaaccgaccatcccgtccgtcaggccttggtttctatgaccggtacgtttttggataccatcgtcgtttgctcgattaccggcatcgtgttggtaatgggactgctcggcgcgggcggcgagtttgtcaaacctgaagtgagcggcgcggcactgacaaccgtcacattccaaaaaatgctgcccggcatcggcggctggattgttaccatcggcctgattttctttgcctactcaaccattttgggctggtgctattacggcgaaaaatgcgcggtgtatgttttcggcgagaaatttgccggtttgtaccgcgtgggttatgtttcttccgttatgctgggtaccgtgttgagccttgatttggtgtggctggcttcggacacattcaacggcttgatggcattgcccaacctgattgcacttttattgatggcgaaagtcatcgtcaatgaaacgcgcgacttcaaacaaaaaatcacaaacggcgaattgccgcattaa

SEQ ID NO: 42456 - DNA, 1410 bp, Neisseria meningitidis
atgacctccacattcccccgccgcctcgcccgcaaaatccgccaaacccgccgcctgtcgcgcaaaagcatcgcctttctgttccttttggcaggttcggcactcgtcgccctgaccgcgctgttttttgcccatcttgccgattttgcgctggaactgaacgccaaactggttcaacaatacccgtggttcgcgtgggtcgcgcttcctttgggtttaccgcttattgcgtggctcacacgcaaattcgcccccttcaccgccggcagcggcatcccgcaggtcatcgcctcactgtcgctgccctacggcgcacagaaaacgcggctgatccgcctcgggcagacgctgctgaagattccgctaacctttttgggtatgctgttcggcgcgtccatcggacgcgaaggtccgtccgtgcaggtcggcgcggcagtgatgggcgcgtggggcgcgtggtgcaagaaacacggcttggcattcaaagggatgcaggaaaacgatttgatggcggcgggcgcggcgggcggtttggcagccgcgttcaacgcgccgctggcgggcgtgattttcgccattgaggaactcgggcgcggcatcatgttgcgctgggagaggcaaattcttttgggcgtgctcgcctccggtttcatacaggtcgccattcagggcaacaacccgtatttttccggcttcaacggcggcgtattggaacatatctttctgtgggtcgcactgtccggcctggtttgcggcgcggcgggcgggctgttcggacgtttgctctatcgcggtgcggcggcgtttgcaccgcgcaagatacgcggcttcatccgcaaccgtccgctgctgctggcggcactgatggggctgctgctcgccctgctcggcacgttctaccaaggcaaaacctacggcaccggctaccacgaagccgcccaagccctgcacggcatctacgaagcccccttcggactcgccgccgccaaatggctcgccaccgtattcagctattgggcaggcgttccgggcggcattttcactccctcgctgaccataggcgcggttttgggcgagcatatcgccgccatcgccgacatatcgcagggtgcaaacatcatcgtcctcatctgcatggcggcatttctggcgggcgcgacacaatccccgattacttccgccgtcgtcgtcatggaaatgacgggcggacaaagcctgctgttttggatgctaattgcctgcattttcgcctcgcaggtttcgcgccagttttcgccgcgtccgttctaccacgcatcgggaatgcgcttccgccagcgcgtgcttcaagaaaccgccgcccaaaccggcaatgcgcccgcaagaccgcaaacagcaaacagcaaaacgggaatgccgtctgaaaattaa

SEQ ID NO: 42457 - DNA, 675 bp, Neisseria meningitidis
gtgcaggcggatttagcttatgccgccgaacgcattacccacgattatccgcaagcaaccggtgcaaacaacacaagcacggtaagcgattatttcagaaacatccgtgcgcattccatccacccccgggtgtcggtcggctatgatttcggcggctggagaatagcggcagattatgccagttacagaaaatggaaagaaagtaattcttctactaaaaaagttactgaagagataaacaacaactacaaagaaacccaaacaaaacatcagggaaacggcagcttccacgccgtttcttctctcggcttgtccgccatttacgatttcaaactcaacgataaattcaaaccctatatcggcgcgcgcgtcgcctacggacacgttaaacatcaagttcattcggtggaaacaaaaaccacgactattacctctaaaccaaagaacggctctccacagggaggccctattatacaaactgatcccagcaaacctccctatcacgaaagccacagcatcagcagcgtgggtcttggtgtcatcgccggtgtcggtttcgacatcacgcccaagctgaccttggacaccggataccgttaccacaactggggacgcttggaaaacacccgcttcaaaacccacgaagtctcattgggcatgcgctaccgcttctga

SEQ ID NO: 42458 - DNA, 1176 bp, Neisseria meningitidis
gtgtctaaagtgaaattttatattcgtcacgcagtattattattgtgtggaagtttaattgtaggatgctctgcgattccttcatcaggccccagcgcaaaaaaaattgtctctttagggcaacaatctgaagttcaaattcctgaagtggagctgattgatgtgaatcatacggttgctcagttattatataaggctcagataaatcagtcattcactcagtttggcgatggttatgcttcggctggtacgctaaatattggtgatgtattggatattatgatttgggaagcgccgccggcagtattgtttggtggtggcctttcttcgatgggctcgggtagtgcgcatcaaactaagttgccagagcagttggtcacggcacgtggtacggtttctgtgccgtttgttggcgatatttcggtggtcggtaaaacgcctggtcaggttcaggaaattattaaaggccgcctgaaaaaaatggccaatcagccacaagtgatggtgcgtttggtgcagaataatgcggcgaatgtgtcggtgattcgtgctgggaatagtgtgcgtatgccgctgacggcagccggtgagcgtgtgttggatgcggtggctgcggtaggtggttcaacggcaaatgtgcaggatacgaatgtgcagctgacacgtggcaatgtagtacgaactgttgccttggaagatttagttgcaaatccgcgacaaaatattttgctgcgtcgcggtgatgtggttaccatgattaccaatccctatacctttacgtctatgggtgcagtggggagaacacaagaaatcggtttttcagccagaggcttatcgctttctgaagccattggccgtatgggcggtttgcaagatcgccgttctgatgcgcgtggtgtgtttgtgttccgctatacgccattggtggaattgccggcagaacgtcaggataaatggattgctcaaggttatggcagtgaggcagagattccaacggtatatcgtgtgaatatggctgatgcgcattcgctattttctatgcagcgctttcctgtgaagaataaagatgtattgtatgtgtcgaatgcgccgttggctgaagtgcagaaattcttgtcgtttgtgttctcgccggttaccagtggcgcgaacagtattaataatttaactaattaa

SEQ ID NO: 42459 - DNA, 1389 bp, Neisseria meningitidis
atgagcacccgtaccgaacacgacacgatgggcaatgtcgaagtcccatccgaagcctattggggcgcgcagacccagcgcagccgcaacaatttcaaaatcggtggcgaaaccctgccgcagccgttgatttatgctttggcattggtgaaaaaagccgccgctgccaccaatgtttccctcggtaggattaagcctgaacaggcggatttgattacgcaggcggcggatgatgtgttgagcggcaagctcgacgggcagttcccattggtagtgtggcagaccggttccggcacgcagtccaatatgaacatgaacgaagtgctggcaaaccgcgccaacgaaatcgccggtacgggtttggcggcttatcagcccgtccatcccaacgaccatgtgaaccacgcgcaatcgaccaacgacgcattcccgaccgctatccacgttgccgccgcgattgaaatcaaccgccacctcatccccgccgtaaaagccctgcgcgacacgttggacaaaaaagcccaagctttcgcccctatcgtcaaaatcggccgcacccacttgcaagacgcgacgccgctgactttgggacaggaattttccggctacgtttcccagcttgatcacggtttaggccgtctgaacgatgcgcttaaagacttgtatgaacttgctttgggcggtacggcggtcggcacgggtttgaacagccatcccgaatacgccgaaaaagccgccgccaaactcgccgaattgtccggcttgccgtttgtcagcgcgccgaacaaatttgaagccctgggcggacgcgatgccgccgttgccgcttcgggcgcattgaaaacgctggcggcaagcctgaacaaaattgccaacgacatccgttggctggcaagcggcccgcgttgcggtttgggcgaaatcaaaatccccgaaaacgagccgggttcgtccattatgccgggcaaagtcaacccgacccaatgcgaagcaatgacgatggtgtgctgccaagtgttcggcaacgacgttaccatcggtatggcgggcgcgtcgggcaatttcgagctgaacgtctatatgcccgttatcgcctacaacctcttgcaatccatccacctgttgggcgacgcgtgcaacagcttcaacgaacactgcgccatcggcatcgaacccgtgccggaaaaaatcgactatttcctgcaccattccctgatgctggttaccgcattaaaccgtaaaatcggttacgaaaacgccgccaaagtcgccaaaaccgcctacaaaaacaacaaatcgttgcgcgaaaccgccgttgagttgggcttgctgacgggcgaagaatttgacgaactggtcgttcctgccgatatggttcatccgcgctaa

SEQ ID NO: 42460 - DNA, 225 bp, Neisseria meningitidis; identical to SEQ ID NO: 36979

SEQ ID NO: 42461 - DNA, 807 bp, Neisseria meningitidis
atgaaaagctcttttgtgcaaacgcttaccatcgccggttcggattcgggcggcggtgcgggcattcaggcggatttgaaaacatttcagatgcgcggcgtgttcggaacgtgcgtcatcaccgccgttaccgcgcaaaataccttgggcgtgtcggcggttcatctcgtcccgaccgaaaccatcaccgcacaaatccaagcaatcagggaagacttcgacatccgcgcctacaaaatcggtatgctcggcacggcggaaatcatcgaatgcgttgccgacaagctgaaacactgcagctttggcaggcgcgtactcgaccctgtgatgattgccaaaggcggtgcgccgctgttgcaggattccgccgttgcggcactgacgcgcctgctgcttcccgatacggatgtattgacccccaacctgcccgaagcggaagctctgaccggcgtgcatattgaaaaccgtaaagatgcggaacgtgcggcaaaaatcctgcttgattacggtgtcaaaaatgtcgttatcaaaggcggacatttgaacggcagcacaagcggacgctgcacggattggctgtttacacaaaatgaaacgctggaattcgacagcccgcgctttccgaccgcccacacgcacggcacgggctgcacgttttccgcctgcatcaccgccgagttggcaaaaggctcggacgtttgcgaagccgtacagactgccaaggcctacatcacggcggcaatctcaaaccctttggaaatcggcgcaggacacggcccggtcaatcattgggcgtatcgggactaa

SEQ ID NO: 42462 - DNA, 837 bp, Neisseria meningitidis
atgttagcgctcaaaacgcccggcgtactgcccggcttcaaactcagccttggtctgaccgtattgtgcctgtcgctgcttgtggtcttgccgtttgcgatgatggcggcgaaggcggcggaaatcggctggggcggcttttggaacacgattgccgagccgaacgtgttggcggcggtatggctgagcttgcggatgtcgttttatgcgatgctgaccaatgtcgtgttcggcacgctggtggcgtgggtattggtgcgttatgaattcccgggcaagggtctggcgaacgcgctggtcgatttgccgtttgcgctgccgacggcggttacgggtatcgcgttggcaaccctgtatgcgcccaacggttggataggccgttttttcgagcctttgggcatcaaaatcgcgtttacacccgtcggcatttggattgcgctggtcgtcgtcagcctgccctttatcgtccgcgccgtgcagccggtattggaagaattgtcgggcgaatatgaggaagcggcggcaactttgggcgcaagccgttggactacgtttcgccgtgtcctcttgcctgaaatcacaccggcactcttgaccggcgcgggaatgatgtttgcgcgggcaacgggggaatacggttcggtgatttttatcgcgggcaacattccgatggtttctgaaatcctgccgctgattattacgggcaagctggaacagttcgacgtgcagggcgcgtcggcggtggcgttgtttatgctgctggtttcgtttgtgattctgtttgcgctgaacgtgatgcagtgggcgttgggcaggcgttcgggcgcgaagggttga

SEQ ID NO: 42463 - DNA, 678 bp, Neisseria meningitidis
atgcaagctgattttaaccgtcccgtcctggccgtcgataccggtacttcccgtttgtcgctcgcgctgcgtgccgacggcgaaacccgtctgttccatcaggaagtcggcagccgccagtccgaactgattctgccggaaatccgcaccctattccgcgatgcaggcattaccgccgccgatttgggtgcggtcgtgtacgcacagggtcccggcgcgtttaccggactgcgtatcggcatcggtgtagctcagggtttggcaacgccgtttgatacccccttaatcggcgtaccctcgctcgatgccgccgcctcgctgccgccgccgcaaagctgcatccttgccgctacggacgctcgtatgggcgaagtgttttatgcatggttcgatacgctgaactgccaccgtttgagcgattatcaggtcgggcgggcggcagacatccggctgccggagggatgcgccttttcagacggcataggcagcgcgttcgcgctggaagaagctccgccgttctcaggcagaccggatatgccgactgccgccgactttctcgcattggcagccaagggcggttatcctgccgtccatgccgcacacgccggtttgctctacgtccgcaacaaaatcgccctgactgccaaagaacaggccgaacggagagcgcgcccgtga

SEQ ID NO: 42464 - DNA, 285 bp, Neisseria meningitidis; identical to SEQ ID NO: 42100

SEQ ID NO: 42465 - DNA, 984 bp, Neisseria meningitidis
atgagtgaaatcaaaaccgacgaccccaaacgcggcatcaaactcagaggcgcggacaaaaccgcgcgcatccccatcaaagtcgtcccccttcaggaaaaactgaaaaagcccgaatggatacgcgccaaactcccatcgcgcaaattctttgaaatcaaagacattttgcgcgaacaaaagatgcacaccgtttgcgaggaagcctcctgccccaacatcggcgaatgcttcagcaaaggcacggcgaccttcatgattatgggtgacatctgcacccgccgctgcccgttctgcgacgtgggacacggtcggcccaatatgctcgaccccgacgaaccgagaaacctcgccgaatccgtcaaagccatgaacctgcgttacgtcgtcatcacctccgtcgaccgcgacgacctgcgcgacggcggcgcacagcatttcgccgactgcatcaaagccatccgcgaaaccagcccgaacaccaaaatcgaaatcctcgtccccgacttccgaggacgcttggacatcgcactcaaaatccttgccgaaaccccgcccgacgtgatgaaccacaacctagaaacccatccgagcctgtacagaaaagcccgtcccggtgccaattatcaacattctttagacttattaaaacgttataaagaaatgatgccgcacatcccgaccaaatccggcatcatggtcggcttgggcgaaacagacgaagacgtgcgtgaaattatgcgcgatatgcgggcgcacaatatcgaaatgattaccatcggacagtacctccagccttcagacggacacctgcccgtcctgcgctacgttacgcccgagcagttcaaaatctttgaaaaagaagcatacgaactgggcttcagcaatgccgccatcggcgcgatggtacgttccagctaccacgccgacgaacaggcggcggaagccttgagggaaagccacggcggttgcgggcatcattaa

SEQ ID NO: 42466 - DNA, 420 bp, Neisseria meningitidis
atgaaaaaaatgttcctttctgccgtattgcttctgtcggctgccgcccaaaccgtgtgggcggatacggtgttttcctgtaaaacggacaacaacaaatacatagaagtccaaaaaatcaaccgcaatctttacgaatattcgttcggcagtgcggcaaaaaaagaaattgccatacgcaacagcaaagctgacctgttggggcgttccgacaggtggcaaggtatgggcagcggtcgttgggcaacgatgaaattccaaaacggcgaatttatgtacaccatatggacaggcttcgattccgtgactcatacggaaagcagcggtgtcgttgtggagcgtaggggcaaggaagtcgcacgggtcggctgtacgccgaaaaccgcgcaggcgaatttcaacgatgacgatttttcctag

SEQ ID NO: 42467 - DNA, 1404 bp, Neisseria meningitidis
atgaacaatcccgacttaccctatcggcaggccttagaatgcctgtctcaaaaacaatataactttaccgaagtccgccgactgctgacagaagcgttctcggcaggtcatcccgccgccgcattcgagttggcaaaacacctgatggacgcggacagcccctaccaagaccgcgaacaaggtatggaaatgctccgcatcgccgctgaacagggacatccctacgcgcgttacaatctggcatatatccaagaattggaaggcgcacccccggaaaccctgataccgctttacagaccgttggcagaagaaggactgcccgaagcgcaagtccgcctgatgtaccttctgtacgcgtcccgacattttgaagaagccttggaatgggcaaaaacaagcgcaaaaaacaacaacccccacgggcaatacctgcttgcccaatactgccggtacggcacaccgccggattttgaaacggcgcacctgctctaccgaaaatcggcggcacaaggcttgccggaggcacattggcagctcgggctgcaatatcgtttcgggcaagggacgaaagtcgacacggcacaggccgtcaatcatttgcgcgccgccgcacaacaaggatacattcctgcctacaccccacttgccgagctcatcctacctacggctcctgatgaagccgttcactggtttcaacaggccgcacaggaaaatgaccccgatgcccatgccgcacttgccgacatctacctgcaaggcaagcatctggaaagaaaccacaaacttgccctgcatcatgccgaagcagccgccgccgaacgccatcccgaaggtttgcggatactgggcgacatctgccgctacggtttgggcatagcccccgatacggaaaaagcccggcattattatcggcaggcagccgaagccggcagcctttccgcctatcagaaactcatatccgacagcgcgttaaaccatcctgaccaatacggcggcattaaagattccgccatcaggcggcaaagggcagaacggctttatcaaaaagcccaagccctgcattacggattacaatgcgcgcccgaatacgcagccgcgctcaaactctacacagaagccgcagaactcggacacagcaaagcccaaaccaatctgggcagcatgtattacttcggacagggtatgaccgccgactacaatgaagcacgcaaatggtttgaaaaagccgccgcgaaaaaagacagtatggcgttctacaacctcgcctgcatccattacagcggacacggcgtcgagccggacaaagaaaaagcctgccgctacctgcaagaagccataaacaacggatacgggcaaaaaagcgtcctgcaagaactgctgcaacaatggcaaaatgccgtctga

SEQ ID NO: 42468 - DNA, 1497 bp, Neisseria meningitidis
gtgcgcaaattttcttttcttccttctgtgctcatgaaagaaacagcttttaaaactgggatgtgtttaggttccaataatttgagcaggctacaaaaagccgcgcaacagatactgatcgtgcgtggctacctcacttcccaagctattatccaaccacagaatatggattcgggaattctgaaattacgggtatcagcaggcgaaataggggatatccgctatgaagaaaaacgggatgggaagtctgccgagggcagtattagtgcattcaataacaaatttcccttatataggaacaaaattctcaatcttcgcgatgtagagcagggcttggaaaacctgcgtcgtttgccgagtgttaaaacagatattcagattataccgtccgaagaagaaggcaaaagcgatttacagatcaaatggcagcagaataaacccatacggttcagtatcggtatagatgatgcgggcggcaaaacgaccggcaaatatcaaggaaatgtcgctttatcgttcgataaccctttgggcttaagcgatttgttttatgtttcatatggacgcggtttggcgcacaaaacggacttgactgatgccaccggtacggaaactgaaagcggatccagaagttacagcgtgcattattcggtgcccgtaaaaaaatggctgttttcttttaatcacaatggacatcgttaccacgaagcaaccgaaggctattccgtcaattacgattacaacggcaaacaatatcagagcagcctggccgccgagcgcatgctttggcgtaacagacttcataaaacttcagtcggaatgaaattatggacacgccaaacctataaatacatcgacgatgccgaaatcgaagtacaacgccgccgctctgcaggctgggaagccgaattgcgccaccgtgcttacctcaaccgttggcagcttgacggcaagttgtcttacaaacgcgggaccggcatgcgccaaagtatgcctgcaccggaagaaaacggcggcgatattcttccaggtacatctcgtatgaaaatcattactgccagtttggacgcagccgccccatttattttaggcaaacagcagtttttctacgcaaccgccattcaagctcaatggaacaaaacgccgttggttgcccaagataaattgtcaatcggcagccgctacaccgttcgcggatttgatggggagcagagtcttttcggagagcgaggtttctactggcagaatactttaacttggtattttcatccgaaccatcagttctatctcggtgcggactatggccgcgtatctggcgaaagtgcacaatatgtatcgggcaagcagctgatgggtgcagtggtcggcttcagaggagggcataaagtaggcggtatgtttgcttatgatctgtttgccggcaagccgcttcataaacccaaaggctttcagacgaccaacaccgtttacggcttcaacttgaattacagtttctaa

SEQ ID NO: 42469 - DNA, 120 bp, Neisseria meningitidis
ttgcctgatgtattgatgctatttgtgctgttcttatatatgttgatgctggttacgtcgcgttttttcggaaaattcaaccggcagggagtcgatacgctgtttcatctctttgcttag

SEQ ID NO: 42470 - DNA, 1239 bp, Neisseria meningitidis; identical to SEQ ID NO: 38584

SEQ ID NO: 42471 - DNA, 432 bp, Neisseria meningitidis
ttggacaaacaaatcgacgaccacacccacacgcattttgacggcaaagcccaagtggcggagcaaatcaaaggcatcggttcgataacgacggctacgctgatggcgatgctacctgaattggggcggctgtcgcacaaacggatagcgggtttggtcggcattgccccgcacccgagggagggcggggaaaccaaattcaaaagccgctgctttggcggaaggtctgcggtgcgtaaggcactgtatatggctaccgtggcagcgacacgttttgaaccgcttattcgggatttctaccaacgcctgccgtccgagggtaagccgtataaggttgccgttacggcatgtatgcgcaaactgctgacgatatcgaatgcccggatgcgtgattattttgccgaaaacgataccgccgaaaacggtatctaa

SEQ ID NO: 42472 - DNA, 504 bp, Neisseria meningitidis
atgcacgcgcttcatttttcggcttcggacaaggccgcgctttatcgggaggtgttgccgcagattgagtctgtggtggctgacgaggcggattgggtggcgaatttggcgaacacggcggcggttttgaaggaggcgttcggttggttttgggtgggtttttatttggtcgatacgcgttcggacgaattggttttggcaccgtttcaggggcctttggcgtgtacgcggattccgttcggtcgcggggtgtgcggtcaggcttgggcgaagggtgaaacggtggttgttaaggatgtcaacgcgcatcccgaccatattgcctgttcgtctttgtcacgttcggagattgtcgtgccgctgttttcagacggccgctgtatcggcgtgttggacgcggacagcgaacatttggcgcagtttgatgagacggatgctttgtatttgggcgaactggcgaagattttggagaagcggtttgaggcttcgcgtcaggcggtttga

SEQ ID NO: 42473 - DNA, 489 bp, Neisseria meningitidis
atgaaaaaaatactcaccgccgccgtcgtcgcactgatcggcatcctccttgccatcgtcctcatccccgacagcaaaaccgcgcccgccttctccctgcccgacctgcacggaaaaaccgtttccaacgccgacctgcaaggcaaagtaaccctgattaatttttggtttccctcctgtccgggttgtgtgagcgaaatgcccaaaatcattaaaacggcaaatgactataaaaacaaaaacttccaagtacttgccgtcgcccagcccatcgatccgatagaaagcgtccgccaatatgtcaaagactacggtttgccgtttaccgtcatgtatgatgcggacaaagctgtcggacaggcgttcggcacacaggtttatccgacttccgtccttatcggcaaaaaaggcgaaatcctcaaaacctacgtcggcgaacccgatttcggcaaactctaccaagaaatcgataccgcgctggcgcaatag

SEQ ID NO: 42474 - DNA, 216 bp, Neisseria meningitidis
atgaccatcacagaagaatactccatcgacatccgagtaacctcagaacaggggaaaaacgactacggctaccccaccgaacgctacggatgcgacatcatcaacacagacggggagctacttgtcggcatagagccagagtacaaaaccccctttgccgccgtcagaaaggcgctcatctgtctgacaaaagacaacctcaaaaacgctgcctga

SEQ ID NO: 42475 - DNA, 1296 bp, Neisseria meningitidis
atgattcgccctgattttcaagaatatctgccttcttattatttcagttcggttaatcctcatactgtttatccgaaacttcaatgccgtctgaaaaccgatacctgtatcatcggcggcggattgggtggtttgtgcactgcattgcccttggcggagcagggacatgaaacggttgtgttggaagccgcgcgtatcggtttcggcgcgtcgggacggagtggcgggcaggttatcagcgattacgcctgcggtatgggggaaattgaaaaacaggtcggcttggagcaggcgcaatggttttggcaacagtctttgcaggcggtcgaactggtggacgaacgcgtccgcaaacatgccgtcgattgtgattggcagcgcggttatgccacggttgccgtccgtccgcagcattgggaagagttgcagcagtggcatgaacacgcccaacggcattacggtgcgagtcattatcaactttgggataaagccgagttgaaacagcagcttgacagcgatatgtaccaaggggcacaattcgaccccttatccggacacctgcatccgctcacttacactttgggcatcgctcgtgccgctgccgaagccggtgcgcagattttcgagcaatccccgatgacgtgcatcgaaccgcatcaaaacggttggctggtttacacgcccgaaggcagcgtcgagtgcaaaaatgtggtctatgctgtcaatacttatgcaggtttgaacccgatattccggcctttggaacgcaaggcgattgctgtcagcacctttattattgcgaccgaacccttgggggcgcgcgcaaaagggcttatccgtaacaatatggcagtatgcgacaaccgccatattttggattattaccgcctcagcgcggacggcagactgcttttcggcggtaaggataacgagtttatcgacaatcctgagcgtatgaccgagcttgtccgccaagatatgcttaaagtttttccgcagcttgccgatgtcaaaatcgaatattcgtggggcggggagtgcgacattaccgccaaccttgtcccgcatttcggacgtttagccccgaatgttttttatgcgcaaggttattccggacacgggatggcgataacaggcattgcaggtctggcggttgccgaagcaattttaggggacgaatgccgtctgaagccgtttgagcggttgcgccagccgaatattatcctgcaaccgtttttgcgcaaactcggttctttcctcggctcgaaatattatcagtggaaagacagccgttaa

SEQ ID NO: 42476 - DNA, 1290 bp, Neisseria meningitidis
atgatgaagtctatcctcaccgtatccggaaatcgtatgcgtaaacccagaatcacctatttggatgtttgggcaaacgatgaaagaatcggtactttggaaaagggggccatgtatcggttcgcatacgacaatcccaattcttcgttgctgggcctgcattatcaagacagaagcaaggtatatatcagcaacaatatgccgcatatctttgcacagtattttccggaaggctttttggatgcacacatcacaagcaaatatgcttttcatgatgcgccttttgaagacaatgagatgctgcgcttggcaattctgtgcagagagactttgggtcggatacatgtgcgctgtaatgacccgctttttaatgaatggattgacgggttggagatgaaaaatccaagaatattgactgaacgggatttgctgggcataaatgcccgacaggtttttcagcaatatatggcagaaatcttccatcacggccgtttcgtcagtgtatccgggatacagcagaagatgtccttagatgccatccgcagaaataccaagcaaactgcctcatatattgccaaaggttttgatgcatccgaatatccttgcttggctgccaatgaatttttatgcatgcagaccatcaaacaagccggcattgccgttgcacagaccagcctgtcggaagattcatcagtcttattggtacgtcggtttgatgtcagtgaacagggttattttttagggatggaagactttaccagtctgcgccagtattcggtagaagataaatataaaggcagttatgcggctattgcacagattatccgacagatatccggcagaccagatgaagatttaatccatttctttaatcagcttgctgccagttgcatattgaaaaacggcgatgcacacctcaaaaatttttcagtactctatcatgacgaatacgatgttcgtcttgcacctgtctatgatgtattggatacatcaatatacagggttggaacacaaggaatttttgatgcttatgacgatacgctggcattaaacctgactaaccacggtaagaaaacatatccttccaagaatacattgttggattttgctgagaaatattgcgatttgggaagagaagatgcatcctttatgatagatacaatcgttcaagctaaagaacaggttcttgttaaatactcggatgtattgcgtgagaatgaatggttggcgcagaagtggcattttatcccggatgaaaatgaagaaggtctaccgtttacattccggtag

SEQ ID NO: 42477 - DNA, 1065 bp, Neisseria meningitidis
atggaaaaagaattcaggatattaaatatcgtatcggccaagatttggggtggaggcgaacaatatgtctatgatgtttcaaaagcattggggcttcggggctgcacaatgtttaccgccgtcaataaaaataatgaattgatgcacaggcgattttccgaagtttcttccgttttcacaacgcgccttcacacgctcaacgggctgttttcgctctacgcacttacccgctttatccggaaaaaccgcatttcccacctgatgatacacaccggcaaaattgccgccttatccatacttttgaaaaaactgaccggggtgcgcctgatatttgtcaaacataatgtcgtcgccaacaaaaccgatttttaccaccgcctgatacagaaaaacacagaccgctttatttgcgtttcccgtctggtttacgatgtgcaaaccgccgacaatccctttaaagaaaaataccggattgttcataacggtatcgataccggccgtttccctccctctcaagaaaaacccgacagccgtttttttaccgtcgcctacgccggcaggatcagtccagaaaaaggattggaaaacctgattgaagcctgtgtgatactgcatcggaaatatcctcaaatcaggctcaaattggcaggggacggacatccggattatatgtgccgcctgaagcgggacgtatctgcttcaggagcagaaccatttgtttcttttgaagggtttaccgaaaaacttgcttcgttttaccgccaaagcgatgtcgtggttttgcccagcctcgtcccggaggcattcggtttgtcattatgcgaggcgatgtactgccgaacggcggtgatttccaatactttgggggcgcaaaaggaaattgtcgaacatcatcaatcggggattctgctggacaggctgacacctgaatctttggcggacgaaatcgaacgcctcgtcttgaaccctgaaacgaaaaacgcactggcaacggcagctcatcaatgcgtcgccgcccgttttaccatcaaccataccgccgacaaattattggatgcaatataa

SEQ ID NO: 42478 - DNA, 492 bp, Neisseria meningitidis
atgaaataccgtcgtttttaccgcaatggcggcacttacttttttacggttgtaaccaataaacggcagaagattttgaccgatgatgcggtgcgtttggctttacggcaggcggtaatggcggtgcgcgaacggtatccgtttgaaattttggcatgggtgttgatgcccgaccatctgcataccatatggcggctgccggacaatgattctgcttattcggaacgctggcggcaaatcaagcggcacagccaatatttaatcggcggcaatctcaggctttggcaaaaacgcttttgggaatatactatccgcgatgaggccgattttgcctggcattttgattatctgcatttcaatccggtcaaacatggctatgtaggacaaatttccgattgggggttttctacgtttcaccgttatgtcaaacagggtatttatccgcataattggggtggcggcaatgcggacttttctattggatacgattga

SEQ ID NO: 42479 - DNA, 309 bp, Neisseria meningitidis
atgaacaaaaacattgctgccgctctcgccggtgctttatccctgtctttggccgccggtgcagttgctgccaacaaaccggcaagcaacgcaacaggcgttcataaatccgcccatggctcttgcggcgcgtccaaatctgccgaaggttcgtgcggcgcggctggttctaaagcaggcgaaggcaaatgcggcgagggcaaatgcggtgcgaccgtaaaaaaaacccacaaacacaccaaagcatctaaagccaaggccaaatctgccgaaggcaaatgcggcgaaggcaaatgcggttctaaataa

SEQ ID NO: 42480 - DNA, 717 bp, Neisseria meningitidis
atgaactttgaaaacgacgacattatccatgcgccgaccacgtcttccctgattctcgaagagcggcacgattcggagctgttccgtgtttacgccctgattttggacggcattaccgatcaggtgctgctgcccggcaaaaagctgaccgaatccgaactttgccgtcagatggtgtgttcgcgcaacaccgtccgcggcgcgctgtcgcttttggcgcacgacaagattgtcgatttgcaacccaacaggggcgcgttcgtccacgttcccgatttgaaagaaatgcaggatgtgttcaatgcgcgcatcgaaatggagacgatgattttgaatatcctcgcagatttgccggatttggaaacgcgcctcaagccgctttatgcgatgatacggcgcgaagaagaggcctccggcaggggcgaccgcgtcggctggaaccgcctgtccaatgccttccacgtcgaactggcgcgcctggtgggcaacgatgtgctgttcgacattatgaatacgctgtgcgcgcggtcttccctgattgtcgccgtggcgggcgtgcatcgcgaggaaaaacacgccatcaatacgcatacgcattccgaacaccgcgaaatcctcgacctgctgctggcgggcaggcgcaaccgcgtggtcaaaatcctgcgccgccatttgggcaactgtatggagcgtttggaaaagactttggaagattga

SEQ ID NO: 42481 - DNA, 624 bp, Neisseria meningitidis; identical to SEQ ID NO: 36421

SEQ ID NO: 42482 - DNA, 1056 bp, Neisseria meningitidis
atgattacattggccgtagatgccatgggcggcgaccaaggacttgccgttaccgtacccggcgcaaccgcattcctccaagcacaccccgatgtccgcctgattatgaccggcgacgaaacgcaactgcgccaagccctgaccgcggcaggcgcaccgatggaacgcatcgacatctgccataccacccaagtcgtcggcatggacgaagccccgcaatccgccctgaaaaacaaaaaagactcctccatgcgcgtcgccatcaaccaggttaaagaaggcaaagcccaagccgccgtatccgcaggcaacacgggtgcgctcatggcaaccgcacgtttcgtcctcaaaaccattcccggcatcgaacgccccgccatcgccaaattccttccttccgacaccgaccacgttacccttgcactcgaccttggcgcgaacgtcgactgcacgcccgaacagctcgcccaatttgccgttatcggcagcgaactcgtccacgcactccatcctcaaaaaggacagccgcgcgtcgggctggtcaacgtcggcacggaagacatcaaaggtacggacaccgtcaaacaaacctacaaactgctgcaaaacagcaaactcaactttatcggcaacatcgaaagcaacggcatcctctacggcgaagcagatgtcgtcgtcgccgacggctttgtcggcaacgtcatgctcaaaaccatcgaaggcgcggtcaaattcatgagcggagccatccgccgcgaattccaaagcaacctgttcaacaaacttgccgccgttgccgccctacccgccctcaaagggctgaaaaacaaactcgacccgcgcaaattcaacggggccatcctgctcgggctgcgcggcatcgtgattaaaagccacggcggcacagacgaaaccggtttccgctatgccctcgaagaagcctaccacgaagccaagtccgccggcctttccaaaatcgaacagggcgtagccgaacaactcgccgcactcgaaactgccaaagccgtccaaaacgaaaatgtcggcggtctgtaa

SEQ ID NO: 42483 - DNA, 570 bp, Neisseria meningitidis
atggtacggcgtttgataatcggcatcagcggggcgagcggtttccaatacggcgtgaaggctttggaacttttgcgcgcgcaagatgtcgaaacgcaccttgtggtatcgaaaggtgcggagatggcgcgcgcttcggaaacggcttatgcgagagacgaggtatatgccttggcggacttcgtgcatccgatcggcaatatcggggcgtgcattgccagcggtacgtttaaaacggatgggatgctggtcgccccctgttcgatgcggacgcttgcctctgtcgcgcacggcttcggcgacaatctgctgacgcgtgcggcggatgtggttttgaaggaaaggcggcggctggtgctgatggtgcgcgaaacgccgctgaaccttgcccatttggacaatatgaagcgggtaacggaaatgggcggcgtggtgtttccccctgttcctgcgatgtaccgcaaaccgcagacggcggacgacatagtggcgcacagtgttgcacacgctttgtcgctgttcggaatcgatacgccggattcggcggaatggcagggaatggcggattaa

SEQ ID NO: 42484 - DNA, 3816 bp, Neisseria meningitidis
atgtattcgaataatgctataactaataatagaaacaatattacactaggtgcgtatagggatgctattatttccatattttctgatgaaaatgtggttagggcgattggtacgattaactcaatgtacgaagaatatttgacccgttcgcacaagatagatcaaaaagaatttttaagggagggtgagcgtctgtctgctaaggcaagagaattccaacgcacagcagaagaggcacaaaaaagcttaaaagaaggaattggaagagctgctagtaaatttcgtggtaattcaaaggaggcatttgttgcaagaaaagtacaaagtgatttgcaaaaagcattgaatgctagcaactataacaagcagcaatatgcaagacgtgcggcaacagcgttagagaatgcttcaaaatcaaaagttatggcagcgaatttgggtaagtttacttatggggcaactgttgccatgggaactttgagtatgggaagtgcttggtggaaagccttggatggagaaggaaattggagtgatgttggtctctcatcagcttcttttttgggtgggctaatgggcgtccaatggggtgcggctttgggtgttggggcttttggtttacttactggtggcgcaggttggctagtagttggagctatacttggaggtggcgcaggagcttggtggggatcattaggagctgaaaaagcttggagatggtttgaggatttcttaaatcttaaccgcagcgacaaataccacgtttacgacccccttgccctagatctagacggtgacggtatagaaaccgttgccaccaaaggctttgcaggtgcattgttcgaccaccgcaatcaaggcatccgcaccgccaccggttgggtttctgccgatgacggtctgcttgtgcgcgatttgaacggcaacggcatcatcgacaacggcgcggaactcttcggcgacaacaccaaactggcagacggttcttttgccaaacacggctatgcagctttggccgaattggattcaaacggcgacaacatcatcaacgcggcagacgccgcattccaaaccctgcgtgtatggcaggatctcaaccaggacggcatttcccaagctaatgaattgcgtacccttgaagaattgggtatccaatctttggatctcgcctataaagatgtaaataaaaatctcggtaacggtaacactttggctcagcaaggcagctacaccaaaacagacggtacaaccgcaaaaatgggggatttacttttagcagccgacaacctgcacagccgcttcaaagacaaagtggaactcactgccgaacaggcaaaagccgccaatcttgcgggcattggtcgtctgcgcgatttgcgcgaagctgccgcattgtccggcgatttggccaatatgctgaaagcttattctgccgccgaaactaaagaagcacagttggcattgttagataatttgattcacaaatgggcggaaaccgattcgaactggggcaaaaaatcgccaatgcgactttcaaccgattggacgcaaacggctaatgaaggtattgcactgacaccatcccaagtagcacaactaaaaaagaacgctttagtttccctttctgataaagctaaagcagctattgacgccgcccgcgaccgcattgccgtgcttgatgcctacacggggcaggattccagcacactctattacatgagcgaggaagacgcgcttaatatcgtcaaagtaaccaacgatacatacgaccatctcgccaaaaacatctaccaaaacctgttattccaaacccgtttgcagccatatttgaatcaaatcagtttcaaaatggaaaatgatacgttcactttggattttagtggtcttgttcaagcatttaaccatgtcaaagaaactaatccgcaaaaagcttttgtggatttggccgagatgcttgcatatggcgaacttcgttcttggtatgaaggccgaagactaatggccgattatgtggaggaggcaaaaaaagcaggtaaatttgaagattaccagaaagtgttgggtcaggagaccgttgcattattagctaaaacatcgggtacgcaagcagatgatatcctgcaaaatgtaggctttggtcataataaaaatgtttctttatatggtaatgacggcaacgacactctaatcggcggtgcaggcaatgattacttggagggcggcagcggttcggatacttatgtcttcggcgaaggcttcggtcaggatacggtctataattacgactacgctaccggacgcaaagacatcatccgctttaccgacggtattacagccgatatgctgacttttacccgagagggcaaccatcttcttatcaaggcaaaagacggcagtggacaagtgactgttcagtcctatttccagaacgatggctcaggtgcttaccgtatcgatgagattcatttcgataacggcaaagtactggatgttgccactgtcaaagaactggtacagcaatccaccgacggttcggacagattgtatgcctaccaatccggaaataccttaaatggcggattgggcgatgactatctgtacggtgccgacggggatgacctgctgaatggtgatgcaggcaacgacagtatctacagtggcaatggcaatgatacgctcaatggaggagaaggcaacgacgccctgtacggctataatggtaacgatgcactgaatggtggcgaaggcaatgatcatttgaacggcgaagacggtaacgacactctgatcggcggtgcaggcaatgattacttggagggcggcagcggttcggatacttatgtcttcggcaaaggcttcggtcaggatacggtctataattacgactacgctaccggacgcaaagacatcatccgctttaccgacggtattacagccgatatgctgacttttacccgagagggcaaccatcttcttatcaaggcaaaagacgacagtggacaagtgactgttcagtcctatttccagaacgatggctcaggtgcttaccgtatcgatgagattcatttcgataacggcaaagtactggatgttgccactgtcaaagaactggtacagcaatccaccgacggttcggacagattgtatgcctaccaatccggaaataccttaaatggcggattgggcgatgactatctgtacggtgccgacggggatgacctgctgaatggtgatgcaggcaacgacagtatctacagtggcaatggcaatgatacgctcgatggaggagaaggcaacgacgccctgtacggctataatggtaacgatgcactgaatggtggcgaaggcaatgatcatttgaacggcgaagacggtaacgacactctgatcggcggtgcaggcaatgattacttggagggcggcagcggttcggatacttatgtcttcggcgaaggcttcggtcaggatacggtctataattaccatgtggataaaaactctgacactatgcactttaaaggatttaaagcagcagatgttcattttatccgttccggaagtgatttggtgcttagcgcttctgaacaagacaacgtacgtatttccggatttttctatggtgaaaaccatcgtgtagatacatttgtctttgatgatgcagctatcagtaatccagattttgccaagtatattaatgctggcaataatttggtacagtctatgtctgtgttcggttctaatactgctgcgacaggaggaaatgtggatgccaatatacaatccgtacagcagccgttattggtaacgccatctgcataa

SEQ ID NO: 42485 - DNA, 549 bp, Neisseria meningitidis
ttgaatttaacggagggcgacaccgtgttggacagggaaggctatcgccccaatgtcggtatcatcttaatcaacaaccgcaacgaagtcttttggggtaagcgcgtgcgcgaacattcttggcagtttccgcaaggcggcatcaagccgggcgaaagccccgaaaccgccatgtaccgcgagttgtacgaagaagtcgggcttttgccgcaacacgtcaaaattatcggccgcacgcgcgactggctgcgttatgacgtgccgaacaactgggtacgccgcgaatggcgcggctcttatcgcggacagaagcagatttggtatctcctgcgcctgaccggccgagattgcgatgtcaacctgcgcgccacccgccaccccgaatttgacggctggcgttggcatcaatattgggcacccgttgacgaagtgattgatttcaaacgcgacgtttatttgggggcgttgaaagaactctcttcccgcttcctgcgcggtatggaaagttatgaagactttgccgcccgccaatcttccgacaaccgctaa

SEQ ID NO: 42486 - DNA, 2046 bp, Neisseria meningitidis
ttgcccgcgcctgaacccgtccccgcattcctgcggggattttcttttttgccgcacgccgtttcaatcccgcaaaattccgatacttggtataaaataccctcttttcccactctaaaaaaccgtacccgataccgtctgaaacagccctgtctttcagacggtataggcacaaggaaacacactatgcctgaataccgctccaaaacctccacccacggccgcaatatggcgggcgcacgtgcattgtggcgcgccaccggcgtgatggaaaccgacttcggcaagcccatcatcgccgttgccaactccttcacccaattcgtgcccggccatgtccacctgcacaatatgggccagctggttgcccgcgaaatcgaaaaagccggcgcaatcgccaaagaattcaacaccatcgccatcgacgacggcatcgctatgggacacagcggcatgctgtactccctgcccagccgcgatttgattgccgactctatcgaatatatggtcaacgcccactgcgccgacgcgctggtgtgcatttccaactgcgacaaaatcaccccgggcatgctgattgccgcgatgcgcctgaacatccccaccatcttcgtctccggcggcccgatggaagcgggcaaggttatcggcgtggcaaacatccagcccgaacgccgtttggacttgattgacgcgatgattgaatcggcggacgacaatgtcagcaaccggcaagtcgaggaagtcgaacaaaacgcctgcccgacctgcggctcgtgttcgggtatgtttacggcaaactcgatgaactgcctgaccgaagcactcggcctttccctgcccggcaacggttcgtatttggcgacccacgccggccgcaaagaattgttcctcgaagccggccgtatgattgtcgaaatcaccaaacgctattacgagcaaaacgatgaaaccgtgttaccgcgcagcattgccaccaaaaaagcgtttgaaaacgctatgacgatggatattgcgatgggcggcagcaccaataccattttgcacctgttggccgttgccaacgaagccggtgtcgatttcaaaatggcagacatcgaccgcttaagccgcgtcgtgccctgcatctgcaaaaccgcacccaacaaccacgactactatatggaagacgtgcatcgcgccggcggtatcttcgccatcctgaaagaactggacaaagcgggcaaactgcacaccgacgtgcacaccatccacgcgccgacgctgaaagacgcgattgaacaatgggacgtgaccaatcccgaaaacacccgtgccatcgaacgcttcaaagccgcgccgggcggcgtacgcaccacccaagcgttctcgcaaaaccgtatgtggaaaaccctcgacctcgaccgcgaaaaaggctgtatccgcgacgtggcacacgcctactcgcaagacggcggtttggcggtcttgttcggcaacatcgccgagcgcggctgcgtggtaaaaaccgcaggcgtggacgagagcatcctcaaattcaccggccgcgcccgcgtgtttgaaagccaagaagacgcagtagaaggcattttgggcaaccaaatcgtcgctggcgacatcgtcatcatccgctacgaaggcccgaaaggcggcccgggcatgcaggaaatgctgtatccgacttcctacctgaaatctaaaggcctcggcaaagcctgcgctctcttaaccgacggacgcttctccggcggcacatcaggtttgtccatcggacacgcctcgcccgaagcggcggaaggtggcgcgatcggtttggtacacgaaggcgataccgtcgaaatcgacatccccaaccgcagcatccaccttgccatttccgatgaagagcttgccgcacgccgtgccgaaatggaagcgcgcggcagcaaagcatggaagcctaaaaaccgcgaccgctacgtctccgccgcattaagagcttacggcgcgatggcgacttccgccgacaaaggcgcggtgcgcgacgtagcgcaaatcgaaagataa

SEQ ID NO: 42487 - DNA, 306 bp, Neisseria meningitidis
atgcgcgtatctaaaataattggaagtatgttgcttgttacagcggttcagaccgtattttcggcaaatgtttacgcgtgccgccataatggtaaaaccagttacagccaaactccgggaaaacattgtaccaacgcgggtttggggcgggaccgggtgtacagttcggttagaccggcagtaaaagacagggcggaagacgcaggggtcggcgattattcggacacggtgagggacgaacacgtccaaaatccgaaaggaaatgcacagaaagacggttcggctgccggcatcaagccgcactga

SEQ ID NO: 42488 - DNA, 126 bp, Neisseria meningitidis
ttgcgaaaatacaacggaatcgattgcaaatctttcccgctgttcttgaaagaatgcgaatttcgatttaacttcggcacaccgtctcaacagcttaaaatcctgcgggattggtgtgggatttag

SEQ ID NO: 42489 - DNA, 1392 bp, Neisseria meningitidis
atgagcggtcagttgggcaaaggtgcggatgcgcctgatttggtgtacggtttggaagacaggccgccgttcggtaatgcgctcttgagcgcggttacccatcttttggcgatttttgtgccgatgattacgcccgcgctgattgtgggcggcgcgctggaattgccggtggagatgacggcgtatctcgtgtcgatggcgatggttgcgtcgggtgtcggcacttatttgcaggtcaaccgcttcgggccggtcggttcggggatgctgtccatccagtcggtgaatttttcgttcgttaccgtgatgattgcgctgggcgcggggatgaaagagggcggtttgactaaggatgcgatgatttcgacgctcttgggcgtatcgtttgtcggcgcgtttttggtgtgtttctcggcgtggcttctgccgtatttgaaaaaagtgattacgccgacggtcagcggcgtggtcgtgatgctcattggtttgagtttggtacacgtcggcattaccgatttcggcggcggcttcggcgcgaaggcggacggcacgttcggctcgatggaaaacttggggctggcatcgctggtgttgctgattgtgttggtgttcaactgcatgaaaaacccgctgttgcgcatgagcggcattgcggtcgggctgattgccggctatatcgtcgcgctgtttttgggcaaggtggatttttccgcgctgcaaaacctgccgctggttacgctgcccgtaccgtttaaatacggttttgctttcgactggcacgcgtttattgtggcgggcgcgattttcttgttgagcgtgtttgaggcggtcggcgatttaaccgcgacggcaatggtgtccgaccagccgattgaaggcgaggaatacaccaaacgcctgcgcggcggcgtgttggctgacggcttggtgtcggtgattgcgacggctttgggttcgctgccgctgacgacgtttgcgcaaaacaacggcgtgattcagatgaccggcgtggcttcgcgccatgtgggcaaatatattgccgtgattttggtgctgttgggtctgttccccgttgtcggtcgcgcgtttacgacgattccgagtccggtgttgggcggcgcgatggttttgatgttcggcttaattgcgattgcgggcgtgcggattttggtcagtcacggcatccgcaggcgcgaagcggtgattgcggcaacgtcggtcggtttgggcttgggtgtcgcgtttgagccggaagtgtttaaaaacctgcccgtcttgttccaaaactctatttccgccggcggcattacggcagtcttgctgaatttggtcttgcccgaagataaaaccgaggcggcggtcaagtttgataccgaccacttggaacactga

SEQ ID NO: 42490 - DNA, 195 bp, Neisseria meningitidis
atgaacatcatcttaaacggcggacccgccgaacttcacggcacgaccgttgccgacctcatcgcccaaaccgcgccgcaaaagccctttgccgtggcggtcaacaccgttttcgtccccaaaggcgcgtatgcggaaacggttttaaacgaaaacgacaaaatcgatatcgtgcggccggtggtcggcggctag

SEQ ID NO: 42491 - DNA, 657 bp, Neisseria meningitidis
atgaacagacaaaaagtcatcgccatcgacggcccgggcgcatcgggcaaaggcacggttgccgcccgcgttgccgccgcattgggatacgattatctcgataccggcgcactctaccgcctgactgccctatatgcacaaaaacaaggcgtgggatggcacgatgaagaaaacgtttccgaactggcaaaaaaactgcccgccgtattttcaggcagccgcatcctgctcggcggcgaagacgtttcagacggcatccggacagaagccatcggcatgggcgcatccgcagtcgcacagttgcctaaagtccgcgccgccctgctgcaacgccaacgcgattttctgaccgaaaaaggactggttgccgacggacgggacaccggatcggtcgtcttcccccaagccgaacttaaaatcttcctgacggcagaatccaaaatccgtgccgaacgccgcgccaaacaaatcggcatcccctgcgaaggtttggcattcgagcgcatcctgtccgacatcgaagccagagacgaggcagaccgaaaccgcaaagttgcccccctgaaacaacagcccgatgccctgcttttggacacaagccgcctgactatagaagaaactgtaaaaaaagtgcttgattggtatcgtgaagtttaa

SEQ ID NO: 42492 - DNA, 1959 bp, Neisseria meningitidis
atgtccgaacgacggcagccccatatttacgctataatccatcccgaccaaaccaccgacagcggctgccgttgcagttcccgccctaccgatatgatagaaaaactgactttcggactgtttaaaaaagaagacgcgcgcagctttatgcgcctgatggcgtacgtccgcccctacaaaatccgcatcgttgccgccctgattgccattttcggcgttgccgccaccgaaagctaccttgccgccttcatcgcccccctgattaaccacggcttttccgcacctgccgcgccgcccgagctgtctgccgccgccggcatcatttccaccctgcaaaactggcgcgaacagtttacctatatggtttgggggacggaaaacaaaatctggaccgtcccgctcttcctcatcatcctcgtcgtcatccgtggcatctgccgctttaccagcacctatctgatgacttgggtctccgtgatgaccatcagcaaaatccgcaaagatatgtttgccaaaatgctgaccctttcctcccgctaccatcaggaaacgccgtccggcaccgtactgatgaatatgctcaacctgaccgaacagtcggtcagcaacgccagcgacatcttcaccgtcctcacgcgcgacacgatgatcgttaccggcctgaccatcgtcctgctttacctcaactggcagctcagcctcatcgtcgtcctgatgttccccctgctctccctgctctcgcgctactaccgcgaccgtctgaaacacgtcatttccgactcgcaaaaaagcataggcacgatgaacaacgtgattgccgaaacccatcagggacaccgcgtcgtcaagctgttcaacgggcaggcgcaggcggcaaaccggttcgacgcggtcaaccgcaccatcgtccgcctcagcaaaaaaatcacgcaggcaacggcggcacattccccgttcagcgaactgatcgcctcgatcgccctcgccgtcgtcatcttcatcgccctgtggcaaagccaaaacggctacaccaccatcggcgaatttatggcattcatcgtcgcgatgctgcaaatgtacgcccccatcaaaagccttgccaacatcagcatccctatgcagacgatgttcctcgccgccgacggtgtatgtgcatttctcgacaccccgcccgaacaggacaagggcacgctcgcaccgcagcgtgtcgaagggcgcatcagcttccgcaacgtcgatgtcgaataccgttcagacggcatcaaagccctcgacaacttcaacctcgacatcagacaaggcgaacgcgtcgccctggtcggacgttccggcagcggcaaatccaccgtcgtcaacctgctgccccgctttgtcgaaccgtctgccggcaacatctgcatagacggtatcgacatcgccgacatcaaactcgactgcctgcgcgcccaattcgccctcgtctcccaagacgtattcctgtttgacgacaccctgtttgaaaacgtccgatacagccgtcccgacgcgggcgaagccgaagtcctgttcgccctccaaaccgccaacctgcaaagcctgattgacagctccccgctcggactgcaccagcccatcggatcgaacggcagcaacttatccggcggacagcggcaacgcgtcgccattgcccgcgccattttgaaagacgcgccgatattattattggacgaagccaccagcgcattagacaacgaatccgaacgcctcgtccaacaggcgctcgaacgcctgatggaaaaccgcaccggcatcatcgtcgcccaccgcctgaccaccatcgaaggggccgaccgcatcatcgtgatggacgacggcaaaatcatcgaacaaggcacacacgaacaactgatgtcccaaaacggttactacacgatgttacgcaatatctcaaacaaagatgccgccgtccggacggcataa

SEQ ID NO: 42493 - DNA, 1116 bp, Neisseria meningitidis
atgcttaaatttaccttacacaaaaaagacggtctcgcccgacgcggcacgctggagttgaaccacggcaaaattgaaacgccggtatttatgcctgtcggtacttacggttcggttaaggcgatgaacccgcaaaacctgcacgatatcaaggcacaaattattttgggcaacacttatcatttgtggctgcgtccgggtttggaagttatcgggcaattcggcggcctgcacggttttatcggctgggacaaaccgattctgaccgactcgggcggttttcaggttttttctttgtcggatatgcgcaagctgacggaagaaggctgtacgttcaaaagcccgattaacggcgacaagctgtttttatcgcctgaaatttccatgaaaatccaaacggttttgaactcggatatcgcgatgcagttggacgaatgcacgccgggcgaggcgacgcgcgaacaggcgcgaaaatcgctgcaaatgagcctgcgctgggcggaacggagcaaaaaagcctttgaagatttgaaaaacccgaacgcgctgttcggcatcgtgcaaggcgcgatgtatgaggatttgcgcgaagaatcgctgcgcggtttggaacagtttgattttcccggccttgccgtcggcggtttgtccgtcggcgaacccaagcccgaaatgtaccgtatgctgcgcgccgtcggtccgattctgccggaacacaagccgcattacctgatgggcgtaggcacgccggaagacctcgtgtacggcgtggcacacggcatcgatatgttcgactgcgtgatgcccacccgcaatgcacgcaacggctggctgtttacccgtttcggcgatttgaaaatcaaaaacgccaaacacaagctcgacaagcgtccgatagacgaaagctgcacctgctacgcctgccaaaacttcagccgcgcctacctgcaccatctgcaccgcaccggcgaaatcttgggcgcacagttgaacaccatccacaatctgcatttctaccaagtcattatggcggaaatgcgcgaagccgtcgaacaaggcaaatttgccgactggcaggcgcgattccacgaaaaccgcgcacgcggcacagactga

SEQ ID NO: 42494 - DNA, 729 bp, Neisseria meningitidis
atgtctcaaattactatgcgtcagatgattgaagccggtgttcacttcggccaccaaacccgtttctggaacccgaaaatggcacaatacattttcggtgcgcgcaacaaaatccatatcgtcaacctggaaaaaaccctgccgatgttccaagacgcgcaagaagccgtacgtcgtctggttgccaacaaaggtacagtattgttcgtaggtaccaaacgccaagcccgcgacatcatccgcgaagaagcgacccgcgccggtatgcctttcgtcgattaccgctggttgggcggtatgctgaccaactacaaaaccgttaagcaatccatcaaacgcctggaagaaaaaaccgcagccttggaaaatgctgccgaaagcggtttcagcaaaaaagaaattctggaaatgcaacgcgatgttgaaaaactggaacgttctttgggcggtatcaaaaacatgaaaggcctgcctgacgcgattttcgttatcgataccggctaccaaaaaggtactctggttgaagctgaaaaattgggcatccctgttatcgccgtagtcgataccaacaacagccccgacggcgtgaaatacgttatccccggcaacgacgactccgccaaagccatccgcctgtactgccgcggcatcgctgacgcagttttggaaggcaaaaaccaagcgctgcaagaaaccgtagccgctgcccaagaagccgctgccgagtaa

SEQ ID NO: 42495 - DNA, 330 bp, Neisseria meningitidis
atgggcggcctgattattgaagacttgcaagaaggcttcggaaaagaagcagttaaaggcaaagagattaccgtgcattacacaggttggctggaaaacggaaccaaattcgactccagcctcgaccgccgccagccgctgaccatcacgctcggtgtcggacaagtcatcaaaggctgggacgaaggcttcggcggcatgaaggaaggcggcaaacgcaagctgaccatcccttcggaaatgggctacggcgcacacggcgcgggcggcgtgattcccccgcacgccactttgatatttgaagtcgagctgctgaaagtgtacgaataa

SEQ ID NO: 42496 - DNA, 2016 bp, Neisseria meningitidis
atgatgaaactcaatccccaacagctcgaagccgtccgctacctcggcggcccactgctcgtccttgccggtgcaggcagcggcaaaaccggcgtgattactcaaaaaattaagcatttgattgtcaatgtcggctacctgccgcataccgttgccgcaattacctttaccaacaaagccgctgcggaaatgcaggagcgcgttgccaaaatgctgcccaaaccgcaaacgcgcgggctgacgatttgcacgttccactctttgggcatgaagattctgcgcgaagaggcgaaccatattggttacaaaaaaaacttctccattctcgattctaccgacagcgcgaaaatcatcggcgaactcttaggcggtacgggcaaagaagccgtattcaaggcgcagcaccagatttccttgtggaaaaacgatttaaaaacgcctgaagatgtcgttcagacggcatcgaacatttgggaacaacaaaccgcacgcgtgtatgcgagctatcaggaaaccttacaaagctatcaggcagtggacttcgacgacttaatccgcctgcctgccgtgctgttgcagcaaaacagcgaagtgcgcaacaaatggcagcggcggctgcgttatctgttggttgacgaatgccaagatacgaatacctgccaatttacgttgatgaagctgctgaccggcgcggaaggtatgtttaccgccgtcggcgacgacgaccagtccatctacgcatggcgcggtgcgaacatggaaaacctgcgtaaaatgcaggaaaactatccgcagatgaaggtcatcaaactggagcaaaactaccgctccaccgcgcggattctcaaaatcgccaacaaagtcatcgaaaacaaccccaagctgtttaccaaaaaactttggtcgcaattgggcgaaggcgagccggtcaaagtcgttgcctgccaaaacgagcaacacgaagccgactgggtcgtcagccaaatcgtcaaacaaaaactcatcggcggcgacaaaacccaatatgccgatttcgccgtgttataccggggaaagcatcaggcgaggattttcgaggaagcattgcgcggcgcgcgcatcccctaccagctctccggcggacaaagctttttcgacaaagccgaaatcaaagacgtgttgtcttatgtgcggctgcttgccaaccccaacgacgatcccgcctttctgcgtgccgttaccacgcccaaacgcggcatcggcgatgtcacgctgggcaagctcaacacttacgcgcacgaacacgaatgcagcctgtatgaagccgcgcaaaacgaagaagcccttgccacgctgaacaataccaaccgccaacacctgcaaacctttatggatatgttcgtcagctacctcgccaaagccgaaaccagcgaagcgggcgagttcatcaacagcctgctcgaagaaatcgactatgaaaaccatttgatgcaaaacgaagaaggcaaagccggcgaaatcaaatggcgcaacgtcggcgatttggtatcatggtttgcgcgaaaaggcggggaagacggcaaaaacatcatcgaactcgcccaaaccgtcgccttgatgacgcttttggaaggaaaagacgaagaagaaaccgatgccgtctcgctatccacgctacacgccgccaaaggtttggagtatccgtatgttttccttgtcggttgcgaagaaggcgttttgccgcacaacgacagtatcgaagagggcaacgtcgaagaagaacgccgcctgatgtacgtcggcatcacccgcgccaaacgccaactcacactgacccactgcgtcaaacgcaaaaaacaaggcacatggcagttccccgaacccagccgattcatagacgaaatgccgcaggaagatttgaaaatcctggggcgcaaaggcggcgaaccgattgtcagcaaagaagaaggcagacgcaaccttgccgatataatcggaaggctcgacaacctaaaaaaaagcggcgcggcggattaa

SEQ ID NO: 42497 - DNA, 1596 bp, Neisseria meningitidis
atgtcccaagaaatcctcgaccaagtgcgccgccgccgcacgtttgccatcatctcccaccctgacgcaggtaaaaccacgttgactgaaaaactcttgctgttttcgggcgcgattcagagcgcgggtacggtaaaaggcaagaaaaccggcaaattcgccacttccgactggatggaaatcgagaagcagcgcggcatttccgtggcatcaagtgtgatgcagttcgattacaaagaccacaccgtcaacctcttggacacgccgggacaccaagacttctccgaagacacctaccgcgttttaaccgccgtggacagcgcattaatggtcatcgacgcggcaaaaggcgtggaagcgcaaaccatcaagctcttaaacgtctgccgcctgcgcgatacaccgattgttacgtttatgaacaaatacgaccgcgaagtgcgcgattccctggaacttttggacgaagtggaaaacattttaaaaatccgctgcgcgcccgttacctggccgatcggtatgggcaaaaacttcaagggcgtgtaccacatcctgaacgatgaaatttatctctttgaagctggcggcgaacgcctgccgcacgagttcgacatcatcaaaggcatcgataatcctgaattggaacaacgctttccgttggaaatccagcagttgcgcgacgaaatcgaattggtgcaggcggcttccaacgagtttaatctcgacgaattcctcgccggcgaactcacgcccgtattcttcggctctgcgattaacaacttcggtattcaggaaatcctcaattcattgattgactgggcgcccgcgccgaaaccgcgcgacgcgaccgtacgtatggtcgagccggacgagccgaagttttccggatttatcttcaaaatccaagccaatatggacccgaaacaccgcgaccgtattgccttcttgcgcgtctgctccggcaaattcgagcgcggcatgaagatgaaacacctgcgtatcaaccgcgaaatcgccgcctccagcgtggttaccttcatgtcgcacgaccgcgagctggttgaagaagcctacgccggcgacattatcggcatcccgaaccacggcaacatccaaatcggcgacagcttctccgaaggcgaacaactggcgttcaccggcatcccattcttcgcacccgaactgttccgcagcgtacgcatcaaaaacccgctgaaaatcaaacaactgcaaaaaggcttgcaacagctcggcgaagaaggcgcggtgcaggtgttcaaaccgatgagcggcgcggatttgattttgggcgcggtcggcgtgttgcagtttgaagtcgttacctcgcgcctcgccaacgaatacggcgtagaagccgtgttcgacagcgcatccatctggtcggcgcgctgggtatcgtgcgacgacaagaaaaaactggctgaatttgaaaaagccaacgcgggcaacctcgccatcgacgcaggcggcaacctcgcctacctcgcccccaaccgcgtgaatttgggactcacgcaagaacgttggccggacatcgtgttccacgaaacacgcgaacattcggtcaaactgtaa

SEQ ID NO: 42498 - DNA, 360 bp, Neisseria meningitidis
atggaaacccaagaaaagaaatttgttcctgcctccaagcaaataccgaccgtaaatagcggctggttagaccgtgaattaggcgaagccatgagtgaagcggtgcgtgcctgccttgctcacggtaaacagtcagaaattactgtcaagctcaaaatccaaccccaaaacatccaaagcggaacggtaaaaatcagccacgatgtagcaaccaaactgcccaaagaaaaacgcgaaggcggcatcgtctttgctacacctgacggcaacatccaagccgacgatccggcacaaggaaaattgaaactcaaacaagtttccaatacgtcaagcacgttgaaaatggtcagatccaactaa

SEQ ID NO: 42499 - DNA, 552 bp, Neisseria meningitidis
atggaattcctatctcttcacccttggtggtctttttttattatattaactattatccttagctatattggattctgtgcacatctccacattcaaaatagggcagttttcttttatagctatcgggatgtaactattattttcttgacacctgtcatcctcatcgctctaagttatttaattaaaaataaagaaatcctgtcagcttgtatcttatgtataactcttattgcattttcatgggcatggattataacctatcgatctaatactaaaaggttttttctttccttattgatagtatggggaaaattgttattaagtactattgtttgggcaattctcgccatatcacttggcttagctgtaataacagggaacagcaagcgtaaaaaatatgaacgacgtgaccgtcatgctgaacgtaatgaaaaagcttttataggtgcgctattagtaggtttcgaattatcaagaaatttattgaatttatgttgcctacacaaggatttttccaccccatctaaaaacattgaagtcaatcgctcttaa

SEQ ID NO: 42500 - DNA, 1452 bp, Neisseria meningitidis
atgccgtctgaacgcccacgggttttcagacggcatcaggacttttttatggatactacattgaaaaccaccttgacttctgttgcagcagcctttgcattgtctgcctgcaccatgattccccaatacgagcagcccaaagtcgaagttgccgaaacgttcaaaaacgataccgccgacagcggcatccgcgccgtcgatttaggttggcatgactattttgccgacccgcgcctgcaaaagctgatcgacatcgcactcgagcgcaataccagtttgcgtaccgccgtattgaacagcgaaatctaccgcaaacaatacatgattgagcgcaacaacctcctgcccacgcttgccgccaatgcgaacgactcgcgccaaggcagcttgagcggcggcaatgtaagcagcagctacaaagtcggactgggtgcggcatcttacgaactcgatctgttcgggcgtgtacgcagcagcagcgaggcggcactgcaaggctatttcgccagcaccgccaaccgcgatgcggcacatttgagcctgattgccaccgttgccaaagcctatttcaacgaacgttacgccgaagaagcgatgtctttggcgcaacgtgttttgaaaacgcgcgaggaaacctacaagctgtccgaattacgttacaaggcaggcgtgatttccgccgtcgccctacgtcagcaggaagccctgatcgaatctgccaaagccgattatgcccatgccgcgcgcagccgcgaacaggcgcgcaatgccttggcaaccttgattaaccaaccgatacccgaagacctgcctgccggtttgccgctggacaagcagttttttgttgaaaaactgccggccggtttgagttccgaagtattgctcgaccgtcccgatatccgtgctgccgaacacgcgctcaaacaggcaaacgccaatatcggtgcggcacgcgccgcctttttcccatccatccgcctgaccggaaccgtcggtacgggttctgccgaattgggtgggttgttcaaaagcggcacgggcgtttggtcgttcgcgccgtctattaccctgccgatttttacctggggtacgaacaaggcgaaccttgatgtagccaagctgcgccaacaggtacaaatcgttgcctatgaatccgccgtccaatccgcatttcaagacgtggcaaacgcattggcggcgcgcgagcagctggataaagcctatgacgctttaagcaaacaaagccgcgcctctaaagaagcgttgcgcttggtcggcctgcgttacaagcacggcgtatccggcgcgctcgacttgctcgatgcggaacgcagcagctatgcggcggagggtgcggctttgtcggcacaactgacccgcgccgaaaaccttgccgatttgtacaaggcactcggcggcggattgaaacgggatacccaaaccgacaaataa

SEQ ID NO: 42501 - DNA, 720 bp, Neisseria meningitidis
atgctgaccacaccgccgctcgcccccaaaaccgtcgccgccctgcacaggctcggtatccgtacactcgaagaactgcggcaaaacggttcggtcaaagcctttctgctgctcaaagcatcgggtttgaccctcacgaaaagcacactgtggcaactcgagtcgctgctggacggcacgccgccgcaagaaatgtcccaagcgcataaagcccgcctgcttgccgagttaaaaaaccatccgcccgtcgccgcctttccgccgcaggaagaaatggaacacttcatgtgcgaagcactgcgccaagcagaacaatcctccgccgacggcgaaatacccgtcggggcagtcatcgtttcagacggcaaaatcatcgcatcggcacacaacacctgcattgccgactgcaatgtcagccgacacgccgaaatcaacgccttggcacaggcaggcagagaaatacaaaactaccgccttgacggatgcgacatatatatcaccctcgaaccctgcgccatgtgcgcgtccgcactgatacaggcacgaatcaggcgtgtgatctacggggcggcagaacccaaaaccggcgcggcaggcagcatcgtcaacctgtttgccgacaaacgcctcaatacgcacaccgccatacggggcggaatcctgcaagaagaatgccgcgccgtgttaagccgtttttttcaaaacaaaagaaaaggttga

SEQ ID NO: 42502 - DNA, 2379 bp, Neisseria meningitidis
gtgctggcattgggcctctgcttcggcacgcattgcgccgccgccgatgccgttgcggcggaggaaacggacaatccgaccgccggagaaagcgttcggagcgtgtccgaacccatacagcctaccagcctgagcctcggttcgacctgcctgttttgcagtaacgaaagcggcagccccgagagaaccgaagccgccgtccaaggcagcggcgaagcatccatccccgaagactatacgcgcattgttgccgacaggatggaaggacagtcgcaggtgcaggtgcgtgccgaaggcaacgtcgtcgtcgaacgcaaccggacgaccctcaataccgattgggcggattacgaccagtcgggcgacaccgttaccgcaggcgaccggttcgccctccaacaggacggtacgctgattcggggcgaaaccctgacctacaatctcgagcagcagaccggggaagcgcacaacgtccgcatggaaatcgaacaaggcggacggcggctgcaaagcgtcagccgcaccgccgaaatgttgggcgaagggcattacaaactgacggaaacccaattcaacacctgttccgccggcgatgccggctggtatgtcaaggcagcctctgtcgaagccgatcgggaaaaaggcataggcgttgccaaacacgccgccttcgtgttcggcggcgttcccattttctacaccccttgggcggacttcccgcttgacggcaaccgcaaaagcggcctgcttgttccctcactgtccgccggttcggacggcgtttccctttccgttccctattatttcaaccttgcccccaatctcgatgccacgttcgcgcccagcgtgatcggcgaacgcggcgcggtctttgacgggcaggtacgctacctgcggccggattatgccggccagtccgacctgacctggctgccgcacgacaagaaaagcggcaggaataaccgctatcaggcgaaatggcagcatcggcacgacatttccgacacgcttcaggcgggtgtcgatttcaaccaagtctccgacagcggctactaccgcgacttttacggcaacaaagaaatcgccggcaacgtcaacctcaaccgccgtgtatggctggattatggcggcagggcggcgggcggcagcctgaatgccggcctttcggttctgaaataccagacgctggcaaaccaaagcggctacaaagacaaaccgtatgccctcatgccgcgcctttcggtcgagtggcgtaaaaacaccggcagggcgcaaatcggcgtgtccgcacaatttacccgattcagccacgacagccgccaagacggcagccgcctggtcgtctatcccgacatcaaatgggatttcagcaacagctggggctatgtccgtcccaaactcggactgcacgccacctattacagcctcaaccgcttcggcagccaagaagcccgacgcgtcagccgcactctgcccattgtcaacatcgacagcggcgcaacttttgagcggaatacgcggatgttcggcggagaagtcctgcaaaccctcgagccgcgcctgttctacaactatattcctgccaaatcccaaaacgacctgcccaatttcgattcgtcggaaagcagcttcggctacgggcagctctttcgcgaaaacctctattacggcaacgacaggattaacaccgcaaacagcctttccgccgccgtgcaaagccgtattttggacggcgcgacgggggaagagcgtttccgcgccggcatcggtcagaaattctatttcaaggatgatgcggtgatgcttgacggcagcgtcggcaaaaaaccgcgcaaccgttccgactgggtggcatttgcctccggcagcatcggcagccgcttcatcctcgacagcagcatccactacaaccaaaacgacaaacgcgccgagaactacgccgtcggtgcaagctaccgtcccgcacagggcaaagtgctgaacgcccgctacaaatacgggcgcaacgaaaaaatctacctgaagtccgacggttcctatttttacgacaaactcagccagctcgacctgtccgcacaatggccgctgacgcgcaacctgtcggccgtcgtccgttacaactacggttttgaagccaaaaaaccgatagaggtgctggcgggtgcggaatacaaaagcagttgcggctgctggggcgcgggcgtgtacgcccaacgctacgttaccggcgaaaacacctacaaaaacgctgtctttttctcacttcagttgaaagacctcagcagtgtcggcagaaaccccgcagacaggatggatgtcgccgttcccggctatatcaccgcccactctctttccgccggacgcaacaaacgaccctga

SEQ ID NO: 42503 - DNA, 1350 bp, Neisseria meningitidis
atggcaaaccaaaccaatagcaaagcaaaagcattgttaggctgggtagatgcccgttttccattaagtaaaatgtggaaagagcatctgtctgaatactatgcgcctaaaaacttcaacttctggtatttcttcggctcattgtctatgctggtgctggtgattcaaatcgtcagcggtattttcctgaccatgaactacaaaccggacggcaaccttaacgcctaccatctgcctgctgcctttaccgcagtagagtacatcatgcgcgacgtgtccggcggctggattatccgctatatgcactctaccggcgcatctttcttcttcatcgtcgtttatctgcacatgttccgtggtctgatttacggttcgtacaaaaaaccgcgcgaattggtgtggattttcggttccctgattttcttggcattgatggcagaagcctttatgggctacctgctgccttggggtcaaatgtccttctggggtgcgcaggtaattattaacctgttctccgccatccctgttatcggtcctgatttgtccacttggatccgcggtgacttcaacgtttccgatgttactttgaaccgattcttcgccctgcacgttatcgctgtacctttggtattgctcggcttggttgtggctcatatcattgccttgcatgaagtgggttccaacaaccctgacggtgtagaaatcaaaaagctgaaagatgaaaacggtgtccctctagatggcatacctttttttccgtattatgttgtgcatgatatattggcagtaacgatattcttgattgtcttctgtgccgtgatgttctttgcacctgaaggcggcggctacttcttggaagcgccaaacttcgatgcagcgaatgcgctgaaaacacctccgcacattgcgccggtatggtacttcactccgttctacgcaattctgcgtgcgattccttcctttgccggtactcaggtatggggtgtaatcggtatgggtgcagcagttgtactgatcgccttgctgccttggttggataaaggcgaggttaaatctgtccgctatcgcggcccaatcttcaaaaccgcattggttctgttcatcattgccttcatcggtttgggtattttgggtgcaatggtagcaactgatacgcgtactttggttgcacgtatcctgtctttcgtctactttgcattcttcctgggtatgccgttctataccaaactggataccaacaaaccagttcctgaacgcgtaaccatgagcactactaaacaaaaaattatgttctttgtttacgtcggtattaccgttgttggtgcttacttgtttgcaaccaatatctga

SEQ ID NO: 42504 - DNA, 222 bp, Neisseria meningitidis
atgaactttctgttatccaaactgctgctggttctgataaggttctaccaatactgcatcagcccgctgattccgccccgctgccgctatacgccgacctgttcgcaatatgccgtcgaagcagtcaaaaaatatggcgcattcaaaggcggcctgcttgcggcaaaacgcatctcccgatgccaccccctcggcggacacggacacgaccccgttccctga

SEQ ID NO: 42505 - DNA, 417 bp, Neisseria meningitidis
atgaataaaaatatactttatatattttctttattaatcactattgttattttctttatatttgaaaagaatgtaataagaaaaataagttttaattataataaaaaagaattcttaattagtgatataacgaattttaattgggattatgtaaaactgtatataatcaattcagatttccaaaaaattgttttttatcataaaagtaagatagtttttgaggaattaatagaactagataaggaagggaatgttttacctcaatatctatttgattcagatttgaaaaatgttgaatattacgaatgtgattacaagaatggcaagatgcaacttttaaaaaaagaaaaatcacatttttttgatggatatttttattattataaacctataaattgtaggccgaaacttttgtaa

SEQ ID NO: 42506 - DNA, 135 bp, Neisseria meningitidis
atgaaacgcacttatcaaccttccgttaccaaacgcaaacgcacccacggcttcctggtgcgctccaaaacacgcggcggccgcgcagtattggccgcacgccgcgccaaaggccgcaaacgcctggcggtataa

SEQ ID NO: 42507 - DNA, 372 bp, Neisseria meningitidis; identical to SEQ ID NO: 41929

SEQ ID NO: 42508 - DNA, 711 bp, Neisseria meningitidis
atgccgtctgaaacccttcgtcccgcactttataaaaaaggaacacacatgatacaagccgtattgttcgacctcgatggcacgctcgccgacaccgccctagacctcggcggcgcactcaacaccctgctcgcccgccacggactacctgcaaaaagcatggacgaaatccgcacccaagccagccacggcgcggcaggactgatcaagctcggcgcaggcatcacccccgaccatcccgactatgcccgatggcgcaccgaataccttgacgaatacgacagccgctacgcccaagacaccaccctcttcgacggcgtaaacgaactcatcgccgaactcggaaaacgcggcatcaaatggggcatcatcaccaacaaacccatgcgcttcaccgacaaactcgtccccaaactcggcttcatcatcccacccgccgtcgtcgtcagcggcgacacctgcggcgagcccaagcccagcgtcaaacccatgctgtatgcgtgcggacaaatccacgccgacccgcaacacacactctacgtcggcgacgcggaacgcgatatacaggcggggcgcaacgccggtatgacgaccgtcctcgccgaatggggctacatcgctcccgaagacgataccggctcatggcaggcggatttccacatccgcacgccactcgatctgctcgaatgtctggacaaaatacagccctga

SEQ ID NO: 42509 - DNA, 747 bp, Neisseria meningitidis
atggattttcgttttgacattatttacgaataccgctggatgtttctttacggcgcactgacgaccttggggctgacggtcgtggcaacggcgggcggttcggtattgggtctgttgttggcgttggcgcgcctgattcacttggaaaaagccggtgcgccgatgcgcgtgctggcgtgggcgttgcgtaaagtttcgctgctgtatgttacgctgttccggggtacgccgctgtttgtgcagattgtgatttgggcgtatgtgtggtttccgtttttcgtccatccttcagacggcattttggtcagcggcgaggcggcaatcgcgctgcgtcgcggatacgggccgctgattgccggttctttggcactgatcgccaactcgggggcgtatatctgtgagattttccgcgcgggcatccagtctatagacaaaggacagatggaggcggcgcgttctttggggctgacctatccgcaggcgatgcgctatgtgattctgccgcaggcattgcgccgcatgctgccgcctttggcgagcgagttcatcacgctcttgaaagacagctcgctgctgtcggtcattgctgtggcggagttggcgtatgttcagaatacgattacgggccggtattcggtttatgaagaaccgctttacaccgtcgccctgatttatctgttgatgacgactttcttaggctggatattcctgcgtttggaaaaacgttacaatccgcaacaccgctga

SEQ ID NO: 42510 - DNA, 477 bp, Neisseria meningitidis
atggaacacctatttgggaaatggctgcccgacttgcccgccgccatttcagacggcatcagcctgccgatggtgcggctgctgcacacccggtcgctgaccgccgcattgcgcgccttgccgcatacattttcggtggaactgctgaaactgggcgaattggagacggaatgcggagggaggctggtgcgcgaagttttgttgaagctggaccgtatccctgttgttgaggcaaggagcgaatgccgtatcggttcggcgttttggcaaaacattttggactgcggcacgcgtcctttgggcgagcgtctgtttcaagccgatttggaaggggcgcgttcggcgtttgagtttgccgttgccggcgaaggatgcggacggtactttgccgcgcggcgttctcggttttcccgtcacggcgaggaaatgctgctgaccgagtattttctgcccgaactgaaacgttttatcggataa

SEQ ID NO: 42511 - DNA, 1233 bp, Neisseria meningitidis
atgggcttgaaacattttctggaaaaaatcgaaccgcacttcctgccgggcggcaaacatgaaaaatggtatgccctctacgaagctgcggcgacaattttctacacatccggcgcggtaacgcgcaaagcggcgcacgtccgcgacgcgctcgactccaagcgcatgatgattttggtgtggctggctttgttccctgccatgttctacggtatgtacaacgtcggcgcgcaggcattcggtgcgttaacgcctgatttgctgcaacaaaacatcgccaacgactggcattacgcctttgccaacgctttgggcatcaatatgtcgtctgaagcgggcgtgtcggacaaaatgctgtttggcgcgatttacttcctgccgatttacgcgactgtatttgttgtgggcggtttctgggaagttttgttcgccaccgtgcgcaaacacgaaatcaacgaaggtttcttcgttacttcgattctgtttgccttaatcgttccgcccacgctgccgctgtggcaggcggctttgggtatttctttcggcgttgtggttgcgaaagaagtattcggcggtacaggtaaaaacttcatgaaccctgcgctggcaggccgtgctttcctgttcttcgcctaccctgccaacttgagcggcgatgcggtttggacggcggttgacggctattccggcgcaaccgcactggcgcaatgggcggcacacggtgcagacggcctgaaaaacgccgtaaccggtcaaaccatcacttggatggacgcgtttatcggcaaactgcccggctccattggcgaagtctccactttggcactcttaatcggcggcgcgtttatcgtgtttgcccgcatcgcttcttggcgcattattgccggcgtgatgatcggtatgattgcgatgtcttcgctgttcaacttcatcggttcggacaccaacgctatgtttgctatgccttggtactggcacttggtggtcggcggcttcgccatcggtatgctgtttatggcgaccgaccctgtttccgcttcctttaccaatgtcggcaaatggtggtacggcgcactgatcggtgtgatgtgcgtattaatccgcgtggtcaatccggcttaccccgaaggcatgatgttggcgattctgtttgccaacctgtttgccccgattttcgactatttcgtcgcacaagcgaacatcaaacgcagaaaggcgcgcagcaatggctaa

SEQ ID NO: 42512 - DNA, 783 bp, Neisseria meningitidis
ttgcagaaagtcgtgcgccatatcgcgcaaaccgaaattatgccgcgttttttgaatacgccgtctcaccgcaaggaagacggttcgatgttgagcgaggcggacattgccgcgcagacggcttttgccgccgcgttgccgcttttaatcgacagtccgatgttgggtgaggaaatgtcgcggcaggaacagtcggctttgtgggaacaatattcgggggaaaaggggctgtggattgtcgatccgatagacgggacgaacaattttgtcaacgggctgccgcattttgcggtatcggtggcgtttgtccgcaacgggcgcgccgagttgggcgtaatctacaacccagtcagcggcgaatgtttttatgccgaacgcgggcagggggcgtttttaaacgggacgcgtctgcccctgcgcctcgtggataaaaaactcaatgaggcgattgcgggcgtggaaatcaaatatctgcgttcgggcaaactttccagccgtatgagtacgctcgcgccttttggaacgatacggagtatgggcagcagtacgttggattggtgttatctggcgtgcgggcgttatgatgtttatgttcacggcgggcagaagctgtgggattatgccgccggcgcgttgattttcgaggaggcgggcggcaggctgacgactttggaaggcgacgggttttggagtggtgaacacgtgttcaaacgctcggtcgttgccgcgctcgaaccgaagctgtttgaacgctgggtcgggtggatacgggaaaaccaatag

SEQ ID NO: 42513 - DNA, 1269 bp, Neisseria meningitidis
gtgaaaccgctgcgcagactgacaaacctccttgccgcctgcgccgtagcggcggccgcactcatacagcccgccctcgcggcggacttggcgcaagacccgttcattaccgataacgcccaacggcagcactacgaacccggcggcaaataccacctcttcggcgacccgcgcggcagcgtttccgaccgcaccggcaaaatcaacgtcatccaagactatacccaccagatgggcaacctgctcatccaacaggcaaacatcaacggcacaatcggctaccacacccgcttttccggacacggacacgaagaacacgcccccttcgacaaccacgccgccgacagcgcgagcgaagaaaaaggcaacgttgacgaaggctttaccgtataccggctcaactgggaaggacacgaacatcatcccgccgatgcctacgacggcccgaagggcggcaattaccccaaacctacgggcgcacgagacgaatacacctatcacgtcaacggcacagcccgcagtatcaaactcaatccgaccgacacccgcagcatccggcaacgcatatccgacaactacaacaacctcggcagcaatttctccgaccgcgccgatgaagccaacagaaaaatgttcgagcacaatgccaagctcgaccgctggggcaacagcatggagtttatcaacggcgtcgccgccggcgcgctcaacccctttatcagcgcgggcgaagccgttgaccagtggatgcaggaaaaccccaatgccgccgaaaccgtcgaagccctggtcaacgtcctgccgtttgccaaagtcaaaaacctgacaaaggcggcaaaaccggggaaggctgcggttagtggggatttctcagactcctacaagcataacactgcttcaagattatctcagtctgtagatggagaaatgtttcaaacccgcaatgttgattttaaagcaaaatctattgggactaaaattcatgatggagctcaagggaaacatatttcaggacatagaaactacattgaaggtaagagtactttaaatcaaaacattaatcctcaagaattgttgaacggaatacattcaggtgcttatccagttatttctaaaggagcaagaggaaatcctgttgttgattttgggtatcctataggcagcgatgggaaatcaggattaagtaccaattttggtacgattcattcaggtaaaaatggagttcacattgttccggctaaccctaaaaccattaaaaaggtgcaatag

SEQ ID NO: 42514 - DNA, 984 bp, Neisseria meningitidis
atgaaaaactttctttcccttttctcctccatactgatgtctgccctgattgccgtgtggttcagccaaaaccccatcaacgcctactggcagcagacctaccaccgcaacagcccgctcgaaccgcttgccgcctacggatggtggcggagcggtgcggcgttgcaagaaaacgcctacgccctttcagacggcatcaaagccttcctgtccggcgaaacgccgccgacggctcaagacggcggttcggcagatatgccgtctgaagccgccgcatccgaagccgtccctcaaaccggtgaaacagaatggaaacaagacaccgaagccgccgccgtccgcagcggcgacaaagtcttttttgtcggcgactcgctgatgcagggcgttgcccccttcgtgcaaaaaagcctgaaacagcaatacggcatcgaatccgtcaacctcagcaaacaaagcacggggctgtcctacccctcattcttcgactggccgaaaacgattgaagaaaccctgcaaaaacatcccgaaatcagcgtactcgccgtcttcctcggaccgaacgacccgtgggatttccccgtcggcaaactctatctcaaattcgcttccgacgaatgggcgcaagaatacctgaaacgtgtcgaccgcatccttgaagccgcacacacgcaccgcgtccaagtcgtctggctcggcatcccctacatgaaaaaagccaagctcgacggacagatgcgctacctagacaaactgctttcggaacatttgaaaggcaaaatcatcctgattcccaccacgcacaccctgagcggcgggaaagaccgctacaccgactccgtcaacgtcaacggcaaacccgtccgctaccgcagcaaggacggcatacactttaccgccgaaggacaaaaactgctggcggcaaaaataatggaaaaaatcgtttttgaaccaagtacgcaaccatcaagtacacagccatga

SEQ ID NO: 42515 - DNA, 1170 bp, Neisseria meningitidis
atgagcgaatatctgtttacttccgaatcggtatccgaaggccatccggataaagttgccgaccaagtatccgatgcgattttggatgccatcttggcgcaagacccaaaagcacgtgtcgccgcagaaaccttggtcaacacaggcttgtgcgtattggcaggcgaaattaccaccaccgcccaagtagactacatcaaagtcgcacgcgaaaccatcaaacgcatcggctacaactcctccgagctgggctttgatgccaacggctgcgcagtcggcgtgtactacgaccagcaatcccccgacatcgcccaaggcgtgaacgaaggcgaaggcatcgacttgaaccagggcgcgggcgaccaaggtttgatgttcggctatgcctgtgacgaaacccctaccctgatgccgtttgccatctattacagccaccgcctgatgcagcgtcaaagcgaattgcgcaaagacggccgcctgccttggctgcgtcctgatgccaaagcccaactgaccgtggtttacgacagcgaaaccggcaaagtaaaacgcatcgacaccgtcgtcctgtctacccagcacgatccgtccatcgcttacgaagagctgaaaaacgccgtaatcgaacacatcatcaaaccggttctgccgtctgaactgctgaccgacgaaaccaaatacctgatcaacccgaccggccgcttcgttatcggcggcccgcaaggcgactgcggtttgaccggccgtaaaatcatcgtcgatacctacggcggcgcggctccgcacggcggcggcgcattctccggcaaagacccgtccaaagtggaccgttccgccgcttacgcctgccgctatgtcgcaaaaaacatcgtcgccgcaggtttggcaacccaatgccaaatccaagtttcctacgccatcggcgttgccgaaccgacttcgatttccatcgatactttcggcaccggcaaaatcagcgaagaaaaactgattgccttagttcgcgaacatttcgacctgcgccccaaaggcatcgtccaaatgctcgatctcttgcgcccgatttacagtaaatccgccgcttacggacatttcggccgcgaagaacctgagttcacttgggagcgcaccgacaaagctgctgcattgagggcggcagcggggctgtaa

SEQ ID NO: 42516 - DNA, 1233 bp, Neisseria meningitidis
atggctaaaaacggaggattttctttgttcgcaaagaaagaaaaacgctttatctttgaaggcaggcattccgcctccgacaaactggtcaacggcgaagtatccgcgtttaccgaagaagaggcgcgcaaaaaactggcaaaacgcggcatccgcccgttgcagattacccgtgtgaaaacaagctccaagcgcaaaatcacacaagaagacatcaccgttttcacccgccagctgtccacgatgattaaagcgggcctgccgctgatgcaggcatttgaaatcgtggcgcgcggacacggcaacccgtctatgacggaaatgctgatggaaatccgaggcgaagtggaacagggcagctcgttgagccgcgcattctcaaaccacccaaaatatttcgaccgcttctactgcaatctggttgcggcgggcgaaacgggcggcgtattggaaagcctgctggacaaattggcaatttacaaagaaaaaacccaggccatccgcaaaaaggtaaaaaccgcactgacctatccggtatccgtcatcgccgtcgccatcggtttggtattcgtgatgatgattttcgtactgcccgcctttaaagaagtttacgccaatatgggcgcggagcttcccgcactgacccaaacagtgatggatatgtccgactttttcgtctcatacggctggatggtgctgatcgcactgggctttgccatatacggcttccttaaattgaaggcgcgttcgattaaaatccaacggcgtatggatgccatactgctgcgtatgccgattttcggagacattgtccgcaaaggaacgattgcccgctggggcaggacgacggcgacgctgattgcggcaggcgtgcctttggtcgatgtattggactccactgccggcgcggcgggcaatttaatctatgaagaagccacccgggaaatccgtacgcgcgtcatccaaggtttgtctatgacttcggggatgcgtgcgacggaactgttccccaatatgatgttgcagatgtcttccatcggcgaggaatcgggttctttggacgatatgctcaacaaagccgccgaattttacgaagacgaggtggacaatgcggtcggcaggctgtccgctatgatggagccgatcattatcgtgattttaggcttggtcatcggcacgcttctggtcgccatgtatctgccgctgtttaatttgggcaacgtggtcgcctga

SEQ ID NO: 42517 - DNA, 669 bp, Neisseria meningitidis
atgagtttgagtaaattggcgaaaaaaacggcacaaactgctaaaaatatcggcgaaaccctgcgcgcggcctttcggggaaaaatcacgctggtggtgtcgtccgagccgatacagcgcgtgcagttgagcggcttggccgacgaaaccctgcaagaccttgaacatttgcaggaatacggctttgccagccatccgcccgacggcagcgaagcggtagtgataccgctgggcggcaatacttcgcacggtgtgattgtgtgcagccagcacggcagctaccgcatcaaaaaccttaagcccggcgagacggcgatttttaatcatgagggtgcaaaaatcgtgattaagcaaggcaaaatcattgaggccgattgcgacgtgtaccgggttaactgcaaacaatacgaggttaatgcggccacggatgccaaatttaacgctccgttggtggagaccagtgcagtgttgacggcgcaaggccaaatcaacggcaacggcggcatggccgtcgagggcggcgacggagccacctttagcggcgatgttaaccaaacgggcggcagctttaacaccgacggcgacgtggtggccggcaatatatcgttgcgccagcacccgcataccgacagcatcggcggcaaaaccttaccggcggaaccggcatag

SEQ ID NO: 42518 - DNA, 456 bp, Neisseria meningitidis
atggatttgcgcaaattaaaaaaactgattgatttggttgaagaatcgggtatcgccgaaatcgaagtaaccgaaggcgaggaaaaagtccgcatcacccgaaccatcgccgccgcacccgtttacgccgcgcccgtacctgccgccgcgccggccgtaacgcctgccgccgcacccgttgcggcatccgcgcccgccgccgcacctgccgcccgcgatttgtccgacgcgcaaaaatcgcctatggtcggcacgttctaccgcgcacccggcccgaatgccgcgccttttgtcgaagtcggccaacaagttaaagccggcgacacgctgtgcatcatcgaagcgatgaagctgatgaacgaaatcgaagccgaaaaatccggcacggtcaaagaaattttggtcgaaaacggtacgcccgtcgaattcggcgaaccgctcttcattatcggataa

SEQ ID NO: 42519 - DNA, 1767 bp, Neisseria meningitidis
ttgtctgaaataataaaacggatattttactataagtgtctgaaaatttgcccgtctgtttcagacggcggggcggttatgttacaatccgaaaattcgaaaaatttaatctcttgttcaataaaggctttaccaatcatgatttctaccaacggcatcaccatgcagttcggcgcaaagccgctgtttgaaaacgtatccgtcaaattcggcgaaggcaaccgttacggcttgatcggcgccaacggctcaggcaaatccaccttcatgaaaatcctcggcggcgatttggaacagacggccggcgaagtggcgattgaaaacggcgtgcgtttgggtaaattgcgccaagaccagtttgcctacgaagacatgcgcgtgctggacgtggtgatgatggggcataccgaaatgtgggcggcgatgaccgaacgtgatgcgatttacgccaatcccgaagccaccgaagacgactacatgaaagccgccgaactggaagccaagttcgccgaatacgacggctacaccgccgaagcgcgtgccgccgaactgttgagcggcgtgggcatttccgaagatttgcacaatgcgaaaatggcggaagtcgccccgggcttcaaactgcgcgtattgctggcgcaggcgctgttctccaagccggatgtattgctcttggacgaaccgaccaataacttggacattaataccatccgctggttggaaggcgtgttgaaccaatacgactccacgatgattatcatcagccacgaccgccactttttgaacgaagtctgcacgcatatggcggatttggactacaacaccatcaccatctatccgggcaactacgacgactacatgctcgcctccgcccaatcgcgcgaacgcgccctgaaagacaatgccaaagccaaagagaaactgcaagagctgcaagagttcgtcgcccgcttctctgccaacaaatccaaagcccgtcaggcaaccagccgtctgaaacaggccgacaaaatcaaatcggagatggtcgaagtcaaaccttccacccgtcaaaacccgtatatccgttttgaagccgatgaaaaagccaagctgcaccgtcaggctgtggaagttgaaaaactggcgaaacgctttgaaacccagttgtttaaaaacctgaacttcatccttgaagcgggacaacgcctcgccatcatcggcccgaacggcgcgggcaaatccaccctgctgaaactcttggccggcgcgtacaaccccgaatattcagacggcctgttgccggacgaaggcaccatcaaatgggcggaaaaagccagtgtcggctactatccgcaagaccatgaaaacgacttcgacgtcgatatggacctgagcgaatggatgcgccaatgggggcaggaaggcgacgacgaacaagtcatccgcggcactttggggcgtttgctcttcggcagtaacgatgtcgtgaaaaaagtgaaggttctctccggtggtgaaaaaggccgtatgctttacggcaaactgttgctgttgaaacccaatgtcttagtcatggacgaaccgaccaaccatatggacatggaaagcatcgaatccttgaacatggcactggaaaaatacaacggcacgctgatttttgtctcccacgaccgtcagttcgtttcctccttggcaacccaaatcatcgaactggacggcaaaggcggatatgaacactacttgggcgattacgaaagttacttggagaaaaaaggcgtagcataa

SEQ ID NO: 42520 - DNA, 1068 bp, Neisseria meningitidis
atgagaaaaatccttgttaccggcggcgcgggctttatcggttctgccgttgtccgtcatattatccgaaacacccgggacgctgtcgtcaatgtcgataagctgacttatgccggcaatttggaatctttgactgaggtagccgataatcctcgctatgcttttgaacaagtggatatttgcgaccgcgccgaactcgaccgcgtattcgcgcaataccggcctgatgccgtgatgcacttggcggcggaaagccatgtcgaccgctctatcggttcggcaggcgagtttatccaaaccaatatcgtcggcacattcaatctgcttgaagcagcccgcgcctactggcaacaaatgccgtctgaacagcacgaagccttccgtttccaccatatttccaccgatgaagtctatggcgatttaggcggcacggacgatttgtttaccgaaaccgcgccctacgcgccgtccagcccctactctgcctctaaagcgtccagcgaccacctcgtccgcgcgtggttgcgtacttacggcttgccgaccattgtaaccaactgctccaacaactacggtccttaccattttccggaaaaactcattcctttgatgattctgaacgcgcttgacggcaaaccgctgcctgtgtacggcgacggtatgcaaatccgcgactggctgtttgtcgaagaccacgcgcgcgcactgtatcaggttgttaccgaaggtgttgtcggcgaaacctacaatatcggcggccacaatgaaaaagccaatattgaagtcgtcaaaaccatctgcgccctgctggaagaactcgctcccgaaaaaccggccggtgtggcgcgttatgaagatttgattactttcgtacaagaccgccccggccatgacgtacgctacgccgtcgacgcagccaaaatcaggcgggatttgggctggctgcctttggaaaccttcgagtccggcctccgcaaaaccgtgcaatggtatctggacaacaaaacctggtggcaaaatgtattgaacggcagctatcgtttggaacgtttaggtactggaaaatag

SEQ ID NO: 42521 - DNA, 225 bp, Neisseria meningitidis; identical to SEQ ID NO: 38459

SEQ ID NO: 42522 - DNA, 2895 bp, Neisseria meningitidis
gtgctacaataccggttttcctttatttttcaggcggcatccattatgtgcaaccatcatccccaacattcgcacgacaacgacaccatccgcatccgcggcgcgcgcacgcataatttgaaaaacatcgatttagacattccgcgccacaaactcgtggtggtaacaggattgtcgggcagcggcaagtcgtcgctggcgtttgacacgctgtatgccgaagggcaacggcgttatgtcgagagcctttccgcctatgcgcggcagtttttgcagatgatggacaaacccgatgtcgatttaattgaaggtctgtcgcctgcaatttccatcgagcaaaaatccaccagccacaacccacgctccaccgtcggtacggtaactgaaatccacgactatctgcgtcttttatacgcccgtgtcggtaccccgtattgtcccgaacacaagctgccgctgtcgagccaaaccgtatcgcagatggtcgatgccgtattgaaactgccggaagacacgcgtgtgatgattcttgcccccaccgtgcgcgagcgtaagggcgagtttgtcgatttctttgccgacttgcaggcgcagggttttgcgcgggtgcgcgtggacggcgaggtctatcagttggacgaagtgccgaagctggaaaaaaacatcaagcacaatatcgacgtggtcatcgaccgcgtgaaagtgaaggcggacatcaagcagcggctggcggaaagttttgaaaccgcgctgcgccacggcaacgagcgtgcgctggcgatggagatggacagcggcgaagaacattggttttccgcacgtttcgcctgccccgtgtgttcgtacagcctgcccgaattagagcctcgccttttttcgttcaacaacccgatgggttcctgcccgacttgcgacggcttgggcaacaccaatttcttcgaccccgaaaaagtggtcgcccatcccgaattgtcgctggcaacaggtgcgattgacggttgggacaagcgcaaccaattctatttccaaatgattcaatcattggcgcggcattacggtttcgatgtgcaggctgcttgggaaacactacctgaaaaagtgaaaaaagttgtgctgcacggctcaggcaaagaagtcattgatttcacttacctgtccgaacgcggcaccaccttcaaccgcagccacgcctttgaaggcatcatccccaatctcgaacgccgctaccgcgaaaccgacagcgaaaccgtgcgcgaaaaactgcgcgaataccaaaaccaccgcgcctgcccaagctgcggcggcgcacgtttgcgcaaagaagcccgctacgtttacgtcagcggtgagccgttgcacgaagtttccgcctggccgctcaccaaaacccaccaattctttgaaacactggatttagacggcaacaaaaaacaaatcgccgaaaaaatcctcaaagaaatcaccgaacgcctcggcttcctgattaacgtcgggctggattacctgaatttaagccgctccgccgaaaccctctccggcggcgaagcccagcgcatccgcctcgccagccaaatcggcagcggcctgaccggcgtgatgtatgtactggacgaaccctccatcggcctgcaccagcgtgacaatgaccgcctgctggccaccctcaaacgcctgcgcgatttgggcaacagcgtgattgtggtcgaacacgacgaagacgccatccgcgaagccgatttcgtggtcgatatgggccccggcgcaggcgaacacggaggcaacgtactgattgccgacacgcccgaaaacgtcgcccaatgcgaaaactccgttaccggacaatacctcagcggcaaaaaatccattgccgtgccgtctgaacgcacgcccgtcaatcccgaccggatgctcgtcctcaaaggcgcacgcggcaacaatctcaaaaacgttacccttgagctgccgctcggtttgattacctgcatcaccggcgtgtccggcagcggcaaatccaccctgattaacgacaccctcgccaaaattaccgcccgcgaactcaaccgcgcccaagaagaacccgccccattcgacgacatccacggcctcgaacacctcgacaaagtcatcaacgtcgatcagtcccccatcggccgtactcctcgctccaaccccgccacctacaccggcctgttcacccctatccgcgaactcttcgccggcgtccccctctctcgcgaacgcggctacaacgtcggcagattctccttcaatgtcaaaggcggccgctgcgaagcctgccaaggcgacggcgtgattaaagtcgaaatgcacttcctgcccgacgtgtacgtcccctgcgaagtctgccacggcaaacgctacaaccgcgaaacgctcgaaatccaatacaaaggcaaaaacatcagccaagtcctcgacatgaccgtcgaagaagcccgcgaatttttcgacgccgtccccaccgtatcgcgcaaactgcaaaccctgatggacgtaggcctaggctatatccgcctcggacagtccgccaccaccctctccggcggcgaagcccaacgcgtgaaactcgccttggaactctccaaacgcgacaccggcagaacgctctacatcctcgacgaacccaccaccggcctgcacttcgccgacatcgccctgctgctggaagtcataggccgtctgaaaggcaaaggcaactcgatagtgattatcgagcataatctggatgtgattaaaacagcggattggattgtggacttggggccggaaggcggagatggcggggggaggattattgctaaaggtagtcctgaacaggtggcgaaagttaaggggagttatactgggaagtatttgaaggtggttttgaggtaa

SEQ ID NO: 42523 - DNA, 960 bp, Neisseria meningitidis
atgagcaccttctttcaacaaaccgcccaagccatgattgccaaacacatcgaccgcttcccgctattgaagttggaccaggtgattgattggcagccgatcgaacaatacctgaaccgtcaaaaaacccgttacctccgagaccaccgcggtcgtcccgcctgtcccctgttgtccatgttcaaagccgtcctgctcggacaatggcacaacctctccgatcccgaactcgaacacagcctcatcacccgcatcgacttcaacctgttttgccgttttgacgaactgagcatccccgattacagcaccttatgccgctaccgcaaccggctggcgcaagacgacaccctgtccgaactgttggaactgattaaccgccaactgaccgaaaaaggcttaaaagtagagaaagcatccgccgccgtcgttgacgccaccattattcagaccgtcggcagcaaacagcgccaggccatagaagtcgatgaagagggacaagtcagcggtcaaaccacactgagtaaggacaaaaatgcccgttggacaaagaaaaacagcctctacaaactcggttacaaacaacatacacgtaccgatgcggaaggctatatcgagaaactgcacattactcccgccaatgcccatgagtgcaaacacctgtcgccgttgttggaagggttacccgaaggtacgaccatctatgccgacaaaggctacgacagtgcggaaaaccggcaacatctggaagaacatcagttgcaggacggcattatgcgcaaagcctgccgcaaccgtccgctgacggaaacgcaaaccaaacgcaaccggtatttatctaagacccgttatgtggtcgaacaaagcttcggtacgctgcaccgtaaattccgctacgcccgggcggcctatttcggactgatttgcgcccgctgccgcctaaaaggcagcccggatgcctga

SEQ ID NO: 42524 - DNA, 1095 bp, Neisseria meningitidis
atgaaaaccaatctgctcaactacgaccttcaagggctgacccgacattttgccgatatgggcgaaaaacctttccgtgccaaacaggttatgcgttggatgcaccaatccggcgcgcaaaattttgacgaaatgaccgatttggcaaaatcgttgcgccataaactgaacgaacaggcaggcatcgaaattcccaagctgatgatgtctcaaaaatcttcagacggcactcgaaaatggcttttggatgtcggtacgggcaacggcgtggaaaccgtcttcatccccgaatcggatcgcggcacgctctgcatttcctcacaagtcggctgcgctttggaatgtacattttgttcgaccggccggcagggcttcaaccgcaatttgactgctgccgaaatcatcgggcaattgtggtgggcaaacaaagcgatgggcgttacaccgaaaaacgagcgcgtgatttccaacgtcgtcatgatgggcatgggcgagccgatggcgaacttcgacaatgtcgttaccgccttaagcatcatgctggacgaccacggctacggtttgagccgccgccgcgtaaccgtttccacttcgggtatggttccccaaatggacaggttgcgcgatgtcatgccggtggctttggcggtttccctccacgcttccaatgacgaagtccgcaaccaaatcgtaccgttgaacaaaaaatatcccttgaaagaattgatggccgcatgccaacgctatctggtcaaagcacccagggatttcatcactttcgaatacgtcatgttggacggaataaacgataaggcgcaacatgcgcgcgaactgatcgaactggtcacagatgttccctgcaagttcaatctgattccgttcaatcccttcccaaactccggatacgaacgctccagcaatgagaacatccgtgtgttccgcgatattttgcagcaggcaggatttgtcgttaccgtacgaaaaacgcgcggcgacgacatcgatgccgcctgcggacagttggcggggcaggttcaggataaaacgcgccgccaacaaaaatggcagcagattttaatcggacaacaggggtaa

SEQ ID NO: 42525 - DNA, 177 bp, Neisseria meningitidis
atgaaaagccgacgtttttttaaagccttattgctgattgccgcgctggtcggcgcgttttatgccggaatgcggacgcaggcgtatctttatgaagatttatgtttagacttgggcggcggtaaaaatccggggagttacccaatttgcgtgattgagaaagtccctgcacgttaa

SEQ ID NO: 42526 - DNA, 678 bp, Neisseria meningitidis
atgcctgctgctttgattaaggattttctgctgactcagggtttgaagctgccgcttgacgaggttcgggcggcgtatctgacggcgcagacggtaatggatatggggacggcttcgatagaccgttcggttttgtggcgcagtgatgagggttggaaacttgccgattacctgtcgtgcgacaatgtccgcgaagatgcactgaaacggcttttcatggctttggattcggtgttttcgcgctcgacaggcgtgcggagtgcggcggtctatgccttgatgccatctgaaaaccaggctttccaactgatatgcctgtcccgacagggcgaggttttggaaaacctgtgggatttggatgaagcggcaggcaaggtttcgctggcttgccgttcggcgcaaagcggttggatgaatgttgcctcggatgtacgccgttggttggatttgggggagctttcgggagaacgcaatcatgcttcggcggcgcaaatttccattccggtctgcacggaaagtggcggtgtgttgggcgtggttcatgtggaatttgaatgcgcagagtgtgcgggtacggcagcacaggtggaatgggtggctcttgccttggctttgtccgaacctttgaaactgctgttgggtatgtctgccggaaaagatgggagtgaagatgtctga

SEQ ID NO: 42527 - DNA, 1101 bp, Neisseria meningitidis
atgactgctctgaaaaccaccccatttcatcaagcccatcaagatgcaggcgcgaagctggtcgattttgccggctgggagctgcccatccattatggttcacaaatcgccgaacacgaagccgtgcgcaccgacgccggtatgtttgacgtatcccatatgctcgttaccgacgtagcaggcgcaaatgccaaagcctttttccgcaaattgattgccaacgatgtcgccaagctcgcttttgtcggcaaagccctttattccgctttgctcaacgacaacggcggtgtgattgacgacttaatcgtttaccgcaccaatgaagccgaaacccaataccgcatcgtgtccaacggcgcgacccgcgaaaaagacacggcgcaattccacaaagtcggacaagagttcggcgtcgccttcaatccgcgctacgacctcggcatgctcgccgtacaaggccctaaagccattgaaaaactcctgaccgtcaaacccgaatgggcagatgtcgtccataacctcaaaccgttccaaggcgcggatttgggcaacgactggtttgtcgcccgcaccggctacaccggcgaagacggcgtcgaagtcatcctgcccggcaccgaagccgtcgcattcttcaaagccctgcaacaagccggcgtacagccctgcggcctcggcgcgcgcgacaccctgcgcatggaagccggcatgaacctctacggcaacgatatggacgacgacaccagcccgctcgaagcaggtatgggttggaccgttgacttgaaagacgaaagccgcgacttcgtcggcaaagccgccttgctggcattgaaagaaaaaggcgttgccgtcaaacaggtcggcctgttgctcgaaaaaggcggcatcctgcgcgcgcatatggaagtgttgaccgacaaaggccaaggcgaaaccaccagcggcgtattctccccaagcctgaaacaatccatcgccatcgcgcgcgtaccgaaagattttgacggcgataccgccaaagtgctgatgcgtggcaaagaagtggacgtgcgtgtactgaagctgccgtttgtccgcaacggacagaaacagtttgattga

SEQ ID NO: 42528 - DNA, 657 bp, Neisseria meningitidis
atgactattaaaattattctgatagacgaccataccctcttccgcagcggcattaaagcccttttgtcgcgccaacacggttttgaagtcatcggcgaagccgcagacggcctctcgggtatcaaaatgatcagtcggctgcaacccgatgtcgtcctgcttgaccttgatatgcccggtatgaacggacgcgaagcactctcccaaatcatcagcatcaatccgcagcaggcagtgattatgctgaccgtttccgaagacagcgacgatttgaccgaatgtatgcgcatcggcgcgcgcggctacctgctgaaaaacatcaacgccgactttctgctcgaaagcatacgcaaagccgctgaaggcgataatgtattctcgcccgagatgaccgccaaactcgtcaaaagcctgatttccccccaacctgcccaagggacgcaggcactctcctcacttacccctcgtgaactggaaatcttgggctatctcgccgcaggacacagcaacaaaatcatcgcccgccacctcgatcttgccgaatccaccgtcaaagtccacgttcaaaacctgctccgcaaactcaacctcagcagccgggtgcaggccgccgtttacgccatccggcacaacgtcccccaacctgtgccggaatag

SEQ ID NO: 42529 - DNA, 1035 bp, Neisseria meningitidis; identical to SEQ ID NO: 42242

SEQ ID NO: 42530 - DNA, 1044 bp, Neisseria meningitidis
atgcagattaccgacttactcgccttcggcgctaaaaacaaagcatccgaccttcacctgagttcgggcatatcccctatgattcgggttcacggcgatatgcggcgcatcaaccttcccgaaatgagcgcggaagaggtcggtaatatggtaacttcggtgatgaacgaccaccagcggaaaatctaccagcaaaacttggaagtcgacttctcgttcgaactgcccaacgtcgcccgattccgcgtcaacgccttcaacaccggccgcggtcccgccgccgtattccgcaccattcccagcaccgtcttatcgctggaagaattgaaagccccgagcattttccaaaaaatcgcagaatcgccgcgcggcatggtattggttaccggccctaccggttcgggcaaatcgaccacgcttgccgcgatgatcaactacatcaacgaaacccagccggcacacatcctgaccatcgaagacccgatcgaattcgtccaccaaagcaaaaaatccctgattaaccagcgcgagctgcaccagcacaccctcagcttcgccaacgcgctgcgttccgcattgcgcgaagaccccgacgttatccttgtcggcgagatgcgcgaccccgaaaccatcggcttggcactgaccgccgccgaaaccggacacttggttttcggcacgctgcacacgaccggcgcagcaaaaaccgtcgaccgtatcgtggacgtattcccggcgggagaaaaagaaatggtgcgctctatgctgtccgaatcgctgaccgccgtcatctcccaaaacctgctgaaaacgcacgacggcaacggccgtgtcgcctcgcacgaaatcctgattgccaaccccgccatccgcaacctcatccgcgaaaacaaaatcacgcagattaactccgtcctgcaaaccgggcaggcgagcggtatgcagacaatggaccaatcgctgcaatcgctggtgcgccaagggctgatcgcaccggaagtcgcacgcagacgcgcgcaaaacagcgaaagtatgagtttctga

SEQ ID NO: 42531 - DNA, 777 bp, Neisseria meningitidis
atgaccctcatccacccgaccgccgtcatcgaccccaaagccgaactcgactccagcgtcaaagtcggcgcgtacaccgtcatcggccccaacgtccaaatcggcgcgaataccgaaatcggcccgcacgccgtcatcaacggccacaccagcatcggcgaaaacaaccgcattttccaatttgccagcctcggcgaaatcccgcaggacaaaaaataccgcgacgagccgaccaagctgattatcggcaacggcaacaccatccgcgaattcaccacctttaatttaggcacggtaaccggcatcggcgaaacccgtatcggcgacgacaactggattatggcgtactgccacctcgcgcacgactgcgtggtcggcaaccacaccatcttcgccaacaacgcctcgcttgccggacacgttaccatcggcgactacgtcgttttgggcggctacacgctggttttccaattctgccacatcggcgactacgctatgaccgccttcgccgcaggcgtacacaaagacgtaccgccctactttatggcatcgggctaccgcgccgaaccggcggggctcaacagcgaaggcatgcgccgcaacggttttaccgcagaacagatttccgccgtcaaagacgtgtacaaaaccctctaccatcgcggcattccgtttgaagaggccaaggcagacatcctccgccgcgccgaaacccaagccgagcttgccgtattccgagactttttcgcacaatcgacgcgcggcatcatccgctga

SEQ ID NO: 42532 - DNA, 822 bp, Neisseria meningitidis
atggattttctgattgtcctgaaagccctgatgatgggcttggtagaaggttttaccgaatttttaccgatttccagcaccggacatttgattgtgttcggcaatctgattggttttcacagcaatcacaaggtttttgaaattgccatccagctcggtgcagttttggcggtagtgtttgaataccggcaacgtttcagcaatgtgttgcacggcttgggaaaagaccggaaagccaaccgcttcgtccttaatcttgccattgcttttatacctgccgccgtgatggggctgttgttcggcaaacaaatcaaagagtatctgtttaaccccttgagtgttgcagtcatgctggttttgggcggtttttttattttgtgggtggagaaacgccaaagccgagcagagcctaaaattgccgatgttgatgcattgcgtccgattgatgccttgatgatcggcgttgcccaagtgtttgcactggttccgggtacgtcccgttcgggcagtacgattatgggcgggatgctttggggcatcgaacggaaaactgcgacagaattctcgtttttcttggctgtgccgatgatggttgccgcaacggcttatgatgtcctgaaacattaccgatttttcaccctgcatgatgtcggtttgattctgataggctttattgctgcctttgtttcaggcttggtagcggtaaaagcgttgctgaggtttgtttccaagaaaaattatattccttttgcctattaccgcattgtttttggtattgccatcattatattgtggctgtcaggctggataagttgggaatga

SEQ ID NO: 42533 - DNA, 633 bp, Neisseria meningitidis
atgagaaaaaccaaaaccgaagccttaaaaaccaaagaacacctgatgcttgccgccttggaaaccttttaccgcaaagggattgcgcgcacctcgctcaacgaaatcgcccaagccgccggcgtaacgcgcggcgcgctctattggcatttcaaaaataaggaagacttgttcgacgcgctgttccaacgtatctgcgacgacatcgaaaactgcatcgcgcaagatgccgaagatgccgaaggagggtcttgggcggtattccgccacacgctgctgcactttttcgagcggctgcaaagcaacgacatctactacaaattccacaacatcctgtttttaaaatgcgaacacacggagcaaaacgccgccgttatcgccattgcccgcaagcatcaggcaatctggcgcgagaaaattaccgccgttttgaccgaagcggtggaaaatcaggatttggctgacgatttggacaaggaaacggcagttatcttcatcaaatcaaccttggacgggctgatttggcggtggttctcttcctgcgaacgtttcgatttgggcaaaaccgccccgcgcatcatcgggataatgatggacaacttggaaaaccatcccgacctgcgccggaaataa

SEQ ID NO: 42534 - DNA, 651 bp, Neisseria meningitidis
ttgctcaaactgatcaaccgccaactgaccgaaaaaggcctaaaagtagagaaagcatccgccgccgtcgttgacgccaccattattcagaccgccggcagcaaacagcgtcaggccatagaagtcgatgaagaaggacaaatcaacggccaaaccacaccgagtaaagacaaagatgcccgttggataaagaaaaacggcctctacaaactcggttacaaacaacatacacgtaccgatggggaaggctatatcgagaaactgcacatcacccccgccaatgcccatgagtgcaaacacctgccgcctttgttggaaggactgcccaaagatacgaccgtctatgctgataaaggctatgacagtgaggaaaaccggcaacatctggaagagtgtcagttgttagacggcattatgcgcaaagcctgccgcaaccgtccgctgtcggaaacgcaaaccaaacgtaaccgatatttgtcgaagacccgttatgtggtcgaacaaagcttcggtacgctgcaccgtaaattccgctacgcccgggcagcctatttcggactgattaaagtgagtgcgcaaagccatctgaaggcgatgtgtttgaacctgttgaaagccgccaacaggctaagtgcgcccgctgccgcctaa

SEQ ID NO: 42535 - DNA, 936 bp, Neisseria meningitidis
atgaacccgaaaaaactcgtcatcgccagccgcgaaagcctgcttgctatgtggcaggcaaagcatatccaaggccgtctgaaggctctgtatcccgattgcgaagtcgagattttgggcatgaccacgcgcggcgatcagattttggacaaaactttgtcaaaagtcggcggtaaaggcttgtttgtcaaagagttggaacaggctttatatgacgggcgcgccgatttggcggtgcattcgattaaggacgtgccgatggatttgcctgaaggtttcgcgcttgccgccatcggcgaacgcgccaatccgtttgacgcgtttgtgtccaaccaatacacgcgtttggaagaaatgcccgaaggcgcggttgtcggcacatccagcctgcgccgcgaagcccagttgcgtgcgcgctatccgcatttgcttatcaaacctttgcgcggcaatgtgcaaacccgtttgtccaaactcgataacggcgaatacgacgcaattatcttggctgccgccggtttgcagcgtctgaaattggacggacgcatccgcatgattttgtcggaatccgacagcctgcctgccgccggacaaggcgcattgggtatcgaaattgccgcgcaccgcgaagatttgtatgaagttttgaaacccttgaaccacggtgttaccaatgcctgcgttaccgccgaacgcgccctcgcacgcgctttgggcggaagctgccaagtgcctttggccgcatattgcacggaagaaaacggcttgctgaccttgcgcggcttggtcggacaccccgacggttcggttgtgttgcgggcggacgcgcaagcccctgccgaatatgccgacgcgctcggacgcgctgtcgctaagaaattggcggacgacggtgcgcgggaattgattggagcagtattgaatacggaaaattga

SEQ ID NO: 42536 - DNA, 375 bp, Neisseria meningitidis
gtggatgagaaacaaaaaattaagattcttgattttcaaatcgatttatcctcaatttttaactcttataaaaatcaaatgggtattaatattcaagatgaaaacttaaaaaacaatttctgttcttttatggaagaactgttaaatgacggttcaatccgtttacatgattataccgacggtatcggaattcctctaactggaacttcaaaagaacaagtgcagaaattgaaagacatatggcctactttggaagatgcccaagcaatatggcctgaagacccttggtattacttagaatggctttggtgggatattgcgtgtccaatagatttggccgatttgccgaatattgatatttatgagcaagcgtag

SEQ ID NO: 42537 - DNA, 999 bp, Neisseria meningitidis
atgtccgaaaacaaacaaaacgaagtcctgagcggttacgaacaactcaaacggcgcaaccgccgccgcctcgtaacggcaagttgcctggttgccgcctcctgcatcctgctggcagccgccctcagttccggccctgccgaacagactgccggcgaaacaagcggcgtagaaaacaaagcggcaggtgcggcacaaacccctgccttgaaatccgccgccgacaaaccgcaggacttggcaggcgaagacaagccttctgccgccgacagcgaaatcagcgagcctgaaaacgtaggcgcgccgctggtgctgattaacgagcgcctcgaagacagcaacatcaaaggtttggaagcatccgagaaactgcaacaggcagaaaccgccaaaaccgcaccgaagcaggcaaaacaacgcgctgccgaaaaagtgccggcaactgccgacagtacggatacggtagcggttgaaaaaccgaaacgcactgccgaaacaaaaccgcaaaaagcggaacgcactgccaaagccaagcccaaagccaaagaaaccaaaaccgccgaaaaagttgccgacaaaccgaaaactgccgccgaaaaaaccaaaccggatacggcaaaatccgacagcgcggtaaaagaagcgaaaaaagccgacaaggctgaaagcaaaaaaacagccgaaaaagaccgttcggacggcaaaaaacacgaaacggcacaaaaaaccgacaaagcggacaagaccaaaaccgccgagaaggaaaaatccggtaaaaaagccgccattcaggcaggttatgccgaaaaagaacgcgccttaagcctccagcgcaaaatgaaggcggcgggtatcgattcgaccatcaccgaaattatgaccgacaacggcaaagtttaccgcgtcaaatcaagcaactataaaaacgcaagggatgccgaacgcgatttgaacaaattgcgcgtacacggtatcgccggtcaggtaacgaatgaatag

SEQ ID NO: 42538 - DNA, 666 bp, Neisseria meningitidis
atgccgtctgaaaaaccgtttaggaacacgccgatgaccctacgttacgaaatcttccccgttacccccttccgccaaaactgcaccctgatttgggacgacgaaagcggcgaagccgtcctgaccgatgtcggcggcgacgtgccgttcctgctgcaagcgttggcaaaccgcaaacttacgctcacggcaatctggctgacgcacggccatctcgatcacgcgggcggcgtggtcgaaatgttgaaaacgcataaagtccctgtcctcgggccgcatccggacgatgaattcctgctccaatcgctgccgcaaaccaccgcgcaatacggatttcccgtctcgcccgcctttgcgccgaaccgttggctcgaagaaggcgaaacgctcacggtcggacgctatgcctttcaagtgctgcatattccgggccatacgccgggacatatcgtcttttattgtgccgaggcggaattgctgattgcgggcgacgtgctgttttacgaaaccataggcagaaccgattttccgcgcggcaaccacgccgacttaatcaataatatccgcaacaaattattcacccttcccgaaaccgtgcaagttgtcgccggacacgggcgtatgacttccatcggacacgaaaagcggcacaatccgtttttctaa

SEQ ID NO: 42539 - DNA, 600 bp, Neisseria meningitidis; identical to SEQ ID NO: 36546

SEQ ID NO: 42540 - DNA, 1227 bp, Neisseria meningitidis
atgccgtctgaaactttccggagtaagaaaatgtcccaaaaattgatcttggttttgaactgcggcagctcgtccctcaaaggcgcggtcctggataacggcagcggcgaagtcctgctcagctgccttgccgaaaaactcaacctgcccgatgcctacatcacattcaaagtaaacggcgaaaaacacaaagtcgatctgtccgcacatcccgaccacaccggcgcggtcgaagccctgatggaagaactcaaagcccacggcctcgacagccgcatcggcgccatcggccaccgcgtcgtcagcggcggcgaactgtacagcgaatccatcctcgttgacgacgaagtcattgccggcatcgaaaaatgcatcccgctcgcccccctgcacaaccccgcccacctcttgggcctgcgtgccgcgcaaagcattttcaaaggcctgcccaacgtcgtcgtattcgatacctccttccaccaaaccatgcccgaagtcgcctacaaatacgccgttccgcaggagttgtatgaaaaatacggcctgcgccgttacggcgcgcacggtaccagctaccgcttcgtcgccgacgaaaccgcgcgcttcctcggcaaagacaaaaaagacctgcgtatggtcattgcccacttgggcaacggcgcgtccattaccgccgtcgccaacggcgaatcgcgcgacaccagtatgggcctgaccccgctggaagggctggtaatgggtacgcgcagcggcgacatcgatccttccgtattcggcttcctcgccgaaaacgccaatatgaccatcgcccaaatcactgaaatgctgaacaaaaaatccggtctgctcggcatttccggcctgtccaacgactgccgcaccattgaagaagaagccgccaaggggcataaaggcgcgaaattggccttggatatgtttatctaccgccttgccaaatacatcggcagtatggcggttgccgcaggcggtttggacgcactggtctttaccggcggcatcggcgaaaactccgacatcatccgcgaacgcgtgatcggctacttgggcttcctcggtctgaacatcgaccaagaagccaacctgaaagcccgcttcggcaacgccggcgtgattaccactgccgacagcaaagccgttgccgtggtcattccgaccaacgaagagctgatgattgcccacgacactgcccgtttgagcggtctgtaa

SEQ ID NO: 42541 - DNA, 1185 bp, Neisseria meningitidis
atgggcaaacatattcttttaggtgtaacgggcagtattgcggcgtataagtcttgcgagttggtgcgactgctgaaaaaacaggggcattcggttacggtggttatgagccgctcggcaactgaatttgtttctccgctgacttttcaggctttaagcggcaatcctgtcctgaccgacacgcacggcggcaacggttcaaacggtatggaacatatcaacctgacccggaatgcggatgtttttctgattgcgccggcaagtatgaataccgtggcaaaaatctgtaacggcgtggcagataacctactgaccagtctggcagccgcacggaaatgtccgcttgccatcgcgcccgcgatgaatgtggaaatgtggctcaaccctgccaaccaacggaatatcgcacaactggtttcagacggcattactgtctatatgccgggcttgggcgaacaggcttgcggagaaaatggtatgggaaggatgccggaacctgccgaattgctggatctgcttccggatttatggacaccgaaaattttaaagggcaaaaaagtcttgattaccgcaggtgcgacatttgaagccattgaccctgtccgaggcatcacaaatatctccagcgggaaaatgggcgtggctttggcgcgggcgtgccgtgccgccggtgcagaagtcagcctgattcacggacagcttcaaaccgcgctgcctttcggcatatccgatacggttcaagccgtcagtgccgaaaatatgcatcgcgcagtgcatcgtttaatcgacaaacaagatgcttttatttctgttgccgccgtctcagactatagggttaagaataggagtactcaaaaattcaaaaaagataaaaatgccaaaccgttatccatcgaattggatgagaaccccgatattttggcttctattgcctcattaccgaacccgccgttctgcatcggttttgccgctgaaacggagaatgtaatgacatatgcgcgggaaaaacgtattaagaaaaagctaccgatgatcgttgccaatgatgtttcaatcgcaatgggcaaaccgaccaaccggattaccattatcggggacgacggggaactgtcttttcccgaaacaagtaaagatgaagcggcaatgcggattgttgaaaggcttgccgtatatttgagcaaataa

SEQ ID NO: 42542 - DNA, 231 bp, Neisseria meningitidis
atgaacatcgttaaaaaatacgctgtaaaagcagccttggcagccggtatcttcacaccggccattgttatggcagatacctttgatccatccgcgattggtacgcaagtagcgaatgtaatcatgggtttcgtgtcaatggtttccgccgtgggtatggcggccattaccgtgattcttgcaatccaaggcttcaaaatggcttggagcatgattaaatctgtcaaataa

SEQ ID NO: 42543 - DNA, 123 bp, Neisseria meningitidis
ttgagcaagcattattttgtctcctgttgtacggtttcagacggcatcggtttgccacgtttgtaccaagtggcgcgggaaatgccgagactctcccacggtttatcgcagctgcaattttaa

SEQ ID NO: 42544 - DNA, 960 bp, Neisseria meningitidis
atgatgaaagtcctctttatcgccgacccgatggcaagtttcaaaacctataaagacaccacctacgcgatgatgcgcgaaatggcaaaacgcggctggcggctgtttcacacattgagcggggaattgtctgtaaacggcggtttggtaacggcgcaggcatcggcatttgaatttttgggtgcaaaaaacgatgatgatcatgcgtggttcaaatctgccgacaaagttcagacggcattggaagcatttgatgccgtgattatgcgtaccgatccgccgttcgatatgcaatacctctacgccacccaattactgacgctggcggaacagcagggcgcgaaggtctttaacagcggacaggcgatgcgcgactttaatgaaaaactggcgattttgaacttcagccgctttatcgcgcccacgctggtaacgacccgttccgccgatgtccgcacatttttgaaagaacacggcgacatcatcatcaaaccgctcgacggcatgggcggtatgggaattttccgcctgaccgaaaaagaccccaacatcggcagcatcctcgaaaccctgatgcagcttgattcccgcaccattatggcgcaacgctacattcccgaaatcgtacacggtgacaaacgcatcctgattatcggcggcgaagtcgtcccctatgctttggcgcgtatcccgcaaaacggcgaaacacgcggcaaccttgcggcaggcgggcgcggcgtggcgcaggaattgggcggacgcgaccgcgaaattgccgaaacgctcgcccccgaactcaaacggcgcggcatcctgctggccggtttggacgttatcggcagcaacctgaccgaagtcaacgtaaccagcccgaccggattccaagaaattatgaaacaaaaaggtttcgatgtggcggcaatgtttgccgatgccgttgccgcgtggtcggtacgttaa

SEQ ID NO: 42545 - DNA, 213 bp, Neisseria meningitidis; identical to SEQ ID NO: 41375

SEQ ID NO: 42546 - DNA, 504 bp, Neisseria meningitidis
atgtcagacaagttcaaccaattcatcaaccgcgtcctctctcacgagggtggttacgccaaccatcccaaagaccccggcggcgaaaccaattggggcatcactaagcgcaccgcacaggcaaacggctacaacggctccatgcgtgccatgacgcgtgaacaggcaatcagcatttaccgtaaagcgttttgggagcgttaccgcgccgaccaaatgccggaagcggtcgcgttccaattttttgatgcctgcgtcaaccacggttacggcaatgccgcccgtatgctgcaacgcgccgcaggcgtaccggacgacggcgttatcggagcagtcagcctcaaagccatcaattcccttcccgaaaacgaccttttattgcggttcaacgccgagcgtctggtcttttataccaagctcggtacgttcacctctttcggcaagggctgggtacgccgtgtggcgcaaaacctgattcacgcgtctgcagataacactgattaa

SEQ ID NO: 42547 - DNA, 1914 bp, Neisseria meningitidis
atgttgaatattaccttgccggacggctcagtccgccaatacgaatcccccgttaccgtggctcaaattgctgcgtctatcggtgccggtttggcgaaggcgacggtggcaggcagggtaaacggcaaattggtcgatgcgtgcgacccgattgttgaagattctgctgttcaaatcattactccgaaagatcaggaaggcatcgaaatcatccgccattcctgcgcgcatcttgtcgggcatgccgtcaagcaactctatcctaatgcaaaaatggttatcggccccgtcattgaagagggcttttattacgacatcgccacggaaaaaccgtttacaccggaagatgttgccgccattgaagcgcgtatgaaagaattgattgcccaagactatgatgtggtcaaaatcatgactccgcgtgcggaggcgattaaaatttttcaagagcgcggcgaagaatacaaactgcgcctgattgacgatatgcccgaagtggaagcgatggggatgtatcatcaccaggaatatgtcgatatgtgccgcggcccgcacgttccgaatacccgtttcctgaaaaacttcaaactgaccaagttggcgggcgcatactggcgcggcgacagcaataatgaaatgctgcaacgcatatacggtacggcttgggcgacaaaagacgaattaaaagcctatattcaacgtatcgaagaagccgaaaagcgcgaccaccgcaaacttggcaagcaattggatctgttccacctgcaagacgaagcgccgggcatggtgttttggcatcctaaaggctgggctttgtggcaagtgattgaacagcatatgcgtaaagagctgaacgccgccggttataaagaggtcaaaacgcctcaaatcatggataaaaccttttgggaaaaatccggccattgggacaactacaaagataatatgttcgtaaccagttcggaaaaacgcgaatatgcggttaaaccgatgaactgtccgggtcatgttcaaatttttaacaacggtttgcgttcgtatcgagatttgccgatgcgtttggcggaattcggttcttgccaccgcaatgagccgagcggtgcgctgcacggtctgatgcgggttcgcggttttgtgcaggatgatgcgcatattttctgtaccgaagatcaaatcgtcagcgaggctcgtgcgttcaatgaattgttgattcgcatctacaaacagttcggtttccatgatgtatccgtcaagctttctcttcgccctgaaaaacgcgcaggttcagatgacgtgtgggataaggcagagcagggtttgcgcgaggcattgactgcctgcggcgtggaatggggcgaattgccgggcgagggtgcgttttacgggcctaaaatcgaatatcatgtcagagatgccttgggtcgttcttggcaatgcggtacattacaactggatttcgtattgccggagcgtttgaatgccgaatatgtaactgaaaacaacgaccgtgcgcgtcctgttatgttgcatcgcgccattttaggttctttggagcggtttatcggcattctgattgagaaccatgcaggctcattcccgttatggttggctccggttcaattggtaattatgaatattaccgaaaatcaggcagattattgtcgggaagtggctgccaaattgcaggcggcaggattccgcgccgagttggatttgcgtaacgaaaaaatcggttacaaaatccgcgacaacagccaataccgtttcccttatcaaatcgttgtcggcgataaggagaagcaggaaaacaaagtggcggtacgccgcaaagcagaagatttgggttctttggatttggatgatttcattgcgcaattgcagcaagaaatcactgatgccctcgtcaatcattaa

SEQ ID NO: 42548 - DNA, 531 bp, Neisseria meningitidis; identical to SEQ ID NO: 39309

SEQ ID NO: 42549 - DNA, 1458 bp, Neisseria meningitidis
atgcacaaaatcctgcccatcgcccacgtcctctcccgactgggtatgctgttttcctttatcctgctgatacccgccgccctctcctacgccttttcggacggcgcgtacaccgccttcgccaccaccgcgaccgttaccctttccggctcgtgcatcgtccggctcgccaccctccggttcaggcgcgaactgcgcccgcgcgacggctttaccctcgtcctgatgttgtggctggcgtttgccgctatggctgcgatgccgatgtacctgtatttcccgaatatgggctttaccgacgcattttttgaatcgatgtcgggactgaccaccaccggcgcgaccgtcatcccccacgtcgacgggctcgccccctccgtcaacttttggcggcatatgctcaactggctgggcgggatgggcatcatcgtccttgccgtcgccatcctgcctatgctcggcgtaggcggcacgcagttattcaaagccgaaatccccggcattgacaaagaaagcaaaatgtcgccgcgcatttcccaagtggcgaaaaaactttggttcggctacaccctgatcaccatcctcgcggcagcctgcctgcattttgccgggatgggctggttcgatgccgtctgtcacgcgatggctaccctctcgctgggcgggttttccacccacgatgccagcatagcttattacaactcccccctcatcgaagcggtcatcatcgttttcaccattgtcggcggcatcaattttgccaaccatttcgccgccctcaacagccgcagcctcaaaacctattggaaagacgaagaatgccggacgatgctgctgctgctctccggcagcatccttgccgccgccctgtacctgtggcacaccggctattacgccggttttaccgaatccctgcgctacaccgccttcaacttcgtctccatcggactggcaaacgggctggccaacaccgacttcgcacaatggccgctcctgatttccctgtggatgtttttcctcgccaacatcctcgccaactccggctcgaccggcggcggcatcaaaaccatacgcgccctcgtcctgttcaaattcagcctgcgcgaaatgatggtgctgctgcaccccaaagccgtccgcaccgtcaaaatcagcggcaaggccatacccgaccgcctcgcgctgaccgttatgtccttcatcttcatctactttatgaccgtcgtcctcttcagcttcctgctgatggcgagcggtatggaatttaccaccgccttcaccgccgtcatcgcctgcatcaccaacgccggccccggcctgggcgaagtcgggcccgccggcaattacgccggtttggacgtgatgcagaaatggatctgcgttaccgccatgctcttgggcaggctggaaatcttcaccgtcttcatcctcttcacccccgcctactggaagaaataa

SEQ ID NO: 42550 - DNA, 2595 bp, Neisseria meningitidis
atgtccaaatccgccgtttccccaatgatgcagcaatacctcggcatcaaagcgcaacataccgacaaactggtgttttaccgtatgggcgatttttacgagatgtttttcgacgatgcggtagaagcggcaaaacttttggatattaccctgaccacgcgcggacaggtggatggcgagccggtcaaaatggcaggcgtgccgtttcacgccgccgaacaatatctggcgcgcctggtcaagttgggcaaaagcgtggcgatttgcgaacaggtcggcgaagtcggcgcgggcaaagggcctgtggagcgcaaagtcgtgcgcatcgtaacgcccggcacgctgaccgattccgcattgctggaagacaaggaaaccaaccgcatcgttgccgtgtcccccgacaaaaaatacatcggtttggcgtgggcatcgctgcaaagcggcgaattcaaaaccaagctgacaactgtggataaattggacgacgaactggcgcgcctgcaggcggcggaaattctgttgcctgacagtaaaaacgcaccgcaacttcagacggcatcgggtgttacgcgcctgaacgcgtggcagtttgccgccgacgcgggggaaaaactgctgacggaatatttcggctgccaggatttgcgcggcttcggtttggacggcaaagaacacgccgttgcgattggcgcggcaggtgcactgttgaactatatccgtctgacgcaaaacctgatgccgcaacatttggacggcctgtcgctcgaaaccgacagccaatatatcggtatggatgccgccacgcgccgcaatctcgaaatcacgcaaaccctctccggcaaaaaatcgccgaccctgatgtccacgctcgacctttgcgctacccatatgggcagccgcctcttggctctctggctgcaccaccctttacgcaaccgcgcccacatccgagcgcgccaagaagccgttgccgcgctggaaagccaatacaaacccctccagtgccgtctgaaaagcattgccgacatcgaacgcatcgccgcccgtattgccgtgggtaacgcccgcccgcgcgacctcgccgccctgcgcgacagcctgtttgccctgtccgaaatcgaattgtccgccgagtgcagcagtctcttaggaaccctcaaagccgttttcccggaaaacctatccacagccgaacagctccgccaagccattttgcccgaaccttccgtctggctgaaagacggcaatgtcatcaaccacggttttcatcccgaactggacgaattgcgccgcattcaaaaccatggcgacgaatttttgctggatttggaagccaaggaacgcgaacgtaccggtttgtccacacttaaagtcgagttcaaccgcgttcacggcttttacattgaattgtccaaaacccaagccgaacaagcacctgccgactaccaacgccggcaaacccttaaaaacgccgaacgcttcatcacgccggaactgaaagcctttgaagacaaagtgctgactgctcaagagcaagccctcgccttagaaaaacaactctttgacggcgtattgaaaaaccttcagacggcattgccgcagcttcaaaaagccgccaaagccgccgccgcgctggacgtgttgtccacattttcagccttggcaaaagagcggaacttcgtccgccccgagtttgccgactatccggttatccacatcgaaaacggccgccatcccgttgtcgaacagcaggtacgccacttcaccgccaaccacaccgaccttgaccacaaacaccgcctcatgctgctcaccggccccaatatgggcggcaaatccacctacatgcgccaagtcgcgctgattgttttattggcacacaccggctgttttgtgcctgccgatgccgccacaatcgggcccatcgatcaaatcttcacccgcatcggcgcatcggacgacctcgcctccaaccgctccactttcatggtcgaaatgagcgaaaccgcctacatcctgcatcacgccaccgaacaaagccttgttttaatggacgaagtcggacgtggtacttccactttcgacggcctcgccctcgcgcacgccgttgccgaacacctgctgcaaaaaaacaaatccttcagcctgtttgctacccactatttcgagctgacctacctgcccgaagcccacaccgccgccgtcaatatgcacctttccgcgctcgaacagggacaggacatcgttttcctgcaccaaatccaaccgggtcccgccggtaaaagctacggcattgccgtcgccaaactcgccggcctgcctgtacgcgcattgaaatccgcccaaaagcatttgaacggactggaaaaccaagccgccgcgaaccgtccccaactggatattttcagtaccatgccgtctgaaaaaggagatgaaccgaatgtgggcaactttgtggataaagcagaggaaaaacattttgaaggtatattggcagcagccttggaaaaactcgatcccgacagcctgaccccgcgcgaagcattgtcagaactgtaccgtctgaaagatttgtgcaaatccgtatcttaa

SEQ ID NO: 42551 - DNA, 1035 bp, Neisseria meningitidis
atgagtacttcattgagttaccgcgatgcaggtgtcgatatcgacgcaggcgaccaactggtcgaaaacatcaaaccgtttgccaaacgcacgatgcgcccggaagtattgggggatttgggcggttttggcgcattggtcgaaatcggcaagaaatatcaaaatcccgtattggtcagcggtacggacggcgtgggtaccaagctcaagcttgcctttgattgggataaacatgatacggtcggcatcgaccttgttgcaatgagtgtcaacgatattttggttcaaggggctgagcccttgtttttcttggactattttgcctgcggtaaattggatgttccgcgcgcgaccgatgttattaaaggcattgcccaaggttgcgaagaatccggttgcgccctgattggcggggaaactgccgaaatgccgggtatgtatcccgtcggagaatacgatttggcgggttttgccgtcggcgtggtggaaaaagagaatgtcattaccggccgcagcatcggcgtaggcgatgtggtattgggtttggcttccaacggcgcacattcaaacggctattcccttatccgtaaaatcatcgaacgcgacaatcccgatctggatgccgagtttgataatggcaaaaccttgcgggaggctgttattgcgccgacccgtctgtatgtgaaaccgattcttgccgctttggaaaaatttaccattaaaggtatggcacacattaccggcggcggcattaccgaaaacgtgccgcgcgtgttgcctgaaaacacggttgcacaaatcgatgctaaatcgtgggaattgcccaagctcttccaatggcttcaaaaggcgggcaatgtggaaacccaagaaatgtaccgaacctttaactgcggcatcggcatggtcgttattgttgctgccgaagatgccgatgcggttcagggtctcttgggtgaacaaggtgaaacagtttaccgtttaggtttgatccgtgagcgtcagggagacgagcatcaaacccaggttgcctga

SEQ ID NO: 42552 - DNA, 720 bp, Neisseria meningitidis
atggcgacactgtccgacaaaaccatcttagtaaccggcgcatcgcaaggtctgggcgaacaggtcgccaaagcctatgcggcggcaggcgcaaccgtgattttggttgcccgtcatcagaaaaaactggaaaaagtgtatgacgcgattgtcgaagccggataccccgaaccattcgccatctgctttgaccttattagcgcggaagaaaaagaatttgaacatttcgccgccaccattgccgaagccacgcaaggcaaactggacggcatcgtccactgcgccggctatttttacgccctctcgccgctggatttccaaaccgtcgccgaatgggtcaaccaataccgcatcaacaccgtcgcacctatggggctgacccgcgccctgttcccgctgctgaagcagtcgcccgacgcgtccgtcatcttcgtcggcgaaagccacggcgaaacacccaaagcctactggggcggcttcggcgcgtccaaagccgcgttgaactacctgtgcaaagtcgccgccgacgaatgggaacgcttcggcaacctgcgcgccaacgtcctcgtccccggccccatcaattccccgcaacgcatcaaatcccatccgggcgaagccaaaagcgaacgcaaaagctacggggacgtgctgcccgcatttgtctggtgggcaagtgccgaaagcaaagggcggagtggcgaaatcgtttacctctaa

SEQ ID NO: 42553 - DNA, 2646 bp, Neisseria meningitidis
ttgagagacattgaaaaaattatgaaaacctccgaactgcgccaaaaattcctaaaattttttgaaaccaaaggccacaccgtcgtccgctcttccagcctcgtgccgcacgacgacccgaccctgctgtttaccaacgcgggcatgaaccagtttaaagacgtattcttaggtttcgacaaacgcccgtacagccgcgccaccaccgcgcaaaaatgcgtacgcgcaggcggcaaacacaacgacttggaaaacgtcggctacaccgcccgccaccacaccttctttgaaatgatgggcaacttctccttcggcgactacttcaaacgcgacgccatccacttcgcttgggaatttctgacttcccccgaatggctcaacatccctaaagacaaactgttggcgaccgtttacgcggaagacgacgaagcctacaacatctggttgaacgaaatcggtatgccgtccgagcgcatcgtccgcatcggcgacaacaaaggcgcgaaatacgcatccgacaacttctggcaaatgggcgacaccggcccttgcggcccctgctccgaaattttctacgaccacggcgaagaaatctggggcggcattcccggcagtcccgaagaagacggcgaccgctggatcgaaatttggaactgcgtatttatgcagttcaaccgcgacgaacaaggcaatatgaacccgcttcccaaaccttccgtcgataccggtatgggcttggaacgcatagccgccgtcatgcagcatgttcacagcaactacgaaatcgacttgttccaagacctgctcaaagccgttgcccgcgaaaccggcgcgccgttcagtatggaagaacccagcctgaaagtcatcgccgaccacatccgctcctgctcgttcctgattgcagacggcgtcttgccttccaacgaaggccgcggctacgtattgcgccgcattatccgccgcgccgtgcgccacggttacaaactgggtcaaagcaaaccgttcttccacaaactcgttgccgatttggtcaaagagatgggcggtgcctaccctgaattgaaagaaaaacaagcccaaatcgaagaagcattgaaaaacgaagaaagccgttttgcccaaacgctggaaaccggtatggctttgttggaaaacgcgctggtcaaaggcggcaaaacactcggcggcgaaatcatcttcaaactctacgatacctacggtttcccatacgacttgactgccgacatctgccgcgaacgcaatatcgaaccggacgaagcaggcttcgagcgcgaaatggaagcccaacgcgcacgcgcacgcgccgcccaaagcttcaaagccaacgcccaactgccttatgacggtcaagacaccgagtttaaaggttatagcgaacgccaaaccgaatccaaagtcctcgccctctacaaagacggcgagcaagtcaacgaattgaacgaaggcgacagcggcgcagtcgtcatcgactttaccccgttctatgcagaatccggcggccaagtcggcgatgtcggctatatcttctcaggcgaaaaccgctttgaagtacgcgatacccaaaaaatcaaagcggccgtattcggtcaattcggcgtacaaacttcaggccgtctgaaagtcggcgacagcgttaccgccaaagtggacgacgaaatccgcaatgccaatatgcgcaaccacagcgcaacccacttgatgcacaaagccctgcgcgatgtattgggcagacacgtcgaacaaaaaggctctttggttaccgccgaatccacccgtttcgacatttcccatccccaagcggtaactgccgaagaaattgccgaagtagaacgccgcgtcaacgaagccattttggcgaacgttgccgtcaatgcagccattatgagcatggaagacgcgcaaaaaaccggcgcgatgatgctcttcggcgaaaaatacggcgaagaagtgcgcgtactgcaaatgggcggtttctctaccgaattgtgcggcggcacacacgtttcacgcaccggcgacatcggcctcttcaaaatcatcagcgaaggcggtattgccgcaggcgtgcgccgtatcgaagccatcaccggcctgaacgcactcaaatgggcgcaagagcaagagcgtttggtgaaagacattattgccgaaaccaaagcccaaaccgaaaaagacgtactggcaaaaatccaagcaggcgcggcacacgccaaagcattggaaaaagaattggcacgcgccaaagccgaactcgccgtccacgcaggcgccaaactcttggacgatgcaaaagacttgggcgcagccaaactcgttgccgcccaaatcgaagccgacgcagccgccctgcgcgaaatcgttaccgatttaaccggtaaatccgacaacgccgtgattcttttagcggcagtaaacgacggcaaagtctccctgtgcgccggcgtatccaaaccgttgaccggcaaagtgaaagcaggcgatctggttaaatttgcagccgaacaagtcggcggcaaaggcggcggcagaccagatttggcgcaagccggcggcacggatgccgacaaattgcccgccgtgttggatagcgtgaaagactgggtcggcgcgaagctggtttga

SEQ ID NO: 42554 - DNA, 390 bp, Neisseria meningitidis
atgtggaaaatcataaaagaggatagtgatgatttaggatttgcaattaaatgcttattctctcagtctattgatttaaatgaattcaagttatggattgaacaagtaatacgcgatatgcccatcgaggacatccctttttatatttttgatttggcggattttgatgggggaattgccgatattgacaatattgtaggttttgtttcaagttgcagactatcaaaatcgaaaaaaaatgccttgaccggcattgccttcttaagggggatagatgtctatgatccgcctatttcaaaagaaaaagcattaaaagccttagagaaacatcctgaaatttatcagaaatttcagcatttctttccgtttgtagaactgcccccgctttaa

SEQ ID NO: 42555 - DNA, 1296 bp, Neisseria meningitidis
atgcccgcgcctgatttgggatttgccttaagtctgccgccaaaaaaggcaatcgagtggctggaaagtaaaaaggttacggcggagagctaccgcaatctgacagcctccgaaattgccaaagtctatacgattgcccgcatgaccgacttggatatgctcaacgacatcaaaacttcgatggttgaatcggcaaaaagtggacagtcgtttgacgattggcgaaaaggtatcttgaatctgctcagcaacaagggctggctgcatccgaacgggcataacggtaaggatatcatcgacccagccaccggcgaggtattcggttcgccgcggaggttggagacgatttaccgtaccaatatgcaaactgcctacaacgccggtcaatatcaaggatatatggcaaatattgatgcacgaccttattggatgtatgacgcggtaggcgacagccgcacccgtccggcgcattcggcaatagacgggctggtgtaccgctacgacgacccgttttgggcaacgttttacccgcccaacggctacaactgccgctgctcggtcatcgcgctgtcggagcgggatgtggaacgccaggggcggattgttgggcaaagcacggcggacaatctggtcgagacccataaaatctacaacaaaaaaggcgatacttatctgacccttgcctataaagcaccggatggcagtctgtacacgaccgatcgaggatttgattacaacgccggacgaatgaactaccgccccgatttagacaagtacgaccgtgcgttggcgcatcaatttgccaaagcggaaatgggtggtgcggattttaaaaccagctttaaacagcttgaaaaagagttttatgaagtcaagcaacgtttggatattgatggcaagcccgataaagagcagaaaatcaaaatccgaaatgcgctatcaagacagcttaaatttgctgcgggtgtattgagcaaggaaacgcaagaattggcaggtatgacacgagcgacggtgtggctgtctgatgatacgttggttaaacaggtagacagccgtgaggggcagaatttcgatgactcctactatgcttttttgccggatatgctgcaaaaccctgaacatgtcatccgcgacaatcgtgaattgattttcacagctcgctataaaggctcggcattgtgggcagttttaaaatatattaaggaggtggatgagatttatctacagtcgtaccgaatcagtaacgacaaagagattgccaaatttatggcgaagaagaaagtattgaaatag

SEQ ID NO: 42556 - DNA, 360 bp, Neisseria meningitidis
atgccacgcgtaaaacgcggtgttaccgctcgtgcccgtcaccaaaaaatcttcgcgttagccaaaggctaccgcggccgtcgtaaaaacgtttaccgcgttgccaagcaggcggtaatgaaagccggtcaatacgcgtaccgtgaccgccgccaacgcaaacgccaattccgtcaattgtggattgtccgtatcaatgcaggtacgcgtgaaaacgggttgtcttacagcaaatttatgaacggtctgaaacgcgcctctattgaaatcgaccgcaaagtattggctgatttggccgtgttcgataaagccgcttttgcacaattggttgaaaaagccaaagctgctttggctgcttaa

SEQ ID NO: 42557 - DNA, 3420 bp, Neisseria meningitidis
atgcaaaatatgaaaaaccaagtacgcggatcaggcatggatgcccgatccaatccggccaatgtttcagacggcctgcaaaacagttcgggtcatatcggtaccaacacgcgttaccgcctgaccaaactcggcgaacagatagcgcgcctacccatcgacccgaaaatcgcgcgcattttgctggcggcgaagaaacacgactgcatggcggaaatattggtgattgcgtccgcgctgtcgattcaagacccgcgcgagcggccgctagaagcgcgcgatgcctcagccaaggcgcacgagcgttttaccgacaagcagtccgatttccttgcctatctgaacatttgggacagcttccagcgcgaacgcgataaaggcttgtccaacaagcagctggtgcagtggtgccgccaatatttcctgtcgcacctgcggatgcgcgagtggcgcgagctgcaccaccagcttgcccaaaccgcgattgaaatgggtttaaccaccaaggaagccgctttcagacgacctcccgaagtcaggcagcttacgtcgtctgaaaatgcgggtgaccaagacctatctgctaaactcaaacaaaaacaactggataaaaagcaacaccgcgcccaaatccgcgccgccaaagaagcgggctacgaacaaatccaccgcgccctgctcactggccttatcgccaacgtcggcatgaaatcgcccgacggtaacgactacaccggcgcgcgcggcagccgcttccaccttttccccgcctccgccctgttcaaagccaaacccaaatgggtgatggcggcagaattggttgaaaccacgcgcctttacgcgcgcgacgtcgccgttatccagcccgaatggatagagcaggaagcgccgcacctcgtccgctatcattatttcgagccgcattgggaacaaaaacgcggcgaagtcgtcgccagcgaacgcgtgacgctttacggtctgaccgtattgccgcgccgccccgtgtcttacggcaaagttgcccccgaagaagcgcgcgaaatctttatccgcagcgcgttggtggcgcaggaatgcgatttgaaagcggatttttttgtccacaacaaaaagctgattaaagaaattaccgaactcgaacacaaatcgcgcaagcaagacgtgctggtcgatgacgaagccctgtttgcgttttataacgaacgactgcccgaaatggcttggaaagacgcgcaaggcagcgtttggggaagtgaagattccgtacggattattgaatctgacaaagccgagaggtcgtctgaaaatgagcgcaacgagtttcgtaaaaacaagcgtaatgggtctcgccaaaatgaaaatcacggcaacaccgtaggttgggttgaaaacccaacatcagccgcaactgcaaaaactgttgggtttgacaatccaacctacgctgcccaacaaaccaccccctcccccgtgggggagggtcggggagagggcaaaacagttgccgcacaaaccaacttttccgcaaccgcagcaaaccctctccctaaccctctcccgcaggagagggaacagagtgccgcagcttcaacgatttcagacgacctgcgtcctgcaaatctgcagcaaaccgccccctcccccgtgggggagggctggggagagggcaaaacagttgccacacaaaccaacttttccgcaacctcaacaaaccctctcccgcaggagagggaacagagtgcctcagcttcaacgttttcagacgacctgcgtcctgcaaatctgcagcaaccctctccctcccccgtgggggagggctggggagagggcaaaacagttgccacacaaaccaacttttccgcaacctcaacactttcagacgactccaaacccaaaaagcagcctgcaccccaaaaaaaccgtctgaaacccctacccctcgccgacatccgcaccttccaagcctggctcaaaaccgccgagcgcgacaatccgcgcctgctgttcctcagccgcgacgatctgatgcaacacgccgccgcacacattaccgaagaacagttccccaaattctggcaaaccgcagacggcaaattcaaactttcctaccgcttcgagccgcaccatccgctagacggcgtgaccatgaccgtgccgctgaccgtcctcaaccgcctgcacgcgccgtcgctcgaatggctggtgcccggcatgatacgcgaaaaaatccagttgcaaatcaaagcactgcccaagcaaatccgccgcatctgcgtgcccgtgcccgaattcatcacccaatttttaagccaaaaccccgaccgcaacgcccccatcctgccccaactcgcccaagccatcgccaaaaccgcaggcgacatccgcatattcgagcaaatcaaccaagacgaatgggccgcgttcaggctgcccgaacactgctatttcaacctccgcattatcgacgacggcggacaagagcttgccggcggccgcaaactgcacgaattgcaacaacaactcggtcaagctgccgccgttaccttccgtgacaacacccaagaatttgagcgcgacaacgtcaccgcatgggacatcggcaccctgcccgaatccatcaaattcgcacgcggcaaacaacagctcaccggctatctcggcctacaaaaagaaaaagacggccgcatcgccctgcgcctgtttgataccacagaagccgcagagcaggcacaccgtcaaggtgtcatcgaattgatgaagctgcaattaaaagagcaggtaaaggatttgaacaaaggcatccaaggcttcacccaagctgccatgctgctcaaacacatcaacgccgacactctgcgcgacgacctcacccaagccgtctgcgaccgcgcctttatcggcgaagacgagctgccgcgcaacgaaaaagccttcaaagaacaaatcaaacgcgcccgcagccgcctgcccgccgtcaaagaagccctcagccgctacctgcaggaaaccgccgccgtctacgccgaactcaacagcaaactcggcaaacacccattgacccaccttctaagactacgcctgcaaaccctgctcgccgccggcttcgccacccgaaccccgtgggcacaatggccgcgcctccccatctacctcaaagccatgaccctgcgcctcgaaaaatacagcagcaaccccgcccgcgacgcagcccgcgaagccgatatccaagagctggaacaaatgtggcaggaaaaaacagacagcctgattaaacaaggtctccccatttcagacggcctcgccgcgtttaaatggatgattgaagaattgagggtgtcgctgttcgcgcaggaattgaagacaccgtatccggtgtcggtgaagcggctgttgaaagagtgggaaaaaattgaaaaataa

SEQ ID NO: 42558 - DNA, 183 bp, Neisseria meningitidis; identical to SEQ ID NO: 38993

SEQ ID NO: 42559 - DNA, 1389 bp, Neisseria meningitidis
atgtctattaaatttgccgatttgaaccttgataaaaacattttgtccgccgtcagcagcgagggttacgaaagcccgacgccgattcaggcgcaagccattccgtttgctttggaaggccgcgacatcatggcttcggcgcaaaccggctccggcaaaaccgccgcctttctgttaccgactttgcaaaaactgaccaaacgcagcgaaaaaccgggcaaaggcccgcgtgctttggtgttgaccccgacccgcgaactggcggctcaagtcgagaaaaacgcgctggcgtatgccaaaaatatgcgttggttccgcaccgtcagcatcgtcggcggcgcgtctttcggctaccaaacccgtgccctgagcaaaccggtcgatctgattgtcgccacgccgggccgtctgatggacctgatgcaaagcggcaaagttgattttgaacgtttggaagtgctgattttggacgaagccgaccgtatgttggatatgggctttatcgacgacatcgaaaccatcgtggaagcaacgccgagcgaccgtcagactttgttgttctccgccacttgggacggcgcggtcggcaaactggcgcgcaaactgaccaaagaccctgaaatcatcgaagtcgaacgcgtggacgatcaaggcaaaatcgaagaacaactgctgtactgcgacgatatgcgccacaaaaaccgcctgctcgatcatatcttgcgcgatgccaatatcgatcaatgcgtgattttcacgtccaccaaagccatgaccgaagtcattgcggatgaactgtacgaaaaaggtttcgccgcaaactgcctgcacggcgatatgccgcaaggctggcgcaaccgcacgctgatggatttgcgtaaaggccgctgcaaaattttggttgccaccgatgttgccgcacgcggtatcgacgtaccgaccattacccacgttatcaactacgacctgccgaaacaggcggaagactacgtccaccgcatcgggcgcaccggccgcgcaggccgcacgggtattgcgattacgtttgccgaagtgaacgaatacgtcaaagtccacaaaatcgaaaaatacattaaccgaaaactgcccgaactgaccatcgaaggcatggaaccgacccgcaaacgcaaatccgcaggcggcaagccgaaaggcaaaggcggctggggcgatcgtaaatccggcggttggcgcggcgatcataaaccgagcaaagaaggcttcggcggcaaaacgcgcggcgaaggtttcaagaaagaaggctttaagagagacggtttcaaaaaaaccggcgaaggcttcaaaggcaaacgcaaagccggcgattcttttgcaggcaaaggcgaacgccgttacaaagaccgctaa

SEQ ID NO: 42560 - DNA, 771 bp, Neisseria meningitidis
atgctgaaacaggctgtaacaggtatgaccaagcaagagcgcatcacgacgcaagcctacaatgagatgaccaaatccgtggcaggttcaaacagcatagtccttaacgatgtccaaggcgatacgaccatcaacaaccatcatacgcatacgcacaaccacagcgatgccgatggcaaagcactgtcgatgaggctcacaccccgtcctttgttgtcagaccgtcaggcggcggctttcgcccgtacaggcaaactcacgggcagtttcgacctgtttgcttcggtggtcgccccctcgcagtacacgtttgccgttgccatgcccgacacgtccatgtcgccggttatcgaaaagggagacttgctggtggtcgagccgcgtatgtgccctgcggacgaagacatcgcgctgattgaactgtccgacaagcggctggtcgtcgcgcaccttgttatcgatattgcgggcaggatgctgatttatcagacgggcaggccgtctgaagcctttgacctgcccgaaggcagcacgattttaggtgtggtgctggagtcaaaaaacggtttatgtccgccgcacaggcaagaaggcgtgttgattcggattaccgcccctgatgtgtggacggttggtatgatttccgcttccaaaacgtcgtgtacgcgcccgaccgcagcccggaaatcagccgtatgctttcttcgattttggcaggctacgcgtgggataccgaaaacccgttcgtggcgaaatccgaacaacgcctga

SEQ ID NO: 42561 - DNA, 1248 bp, Neisseria meningitidis
ttgaataccagaagggtcgcagtaacaggcataggcggcattaccgccttcggccgggattggcaaagcatacaggcagcattcaaagccgaaaaaaacgccgtcaaatatatggattggcacgaacgtttccccgaattggaagcgcaactgggtgcgccgattgaaaattacgcgccgccgaaacattggacgcgcaagcagctcagaagtatggggcgcgtgtcgtacctgtgcgtcgatgcggcggagcaggcgctggcggatgccggtttgctcggggacgaaagcattaccgacggacggatgggcgttgcctgcggctcttccagcggcagcaccaaagacatcggcgatgtgggcgaattgttgctgaccggcacgtcgcgcaacttcagcgccaacacctatgtgcgtatgatgccgcacaccaccgccgccaatatcggcatctttttcgggctgaaagggcgcatcatcccgacatcgagcgcgtgttcgtccggcagccaaggcataggttatgcctacgaagccatcaaatacggtctgaccgatatgatgctggcgggcggaggcgaagaatttttcccgtccgaagtgtatgttttcgactcgctttatgccgccagccgccgcaacggcgaaccggaaaaaaccccgcgcccatacgacgcgaaccgcgacgggctggtcatcggcgaaggcgcggggattttcgtgctggaagaattggaacacgccaaacggcgcggtgcgataatttacgccgaactcgtcggctacggagccaacagcgatgcctaccatatttccacgccccgccccgacgcgcaaggcgcaatccttgcctttcagacggcattgcaacacgcaaaccttgcacccgaagacatcggctggattaatctgcacggcaccgggacgcaccacaacgacaatatggaaagccgcgccgttgcagcggttttcggcaacaatacgccctgcacgtccaccaagccgcaaaccggacacacgctgggcgcggcggacgcaatcgaagccgcgttcgcgtggggcattgccgaccggcaaagcaatcccgaaggaaaacttccgccccggctttgggacgggcagaacgaccccaacctgcccgccatcaacctgaccggcagcggcagccgctgggaaaccgaaaaacgcattaccgccagctcgtcgtttgccttcggaggaagcaactgcgtcttaatcatcggatga

SEQ ID NO: 42562 - DNA, 315 bp, Neisseria meningitidis; identical to SEQ ID NO: 37950

SEQ ID NO: 42563 - DNA, 1197 bp, Neisseria meningitidis
atgcaaaactatctgacccccaatttcgcctttgccccgatgattcccgaacgcgcttcaggcagccgcgtttgggatacgaaagggcgtgaatatattgatttttcaggcggtatcgccgtcaatgcgctgggacactgccaccctgcccttgtcgatgctttaaacgcgcagatgcacaagctgtggcacatttccaatatctatacgacgcgtccagcgcaggaattggcgcaaaaattggttgcaaacagttttgccgacaaggtttttttctgcaactcgggctcggaagcgaatgaggcggcgttgaagctggcgaggaaatacgcccgcgaccgtttcggcggaggaaaaagcgaaatcgtcgcctgtatcaacagttttcacggacgcacgctgtttaccgtgtccgtcggcggtcagccgaaatacagcaaggattatgcacccctgccgcaaggcattacgcacgttccgttcaacgatattgccgcgctggaagctgccgtcggcgaacagacctgcgcggtcatcatcgagccgatacagggcgaaagcggcatcctgcccgccactgcggaatatttgcaaaccgcgcgccgtctgtgcgaccggcacaatgcgttgttgattttggacgaagttcaaaccgggatggggcatacgggcaggctgtttgcctatgaacattacggcattgttcccgatattttgagttcggcaaaagccttgggctgcggctttccgatcggcgcgatgctggcgacagaaaagattgccgccgccttccaaccgggcacgcacggctcgactttcggcggcaacccgatggcgtgtgcggtcggcagccgcgcattcgacatcatcaatacgcccgaaactttaaaccatgtccgtgaacaggggcagaaacttcagacggcattgctggatttgtgcaggaaaacgggcttgttctcacaagttcgcgggatggggctgctactcggctgcgtgttggacgaagcctatcgcggacgcgcatccgaaatcaccgccgccgccttgaaacacggcgtgatgattttggttgcgggtgcggacgtattgcgtttcgcgccttcgctactgttgaacgatgaggatatggcggaaggtttgcgacgtttggaacacgcgctgacggaatttgccgcgacatcagacaatccgtaa

SEQ ID NO: 42564 - DNA, 1311 bp, Neisseria meningitidis
atgagcgcgcccgacctctttgtcgcccacttccgcgaagccgtcccctacatccgccaaatgcgcggcaaaacgctggtcgccggcatagacgaccgcctgctcgaaggtgataccttaaacaagctcgccgccgacatcgggctgttgtcgcaactgggcatcaggctcgtcctcatccacggcgcgcgccacttcctcgaccgccacgccgccgctcaaggccgcacgccgcattattgccggggcttgcgcgttaccgacgaaacctcgctcgaacaggcgcagcagtttgccggcaccgtccgcagccgttttgaagccgcattgtgcggcagcgtttccgggttcgcgcgcgcgccttccgtcccgctcgtatcgggcaacttcctgaccgcccgtccgataggtgtgattgacggaaccgatatggaatacgcgggcgttatccgcaaaaccgacaccgccgccctccgtttccaactcgacgcgggcaatatcgtctggctgccgccgctcggacattcctacagcggcaagaccttctatctcgatatgcttcaaaccgccgcctccgccgccgtctcgcttcaggccgaaaaactcgtttacctgaccctttcagacggcatttcccgccccgacggcacgctcgccgaaaccctctcggcacaggaagcgcaatcgctggcggaacacgccggcggcgaaacgcgacggctgatttcgtccgccgttgccgcgctcgaaggcggcgtgcatcgcgtccaaatcctcaacggagccgccgacggcagcctgctgcaagaactcttcacccgcaacggcatcggcacgtccattgccaaagaagccttcgtctccatccggcaggcgcacagcggcgacatcccgcacatcgccgccctcatccgcccgctggaagaacagggcatcctgctgcaccgcagccgcgaatacctcgaaaaccacatttccgaattttccatcctcgaacacgacggcaacctgtacggttgcgccgccctgaaaacctttgccgaagccgattgcggcgaaatcgcctgccttgccgtctcgccgcaggcacaggacggcggctacggcgaacgcctgcttgcccacattatcgataaggcgcgcggcataggcataagcaggctgttcgcactgtccacaaataccggcgaatggtttgccgaacgcggctttcagacggcatcggaagacgagttgcccgaaacgcggcgcaaagactaccgcagcaacggacggaactcgcatattctggtacgtcgcctgcaccgctga

SEQ ID NO: 42565 - DNA, 777 bp, Neisseria meningitidis
atggcagcattcaatacccaaaaagtattgtccgtacaccactggacagacgcatattttacctttacctgcacccgcgacgaatcgttgcgctttgaaaacggccaattcgttatggtcgggctgatggtggacggcaagccactgatgcgcgcatacagcgtcgcctccgccaactgggaagaacacctcgaatttttcagcattaaagtccaagacggcccgctgaccagccgcctgcaacacctcaaagtcggcgacgacgtgttaatcagcaaaaaaccgaccggaaccttggttgccggcgacctgaatccgggcaaacacctttacctgttgagcaccggtaccggcatcgcccctttcttgagcatcaccaaagatcccgaaatttacgaacagtttgaaaaaatcatcctcgtacacggcgtgcgctacaaaaaagatttggcgtactacgaccgctttaccaaagaattgcccgaacacgaatacctcggtgacttggttaaagaaaaactgatttactacccgattgtttcgcgcgaagaattcgaacaccacggccgcctgaccgacctgatggtgagcggcaaactgtttgaagacatcggcctgcccaaaattaatcctcaagacgaccgcgccatgctgtgcggcagccccgcgatgctgaaagacacctgcaaagttttggacgatttcggactgaccgtctctccgaaaacaggcgtacgcggcgattacctgattgagcgcgcatttgtggaccaataa

SEQ ID NO: 42566 - DNA, 438 bp, Neisseria meningitidis
atgaaccaaaccgtttacctttacaccgacggcgcgtgcaaaggcaatcccggcgcgggcggctggggcgtgttaatgcgctacggtagccacgaaaaagaacttttcggcggcgaagcgcaaaccaccaacaaccgcatggaactgactgccgtcatcgaaggactgaaatcgctcaaacgccgctgcaccgtcatcatctgcaccgactcgcaatacgtcaaaaatggcatggaaaactggatacacggttggaagcgcaacggctggaaaaccgcctccaaacagcccgtcaaaaacgacgacttgtggaaagaactcgacgctctagtcggacggcatcaagtcagttggacttgggtgaaaggacacgcgggacacgccgaaaacgaacgcgccgacgatttggcaaaccgtggcgcagcgcagttttcctga

SEQ ID NO: 42567 - DNA, 1929 bp, Neisseria meningitidis
ttgatcgaatgtaaaaacatcaaccgctatttcggcagcggcgagaaccgcgtccatattttgaaagacatcagcctgtcgatagagaagggcgattttgtcgccatcatcgggcagtccggttcgggaaagtccacgctgatgaacatcctcggctgtttggataccgccggttccggttcgtaccgaatcgacggcatcgaaactgccaaaatgcagcctgacgagctggcggcattgcgccgcgaacgcttcggtttcatcttccaacgctacaacctcttaagctcgctgaccgcaagggataacgtcgcgctgccagccgtctatatgggcgcgggcggcaaagagcgttccgcgcgggcggagaagttgttacaggatttgggtttggcaagcaaagagggcaacaagcccggcgaactctcgggcggacagcagcagcgcgtctccatcgcccgcgccctgatgaacggcggagaaatcatcttcgccgacgagccgaccggcgcactcgataccgccagcggcaaaaacgtgatggaaatcatccgcaggctgcacgaagccgggcataccgtcattatggtcacgcacgaccccggcatcgccgccaatgccaaccgcgtcatcgaaatccgggacggcgaaatcatttccgacacctcgaaaaatcccgaaatccccgcaagcaatgtcgggaggattcgggaaaaagcctcgtggtcgttttattacgaccagtttgtcgaagccttcagaatgtcggtgcaagcagtattggcgcacaaaatgcgttcgcttctgacgatgctcggcatcatcatcggtatcgcttcggttgtctccgtcgtcgcattgggcaatggttcgcagaaaaaaatccttgaagacatcagttcgatagggacgaacaccatcagcatcttcccggggcgcggcttcggcgacaggcgcagcggcaggattaaaaccctgaccatagacgacgcaaaaatcatcgccaaacaaagctacgttgcttccgccacgcccatgacttcgagcggcggcacgctgacctaccgcaataccgacctgaccgcttctttgtacggcgtgggcgaacaatatttcgacgtgcgcggactgaagctggaaacggggcggctgtttgacgaaaacgatgtgaaagaagacgcgcaggtcgtcgtcatcgaccaaaatgtcaaagacaaactctttgcggactcggatccgttgggtaaaaccattttgttcaggaaacgccccttgaccgtcatcggcgtgatgaaaaaagacgaaaacgctttcggcaattccgacgtgctgatgctttggtcgccctatacgacggtgatgcaccaaatcacaggcgagagccacaccaactccatcaccgtcaaaatcaaagacaatgccaatacccaggttgccgaaaaagggctgaccgatctgctcaaagcgcggcacggcacggaagatttcttcatgaacaacagcgacagcatcaggcagatagtcgaaagcaccaccggtacgatgaagctgctgatttcctccatcgccctgatttcattggtagtcggcggcatcggcgtgatgaacatcatgctggtgtccgttaccgagcgcaccaaagaaatcggcatacggatggcaatcggcgcgcggcgcggcaatattttgcagcagtttttgattgaggcggtgttaatctgcgtcatcggcggtttggtcggcgtgggtttgtccgccgccgtcagcctcgtgttcaatcattttgtaaccgacttcccgatggacatttcggcggcatccgttatcggggcggtcgcctgttcgaccggaatcggcatcgcgttcggctttatgcctgccaataaagcagccaaactcaatccgatagacgcattggcgcaggattga

SEQ ID NO: 42568 - DNA, 1032 bp, Neisseria meningitidis
atgggcatcaaagtcgccatcaacggctacggacgcatcggccgccaggttttgcgcgccatctacgattatcagattcaagaccaactccaaatcgtcgccgtcaacgccagcggtagccttgaaaccaacgcccacctcaccaaattcgacaccgtgcacggacgctttgaagccgacgtatcccacgacggcggcaacctcatcgtcaacggcgacaaaatccccttcttctcgacccgcaaccctgccgaactgccgtggaaagaactcggtgtcgatttggtcatggaatgcaccggcgcgtttaccagcaaagaaaaagccaaaatccacctcgaaagcggcgcgaaaaaagtcctcatttccgcaccgggcggcgacgatgtcgatgcaaccgtcgtgtacggcgtgaacgacagcgtcctgaccgccgacatgaccgtcgtttccaacgcttcctgcaccaccaactgcctctcgccggttgccaaagtgttgagcgaaagcgtcggcatcgtcaaaggcgcgatgaccaccatccacgcgctgaccaacgaccaaaccgttaccgacgtgcgccacaaagacctgcgccgcgcccgcagcggcgtggaaaacatgattccgaccaaaaccggcgcggcaaaagccgtcggtttggtactgcccgaattgaaaggcaggctcgacgggcttgccatccgcgtgccgaccgtcaacgtatcattggtagatttgagcttccaagccgcgcgcgacacgacagtcgaagaaatcaacgcactgatgaaagccgcctcggaagcaggcgcgctcaaaggcgttttaggctacaacaccctgcccttggtttccatggacttcaaccacactaccgaagccagccacttcgacgcaacactgaccaaagtcgttgacggcaacatgattaaagtcttcgcatggtatgacaacgaatggggcttcagctgccaaatgctgaacaccgcacgccgtatgttcggacttgaagtgcgcccgctcaaataa

SEQ ID NO: 42569 - DNA, 873 bp, Neisseria meningitidis
gtgaaaggactcgactattgccgccaaaaagcagaagaaagccgctccagttttttgtcgggcttccgtttcctgactcaggaaaaacgggatgcggtaacggttttatatgctttttgccgcgaattggacgatgtggttgacgaatgttccaaccccgatgttgcacaggcgacattgaactggtggcgcggcgatttggacaaggtattcggcggcgcgatgccggaacaccccgtcaatcaggccttgcggcaagttaaggaaaccttcaagctgccgaaatatgaactggaagccttaatcgacgggatgcagatggatttggttcaagcccgttacggcagttttgaagaattgaaactgtattgccaccgcgtcgcaggcgtggtcggctgcctgattgcgcggattttggggttttcagacgaccaaacgctggaatacgccgacaagatgggacttgcgctgcaactgaccaacatcatccgcgatgtcggcgaagacgcgcgcagggggcggatttacctgccgatggaggaaatgcggcggtttgacgtacccgcaagcgtgattttgcaatgcagcccgacgggcaattttgccgaattgatggcgttccaaatcaaacgcgcccgcgaaacctaccgcgaagccgtatcgctgctgcctgatgccgataaaaaagcccaaaaagtcggactggtcatggcggcggtttattacgagctattgaacgaaatcgaccgagacggcgcacaaaacgtcctcaaatacaaaatcgccctcccttcgccgcgcaaaaaacgcattgccctgaaaacctggttattcggattcaaaccgcgccccggcacgccggaacgggcataa

SEQ ID NO: 42570 - DNA, 612 bp, Neisseria meningitidis
atgattacgacttataaaaccattacttcctcgacgcaggctgagtttaaagataaaggcagccgttttattgcatttgcctatccgattcggacattggctgatgtgaaaaaatacctcgatccgttaaaggaagagcatcataaagcacgacactggtgctatgcctatcgtttgggtgtggatggtgtgcaatttcgtgccaacgatgatggagagccatcaggaagtgctggacgaccaattttgggacagattgattcggtgggtattaccgacgttttggttgtggtcgtccgctatttcggtggtactttgttaggtgttccaggtctgatacatgcgtacaaagaggcgacggctcaagcgttggcagttgcagaagtagttgaaaagaatattgaaaaaactgtttggctgaaatgtgaatatccgtttttgaatgaagcgatacgcattgccaaacaatatcaggcggatatattggagcgggatttgcagttggattgccgattgacggtcagtttgtcgttggtaaattatgaggcctgtgttgcggcttggaagaatactcggcagattgaagtaaatacggaaaagccttttgaatga

SEQ ID NO: 42571 - DNA, 1272 bp, Neisseria meningitidis
atgaaactgctggttatcggtaatggcggtcgcgaacacgcgctggcttggaaattggcgcagtcgcctaaagtggaaacagtatttgttgcgcctggtaatgccggtacagcgattgaacccaagttgcaaaacatcgacttgactgcgcatcaggatttgattgaattctgtcgtaaagaaaatattgtttttaccgtcgtcggccctgaagcgcctttggcggcaggtattgtggatgatttccgtgctgcaggactaaaaatattcggtccgacacaatatgcggcgcagttggaaagttccaaagatttcgccaaagcatttatggcgaaatacaatattccgaccgcgcaatatcaaacctttgaaaacgccgatgccgcacatgattacgtcaatcagaaaggtgcgcctatcgttatcaaagccgatggtttggcggcaggtaaaggcgtgattgtggcgatgactttggatgaagcgcatgctgcgattgatgatatgctgctggacaacaaaatgggcaatgccggcgcgcgtgttgtaattgaagatttcctgcaaggcgaagaagcgagttttatcgtcatggttgatggcaataatgtactgcctatggcaaccagccaagaccacaagcgtcttttagacggcgacaaaggtctgaatacgggcggtatgggtgcgtacagccctgcgcctgtggtaacgcctgttgtgtacgaacgcgcgatgaatgaaattattttgccgaccgtagcagggatgaaagcggaggggcatgagttcaccggtttcctgtacgcaggtttgatgattgatcaaagcggtgcaccctatacgattgagtttaactgccgtttcggcgatcctgaaacccagccgattatgagccgactgaacagcgacttatcggatttggttgaagcggcaatagacggcaaactcgatagcgtaaccgcggaatggagcccgcaaactgccgtgggcgtggtactggcggcgcaaaattaccccgaaacgcccaaaaaaggcgatattatttccggtctggatgctgccaaccaaatcggcaaagttttccatgcaggtacaacggcaaacgagaaaggtgacgtattgaccaacggcggacgcgtattgtgtgttgtgggattgggcgataatgtggcgcaagcgaaagctaaggcatatggcgcgttggaaaaaatcagtttcgacgggatgcaataccgtaaagacattgccgataaagcgattaaccgttaa

SEQ ID NO: 42572 - DNA, 888 bp, Neisseria meningitidis
atgcagaaatccaaattatcttggttcttgaaactgatgttggcactgtcgctggcgtttctgtatatcccgctggttgttttggtcatctattcgtttaacgaatccaagctggtaaccgtttggggcggcttttcgaccaagtggtacggcgcattgctggaaaacgacaccatcttggaagccgcttggctgtcgctgcggattgccgttgtgtcttcgcttgccgccgtcgttttgggcacgctggcaggctatgcgatggcgcggattaaacgttttcgcggcagtaccttgttcgctggcatgatttccgcacctatggtgatgcccgacgtgattaccggtctgtctatgctgctgctgattattcaggtacagatatttttgcagggcagcgaatggttacaacatctctacttcgatcgtggctttttcaccatcttcctcggacatacgacgctgtgtatggcgtacattaccgttgttatccgttcgcgtctggttgagcttgaccagtcgctcgaagaagccgcaatggatttgggcgcgcgcccgctgaaaatcttttttgtcatcactttgcctttgattgcccctgccatcgcttcaggctttctgctcggcattaccctgtctttggatgatttggtgattacctcattcctctccggccccggttcatccacattgccgcaggtgattttctccaaaatcaagttgggtctcgatcctcagatgaatgtcttggcgaccatcctaatcggcatcatcggaacattggtcatcatcgtcaattattggatgatgaggcaggcaaccaagcgtgaccgagaagcggcagaagcctaccgccaggaaaaattggctgccgagaaagcaaattaa

SEQ ID NO: 42573 - DNA, 756 bp, Neisseria meningitidis
atgaagtatgtccggttatttttcctcggcgcggcactcgccggcactcaagcggcggctgccgaaatggttcaaatcgaaggcggcagctaccgcccgctttatctgaaaaaagataccggcctgattaaagtcaaaccgttcaaactggataaatatcccgttaccaatgccgagtttgccgaatttgtcaacagccacccccaatggcaaaaaggcaggatcggttccaaacaggcagaacccgcttacctgaagcattggatgaaaaacggcagccgcagctatgcgccgaaggcgggcgaattaaaacaaccggtaaccaatgtttcctggtttgccgccaacgcctattgcgccgcacaaggcaaacgcctgccgaccattgacgaatgggaatttgccggacttgcttccgccacgcagaaaaacggctcaaacgaacccggctacaaccgcactattctcgattggtatgccgacggcggacggaaaggcctgcacgatgtcggcaaaggccgcccgaactactggggcgtttatgatatgcacgggctgatttgggaatggacggaagatttcaacagcagcctgctttcttccggcaatgccaacgcgcaaatgttttgcagcggcgcgtctatcgggtcgagcgactcgtccaactatgccgccttcctccgctacggcatccgtaccagcctgcaatccaaatatgtcttgcacaacttgggcttccgttgcacaagccgataa

SEQ ID NO: 42574 - DNA, 432 bp, Neisseria meningitidis; identical to SEQ ID NO: 38797

SEQ ID NO: 42575 - DNA, 549 bp, Neisseria meningitidis
gtgtctcaaaacactccaatcaaaccttggtacaaacacgtctggccgtggatcttgatggcggggccgatttttgtcgtcatcgccagcgtcgctatgttttttgtcgcgcagcagcacgcgacagatttggttacggacgattattataaagacggcaaacatatcgacatccagcttcatcgggatgaagaagccgtcagacggcatatcggggtgcaggttctcatttcccccgatatgaatgcggcaaaagtgtttgtcggcggcgagtttgacggcaaacagcctttgaacctgctgctgatgcacccgacccgcaaggcggacgatcaaaccgtcgccctcaagcccgtcggcagcgcgcagaacggcagggcggaatatgaggcggtgttcaaaaccctttcgccgaccaaccactggtatgtgcgcgtggaggacgcggcaggcgtgtggcgcgtcgagaacaaatggattaccagccaaggcaatgcggtcgatttgaccccgatggacaagcttttcaataatactgaaagcaaataa

SEQ ID NO: 42576 - DNA, 723 bp, Neisseria meningitidis
atggacaaagatttgtatgccgtattgggcgtgtcgccgcaggcgggagcggacgaaatcaaacgcgcctaccgcaagctggcgatgaaatatcatcccgaccgcaatccgggcaatccgaaggcggaagaaaagttcaaagaaatccaacgggcttacgatacgctttccgacctgtcgaaacggatgcaatacgacgcgtccttcagacggcatgaggaacgcgggcggcaggaagaggcattccgccgcgaacaggcgcgcagggagcagttttaccgcgaacagatgcgccgcgaacaggcgttcagacaggcgtttgaacggcaggcatcacgttcgtgccatacttacgaaccgtccggcggcggaagcgggcgcaactatgtcctcgccgcctacatcctgttcggtttgggtgcaatcatgctgttcatgcccatagtcggcgtgattttcgcctatatgcccatagtcggcgtgattctcgcctatatgaaacggaacagtttggacagcattgtctatgccgcacataccgaatacctgattaaaaccttttggcgcacattttggctttatattttgggtgcgctgactgcccttttgggtatcggcgtgctgattattattgcaacgaacgtctggtatttctaccgcatcatcgccggctttatccgcttcaacggcggcagggcggttgcacccgagaaatggatatag

SEQ ID NO: 42577 - DNA, 1746 bp, Neisseria meningitidis
atggaacggcagacagatgaatttgcccaagcggcggcaagggcggcaatccgttttttggaacactatgcgggttccggcgacgaagtgcttgcaaactgcaccgaacgcctgtttcaggcattgcaaaacggtcattcgtttatccgtttgagcggtggcgaggctgacgcgctgtcggcactcgcacccgttgtcggaacatccgccgcgcctttgattttggaaggcagaaggctgtttttgggcaggatgtggcagttggaatacgatttggctgccgagataaaacgcttggcggcagccggcacatccgcccccgacgcggcaggcgcgaggcaaaacctcgcaaaatggtttcaaggcacgggcagcgaagggcagcgcgatgccgccgccttggcactgttgcagtcttttatggtgattaccggcgggccgggaacgggcaaaacgacaacggttgccaaactgctggcgctgatttgcggtgaagacgaaaatcttcccaacatcgcgcttgccgcaccgacgggcaaagcggcggcacatatggcgcgcgcgctgcaccgtgcaatcaacggttttgacgcgccggaggccgtccgccgccatttgctcaaactggaagggcaaaccgtccaccgactgctgaagctgcgcccgcccaaaatgcaggcggcgttcaaccctgtttacccgctgccgtttgacgtattggttatcgatgaagcctctatgctggatacggcattgatgctgcaacttttaaaagcggtcaaaaccggcgcgcgcgtgattctgctgggggatgaaaaccagctcccgtccgtcggaataggggcggtgctgtccgttttgtcacaaaaaaccgttttggacggagaaacgcaccaaaggctggccggcttccttccggaacacggtttcagcgtcagcgcaaatccacccgtgttggcgcaaaacaccgcccatctgtcgttcagccaccgcttcggcgacaacagcggcatcggctgccttgcccgtgccgccgtatcgggcgatgaaggggcgtgggcattgtttgaccggtttccggacgaactggaacattcggaatgcagtccgaacgctcgagtcgaaaggttgtaccgggcacacaaagcctattggcaggcggtaaaagacggcaatatcgaagccgcatacgcgggcatttcggatatcgtggttctggcagcttggcggcaggatgcggaagacttcaacgaagcctattgccgccatgtacgccgcaaaatgaacataccggaacatttggcatattttgccggagagccgattatgatcaggcagaacgactacgcgcttgaactgttcaacggcgacatcggactgattatggaagatgtcggacggcagggcagccttgccgcctattttgccgatgcggacggatttaaaaaggtagcggtaagctgcctgcccgaatttgaacccgcattcgccatgaccgtccacaaaagccaaggttcggaataccgggaagtatggctgctgccgccttccgccgcaccttcggacgaaggggacgatgcattgtccggattgagtaaggagctgttatataccgccattacccgcgcgagagagaagttcgtattcttcggcggggaagaagccttccggcaagctgccgccaccgtcaaaacgcgtcagacggcattgggcagtatgctcgagcgggtattttcacaagaataa

SEQ ID NO: 42578 - DNA, 705 bp, Neisseria meningitidis
atgctgtctgaaggcatttcagacggcatttttcgcggggagatgctacaatttgcaccatttttaccgacacagggaaacaggattatgtttacaggcattgttcaaggattgggaaaactgacggcaatccaccgcccgtcggaggcatttcacacttatgtcgtcgagcttccgcaagaggcggcggacaatctgcaacgcggcgcatcggtcgccaataacggctgctgcctgacgattaccgaaatcgaaggaaaccgcgtcagtttcgatttaatggcggaaactttggcaaaaaccaatttggggctgctgaaggaaggcgattgcgtcaacatcgaacgggcggcgcgtttcggagacgaaatcggcggacacgtcatgagcggacacattatggcaaccgtgcctattgtcgaaatcgaacgggacgggttcaaccgcacggtttggttttcgctcccgcatgaactcaaaccctatatcctgaccaaagggttcgtcggcttggacggttgcagcctgaccataggcaaagtcgaagacggccgtttcaatgtccatctgattcccgaaactttggaacggacgctgttcggcagcagaaaggtcggcgacaggatcaacatcgaaatcgatccgaatacgcaggcaatcgtcgataccgtcgaacggctgatggcgcaaagatatgcaaagtga

SEQ ID NO: 42579 - DNA, 675 bp, Neisseria meningitidis
gtgcaggcggatttagcctatgccgccgaacgcattacccacgattatccgaaagcaaccggtgcaaacaacacaagcacagtaagcgattatttcagaaacatccgtgcgcattccatccacccccgggtgtcggtcggctacgatttcggcggctggaggatagcggcagattatgccagttacagaaaatggaaagaaagtaatttttctactaaaaaagttactaaagagataaacgacaactaccaagaaaccaaaacagaacatcaaggaaacggcagcttccacgcctcttcttctctcggcttatccgccatttacgatttcaaactcaacgataaattcaaaccctatatcggtgcgcgcgtcgcctacggacacgttaaacatcaagttcattcggtggaaaccaaaaccacgattgttacctctaaaccaacgcaaggcgctgcacagggaggtcctattatacaaactgatcccagcaaacctccctatcacgaaagccacagcatcagcagcgtgggtcttggtgtcatcgccggtgtcggtttcgacatcacgcccaagctgaccttggacaccggataccgttaccacaactggggacgcttggaaaacacccgattcaaaacccacgaagtctcattgggcatgcgctaccgcttctga

SEQ ID NO: 42580 - DNA, 438 bp, Neisseria meningitidis
ttgaaaatttctatattttggttgtataatgctttcattttagaaaggtctataatgccaaaatcactctcgctacaagatgttcagttaaggttttccagtaaatttcctgataagacggttttgaagttcactaaaaactacgaaccggtaacaatccaatgccctttgcatgggtcggttgtttacgggaatctacaagctgccatgaaatcctcaacaggatgtcctgaatgtactcgaaatcccgaaaagccctctccaaacgccgttgccattaggttggaggacacagagacaggggaaatctacgagtttgcaagtacactggctgccagtaaatttatcggttgctccaacagcactttagctgtacgtttaagcggacgcactccgtttgaccgattgattaggtatcgttataggttggtaaagtaa

SEQ ID NO: 42581 - DNA, 372 bp, Neisseria meningitidis
atgaataactcttccttttttggcaaccgattgaaagaagaaagaaaaaaattaaaaatgactcaagctgaaatcgctgaaaaatgtggggtttcaggaagaatgtggggggattatgaacgtggcatcagccagccaaaagcggaacttttcttccaatttgaaaaggtgggtatagacgttcaatacgtcatgcacggcagacgcggcgaaacagcggtcatgccgtctgaaaccctgaacgccgaagaacaagaactgctggtcttgttccgcgaggcggcagctgccgaccgtgaaatgattctgatggttgcgcgcagggcagagaaaaaagcccaaactgcgcttggtaaagtgagtaatggataa

SEQ ID NO: 42582 - DNA, 483 bp, Neisseria meningitidis
atgatgaaaaagatactggccgtatcggcactatgcctgatgactgcggcggcacgggctgccgatacttacggctatctcgccgtttggcagaatccgcagaatgcggacgatgttttgcaggttaaaaccacaaaagaagattcgacgaaaagcgaagcgttttccgagttggaagccttctgcaaaggtcaggacacgcttgcgggcattgctgaagacgagccgaccggatgccggtcggtcgtgtcgctgaacaatacctgtgtcgcgctggcatacccgaaagccttgggcgcgctgcgtgtcgacaacgccgtcgtgattacttctccgcgttttacgagcgttcatcaggtcgcactcaaccagtgcatcaaaaaatacggcgtacagggacaatgcggcttggaaacagtgtattgcacatcttcttcttattacggcggaactgtgcgctctttgattcaaaatctcaaataa

SEQ ID NO: 42583 - DNA, 417 bp, Neisseria meningitidis
atggcaaagctgacagaacaagatattttgaattggaacgggccggaagacgattatatgaatgacgagcatttggcttttttccgcgaattgctggttaaaatgcaagatgaactcatagagaatgcatctgttacgacagggcacctccaagaacacgaatcagcccccgatcctgccgaccgtgccacacaggaagaagagtacgcattggaactccgtacccgcgatcgggaacgaaaacttctcagtaaaatacaggcgaccatccgcaatattgatgaaggggattatggattctgtgccgatacgggagagcctatcggtctgaagcggctgctggcacgcccgacagccactttatctgttgagtcccaagaacgccgagagaggatgaaaaaacagtttgccgactga

SEQ ID NO: 42584 - DNA, 750 bp, Neisseria meningitidis
atgcctgatgccgtcaaaaaagtttacctgatacacggttggggggcgaaccgccacatgttcgacgatttgatgccgcgcctgcctgcaacgtggccggtgtccgccgtcgatttgcccggacacggggacgctccgtttgtccgacctttcgacattgcggctgcggccgacggcattgccgctcaaattgacgctccggccgacattctcggctggtcgctcggcggattggtcgcgctgtatctggcggcgcgccatcccgacaaagtccgttcgctctgcctgacggcgagtttcgcacggctgacggctgacgaagactatcccgaagggcttgccgcgcctgcattgggcaaaatggtcggtgcgttccgttcggattatgccaaacatatcaaacagtttctacaattacagcttctgcacacgcctgatgcggacggaatcataggcagaatcctgcccgatttggcgcgctgcggcacgcctcaagccttgcaggaggcgttggacgcggcggaaagggcggatgcgcggcatttgttggacaagatagatgttccggtactgctggtgttcggcggcaaagacgcgattacgccgccgcgtatgggtgaatatctgcaccgccgtttgaagggcagcaggttggttgtgatggaaaaggcggcgcatgcgccgtttttgagccatgcggaagcgtttgccgcgctgtaccgcgactttgttgaagggggtttgagatga

SEQ ID NO: 42585 - DNA, 321 bp, Neisseria meningitidis
atgttcggcaagcagctttttgaggaagtcggctcgaaaatcagcgaaaccatcgccaacagccctgccaaagatgtggaaaaaaatattaaggcgatgctgggcggcgcgttcaaccgtatggatctggttacgcgcgaagaattcgacatccagcagcaggttttaatcaaaacccgtaccaaactggcggctttggaagcgcgtttggaaaaactcgaagccgcgcaaaatcccgaacgggcagcattggaagcggctgaagccgctgccgaagaagccgtcgccgaaatcaggcagcaaaccgaagccggcgaataa

SEQ ID NO: 42586 - DNA, 1386 bp, Neisseria meningitidis
atggacggctggacacagacgctgtccgcgcaaaccctgttgggcatttcggcggcggcaatcatcctcattctgattttaatcgtcaaattccgcatccacgcgctgctgacactggtcatcgtcagcctgctgacggctttggcaaccggtttgcccacaggcagcattgtcaacgacatactggtcaaaaacttcggcggcacgctcggcggcgtggcgcttctggtcggcctgggcgcgatgctcggacgtttggtcgaaacatccggcggcgcacagtcgctggcggacgcgctgatccggatgttcggcgaaaaacgcgcaccgttcgcgctgggcgttgcctcgctgattttcggcttcccgattttcttcgatgccggactaatcgtcatgctgcccatcgtgttcgccaccgcacggcgcatgaaacaggacgtactgcccttcgcgcttgcctccatcggcgcattttccgtcatgcacgtcttcctgccgccccatccgggcccgattgccgcttccgaattttacggcgcgaacatcggccaagttttgattttgggtctgccgaccgccttcatcacatggtatttcagcggctatatgctcggcaaagtgttggggcgcaccatccatgttcccgttcccgaactgctcagcggcggcacgcaagacaacgacctgccgaaagaacctgccaaagcaggaacggtcgtcgccatcatgctgattcccatgctgctgattttcctgaataccggcgtatcggccctcatcagcgaaaaactcgtaagtgcggacgaaacctgggttcagacggcaaaaataatcggttcgacaccgatcgcccttctgatttccgtattggtcgcactgtttgtcttgggacgcaaacgcggcgaaagcggcagcgcgttggaaaaaaccgtggacggcgcactcgcccccgtctgttccgtgattctgattaccggcgcgggcggtatgttcggcggcgttttgcgcgcttccggcatcggcaaggcactcgccgacagcatggcggatttgggcattcccgtccttttgggctgtttccttgtcgccttggcactgcgtatcgcgcaaggttcggcaaccgtcgccctgaccaccgccgccgcgctgatggctcctgccgttgccgccgccggctttaccgactggcagctcgcctgtatcgtattggcaacggcggcaggttcggtcggttgcagccacttcaacgactccggcttctggctggtcggccgtctcttggacatggacgtaccgaccacgctgaaaacctggacggtcaaccaaaccctcatcgcactcatcggctttgccttgtccgcactgctgttcgccatcgtctga

SEQ ID NO: 42587 - DNA, 810 bp, Neisseria meningitidis; identical to SEQ ID NO: 39750

SEQ ID NO: 42588 - DNA, 1569 bp, Neisseria meningitidis
atgagtcaaaccgatacgcaacgggacggacgatttttacgcacagtcgaatggctgggcaatatgttgccgcatccggttacgctttttattattttcattgtgttattgctgattgcctctgccgtcggtgcgtatttcggactatccgtccccgatccgcgccctgttggtgcgaaaggacgtgccgatgacggtttgatttacattgtcagcctgctcaatgccgacggttttatcaaaatcctgacgcataccgttaaaaatttcaccggtttcgcgccgttgggaacggtgttggtttctttattgggcgtggggattgcggaaaaatcgggcttgatttccgcattaatgcgcttattgctcacaaaatcgccacgcaaactcactacttttatggttgtttttacagggattttatctaataccgcttctgaattgggctatgtcgtcctaatccctttgtccgccatcatctttcattccctcggccgccatccgcttgccggtctggctgcggctttcgccggcgtttcgggcggttattcggccaatctgttcttaggcacaatcgatccgctcttggcaggcatcacccaacaggcggcgcaaatcatccatcccgactacgtcgtaggccctgaagccaactggttttttatggtagccagtacgtttgtgattgctttgattggttattttgttactgaaaaaatcgtcgaaccgcaattgggcccttatcaatcagatttgtcacaagaagaaaaagacattcggcattccaatgaaatcacgcctttggaatataaaggattaatttgggctggcgtggtgtttgttgccttatccgccctattggcttggagcatcgtccctgccgacggtattttgcgtcatcctgaaacaggattggtttccggttcgccgtttttaaaatcgattgttgtttttattttcttgttgtttgcactgccgggcattgtttatggccgggtaacccgaagtttgcgcggcgaacaggaagtcgttaatgcgatggccgaatcgatgagtactctggggctttatttggtcatcatcttttttgccgcacagtttgtcgcattttttaattggacgaatattgggcaatatattgccgttaaaggggcgacgttcttaaaagaagtcggcttgggcggcagcgtgttgtttatcggttttattttaatttgtgcttttatcaatctgatgataggctccgcctccgcgcaatgggcggtaactgcgccgattttcgtccctatgctgatgttggccggctacgcgcccgaagtcattcaagccgcttaccgcatcggtgattccgttaccaatattattacgccgatgatgagttatttcgggctgattatggcgacggtgatcaaatacaaaaaagatgcgggcgtgggtacgctgatttctatgatgttgccgtattccgctttcttcttgattgcgtggattgccttattctgcatttgggtatttgttttgggcctgcccgtcggtcccggcgcgcccacattctatcccgcaccttaa

SEQ ID NO: 42589 - DNA, 2607 bp, Neisseria meningitidis
atggctgccaaccaacgttaccgcaaaccgctgcccggtacggatttggaatactacgacgcgcgtgcggcgtgtgaggacatcaagcccggctcttacgacaagctgccttacacgagccgcattttggcggagaatttggtcaaccgcgcggacaaagtcgatttgccgacgctgcaaagctggctggggcagttgatagaagggaagcaggaaatcgactttccgtggtatccggcgcgggtggtgtgccacgatattctggggcagaccgcgttggtggatttggcaggcctgcgcgatgcgattgccgaaaaaggcggcgatcctgccaaagtgaatccggtggtgcaaacccagctcatcgtcgaccactctctggcggtggagtgcggcggttacgatcctgatgccttccgcaaaaaccgcgaaatcgaagaccgccgtaacgaagaccgtttccacttcatcaactggacaaaaaccgcgtttgaaaatgtggacgtgattccggcgggcaacggcatcatgcaccaaatcaatctagaaaaaatgtcgcccgtcgtccaagtcaaaaacggcgtggctttccccgatacctgcgtcggtactgactcacatacgccgcacgtcgattcattgggcgtgatttccgtgggcgtgggcggattggaagcggaaaccgtaatgctgggacgcgcgtccatgatgcgcctgcccgatattgtcggcgttgagctgaacggcaaacggcaggcgggcattacggcgacggatattgtgttggcactgaccgagtttctgcgcaaagaacgcgtggtcggggcgtttgtcgaattcttcggcgagggcgcgagaagcctgtctatcggcgaccgcgcgaccatttccaacatgacgccggagttcggcgcgactgccgcgatgttcgctattgatgagcaaaccattgattatttgaaactgaccggacgcgacgacgcgcaggtgaaattggtggaaacctacgccaaaaccgcaggcttgtgggcagatgccttgaaaaccgccgtttatcctcgcgttttgaaatttgatttgagcagcgtaacgcgcaatatggcaggcccaagtaacccgcatgcccgttttgcgaccgccgatttggcggcgaaagggctggcgaagccttacgaagagccttcggacggccaaatgcccgacggctcggtcatcatcgccgcgattaccagttgcaccaacacttccaacccgcgcaacgttgttgccgccgcgctcttggcacgcaatgccaaccgtctcggcttgaaacgcaaaccttgggtgaaatcttcgtttgccccgggttcaaaagtagccgaaatctatttgaaagaagcgggcctgttgcccgaaatggaaaaactcggcttcggtatcgtcgccttcgcctgcaccacctgcaacggcatgagtggcgcgctggatccgaaaatccagaaagaaatcatcgaccgcgatttgtacgccaccgccgtattatcaggcaaccgcaacttcgacggccgtatccacccgtatgcgaaacaggctttcctcgcttcgcctccgttggtcgttgcctacgcgctggcaggcagtatccgtttcgatattgaaaacgacgtactcggcgttgcagacggcaaggaaatccgcctgaaagacatttggcctgccgatgaagaaatcgatgccgtcgttgccgaatatgtgaaaccgcagcagttccgcgatgtgtatgtaccgatgttcgacaccggcacagcgcaaaaagcacccagtccgctgtacgattggcgtccgatgtccacctacatccgccgtccgccttactgggaaggcgcgctggcaggggaacgcacattaagaggtatgcgtccgctggcgattttgcccgacaacatcaccaccgaccacctctcgccgtccaatgcgattttggccgtcagtgccgcaggcgagtatttggcgaaaatgggtttgcctgaagaagacttcaactcttacgcaacccaccgcggcgaccacttgaccgcccaacgcgctaccttcgccaatccgaaactgtttaacgaaatggtgaaaaacgaagacggcagcgtgcgccaaggctcgttcgcccgcgtcgaacccgaaggcgaaaccatgcgcatgtgggaagccatcgaaacctatatgaaccgcaaacagccgctcatcatcattgccggtgcggactatggtcaaggctcaagccgcgactgggctgcaaaaggcgtacgcctcgccggcgtagaagcgattgttgccgaaggcttcgagcgtatccaccgcaccaaccttatcggcatgggcgtgttgccgctgcagttcaaacccgacaccaaccgccataccctgcaactggacggtacggaaacctacgacgtggtcggcgaacgcacaccgcgctgcgacctgaccctcgtgattcaccgtaaaaacggcgaaaccgttgaagttcccgttacctgctgcctcgatactgcagaagaagtattggtatatgaagccggcggcgtgttgcaacggtttgcacaggattttttggaagggaacgcggcttag

SEQ ID NO: 42590 - DNA, 633 bp, Neisseria meningitidis
atgacggtatgggtcggactgaccggcggaatcggcagcggcaaatcggcagccgcgcaatgttttgccgatttgggcgtgccgcgcatcgatgcagacgcggcggcgcactcgctgacggcttcagacggcatcgccctgccggaaatcaggcggctgttcggcgacaccgtttttgacacacagggtttgttgcggcgcgacatattgcgtaaagaagtctttgcctccccatcgcgaaaagccttgctcgaatccgtgatgttgccgctgattttctcagaaatcaaaaaacagcaagaaacctttactgatgcagcttacggcattgtcgaaattccgctgctgacggaaaagcgtcaatttatcagcctgatacggcgtgtcctgaccataagtgcccctgtggaaaaacgtatcggcagggtgatggcccgcagcgggctgacgcgcggcgaggtggcggccgtcatcagccatcaggcatccgaatccgaacgcctgctgcttgcagacgatgtgctgctcaatgacggcagcctcaaaagcctgcgtgagaaaacaatgcgcctgcacgcgttttattcagggattttcgcctcaaaaccaacacaaggaaaacacaatgactga

SEQ ID NO: 42591 - DNA, 651 bp, Neisseria meningitidis
atgatccgtttcgaacaagtttccaaaacctatcccggcggttttgaagccctgaaaaacgtcagcttccaaatcaacaaaggcgaaatgatatttatcgcgggacactccggttcgggcaaatccaccatcctcaaactgatttcgggcattaccaagccgagcaggggcaaaatcctgtttaacgggcaggacctcggcacattgtccgacaaccaaatcggctttatgcgccaacacatcggcatcgtgttccaagaccacaaaatcctctacgaccgcaacgtcctgcaaaacgtcatcctgccgcttcggattatcggctatccgccgcgcaaagccgaagagcgtgcccgcatcgccatcgaaaaagtcggcctgaaaggacgagaattggacgatcccgtaaccctctccggcggtgaacaacaacgcctgtgcatcgcccgcgccgtcgttcaccagcccggcctgctgattgccgacgaaccctccgccaacctcgaccgcgcctacgcgctcgatattatggaattgttcaaaaccttccacgaagcgggaactaccgtcatcgttgccgcacatgacgaaaccctgatggcggactacggacaccgcatcctgcgcctctcgaaaggacgactcgcatga

SEQ ID NO: 42592 - DNA, 2151 bp, Neisseria meningitidis
ttgggtagcgattgggtttcagacggcatacattcaggatttcaccgccttatgccgtctgaaagacgtttccgacccatccctactgcacgctttgtccgcaaacgcatcacaggcaagattatggaagttatccaatacccaaattcccccttcaaactccaccaacccttcccgcccgcaggcgaccagcccaccgccattgcaggcctgctcgaagggctttcagacggccttgcctatcaaaccctgctcggcgtaaccggttcgggcaaaacctacaccatggcgaacgtcatcgcccaaagcggccgccccgccatcatcatggcgcacaacaaaacccttgccgcccagctttacgccgaaatgcgcgaatttttccccgaaaacgcagtggaatatttcgtctcctactacgactattaccagcccgaagcctatgtgcccagccgcgatttgttcatcgaaaaagacagcgcgatcaacgaacacatcgagcagatgcgcctttccgccaccaaaaacctaatgacgcgcaacgacgtgattatcgtcgccaccgtgtccgccatttacggtatcggcgacccgaccgagtatcaacaaatggtgttgtccgtcaaagaaggcgataccatcgagcagcgcgacatcatcgccacgctcgtttccatgcaatacgaacgcggcgatttggacttcaaacgcggcagcttccgcgtgcgcggcgacgtgattgacgtgtaccccgccgaaagctccgaaaacgccttacgcatcagcctgtttgatgacgaaatcgaccgcctcgatatgttcgacccgctttcaggcagccttatccagcgcgtcggccgctacaccgtcttcccgtccagccactacgttaccccgcgcgacaccgtcttgcgcgcctgcgagtccatcaaagaagaattacgcgaacgcatcgaatttttcgcccgcgaacaacgccccgtcgaacaacaacgcatcgaacagcgcacccgtttcgacctcgaaatgctctacgaaatgggcttctgcaaaggaatcgaaaactactcccgccacttttccggcaaaaaagaaggcgaaccgccgcctacgctgatggactacctgcccgacaacgccatcatgttcatcgacgaaagccacgttaccgtaacccaaatcggcggcatgtacaaaggcgacgcatcgcgcaagcaaaacctcgtcgactacggcttccgcctgccttcagcccgcgacaaccgcccgctcaaattccacgaatttgaaaaagtcatgccgcaaaccatcttcgtttccgctacccccgccaaatacgaagaagaacacgccggacaagtggtcgaacaagtcgtccgccccacagggctggttgatccccaaatcatcatccgccccgttgccacccaagtcgacgacttaatgagcgaaatcaacgaccgcattgaaaaaggcgaacgcgtactcgttactaccctcaccaaacgcatggcggagcaactcaccgactattacagcgaactcggtatcaaagtgcgctacctgcacagcgacatcgacaccgtcgagcgcgttgaaatcattagagatttacggctcggcctgtttgacgtactcgtcggcatcaacctcttacgcgaaggcctcgacatccccgaagtctctctcgtcgccatcctcgacgcagataaagaaggcttcctgcgctcccaccgcagcctgattcaaaccataggccgcgccgcgcgcaacgtgaacggcgtcgccatcctgtacgccgacaaaattaccgactccatgaaagccgctatcgacgaaaccgaacgccgccgtgaaaaacagattaaattcaacgaagaacagggcatcgtgccgcagcagattaaaaaacaggtcaaagacatcatcgacggcgtgtaccacgaagaagacggcagtaaaggccgtctgaaaggtaaaaacaaggttaaagtgggcgagattcacaacgaagaagatgcgattaaagaaatcgccaaactcgaaaaagccatgcagcaggcggctagggatttgcagtttgaagaggcggctgtgttgcgggataggattagggatattaaagagaatttgttgtttggggcggagtga

SEQ ID NO: 42593 - DNA, 1041 bp, Neisseria meningitidis
atgaacacacccatccccttctccgaacggctcatccgctggcaaaaacaacacggtcgccaccacctcccttggcaggtcaaaaacccttattgcgtctggctttccgaaatcatgctccagcaaacgcaagtcgccaccgtgttggactactatccgcgcttcttagaaaaattcccgaccgttcagacgcttgccgccgcgccgcaagacgaagtgttgtcgttgtgggcgggcttgggctattacagccgcgcgcgcaacctgcacaaagccgcgcaacaagtcgtcaggcaattcggcggcacgtttccgtcggagcgcaaagacttggaaaccctctgcggcgtaggcagaagcaccgccgccgccatttgcgccttctccttcaaccgccgcgaaaccattttggacggcaacgtcaaacgcgtactctgccgcgtgttcgcccgcgacggcaatccgcaggacaaaaaatttgaaaactcgctctggacacttgccgaaagcctgctgccgtctgaaaacgccgatatgcctgcctatacacaaggtttgatggatttgggcgcgaccgtgtgcaaacggacgaaacccttgtgccaccaatgcccgatggcggacatctgcgaagcgaaaaagcaaaaccgcaccgccgagctgccgcgcaaaaaaaccgccgccgaagtaccgaccctgccgctttactggctgattgtccgcaaccgggacggcgcgattttgctggaaaaacgccccgccaaaggcatttggggcgggctgtattgcgtgccgtgttttgaaagtttgaacgggctttccgactttgccgccaaattctccctgaccatggcagatatggacgaacaaaccgccctgacccaccgcctgacgcaccggctgctattgattacgccctttgaagcacaaatgccgtctgaaagcccttcagacggcatttggataaagccggcgcatttgaaagattacggtttgcccaagcctttggaaatttatttaaacggtaataggttagaataa

SEQ ID NO: 42594 - DNA, 1497 bp, Neisseria meningitidis
atgaccacggaaaaccaagccggcagtccggcatccggaatcggcacgtccgaacaaacaaaagccgcgccgaaagcaaaaaaaacattcgatccgcgagccagcgtgattcaaatccatcccgaaggcgaacgcatccatcccaaaaaggcggaaggacggttcgccaaactgcgtatcgccgccgtattggcgacgcagtttgtgttttacgtcattccgtggttcaactggagcggcaggcaggccgtcgttttcaatatccccgaacggcatttcttcattttcggattgtcgttgggggtgggcgatttgatttaccttgccttgctgctgatgatttgcgccttcgggctgttttggtggacgacgattgcagggcgactgtggtgcggctattcctgcccgcaaacggtttacaccgaaattatgctgtggattgacaacctggtcgaaggcgatagaaacaaacggctgaaactggaaaaatcgccgtggaatttcactaaaatccgcatcaaagccaccaaatacctgctgattttccttgtctgcgcgtggacgggcatcacgtttgcaggctggtttgtccctatccgccagttcgttcccgatttattcactggagcagcaggtggcggcgcgatgtttgccgcagcgttttatggctttatgaccttcttcttcgcccacattatgcgtgaaaaagtatgcctgcatatgtgtccgtatgcacgtttccaaagcgcgatgttcgacaaggacacgctgattgtttcttatgacgcggaacgcggcgaaccgcgcggcgcgcgcaagaaaacggtcaataaggaagaggcgggtttgggcgactgcatcaactgtgcgatgtgcgtccaagtctgccccgtcggcatcgacatccgcaacggtctgcaataccaatgtatcggctgcgccgcctgtatcgacgcgtgcgatgagattatggacaaaatgggctatccgcgcggattaatccgttatacgaccgaaagcgcgctggaacacgaatattctgaaaaagacattaaaaaacggctgctcagaccgcgcgtggcaggttacggcgcggtgttggcgttagttatcattgccttcctggccggtttgtccacgcgcaaaatggtcgaggtcgatattttgaaagaccgtggcgtactggtgcgcgaaaacgccaaaggctggctggaaaacgcatacagcctgcgtatcatcaacaaaagtgaaaaagaacagctgattaccgcaagtgtcaaaggctttgacgaaatcgccctgaccgggctgcccgaaggcggtatcaaggttgccccgcgcgaaacggtaacccttcccgtccaagtgtccaccattccggaatacgcggacaaaggcagccaccctatcgaatttaccttccaataccgcgaaagcggcgcgcccgacggcaagccggtcgtcttggaagaagatgcaacctttatcggagaataa

SEQ ID NO: 42595 - DNA, 210 bp, Neisseria meningitidis; identical to SEQ ID NO: 37799

SEQ ID NO: 42596 - DNA, 1314 bp, Neisseria meningitidis
atgatgagcgtaactgttgaaactttagaaaatctggaacgcaaagtagtgttgtccctgccttggtccgaaatcaacgcagaaaccgataaaaaactgaaacaaacccaacgccgtgcaaaaatcgacggtttccgtccgggtaaagcacctttaaaaatgattgcccaaatgtacggtgcgagcgcacaaaacgacgtgatcaacgagctggtgcaacgccgcttctacgatgttgccgttgcccaagagttgaaagtggcaggcttcccccgttttgaaggcgttgaagaacaagacgataaagagtctttcaaagttgccgccatttttgaagtgttccccgaagtcgttatcggcgatttgtctgcacaagaagttgaaaaagtaaccgcttccgtcggtgatgccgaagtggaccaaaccgtagaaatcctgcgcaaacaacgcacccgcttcaaccatgtcgaacgcgaagcccgaaacggcgaccgcgtcatcattgactttgaaggcaaaatcgacggcgaaccttttgccggcggcgcatccaaaaactacgccttcgtattgggcgcaagtcaaatgctgcctgaatttgaagccggcgtagtcggcatgaaggctggcgaaagtaaagacgttaccgtcaatttccctgaagactaccacggtaaagacgttgccggtaaaactgccgtgtttaccattacgctgaacaacgtttccgaagcgactctgcctgaagtcgatgcagattttgcaaaagccttgggtattgcggatggcgacgttgccaaaatgcgcgaagaagtgcagaaaaacgtaagccgcgaagtggaacgccgcgtaaacgaacaaaccaaagaatccgtaatgaacgcgctgctcaaagccgtagagctgaaagcacctgttgctttggtcaatgaagaagccgcacgcttggcaaacgaaatgaaacaaaattttgttaaccaaggtatggctgatgctgccaacttggatctgcctttggatatgttcaaagaacaagccgaacgccgcgtatctttaggtctgattttagccaaactggttgacgaaaacaaactggaaccgactgaagagcaaatcaaagccgttgttgccaactttgcagaaagctacgaagatcctcaagaagtgattgactggtactacgcagatccttcccgcctgcaagccccgacttctttggcggtagaaagcaacgtcgttgatttcgttttgggcaaagccaaagtaaatgaaaaagctttgtcttttgacgaagtgatgggcgcgcaagcctga

SEQ ID NO: 42597 - DNA, 1017 bp, Neisseria meningitidis
ttgatatttgccctgggtttcatcttcctgaacgcctgttcggaacaaaccgcgcaaaccgttaccctgcaaggcgaaacgatgggcacgacctataccgtcaaatacctttcaaataatcgggacaaactcccctcacctgccgaaatacaaaaacgcatcgatgacgcgcttaaagaagtcaaccggcagatgtccacctatcagcccgactccgaaatcagccggttcaaccaacacacagccggcaagcccctccgcatttcaagcgacttcgcacacgttactgccgaagccgtccgcctgaaccgcctgacacacggcgcgctggacgtaaccgtcggccccttggtcaacctttggggattcggccccgacaaatccgttacccgtgaaccgtcgccggaacaaatcaaacaggcggcatcttatacgggcatagacaaaatcattttgaaacaaggcaaagattacgcttccttgagcaaaacccaccccaaggcctatttggatttatcttcgattgccaaaggcttcggcgttgataaagttgcgggcgaactggaaaaatacggcattcaaaattatctggtcgaaatcggcggcgagttgcacggcaaaggcaaaaacgcgcgcggcgaaccgtggcgcatcggtatcgagcagcccaatatcgtccaaggcggcaatacgcagattatcgtcccgctgaacaaccgttcgcttgccacttccggcgattaccgtattttccacgtcgataaaaacggcaaacgcctctcccatatcatcaacccgaacaacaaacgacccatcagccacaacctcgcctccatcagcgtggtcgcagacagtgcgatgacggcggacggcttgtccacaggattattcgtattgggcgaaaccgaagccttaaagctggcagagcgcgaaaaactcgctgttttcctgattgtcagggataaaggcggctaccgcaccgccatgtcttccgaatttgaaaaactgctccgctaa

SEQ ID NO: 42598 - DNA, 327 bp, Neisseria meningitidis
atgaacatcaaacaccttctcttgacctccgccgcaaccgcactgctgagcatttccgcccccgcgctcgcccaccacgacggacacggcgatgacgaccacggacacgccgcacaccaacacaacaaacaagacaaaatcatcagccgcgcccaagccgaaaaagcagcgttggcgcgtgtcggcggcaaaatcaccgacatcgatctcgaacacgacaacggccgtccgcactatgatgtcgaaatcgtcaaaaacggacaggaatacaaagtcgttgtcgatgcccgtaccggccgcgtgatttcctcccgccgcgacgactga

SEQ ID NO: 42599 - DNA, 1539 bp, Neisseria meningitidis
atgttccattccatcgaaaaatacagaacgcccgcccaagtccttttgggcctgattgcattaaccttcgtcggcttcggggtcagcacggtatcccatccgggtgccgactacatcgtccaagtgggcgacgaaaaaatcagcgaccactccatcaacaacgccatacagaacgaacaggcggacggcggcggcccttcgcgcgacgcggtgttccaatccctgctgcaacgcgcctacctgaaacagggcgcgaagctgatgggcatttcggtttcttccgaacaaatcaagcaaattatcgtggacgatcccaatttccacgacgcaaacggcaaattcgaccacgcgcttttaaaccgctacctttcccaacgccatatgtctgaagaccagtttgtcgaagaaatccgcgatcagtttgccttgcagaatttggtaaacctcgtccaaaacggcgtattggtcggcgacgcgcaggcggaacagctgatcaggctgacacaggtcaaccgcaccatccgttcgcacactttcaaccccgacgagttcatcgcccaagtcaaagtgtctgaagccgatttgcagaaattttataatgcgaacaaaaaagactatctgctgccgcaggcggtcaaattggaatatgtcgccttgaatctgaaggattttgcagacaagcagaccgtcagtgaaacggaagtgaaaaatgcatttgaagagcgcgtggcgcgtttgccggcaaatgaagccaaaccttctttcgagcaggaaaaagccgccgtcgaaaacgaattgaaaatgaaaaaggcggttgccgacttcaacaaggcaaaagaaaaattgggcgacgatgcgttcaaccatccttcctcgcttgccgaagccgccaaaaacagcggtttgaaagtcgaaacccaagaaacttggctgagtaggcaggacgcgcaaatgtccggtatgcccgaaaacctgatcaatgccgtattcagcgacgacgtattgaagaaaaaacacaattccgaagtgctgaccatcaacagcgaaaccgcgtgggtcgtccgcgccaaagaagtccgcgaagagaaaaccctgccgtttgccgaagccaaagacgcggtacgtcaggcttatatccgtaccgaagccgccaaacttgccgaaaacaaggcaaaagacgtgcttacccaactgaacggcggcaaggctgttgacgtgaaatggtcggaagtgtccgttttgggcgcacagcaggcaaggcagtccatgccgcccgaggcttatgcggaactgctgaaagcaaaaccggcaaacggcaaacccgcctacgtcaggctgatcggtctgccggcacccgtgattgtcgaagtacaggctgtaaccccgccggatgatatcgccgcacagcttccgcttgcaaaacaggctttggcgcaacagcagtctgccaatactttcgacttgttgatacgttatttcaacggcaaaatcaaacagaccaaaggagcgcaatcggtcgacaacggcgacggtcagtaa

SEQ ID NO: 42600 - DNA, 450 bp, Neisseria meningitidis
atgagccttatcggcgaaattttgcctttgtcccatattgttttggatatggaggtaggcagtaaaaaaaggctgtttgaggaagcaggcctgcttttggaacgcgaatcctcattgtcccatgctgatgttttcgaatgtctttttgcccgtgaaaaactcggttcgaccggtttggggcagggcgttgccatcccgcacggccgtcatgccggcgtgaagcaggcgacgggcgcgttcatccgcacgcgcgaacccgtcggatttgacgcaccggacggcaagccggtttccctgatttttatcttgctggttccggaaaacgcaaccggcgagcatttggaagtcttatccaaactggccggcaagttttcccaaaaaagcatcagagaatcgctgatgacggtttcctctgcggaagaagtccgtgccatcctgactgaagaataa

SEQ ID NO: 42601 - DNA, 1419 bp, Neisseria meningitidis
atggaaaatatattgtctgttctggtgggtacagtcaatcggttcctttgggactacctgctgatttacgcgcttttgggtatcggcctgttttttacgctgtatctcggtgcgccgcagattaccaagctgggcgcgggattcaaatccgtattcggcggcttgtttgccaaaggcgataaagacgacaagtctttatcgcagtttcaggcgttggcggttgccatatctgcgcaaatcggtacgggcaacgtcgccggcgtggcgaccgccatcaccgcaggcgggccgggcgcgattttttggatgtggctttctgccgttttggggatgtccacgatttttgccgaagcgctgctggcgcagaaataccgcgtcgtcagccacggcaaatacatcggcgggccggcgttttatattacgcacggtctgactccgaaaatcggcaggggcgcggcgcgttttctgtcgggctttttctctatcgcgctgattgtcgcattgggctttatcggcaatgcgactcaggcaaactccatcgcttctgccgttaccattgcatttgatgtaccttctttggcagtcggtattgtgcttgccgtccttgcgggcatggttgtgattggcggcgtgaaccgtattgccaatattgcccaatttgtcgtgccgtttatggcggttgtttatattttgtgcgccgtcgttatcctgtttgaattttccgaccatattgtgccgatgttcaaccacatctttaccgccgccttcaatcccgaagccgttttgggcggtgcggcgggtatcggtatgcgcgaagccgtccgtttcggcgtggcgcgcggtctgttttccaacgaagcgggtatgggttctaccccgcacgcccacgcgactgcggatgtgaagcatccggtgcagcaaggtatggcggcatttgtcggtgtgtttatcgatacgattttggtatgtacggcaactgcgctgattatcctgctgaccgatgccaacctttcgggcgaacagggcgcggcggttactcaatttgcctttaacaaggcatttccgggcttcggttcgcaattgcttgccgtgtgtctgacctttttcgccttgacgaccattatcggctggtattatttcggcgagtccaacatccgttttcttttcaggggaagacacttgggcatctatcgcgcattggttctgcttgccatcgttttgggtacgctcggcaaagtcgatttggtttggagcctgtccgatatgttcaacggctttatggttatcccgaacttgatagccctgtttttgttgcgtaaggaaatccgtgccatttatgatgattatttggcacaaaaaaaagcgggtcgggatttgtcttatccgtatgaattccacgagttccacgacaagggctga

SEQ ID NO: 42602 - DNA, 2376 bp, Neisseria meningitidis
atgaataaaaatattaaatctttaaatttacgggaaaaagacccgtttttaagtcgtgaaaaacagcgttatgaacatcctttgcccagtcgggaatggataatcgaattgttggagcgcaaaggtgtgccttcaaaaatcgaatcgcttgcgcgcgagctgtcgattacggaagacgagtatgtcttttttgaacgccgtctgaaggcgatggcgcgggacggtcaggttttaatcaaccgtcggggcgcggtttgcgcggcggacaaattggatttggtcaaatgccgcgtcgaggcgcataaggacggtttcggttttgccgtgccgctcacgcccgccaaagacggtgattttgttttgtatgaacgccagatgcgcggcattatgcacggcgatattgtcactgttcgtcctgccggcatggaccgtaggggccgccgcgaagggacagttctggatattgtcgaacgcgcgcaaagcaaagtggtcggccgtttctatatggataggggcgtggcgattttggagccggaagacaagcgtctgaaccaaagcatcgtattggaaccggacggcgtggcgcgtttcaaacctgaatccggtcaggtcatcgtcggcgaaattgaggtttatcctgagcaaaaccggccggcagtggcaaaaatcatcgaagttttgggcgattatgccgacagcggcatggagattgaaattgccgtgcgcaagcatcatttgccgcaccaattcagtgaagcgtgtgccaaagctgcgaaaaaaattcccgtccatgtacgcaaaagcgatttgaaaggccgcgtcgatttgcgcgacctgcctttggtaacgatagacggcgaaacggcgcgcgatttcgacgacgcggtgtttgccgaaaaagtcggacgcaattaccgtctggtcgtggcgattgcggatgtcagccattatgtccgccctgacgatgtgattgatgcagatgctcaagaacgcagtaccagcgtatatttcccgcgccgtgtgattccgatgctgccggaaaacctgtctaacggcatttgctcgctcaatcccgatgtcgagcgtttgtgtatggtgtgcgatatggtcgttacctatgcgggcaatatcaaagaataccgcttctaccccgccgtaatgcgctctcatgcccgcctgacctacaaccaagtttggaaatggatttcagacggcatcgaccatccgtacaaagcccaaatcgacaccctttacaaactcttcaaaatccttcagaaaaagcgtttcgaacgcggcgcggtggagtttgaaagcgtcgaaacccagatgattttcgatgacaacggcaaaatcgaaaaaatcgtccccgttgtccgcaacgatgcccacaagctgattgaagaatgtatgctggcggcgaatgtttgcgcagcggatttcctgttgaaaaacaagcatacggctttgttccgcaaccatttgggccccacgcccgaaaaactcgccaccctgcgcgagcagctcggtctgttggggcttcaacttggcggcggcgacaacccgtcgccgaaagactatgccgcgcttgtcgaacaattcaaaggcagacctgatgccgaattgctgcaagtcatgatgttgcgctccatgcagcaggcggtttacgaaccgcattgcgacggacactttggtcttgcctacgaagcatacgcccacttcacctcgcccatccgccgctatcccgacctgaccgtacaccgcgccatcaaagccgtgttgaatcagcaaacctacacgccaaaaaaaagctggcaggctttgggcgtgcatacctcgttctgtgagcgccgtgccgacgacgccagccgcgacgtggaaaactggctgaaaacctattatatgcgcgataaggtcggcgaagtattcgaaggtaaaatctccggcatgaccagttttggtatctttgtaacactggacggcatccacattgacggcttggtgcatatcagcgatttgggcgaagactatttcaacttccgccccgaaatcatggcaatcgaaggcgaacgcagcggcatccgtttcaacatgggggacagggttgccgtccgggtcgcccgtgccgatttggatgacggaaaaatcgattttgtcctgattgccggggggagcggcagggggcggaaagttaaatcatccgcgtctgccaaaccggcagggacggcggggaaagggaagccgaaaaccgccgccgagaaaaaaacagcccgaggcggcaaagtaaggggaaggggcgcgtctgccgccgcagaatcgaggaaaaaggcaaagaaaccggttccgattaaggtaaaaaaacggaaaggcaaatcataa

SEQ ID NO: 42603 - DNA, 1017 bp, Neisseria meningitidis
atgtatcggaaactcattgcgctgccgtttgccctgctgcttgccgcttgcggcagggaagaaccgcccaaggcattggaatgcgccaaccccgccgtgttgcaaggcatacgcggcaatattcaggaaacgctcacgcaggaagcgcgttctttcgcgcgcgaagacggcaggcagtttgtcgatgccgacaaaattatcgccgccgcctacggtttggcgttttctttggaacacgcttcggaaacgcaggaaggcgggcgcacgttctgtatcgccgatttgaacattaccgtgccgtctgaaacgcttgccgatgccaaggcaaacagccccctgttgtacggggaaactgctttgtcggatattgtgcggcagaagacgggcggcaatgtcgagtttaaagacggcgtattgacggcagccgtccgcttcctgcccgtcaaagacggtcagacggcatttgtcgacaacacggtcggtatggcggcgcaaacgctgtctgccgcgctgctgccttacggcgtgaagagcatcgtgatgatagacggcaaggcggtgaaaaaagaagacgcggtcaggattttgagcggaaaagcccgtgaagaagaaccgtccaaacccacgcccgaagacattttggaacacaatgccgccggcggcgatgcgggcgtaccccaagccgcagaaggcgcgcccgaaccggaaatcctgcatcctgacgacggcgagcgtgccgataccgttaccgtatcacggggcgaagtggaagaggcgcgcgtacaaaaccagcgtgcggaatccgaaattaccaaactttggggaggactcgataccgacgtgcaaaaagagttggtcggcgaacaacgcaagtgggcgcaggaaaaaatcagcaactgccgacaagccgccgcgcaggcagaccggcaggaatacgccgaatacctcaagctgcaatgcgacacgcggatgacgcgcgaacggatacagtatcttcgcggctattccatcgattag

SEQ ID NO: 42604 - DNA, 705 bp, Neisseria meningitidis
atgttgcgtcttgttttggcggcttcgctgtcggcggtatcttttccggcagcggctgaagcattgaattacaatattgtcgaattttccgaatcggcgggtgtcgaggtggctcaggatacaatgtccgcacgtttccaagtgacggcggaaggacgggacaaaaatgccgtcaatgctgagtttgttaaaaaattcaacaagttcatcagaaaatcgaaaaatggtagctttaaaaccgaattggtatcgcgcagtgcgatgccgcgctatcaatataccaacggcagacgcattcaaacaggctgggaggagcgtgcggaatttaaggtcgaaggtagagattttgatgagttaaaccgttttattgccgatattcaagcagatgccgcgttggaatatacggatttccatgtgtcgcgcgaacgccgcaacgaggtcatcgatcaggtcagcaaggatgccgttttgcgtttcaaggcgcgtgccgaaaagttggcgggcgttttgggtgcgtccggttataaaatcgtcaaattgaatttgggacacatcggcagccatatcgcgggagggggagctgctcaggcaaaaatgcttcgtgccatgccgatggcggcaagcgtcaatatggagggtgcggattccgccgcgcctggtgtggaggaaatcagcatcagcgtcaatgggacggttcagttctga

SEQ ID NO: 42605 - DNA, 1188 bp, Neisseria meningitidis
atgactgaacactataaaacccttccggaacacgagctgctgattcagaagtctttgatcagcaatctgaatctttgggattgggtatttgccgtgctggtttttgcggctacggttttcgtacagacccgttccggtatgcatatggacatttacgaaacggtcatgttgtgggcaagtgccggtattgccgtgtttttgggttggtttttcaaaccgatgcgctggtttgttcctttaagcgtattgcttgcctatgccgccgtcggtttgtacggaggcgacatcaaatcggcagagattttcctgttgcggtatttcctcagcagccagtcggcgatcatgtggcagtgcgcctttgtctttttcgccctgttcgcctatatttcgggcgcggttttggcaagcgtaaaaaatgtgccgaccaacacgctgttgggtatgggaaccgtgtttgcatgggtgtctgccgtagcaggctttaccggtctgctggtacgttggcacgaaagctatctgctccgtcccgatgcggggcatattccggtttccaacctgtatgaagtgttcatcctgtttttggtgattaccgcgctgatgtatctttattatgaaggtaagttcgccatacagaaattgggcggcttcgtgttcggctttatggcggtcgtggttggatttgtcttgtggtacagcgtgtcccgcgaggcgcataccatccagccgctgattcccgcgctccagtcctggtggatgaaaatccacgttccggcaaactttatcggttacggcgcgttttgcatttccgcgatgctcggtattgccgaactggtttccctgcgtgcggaaggaaaaggcggaaaactgtggctgccgccgtcggcattgatcgacgaggtgatgtataaggcgattgccgtcggctttctgttctttaccattgccaccattttgggtgcgctgtgggcggcagatgcttggggacgctattggagttgggatccgaaagagacgtgggcgttcatcgtctggctcaattacgccgtttggctgcacttgcggctggttgccggttggcgcggcaaagtgctggcgtggtgggcgattatcggtttgttcgtaaccgcatttgcctttatcggcgtgaatatgtttttgagcgggctgcattcttacggaacgctttga

SEQ ID NO: 42606 - DNA, 774 bp, Neisseria meningitidis
atgtatcgccaaatcggaatgtgggatcaaaaatgggtcatcggcaactggaaaatgaacggccggctccaaaacaacaacgcactgatgcaccgcttccgcatccaccccaccgccgaacgcgtcctcatcggactcgccgccccgaccgtttacctgctgcaactgcacaacgccatgcaaatcgttttaaacaaccgcatcctcacctgcgcccaagacgtgagccgcttccccaataacggcgcgtacaccggcgaagtgtccgccgaaatgctcgccgacaccggcacagacatcgtcctcatcggacactccgaacgcagcctttatttcggcgaaaaaaacgaaatccaacgccgcaaaatggaaaacgtcctcaacgtcggactcatcccgttattgtgcgtcggcgaaagcctcgaagagcgcgaagccggcaaagaacacgaagtcatcgcccatcagctttccatcctgcaagggctggataccaaaaacatcgccgtcgcctacgaacccgtctgggcgatcggcaccggcaaagtcgccaccgtcgaacagattgccgatatgcacgcattcatctacaaagaaatcttgtctttgtgcggaagcgatgttaaaatccgcgtcctttacggcggaagtgtgaaagcggacaacgcggccgacatcttcgcagtaccttatgtggacggcgcactcgtcggcggcgcgtcattgtcgtacgactcctttaccgccatcatcagtgccgcacaaaatgcgtag

SEQ ID NO: 42607 - DNA, 756 bp, Neisseria meningitidis
atgattaaaatccgcaatatccataagacctttggcgaaaacactattttgcgcggcatcgatttggatgtgtgcaaagggcaggtggtcgtcatcctcgggccttccggctcaggcaaaacgacgtttctgcgctgcctaaacgcgttggaaatgcccgaagacggacaaatcgagttcgacaacgagcgaccgctgaaaatcgatttttctaaaaaaccaagcaaacacgatattttggcactgcgccgcaaatcaggcatggtgtttcaacaatacaacctctttccgcacaaaaccgccttggaaaacgtgatggaaggaccggttgccgtacagggcaagcctgccgcccaagcgcgcgaagaggctctgaaactgctggaaaaagtcggcttgggcgacaaagtggatttgtatccctaccagctttccggcggtcagcagcagcgcgtcggcattgcccgagcattggcgattcagcccgagctgatgttgtttgacgaacccacttccgcgcttgaccccgagttggtgcaagacgtgttgaacgccatgaaggaattggcgcgggaaggttggacgatggtcgtcgttacccacgaaatcaagttcgcgctggaagttgccacgaccgttgtcgtgatggacggcggcgttatcgtagagcagggcagcccgaaagagttgttcgaccaccccaaacacgaacggacgcggagatttttaagccaaatccaatctaccaagatttga

SEQ ID NO: 42608 - DNA, 219 bp, Neisseria meningitidis; identical to SEQ ID NO: 36470

SEQ ID NO: 42609 - DNA, 702 bp, Neisseria meningitidis
atgagcgcgcgtgaaaatattttggcaaaactgaaaaaagccgacgcattgccgatggaagaacctgcggtttttgattattaccgtgaaatgggtgtttcttggggcagcgaagttgagcgtctgaaacattgggctgccgctatgcgtgcggtcaaaaccgaaatttattgggtgacgaaaagcaattggatgcaggttttccgcgaagcggcagaaggcaagggtttgaaaaacatcctgctgcccttggcgaccgaacacggacaaattgcccgtgccgcattggcggacagcaatatcgaaccgattgccttcgagcgcgaaatcgatacttggaaaaccgagtttttcacgaacatcgatgcgggcttcagcggcgcgcaatgcggcatcgcccgcaccggcacgctgatgctgttttccagccccgaagaaccgcgtactttaagcctcgttccgcccgtgcatttctgcctgttcgatacgtccaagatgtacaacgagtttcataatgccgtcgaaggcgaaaaactggtggaaaacggtatgccgaccaatgtattcctgatttccggcccgtccaaaaccgcagacatccaactgacgcttgcttacggcgcgcacggcccgcgcgatttggtcatcctcgccatcctgcccgaccacatttcccctgccgatttggaggaaaacgcatga

SEQ ID NO: 42610 - DNA, 960 bp, Neisseria meningitidis
atgtccaaaaaaaccaaacaagaactcgaaaacaacaaactcagcaaacgcctgcgccacgccgtcggcgacgcgattaacgatttcaatatgatcgagccggacgacaaaatcatggtctgcctctccggcggcaaagacagctatgccctgttagacatcctgcgccagctccaagccagcgcgccgattgatttccaactggttgccgtcaatctcgaccaaaagcagccgggcttccccgaagaagtattgccgacctatctcgaaagcatcggcgttccctacaaaatcgttgaagaagacacctactccaccgtcaaacgcgtattagacgaaggcaaaacgacttgttcgctgtgcagccgcctgcgccgcggcatcctctaccgcactgcaaaagaattgggctgcaccaaaatcgccttgggacaccaccgcgacgacatcctcgccaccttgtttttaaatatgttttacggcggcaaactcaaagccatgccgcccaagctggtgagcgacaacggcgaacacatcgtcatccgcccgctggcgtatgtgaaagaaaaagacttaatcaaatacgccgaattaaaacaattccccatcatcccgtgcaacctctgcggctcgcaacccaacctgcaacgccaagtcatcggcgatatgctgcgcgattgggacaaacgcttccccggccgcatcgaatcgatgttctccgccctgcaaaacgtcgtcccttcccaccttgccgataccgaactcttcgactttgtcggattggaacgcggtcaaagcctgaaacacggcggcgatttggcgtttgacagcgaaaaaatgcccgaacgtttttcagacggcagcgaagaagacgagagcgaaatcaaaatcgagccgcaaaaagccgaacgcaaagtcatcaatattctggcgaacaagccgaaaacctgcggctcatag

SEQ ID NO: 42611 - DNA, 852 bp, Neisseria meningitidis
atgaccttactcggaataaagctcaaacagacccagcagctcaaccagcggctgcaacaatctttgcgcgtattgcagatgtcgggtatcgaacttgaacgcgaggtcgaaaactggctgtcggacaaccccctgctcgaacgcaaagacacggatgaattttccgatgccgagttcagccattacactgcgcctgcccgtcaaatcggcggagacgaaggcgaagatatgctgtccaacatcgccggcgagcaggatttcaagcaatacctgcacgcgcaagtatgcgaacacccgctttccgaccaagaagccgcctgtgtccacatccttatcgatttccttgacgagcagggttatctgaccgacagcatcgaagacatcctcgaccatacgcccttagagtggatgttggatgaagcaatgctgcaacacgcgctgaccgcattgaaaaaattcgacccggcaggcgtggccgccgccgatttgaacgaatcgctgatactgcagatagaaagattgggcgaatgtgctgccaaacccgccgccctgcatatcgtccgaaacgccctcgacagcattgacggcaaccgcagccaaaccctcgcacgaataaaaaaacacctgccccaaaccgacagcggcacactcgaagccgcactcgacctcattgcttcgctcaatccctttcccgccgccggttttgcctcgtccacgcccacgccgtattctgacgaggcgctcgccaacctgctggctttccgcggcatggaggtttctcgccgcaccattgccaaatacagagaatcctttgagattccggcagcacacaaacgcaaaaccgcagaataa

SEQ ID NO: 42612 - DNA, 621 bp, Neisseria meningitidis; identical to SEQ ID NO: 39249

SEQ ID NO: 42613 - DNA, 1056 bp, Neisseria meningitidis
atgaaaacctacgcaccggcactctataccgcagccctgctcaccgcctgcagccccgcagccgattcaaaccatccgtccggacaaaatgccccggccaataccgaatccgacggaaaaaacattaccctgctcaacgcctcatacgatgtggcacgggatttttacaaagaatacaaccccttatttatcaaaacataccaatccgaacaccccggcacatccgtcagcatccaacagtcccacggcggctccagcaaacaggcattatccgtagccaacggccttcaagccgatgtcgtaaccatgaaccaatcctccgacatcgacctgctcgaaaaaaaaggactggtagaaaaaggctggcaacaagccctccccgaccacgccgcgccctacaccagcactatggttttccttgtccgaaaaaacaaccccaaacagatccgcgattggaacgaccttgccaaagacggcgttaacatcgtcatcgccaatcccaaaacctcgggcaacggacgctacgccttcctcggcgcatacggttacggtctgaaaaccaccaacggcaacgaacaggaagcccaaaaactcgtcgcatccatcctcaaaaacacccccgtttttgaaaacggcggacgcgccgccaccaccaccttcacacaacgcaacatcggcgacgtactcatcacttttgaaaacgaagccaactacgtcagcaaaaaactgacccaaggacagtttgaaatcgtctatccgagctacaccatttccgccgaaagccccgtcgccgtcgtcaacagcgtcgtcgcgaaaaaaggcacgcaaaaaaccgcccgcgcctatctcgaatacctttggagcgaaccggcgcaagaactcgccgcctcactctacctgcgcccccgcaaccccgaagtattggcaagacacaaagccgacttcccagacttagacaccttctctcccgaaaaaaaattcggcggatgggacaacatcatgaaaacctacttcgccgacggcggcatattcgaccgcctgaccgcacaaaaatga

SEQ ID NO: 42614 - DNA, 684 bp, Neisseria meningitidis
atggaactggtatttatccgccacggacaaagcgaatggaacgcgaaaaacctgtttacaggctggcgcgacgtgaagctgagcgagcaggggcttgccgaggctgccgccgccggcaagaaactgaaagaaaacggctatgagttcgacatcgccttcacatccgtcctgacccgcgcgattaagacctgcaacatcgttttggaagaatccgaccaactgttcgtaccgcaaatcaaaacgtggcggctgaacgaacgccactacggccaactgcaaggcctggacaaaaaacaaaccgccgaacaatacggcgacgagcaagtccgcatctggcggcgcagctacgacaccctgccgccgcttttggacaaagacgatgagttttccgcacacaaagaccgccgctatgcccatctgcctgccgatgtcgtacccgacggcgaaaacctgaaagtaacgctggagcgcgtattgccgttttgggaagaccaaatcgcccccgcgattttgagcggcaaacgcgtcttggtggcggcgcacggcaactccctgcgcgcgctggcaaaacacatcgagggcatttccgacgaagacattatgggcttggaaatcccgaccggtcagccgttggtgtacaaattggacgacaatttgaaagtcatcgaaaaattctacctgtaa

SEQ ID NO: 42615 - DNA, 468 bp, Neisseria meningitidis
atgcaggtatttctgacgattcccggctatgatgttgaggcagaaatcgaaaaattcgtttggatggatgctgtgatttggcagatgccgggctggtggatgcacgagccttggacagtgaaaaaatacatagacggagtattaaccgctggacacggcaaactctaccaaagcgacggcagacacagcgtcaatccgactgagggctacggcacaggcggcttgttgcaaggcaaaaaacatatgctttcactgacttggaatgcgccgattgaggcgtttacccgcgaaggcgatttctttgaaggcaaaggcgttgatgttttgtatatgcacttccacaaagccaacgagtttttgggtatgacccgcctgccgacattcttatgtaacgatgtggttaaaaatccgcaagtggaaaaatacttggcagattatcaggcacacttggaaaaagtgttcggctaa

SEQ ID NO: 42616 - DNA, 1152 bp, Neisseria meningitidis
atgcagacatggcagcttccggaacatatcgccgacgtactgcccacgaacgcgcggcagcttgaaagcgcgagggagcagttgttggcactgttccgcgtacacggttatgaactggtacagcctccgctgatggagtacgcacattccctgctgacgcatatcgatgcggggctttccctgaaaaccattttggtaacggacaggctcagcggcaggcagttgggcatacgcgccgacatcacgccgcaggtggcgcgtatcgatgcccatcttttatccgccaaccaagggattaaccggttgtgttatgccggtccggtgttgcacgcgcagcccgacggtctgctgaatatgcgcgaacccttgcaggcaggggcagaaatgtacggttttgctgacatccgtggcgacatcgagctgatagacctgatgctgaaaagcatgaaaattgccgatatgggcaaagtgctgctttcgctggggcatatcggcatatttcgcgccttgtccgatgcggcacatttggatgcggggcagtccgcaacgctgcttgccttgatgcaggataaagataccggggcggtcgaagcgcaggtcaaggcttggaagctggacggcatgtgggcaaaagcattctcgctgttgccgcgcctgtacggcgggcgtgaagtgttgtccgacgcgcgcggacggttgccggatttgtcggcggtcggcggcgcgttgggcgaattgcaggcggtgtgcgacgcattccccgattgtgaaatccatatcgacttgtccgagctgcgtgtcgacaattaccacacgggcttgctgtatgccgcctatgccgccgatttccacgacgcggtcgcgcgcggcgggcgttatgacggattgggcggatatttcggtagggcgcgcccggcaacgggattcagtttcgacttgcgcagctttatcgggcgtttgcccgccatcgaacggcagcccgccgtgttggtcgatgcggaagatgccgaagcggcgcacgaagcggtcgaagccttgcgtgaacaagggcagtgtgtcgtaatcgattacggtatcggacacaatgtttcggaagagcttgcaggccgtctgaaaaagacggacggcgtttggcaggtcgtgaaacgctaa

SEQ ID NO: 42617 - DNA, 1770 bp, Neisseria meningitidis
atgaccgtacagaccaagacaaaaggtttggcgtggcaagaaaaaccgctatccgacaacgaacgtctgaaaaccgaaagcaattttttacgcggcacgattttggacgatttgaaagacccgctcacgggcggcttcaaaggcgacaacttccaactcatccgcttccacggtatgtatgagcaggacgaccgcgacatccgcgccgaacgcgccgaggcaaaactcgagcccttgaaatttatgcttttgcgctgccggctgccgggcgggatcatcaaaccgtcccaatggatagaactggacaaatttgcccgggaaaacagtcattaccgctccatccggctgaccaaccggcaaaccttccaatttcacggcgtgccgaaagccaagttgcagacgatgcaccgcctcttgcacaaactgggtttggattccatcgccacggcggcggatatgaaccgcaacgtgctttgcacgtccaacccgatcgagtccgaactgcaccggcaggcttacgaatacgcgaaaaagatttccgaacacctgctgccgcgcacgcgcggttatctggatgtgtgggtggacggcaaaaaagttcaaagttccgacgacttccttcaagaagacgagccgattttgggcaaaacctatctgccgcgaaaattcaaaaccgcagtcgtcatcccgcccttgaacgatgtggactgctacggcaacgatttggatttcgtcgccgtttcagacggtaacggacagcttgccggcttcaatgttttggcaggcggcgggctttcgatggaacacggcaacaccaaaacctatccgaacatttcactggaactgggtttcgtgcctccggaacacgcgctgaaggccgccgaagcggtggtaaccacgcagcgcgacttcggcaaccgcagcgaccgcaaaaacgcccgcacccgctacaccattcaaaatatgggcttggacaacttccgcgcggaagttgaacgccgtatgggtatgccgttcgaacccgtacgcccgttcaaatttaccgggcgcggcgaccgcatcggctgggtgaaaggcatagacggcaactggcatttaacccttttcatcgaaagcgggcgtttggttgacgaaggcgggaaacagcttctgaccggcgtgttggaaatcgccaaaatccacaaaggcgatttccgcatcaccgccaaccaaaacctcatcgtggcaaatgtcgccgaagcagacaaagcaaaaatcgaagaatttgcccgaacatacggattaatccgcaacgatgtcagcaagctgcgtgaaaatgcgatgtcctgcgtttcctttccgacctgcccgctggcaatggcggaagccgaacgcgtgctgccggacttcatcggcgagctggataagattatggcgaaacacggcacgtcggacgactacatcgttacccgcattaccggctgcccgaacggctgcggacgggcgatgttggcggaaatcggactggtcggcaaagccgtcggacgctacaacctccatatcggcggcgaccgtgaaggcgtacgcatcccccgtctttacaaagaaaacatcaccctgcccgaaatccttgccgaattggacgacctgatcggcaaatgggcggcagaacgcaatatcggcgaaggtttcggcgatttcgccatacggacgggcatcgtcaaacccgtattaaatgcacccgttgatttttgggacgcatccaaagccgtcgcgattgcccgcgcctga

SEQ ID NO: 42618 - DNA, 378 bp, Neisseria meningitidis; identical to SEQ ID NO: 36526

SEQ ID NO: 42619 - DNA, 1488 bp, Neisseria meningitidis; identical to SEQ ID NO: 39015

SEQ ID NO: 42620 - DNA, 813 bp, Neisseria meningitidis
atgtcggttgggcattatgagaattttcccgtcggttcgctgattttgccgcgcaggttgaggaagccggttcacgcggtgtacgcgtttgcacggacggcggacgatatggcggacgagggcagtatgccgtctgaagccaggttggcggggttggagggtttgcagcgcgagttggacgtgttggcatcgggcggccggtcggcgcatcctttgattgcacgattggatgccgaggcggttgtgccgttcggtttggatttgcagccgttttatgatttgctttctgcattttctcaggatgtggttaaaacaaggtatggaaatttcggcgagctggccgattattgtcggcgttccgccaaccctgtcggacgcattatgctggctttgtacgggaaaacggatgcggtgtgcgtggcgcaaagcgacggcatctgtacggctttgcaactggtgaatttttggcaggatgtggctgtggattggcaaaaaggcagggtttatattccgcaggacgatttgttgaaattcggtgtttctgaggaacagatcgcggcaggacgggcggatgcggcgtttcagcggctgatggcgtatgagtgtcggcgtgcgttccgtatgctgaaggcgggttcgcctttggcaagggaactgaatgggcgtatcggtttggaactccgtatgattgtgttgggggcgcagttgattttgcagaaactggacgcgtgccgatacgatgtgtttgcacaacgccccgttttggataagaaggattggttgattatgctgaaaaaggcgttgtggaaatga

SEQ ID NO: 42621 - DNA, 279 bp, Neisseria meningitidis; identical to SEQ ID NO: 36688

SEQ ID NO: 42622 - DNA, 1812 bp, Neisseria meningitidis
  misc_feature 8, 9, 10, 11, 12: 'n' is a, c, g or t
gtgtgtgnnnnnatcaaacgccgtctgcaagccggcgacaaaatggcgggccgccacggtaacaaaggcgtggtatcgcgcattctgccagtggaagacatgccttacatggcggacggccgtccggtagacatcgtactgaacccattgggcgtaccttcccgtatgaacatcggtcagattttggaagttcacttgggttgggcagcaaaaggtatcggcgagcgtatcgaccgtatgctgaaagagcaacgcaaagcaggcgagtcgcgcgagttcttgaacagactctacaacggcagcggtaagaaagaagatttggatgccctgactgatgaagaaatcatcgaactggcctccaacctgcgcaaaggtgcatctttcgcctctcctgtattcgacggtgcgaaagagtctgaaatccgcgaaatgctgaacttggcttatccgagcgacgatcctgaggttgaaaaactgggcttcaacgacagtaaaacccaaatcacgctgtatgacggccgttcaggcgaagcatttgaccgcaaggttacagtaggtgtgatgcactatctgaaactgcaccacttggtcgcccggctgcgcggcacaaaggcggaaaaaccgtttgccccgtattttcaaacgcgttacacttgccgccgctgttttcagccatttgattacccgcaaccgccgtcattgcgccggcggtttgcctgtcagcgtcattgcgccgctgtaaatacgaaagaacacattatgaccgtatcccccgtcgccttgcgccgtaagaccgagtgcaagcctcatcccaccgcgcgctattggaaaaaatgcgatgtcgaagccctgttcggacttcccttcctcgacctcatttaccaagccgccgaaatccaccgccaaaatttcaacccgcgcgaaatccagctttccacgctgttgtccatcaaaaccggcggttgtcccgaagactgcgcctattgtccgcaatcggcgcaccacaataccaatctgggcaaagagcagatgatggatgtggatgaaatcgtcgaaaaagccaaaatcgccaaatcgcgcggcgcaagccggttttgtatgggcgcggcgtggcgcggccctaaacccaaagacgtggagacggtttccgcaatcatcaaagccgtcaagggcttgggtatggaaacctgcggcacgttcggtatgctcgaagaaggtatggcggaagacttgaaagaggcgggcttggattattacaaccacaacctcgacaccgaccccgaccgctacaacgacatcatccacacccgccaacacgaagaccgaatggacaccttgggcaaagtccgcaacgccggtttgaaagtctgctgcggcggcatcgtcgggatgaacgaaacccgcgccgaacgtgccgggctgattgccagtctcgccaatctcgacccgcagcccgaaagcgtgccgattaaccggttggtcaaagtggaaggcacgccgcttgccgatgccgaagatttggactggacggaatttgtccgcaccatcgccgtggcgcggattacgatgccgcaaagttatgtccggctgtcggcagggcgcagcaatatgcctgaagcaatgcaggcgatgtgctttatggcgggcgcgaactcgattttttacggcgacaagctgctgaccacgggcaatcctgatgaggacggcgacagaatcctgatggaaaagctcaacctgtatcccttgcagtttgaaccggaaggcgaggtcgccgaagtggaaaaagcctctgggattaaagtggattattga

SEQ ID NO: 42623 - DNA, 711 bp, Neisseria meningitidis
atgcacgagacaactgacagactttttgagatagccaaagagcagggagttttaaagccggctgacatagcagagcgtctgaatatcagccaacaggctttgaaaaactgggaaagtcgtggcatagcggcaaaggcgctgcctgaagtagcaaaagcattcggtgtatctgaaacatggctgagaacaggtgaaggcagccgaaccgcgcccgtccttattgaccccgacctaccccacgaagtcaaagacatccaccgcccgatgacgtggagcagcaacgacccgctgcccgacgatgattatgttttcgtcccctacctcaaagagagctgcttcaaaggcggagtaggcacgtatgaaatccccgattacaacggctaccgcctgccgttcggcaaatccacgcttaaacgcaaaggcatcaatcccgacaacgtgttttgctgcaccctgaccggcgacagtatggaggaaaaaatcgcagaagacgcggcaattgccgtagatacgggcgaaaccgccatacgcgacggcaaaatctacgccttcgcccaggacggtatgttccgcgtgaagtacctgatacggcagcctggcaacagcgttctgatacgcagccacaacagcggtttctatggcgacgaaaacgcccccttggacagcctgaccgttatcggcagggtattttggtggagcgtgctggattga

SEQ ID NO: 42624 - DNA, 486 bp, Neisseria meningitidis
atggacgcgctgcacaccatcgcccgaaacctgacgaaaaaatgtcaaaccgtaagctgtgccgaatcctgtacaggcggaatgcttgccgccgcattcacaagcgttgcaggcagttcgcaatggttcgaccagagttttgtaacatacagcaacaaagccaaagaagaccgcttgggcgtgttgcccgaaaccctgctcgaacacggcgcggtcagccgccaaaccgtctatgagatggcgcgcggcgcgaaagccgtggcgcaggcggattacgccgtcggtatttccggcatcgccggtccgggcggcggcagcgaaagcaaacccgtcggcacggtttggttcgggtttgcctttccgggcggaagttgcgaagcaatgcgccgttttgacggcaaccgcgaatccgtccgcgcgcaggcggtcgccttcgcgttggaacggttggcggggctgattgaaaacggcggcgatgctgtctaa

SEQ ID NO: 42625 - DNA, 360 bp, Neisseria meningitidis
atgaatatcaaacacctgattaccgccgcactcattgcctcagccgcctttgccgcgcaggcagccccgcaaaaacccgtatccgccgcccaaaccgcgcaacatccggccgtttggatcgatgtccgttccgaacaggaatttagcgaagggcatttgcacaacgcggtcaacatccccgtcgaccaaatcgtccgccgcatacacgaagccgcgcccgacaaagacacgccggtcaacctctactgccgcagcggacggcgtgccgaagccgcccttcaagagctgaaaaaagcaggttatacaaatgttgccaatcacggcggttatgaagacctgctcaaaaaagggatgaaatga

SEQ ID NO: 42626 - DNA, 1302 bp, Neisseria meningitidis
atgaccgaatccgtccgcctccccgtcgcccgtctcaaaccttccaccgtcgccctgcccggctccaaaagcatcagcaaccgcaccctgctgcttgccgccttgtccgacaatgcttgcgaaatccattccctgctcaaatccgacgataccgaccgtatgctcgaagcactcgataaactcggcgttcaaatcgaatatcttgccgaagaccgtctgaaagtgcacggcacaggcggacgcttccccaaccgcactgccgatttgtttttgggcaacgcgggcacggcgttccgcccgttaaccgccgctctggccgttttgggcggcgattatcatctgcacggcgtgcctcgtatgcacgaacgtcctatcggcgatttggtcgatgcgttgcggattgccggggccgatgtcgaatatctcggcaaggaacactatccgccgcttcatatcggcgaacgccaagacaacggcgagcgcgtgattccgattaaaggcaatgtgtccagccagtttctgaccgcccttttaatggcgttgccgctgaccgggcaggcgtttgaaatccgtatggtcggcgaattgatttccaagccctatatcgacattactttaaaactgatggcgcaattcggcgtacaggttatcaatgaaggctaccgcgtcttcaaaattcccgccgatgcgcactaccacgcgcccgaacacttgcacgtcgaaggcgatgcctccagcgcgtcctacttcctcgcagccggtttgattgccgccacgcccgtccgcgttaccggtatcggcgcaaacagcatacagggcgatgtcgcctttgcccgcgagctggaaaaaatcggggcggacgtggtttggggcgaaaacttcgtcgaagtttcacgcccgaaggaacgtgccgtccaatcctttgatttggatgcgaaccatatccccgatgccgccatgaccctcgccatcgtcgcgcttgctacagggcaaacctgcacgctgcgcaacatcggttcgtggcgcgtcaaagaaaccgaccgcatcgccgcaatggcaaacgagttgcgcaaactcggggcaaaagtcgtcgaagaagccgaagcaattcacatcaccccgcccgaaacgctgacacccgacgccgtcatcgacacgtacgacgaccaccgcatggcgatgtgtttctcgctggtttcgctgttgggcgtacccgtcgtcatcaacgatccgaaatgcacccacaaaaccttcccgacttatttcgacgtgttctcatcgctgaccgaaacagcggaataa

SEQ ID NO: 42627 - DNA, 465 bp, Neisseria meningitidis; identical to SEQ ID NO: 38444

SEQ ID NO: 42628 - DNA, 774 bp, Neisseria meningitidis
atgagtgcgaacatccttgccatcgccaatcagaagggcggtgtgggcaaaacgacgacgacggtaaatttggcggcttcgctggcatcgcgcggcaaacgcgtgctggtggtcgatttggatccgcagggcaatgcgacaacgggcagcggcatcgacaaggcaagtttgcagtccggcgtttatcaggtcgtactgggcgatgcggacgtgaaatcggcggcggtacgcagcaaagagggcggatacgctgtgctgggtgcgaaccgcgcgctggccggtgcggaaatcgagttggtgcaggaaatcgcccgggaagtgcgtttgaaaaacgcgctcaaggcggtggcggaagattacgactttatcctgatcgactgcccgccttcgctgacgctgttgacgcttaacggcttggtggcggcaggcggcgtgattgtgccgatgttgtgcgaatattacgcgctggaagggatttccgatttgattgcgaccgtgcgcaaaatccgtcaggcggtcaatcccgatttggatatcacgggcatcgtgcgtacgatgtacgacagccgcagcaggctagttgccgaagtcagcgaacagttgcgcagccatttcggggatttgctgtttgaaaccgtcatcccgcgcaatatccgccttgcggaagcgccgagccacggtatgccggtgatggcttatgatgcgcaggcaaagggtgccaaggcgtatcttgccttggcggacgagctgatggcgagggtgtcggggaaatag

SEQ ID NO: 42629 - DNA, 1812 bp, Neisseria meningitidis
atgaaacaaatccgcaacatcgccatcatcgcccacgtcgaccacggcaaaaccacattggtcgaccaactgctgcgccaatccggcacattccgcgccaaccagcaggttgacgagcgcgtgatggacagcaacgaccttgaaaaagaacgcggcatcaccatcctcgccaaaaacaccgccatcgattacgaaggctaccacatcaatatcgtcgacacgccgggacacgccgacttcggcggcgaagtagagcgcgttttggggatggtggactgcgtcgtcttgttggtggacgcgcaggaaggcccgatgccgcaaacccgtttcgtgaccaaaaaagccttggctttggggctgaaaccgattgtcgtcatcaacaaaatcgacaagccgtccgctcgtccgagctgggttatcgaccaaactttcgagctgttcgacaacttgggcgcgaccgacgagcagttggatttcccgattgtttacgcttcagggttgagcggtttcgccaaattggaagaaaccgacgagagcaacgacatgcgtccgctgttcgatactatcttaaaatatacgcctgcaccgagcggcagcgcggacgaaacgctgcaactgcaaatttcccaactcgactacgacaactacaccggccgcctcggtatcggtcgtatcttgaacggacgcatcaaacccggccaaaccgttgccgtcatgaaccacgatcagcaaatcgcccaaggccgcatcaaccagcttttgggtttcaaaggtttggaacgcgtgccgcttgaagaagccgaagccggcgacatcgtgattatttccggtatcgaagacatcggtatcggcgtaaccatcaccgacaaagacaatcccaaaggcctaccgatgttgagcgtggacgaaccgacgctgacgatggactttatggtcaacaccagcccgctggcgggtacggaaggcaaattcgtaaccagccgccaaatccgcgaccgcctgcaaaaagaattgctgaccaacgtcgccctgcgcgtggaagataccgccgatgccgacgtgttccgcgtatccgggcgcggcgagctgcacctgaccattttgctggaaaacatgcgccgcgaaggctacgaactcgccgtcggcaaaccgcgcgtcgtgtaccgcgacatcgacggtcaaaaatgcgaaccgtatgaaaacctgaccgtggatgtacccgacgacaaccaaggcgcggtaatggaagaactcggccgccgccgtggcgaactgactaatatggaaagcgacggcaacggacgcacccgcctcgaataccatattccagcgcgcggcttgatcggtttccaaggcgaatttatgaccctgacgcgcggggtcgggctgatgagccacgtgttcgacgattacgcgcccgtcaaacccgatatgcccggccgccacaacggcgtgctggtgtcccaagagcagggcgaggcagtcgcttacgccttgtggaatctggaagaccgcggccgtatgttcgtatcgcccaacgacaaaatctacgaaggcatgattatcggcatccacagtcgcgacaacgatttggtggtcaacccgctcaaaggcaaaaaacttaccaacatccgtgccagcggtaccgacgaagccgttcgcctgaccacgccaatcaagctgacgctggaaggtgcggttgagtttatcgacgatgacgaactcgttgaaatcacgccgcaatccatccgtctgcgcaagcgttacttgagcgaattggaacgccgccgccactttaaaaagctggattga

SEQ ID NO: 42630 - DNA, 855 bp, Neisseria meningitidis
atggcagaaattactgcaaaaatggttgccgacctgcgcgccgctaccggcctgggcatgatggaatgcaaaaaagccttggttgaagccgaaggcaacttcgacaaagccgaagaaatcctgcgtatcaaatccggtgcgaaagccggtaaactggccggccgtaccgctgccgaaggcgtattggcttacgcgatcaacggcaatgtcggcgcattggtcgaagtaaactgcgaaaccgacttcgttgctaaagacgcgggcttcgtagaatttgccaacttcgttgcgaaaactgctgccgagaaaaaaccggcttctgttgaagaactgagcgaactggttgaagcagaacacaaagccatcatcgccaaattgggcgagaatatgtctgtccgtcgcttccaagtgatcgacactgccaaccaactggttgcctacatccacggcgcattggcgaccgaaggcgtattggttgagtacaaaggctctgaagacgtagcacgcaaaatcggtatgcatattgttgccgctaaaccacaatgcgtaagcgaagccgaagtagatgccgaaaccgttgaaaaagaacgccacatctacaccgagcaagccatcgcttccggcaaacctgccgacatcgccgctaaaatggttgaaggccgcatccgtaaattcttggctgaaatcactctgaacggccaagcattcgtgatgaaccccgatcaaactgttgcccaattctctaaagaaaacggcactgaagtgatcagcttcgtacgctacaaagtaggcgatggtattgagaaaaaagccgtcgattacgcagccgaagttgctgccgctgctaaagtgtaa

SEQ ID NO: 42631 - DNA, 1086 bp, Neisseria meningitidis
atgaccgtcccccatattccgcgcggccccgtcatggcagacattgccgccttccgcctgaccgaagaggaaaagcaacgcctgctcgatcccgccgtaggcggcatcatcctcttccgccgcaacttccaaaacatcgaacaactcaaaacactcaccgccgaaatcaaagccctgcgcacacccgaactcattatcgccgtcgatcacgaaggcggcagggtgcaacgtttcatcgaaggcttcacccgcctgcccgcaatgagtacgctcggcgagatttgggacaaagacggcgcgtccgccgccgaaaccgccgccggacaagtcggccgggttttggcaaccgagctttccgcctgcggcatcgatttgtccttcacgcccgtcttagatttggactggggaaactgccccgtcatcggcaaccgcagtttccaccgcaatcccgaagcggtcgcccgcctcgccctcgcccttcaaaaaggtttgacaaaaggcggtatgaaatcctgcggcaaacattttcccggacacggatttgtcgaaggagacagccatctggtcttgccggaagactggcgcagcctgtccgaactcgaaaccgccgacctcgcccccttccgcattatgagccgcgaaggtatggcggcggttatgcccgcccacgtcgtttatccacaagtggacacaaagcccgcagggttttccgaaatctggctcaaacaaattttgcgccgcgacatcgggttcaaaggcgtgattttctcggacgatttgactatggagggcgcgtgcggggcaggcggcatcaaagaacgcgcccgcatttcctttgaggcaggttgcgacatcgtcctcgtctgcaaccgtcccgaccttgtggatgaactgcgcgaagatttccgcattcctgacaatcccactttggcgcaacgttggcaatatatggccaacacgctcggcagtgccgccgcgcaagccgtgatgcagacggcggatttccaagcggcgcaagcctttgttgccggccttgcctcgccgcaggacacggcgggcggcgtgaaagtcggcgaagccttttaa

SEQ ID NO: 42632 - DNA, 294 bp, Neisseria meningitidis
atgaaaccgtctcttttgttgcaaagcagaaagaaagaaatattggcagttttcgggaaatatccattgatttgcaatccaagggtattcggttcggtttctcgcggagatgatacggaaaacagcgacattgatttgttggtggatgcaaaaacagggacaacattattggatttgggcgggctgcaagaggaattgcagaaactcttgggcataaaggtcgatttgctgacacccgatgacatctcggcccactttagagataaggtgttgactgaggctgtcgcattatga

SEQ ID NO: 42633 - DNA, 969 bp, Neisseria meningitidis
atgaaaattttgcttgtccgcttgtctagtatgggcgatttaattcacactttgcccgcaatcgaagatttggcgcgacaatgtcctgatgtagaactgcattggctatgtgaggctggatttgcagatattgcgcgcctgcatccgtttgtaaaaaaaatccatgtgatgaaatggcggcaatggcgcaaacatctctttcgggctgaaacttggcgggaaatgggtcatctgaaacagactttgcggcaggaagtatttgatttcgtattggacagtcaaggtctgattaaaagcgcgtgtttcgctaaaatggcaaaatccccgatttgtggtttggataaaaacagtgcgcgcgagggatgggctgctttggcgtatgtaaaaacatacgctgtaccgaagggaaaaaatgccgtttggcgcaaccgtgaactgtttgcccaagtatttgggtatgtaatgccggaaacgcaggtatttggcttgactgttcctgaagcaggccgtctgaaaaatttagcgcagccgtattatgcggctttgcatgcgaccagtcgggacagtaagttatggcctgtggaaaactggcggtcgttgctgcaaaagttgaatgaagaacagcaatgcaatatttacctgccttggggaaatgaagatgaaaaaacgcgtgccaaacaaattgcagatgggctgccgtttgctattgtgtgcgacaaaataaatttattgcaggcagcgtatctgctgaaatacgcggtcggaattgtcggcgtggataccggtttgctgcatttggcaaatgccttggaaaaacctgtggtcggcatttataccgataccgatccgattaaaacaggcgttcaggtttcgccaattgcaaaaaatttgggcaatatcgggcagattccgaccgcagatttggtttatcaagcgctgatggattgtgttgcagcagataaaggctaa

SEQ ID NO: 42634 - DNA, 1887 bp, Neisseria meningitidis
atgccgtctgaaaccgtttttcaagtaattgatatgaataaagaaacccgttttccggaacacttcgacatcccacttttcctcaaaaacctgcccaacctgccaggcgtataccgttttttcaacgaaagcggcaacgtcttatacgtcggcaaagccgtcaacctcaagcggcgcgtgtccggctatttccagaaaaacgaccattccccgcgcatcgcattgatggtgaaacaggttcaccacatcgaaaccaccatcacccgctccgaatccgaagccctgattctcgaaaacaacttcatcaaagccctgtcgcccaaatacaatattcttttccgcgatgacaaaagctatccttatttgatgctcagcggccatcaatatccgcaaatggcgtattaccgcggcacgctgaaaaagcctaatcaatatttcggcccatatcccaacagcaacgccgtgcgcgacagcattcaagtgttgcaaaaagtctttatgctgcgtacctgcgaagacagtgtattcgagcatcgcgaccgtccttgtctgctttaccaaatcaaacgctgcaccgcgccttgtgtaggccacatcagtgaagaagattatcgtgacagcgtgcgtgaagccgcgactttccttaatggcaaaactgacgaattgacgcgtaccctgcaacacaaaatgcaaaccgccgccgctaatctacaattcgaagaagccgcacgttaccgcgatcaaatccaagcgctcggcatcatgcaaagtaatcagtttatcgacagtaaaaatccgaacaatcccaacgatatcgatttgcttgcactggcggtttcagacggcctggtttgcgtacactgggtcagcatccgcggcggacggcacgtcggcgacaaaagctttttccccgacaccaaaaacgatcccgagccaaacggacaagattacgccgaagccttcgtcgcccaacactatctgggcaaaagcaaacccgacatcatcatcagcaactttcccgttcccgatgcgctaaaagaggctttggaaggcgaacacggcaagcagatgcaatttgtcaccaagaccataggcgaacgcaaagtccggttgaaaatggcggaacaaaacgcgcaaatggcgattgcacaacgccgcctgcaacaaagcagccagcaacaccgcattgatgaactggcaaaaatcctcggcatggattcagacggcctcaaccgccttgaatgtttcgacatcagccacacacaaggcgaagccactattgcgtcctgcgttgtgtacgatgagcaaaacatccagccttcgcaataccgccgctacaacatcacgaccgccaaacccggcgacgactacgccgccatgcgcgaagtgttgacgcgccgttacggcaaaatgcaggaggccgaagccaacggcgagaccgtcaaatggccggatgccgtgttgattgacggcggcaaagggcaaatcggcgtagccgtatcggtatgggaagaactcgggctgcacatccctttggtcggcattgccaaaggcccggagcgcaaagccggtatggaggagctcatactgccttttaccggcgaagtcttccgcctgccgcccaacagcccggccttgcatctattgcaaaccgtacgcgatgaatcgcaccgtttcgccattaccggtcaccgcaaaaaacgcgacaaagcccgcgttacctcctccttaagcgacatccccggcgtaggcagcaaacgccgccaagccctgctcacccgcttcggcggtctgcgcggcgtgattgccgccagccgcgaggacttggaaaaagtggaaggcatcagcaaggcattggcggaaacgatttacaatcatctgcattag

SEQ ID NO: 42635 - DNA, 315 bp, Neisseria meningitidis
atgaagaaaaccctttctaatttagtgctaatatcattctgctcaacaatgctaacagcttgccctttttggggtagttgtgcagactggaattgctccaaacttaatccacgctgggagaaagccgttgacacatgtgaaactgaaaatctcacctttgttttgcatgaattaggcaatcaattaggatataaatctattaccgaagtctcatttagtgaaattgggcaacatatttcttatcagtgtattcaccatggcggtggatacaatattcgtaaagataagcagtatggtcatttgtttgtgcaataa

SEQ ID NO: 42636 - DNA, 924 bp, Neisseria meningitidis
atgaaaaaacgcaataatcctcttccgctgttgaacggtgtcaaacccagttatttggtgctgccgcatgaaaagcagttttacgggctgccgctgctgcattttctgtgcatccgctttccttttgtgggcgcggacgattggcgcaggcggttgaacagcggttttgtggtcggttcggatggtgcggcgttggacgaacattctttgttcgagccgggtaaggtgatgttttattaccgtgaaaccagccgtgagagcgagccgcgtattccgtttgaagaaaagattttgcatattgatgagcatttgattgtggtggacaaaccgcattttctgcccgtcatccccagcggcaggtttttgcgggaaaccctgctcacgcgcctgcgtttgcggcctgaattgcagcatttgaatgttgaggacattacgccgctgcaccgcttggacaaggatacggcaggcgtgatgctgctgtcgcacaatcctgccacgcgcggagcctatcagacgatgtttcaaaacaaaacggtatggaaaacgtatgaggcgcttgcgccgacaaggacggatttgccgtatccgctcgatgtggtttcgcgtttggtgaggggtgagaaattttttacgacgcaagaggcggaaggcgaaccaaacgcacatacgacggtcgaactgattgaaaacaggggggaattcagcctttaccgccttacgccgcatacgggcaagaaacaccagttgcgcgtgcatatgatgggtttgggtatgccgctgttgaatgacgcgctctatcccgtgccgtctgaagcgggcagcgaggattatcggaaacctttgaagctattggcaaaaaagattgcgtttgcagatcctttgtcgggtcgggaaagggtgttttgcagcggattttgcctataa

SEQ ID NO: 42637 - DNA, 219 bp, Neisseria meningitidis; identical to SEQ ID NO: 40879

SEQ ID NO: 42638 - DNA, 1563 bp, Neisseria meningitidis
ttgtttgaagtgatgaaaaaacctttgatttcggttgcggcagcattgctcggcgttgctttgggcacgccttattatttgggtgtcaaagccgaagaaagcttgacgcagcagcaaaaaatattgcaggaagcgggcttcttgaccgtcgaatcgcaccaatatgagcgcggctggtttacctctacggaaacgacggtcatccgcttgaaaccggagttgctgaataatgcccggaaatacctgccggacaacctgaaaacagtgttggaacagccggttacgctggtaaaccatatcacgcacggccctttcgccggcggattcggcacgcaggcgtacattgaaaccgagttcaaatacgcgcctgaaacggaaaaagttctggaacgcttttttggaaaacaagtcccggtttcccttgccaataccgtttattttaacggcagcggtaaaatggaagtcagtgttcccgccttcgattatgaagagctgtcgggcatcaggctgcactgggaaggattgacgggaaaaacggtttatcaaaaaggtttcaaaagctaccggaacggctatgatgcccccttgtttaaaatcaagctggcagacaaaggtgatgccgcgtttgaaaaagtgcatttcgattcggaaacttcagacggcatcaacccgcttgctttgggcagcagcaatctgaccttggaaaaattttccttagaatggaaagagggtgtcgattacaacgtcaaattgaacgaactggtcaatcttgttaccgatttgcagattggcgcgtttatcaatcccaacggcagcatcgcaccttccaaaatcgaagtcggcaaactggctttttcaaccaagaccggggaatcaggcgcgtttatcaacagtgaagggcagttccgtttcgatacactggtgtacggcgatgaaaaatacggcccgctggacatccatatcgctgccgaacacctcgatgcttctgccttaaccgtattgaaacgcaagtttgcacaaatttccgccaaaaaaatgaccgaggaacaaatccgcaatgatttgattgccgccgtcaaaggagaggcttccggactgttcaccaacaatcccgtattggacattaaaactttccgattcacgctgccatcgggaaaaatcgatgtgggcggaaaaatcatgtttaaagacatgaagaaggaagatttgaatcaattgggtttgatgctgaagaaaaccgaagccgacatcagaatgagtattccccaaaaaatgctggaagacttggcggtcagtcaagcaggcaatattttcagcgtcaatgccgaagatgaggcggaaggcagggcaagtcttgacgacatcaacgagaccttgcgcctgatggtggacagtacggttcagagtatggcaagggaaaaatatctgactttgaacggcgaccagattgatactgccatttctctgaaaaacaatcagttgaaattgaacggtaaaacgttgcaaaacgaaccggagccggattttgatgaaggcggtatggtttcagagccgcagcagtaa

SEQ ID NO: 42639 - DNA, 516 bp, Neisseria meningitidis
atgtacacttgcacttcctgcggcgaaaaccacgaagaaatgcccgcaatcggctttaccgcacccgatccctataatcaactcagtgaagaagaacgcattgcttatcaagcagaatgcgattctgatttctgcatcatccgctatcccgaccaaaccgaccgctttatccgcgcggtgctgccgattccgattatcgggcatgaggaaacgctggaatatggcgtgtgggtatccgtcagcgaaaagagttttaacgactatcaaagccgcttttacgacaaccttgaaaacgctgtttatttcggcatgatctgcaaccagctgcccccttatgaaaccgacaccttcggtctgcactgcaatgtcgttacccaacccgatggtcaacgtcctttgttgcaactccatcaaggcggcgaacatccgctggtacgcgacttttatcacggcatagaatatgccgaggcacaggcaaggataggggcggtatccgaatcggattgttcaggataa

SEQ ID NO: 42640 - DNA, 489 bp, Neisseria meningitidis
atgaccccgttatttagaaaagccgtttggctgctgtttgccgtttcggtctgtgcatttgccggctctttggcggcacagtatgttttgggtatggagccttgcgttttgtgtatcagccagcggttgtgcgtcttggcaaccgcattgtgtgcggcaattgtcctgatgtgcagaccaagaagaaaggcaggcggtttgttcggtgctgtctttatcagcattcccgccgttacgggtatttctgttgcggcatatcagttgtggttgcagtcgctgccgccgggaaccgctccttcgtgcggcgcgccgtggacgttccgattgaagggctggcctttgtttgattggttcgagcctgtcgtgcgcgggttcggaaattgtgccgaaccggattatctgctgggggttgctttgcctgtttggagtgtggcgtattttctggcggttgtcctgacggtttggtgggcgtgggcaagggctaaataa

SEQ ID NO: 42641 - DNA, 1380 bp, Neisseria meningitidis
atgctgctcgacctcaaccgcttttcctttcccgtcttcctgaaagaagtccgcctgctgaccactcttgccctgcccatgctgttggcgcaggtcgcgcaggtgggcatcggttttgtcgatactgtgatggcgggcggtgcgggcaaggaagacttggcggcggtggctttgggcagcagcgcgtttgccacggtttatattacctttatgggcattatggcggcgctgaacccgatgattgcccagctttacggcgcgggtaaaaccgacgaagtgggcgaaacggggcggcaggggatttggttcgggctgtttttgggcgtgttcggcatggtcttgatgtgggcggcgattacgccgttccgcaactggctgaccttgagcgattatgtggaaggcacgatggcgcagtatatgttgttcaccagcttggcgatgccggcggcaatggtacaccgcgcgctgcacgcctacacttccagcctgaaccgcccgcgcctgattatgttggtcagctttgcggcgtttgtgttgaacgtgccgctgaactatattttcgtttacggcaaattcggtatgcccgctttgggcggcgcaggctgcggactggcgacgatggcggtgttttggttcagcgcgctggcattgtggatttatatcgccaaggaaaatttcttccgcccattcggactgacggcgaaattcggcaaaccggattgggcggtgttcaaacagatttggaaaatcggcgcacccatcgggctgtcttattttttggaagccagcgcgttttcgtttatcgtgtttttgattgcgcctttcggcgaggattatgtggcggcgcagcaggtcggcatcagtttgtcggggattctctatatgattccgcaaagcgtcggctcggcggggacggtgcgcatcggcttttcgcttgggcggcgcgaattttcgcgggcgcgttatatttcgggcgtgtcactggtgttaggatggatgctcgccgtgattaccgtgctttccttggtattattccgttcgccgctggtaagtatgtacaacaatgatccggcggttttaagcatcgccgccaccgtcttactgttcgccggcttgttccaaccggcagacttcacccaatgtatcgcctcctacgccttgcgcggctacaaagttacaaaggtgccgatgttcatccacgccgccgccttttggggctgcggcctgctgccgggctatctgctcgcctaccgtttcgatatgggcatttacggcttctggacggcattgattgcctcgctcaccatcgccgccatcgccttggtgtggtgcttggaattgtgcagtagggagatggtcagatcgcataaggccgtctga

SEQ ID NO: 42642 - DNA, 1056 bp, Neisseria meningitidis
atgacacaccattaccccacagacgatattaagattaaagaagttaaagagttgttgccgccgatagcccatctttacgagctgccgatttccaaagaggcttcgggcttggttcaccgcacccgtcaggaaatttccgatttggttcacggcagggacaagcggctgttggttattatcgggccgtgttcgattcacgatccgaaagcggcgttggaatatgcggagcgtttgttgaaactccgcaagcagtatgaaaacgagcttttgattgtgatgcgcgtttatttcgagaagccgaggacgacggtgggttggaaaggtttgattaacgacccgcatttggacggtacgtttgacatcaatttcggtttgcgtcaggcgcgcagcctgttgttgtcgctgaacaatatgggtatgcctgcctctaccgagtttttggatatgattacgccgcaatattatgcggacttgatttcttggggggcaatcggtgcgcggacgaccgaaagccaagttcaccgcgaattggcaagcgggctgtcctgccccgtcggctttaaaaacggtacggacggcaatttgaagattgccatcgacgcaatcggtgcggcgagccattcgcatcatttcctgtctgtaaccaaggccgggcattccgccattgtccataccggcggcaatcccgactgtcatgtcattttgcgcggcggcaaagagccgaattatgatgcggaacacgtcagcgaggcggcggaacaactgcgtgcggcaggggtaaccgacaagctgatgatagattgcagccacgccaacagccgcaaggattacactcggcagatggaagtggcacaagacattgccgcccaattggaacaggacggcggcaatatcatgggcgtgatggtggaaagccatttggtcgaaggcagacaggacaagccggaagtgtacggcaagagcattaccgatgcgtgtatcggttggggcgcgactgaagaactgttggcattgttggcaggtgcaaacaaaaaacgtatggcgcgcgccagttga

SEQ ID NO: 42643 - DNA, 1074 bp, Neisseria meningitidis
atgaaatacaaagccctctccttactgccgcttgctgccgcccttgccgcctgtgccggggggggggtagccgaaccgcacgtccccgtgtccatccccaccgccacgccgctgaccggtgaggtaaagttatcaagcgataacagcaaaatcgaaaacatcaacaccgccaacactgaaacacatccgccgcgccgcaccagacgctccctctatgcctccccgcaaaacacatcctccggtatttccattcagcagcgggaagtagaaaaaatctatttcggtgttaaatcaccagaaaaatcattcatcttccaaacacccggcggcgcgcaatacgccctttcatcctacgccgaccccatcgtccccagctactcctcccccgacttcaaaattcccgaccgccacgcagggcagcggcttgccgacggcagccgcatctttatctgctgcagcgactccggggctacttcgtatgcggaaattaccaaacaagattatatgaaattcggggcgtggataggccccaacggcgaaatcgacctcttcgccggcggcttccccatcggcaaaacgccgcctcctgcgttctcctggggcagccccacgaccgaaaccgcattgtcaaaaggcaaaatcacttatcaggtttggggcatccgcgtcagaaacgggcaatttgttacttcctcttatacgccgcccaaaggcagctcttggagtggttatcaaaacacccccgtcctttcctttatcaccgccaatttcaacagcaacaaactggcaggcgaaatcatcggcaacagcgattacgggccaaatgtgaaaattgaaaacgcaacgattgacggactatccttttccggcgatgccacctccaacggcaaaaccggcaacttggaaggcaagttttttggcaagttcaacagcacccgcagcagcgacaccggcataggcggcaaaatcacttttaaagacgaccgctccctcgataccgtattcggcggcgtgatttatgagaaaaaacttgatgacaaaaccagtcaagataccaaccatctcaaaaaataa

SEQ ID NO: 42644 - DNA, 537 bp, Neisseria meningitidis
gtggatttgagggaagtaaaattaggcggcgaaaccatttacgagggcggtttcgtcagtatcagcagggataaggtcaggttgcccaacggcaatgaagggcagcgtatcgtcatccgccatccgggtgcggcatgcgtgttggcggttacggacgaggggaaagtggttttggtgcggcagtggcgttatgcggcaaatcaggcgacattggaacttcctgcgggcaagctggatgtggcgggcgaggatatggcagcgtgtgcgctgcgagaattggcggaggaaacaccttataccgccgacagcgtacgcctgctttacagtttttatacggcggtcggtttttgcaacgaaaaaatgtatctgttcgaagcggaaggcgtgcgtttgggcagtacgcttgccaatgacgaagacgagattacggaaaccgtattgatgtcgaaagaagaagtccgtcaggcattggcaaacgatgaaattaaagacggcaagacattaatcggtttgcaatactggttgatgaaggattga

SEQ ID NO: 42645 - DNA, 1671 bp, Neisseria meningitidis
atggaaaaaatctggttagacagctacgagaagggcgtcagtgccgaaatcgacatcacgcaatacaattccgtcagcgacgtattccgccaaagcgtggaaaaatttgccgaccaacctgcttttcaaaacatgggtaagacgctgacttatgccgaaaccggcaaactggcaacagattttgcttcttatctgcaaaacgtccttaaattgcctcgaggagagcgcgtggcaataatgttgcccaatgtactgcaatatccggttgcccttttcggcattttgcaggcaggtttggtagcggtgaacaccaatccgctctataccccgcgcgagctggagcatcagttgaaagacagcggcgcgaccgccatcatcgttttggaaaatttcgccaacacgctggagctggtgctgccgcgcacgcagatcaaacacgtcatcgtagcctccgtcggcgaaatgttcgggctgcttaaaggttcgctgatcaatttcgtcatccggaaaatcaagaaaatggtgcccgaataccgtattcgggaaaccgtttcctttcagacggcattgaaagaaggggcgaagcacgttttccaacctgtcgcattaaaccgcgaagataccgcgctgttgcaatacacgggcggcacgacaggtgttgccaaaggggcggtgctgagtcacggcaacatctgcgccaatatgcttcaggcaaaagaatggattaaaaaccagttgcgcgagggcaaagaaaccgttatcgccgccttgccgctgtaccatatttttgccttaaccgtgaatctgatgatttttgccaatgccggctcgaaaatcatcctgattaccaacccgcgcgatatgaaaggctttatcggagaactgaaaaaacagcgggttaatgtatttatcggcgtgaacacgctgtttaacgcgatggttaaccgtcctgattttgccgaagtcgatttttcagaattgcggctgactttgggcggcggtatggcgacccaaaaagccgttgccgaaaaatggaaaaaaatcaccggcacgcccatcgtcgaagcctacggtctgaccgaagccagccccggcgtgtgctgcaaccccttaaacatcgaatcatacagcggcagcatcggtttgcccgtctcgtccaccgaagtcgaactgcgcgacgcaaacggcaaagaagtccccgtcgggcagccgggcgaattgtgggtaaaaggccctcaagtgatgcaaggctactggaaccgccccgaagaaaccgccaaagccatagacgcgcgcggcttcttggaaaccggcgatattgccgtcatggacgaaaaaggctggttgaagctggtcgatcgtaagaaagacctcgtcgttgtttccggattcaatgtttatccgaacgaaatcgaggaagtcatcgcgcatcacggcaaagtcatggaagtcgcctgtatcggcgttcccgacgaaaaaaccggcgaggcactcaaagtattcgtcgtcaaaaaagacccgtctttgaccaaagaagaacttatcgctttttgccgcaccgaattaaccgcatataaagtaccgaaaaatatcgaattccgcgacgagttgcccaagtccaacgtcggcaaaatcctgcgccgcgagttgcggcaaagtaccgggaaataa

SEQ ID NO: 42646 - DNA, 684 bp, Neisseria meningitidis; identical to SEQ ID NO: 36776

SEQ ID NO: 42647 - DNA, 795 bp, Neisseria meningitidis
atgaaagcctatttggacttgatgcgccacgtcctcgacaacggtacggacaaatcagaccgcaccggtacgggtacgcgctccgtattcggttatcagatgcgttttgacttgggcaaaggttttccgctgctgacgaccaaaaagctgcatctgcgttcgattatccacgagctgctttggtttctcaaaggcgataccaatatcaaatacctaaaggacaacaatgtttccatttgggacgagtgggcggacgaaaacggcgacttaggcccggtttacggctaccagtggcgtaactggcccgcgcccgacggcaggcatatcgaccaaatcgccaatgtgctggaacaaatcaagaagaatcccgactcgcgccgcctgattgtatcggcgtggaatccggctttggtcgatgaaatggccttgccgccctgccacgcgctgtttcagttttacgttgccgacggcaaactgtcctgccagctttaccagcgtagtgcagatattttccttggtgtgccgtttaatattgccagctacgcattgttgaccatgatgatggcgcaagtgtgcggattggaggcgggcgagtttgtccatacgtttggcgacgcgcatttgtaccgcaaccatttcgagcaggccgcattgcagttggaacgcgaaccgcgcgccttgccagtgatgaaaatcaatcctgaagtcaaagatttgttttccttcaagtttgaagatttcgagttggaaggttacgaccctcatccgcatatcaaggcggcagtgtcggtttag

SEQ ID NO: 42648 - DNA, 1098 bp, Neisseria meningitidis
atggaagttcaactgccgaaaattaaaacagtacgcgtaatgttggcggggatgacggcgcagcaggaatccgttttcaaaatggcattcaaaatgcacaataccacccgttatgaaacagtatccccttcagacggcagtgccgtgcccgatttggttttggcggataccgatgccgagggcggttttgaactttggaaagagcttgccgagcgttataaggatatacccgtcgccgtctgttcggagaaagttcccgattctgaagttccctacctgcccaaaccgattcggtttgaaacattgtttcctatgctccgcaaattgttgcagggcgagaatgtttatgggaaatcgtttattgcacccgcagaccggtcggcgaaaaataacgggaatgtgcagcgtacggttacgatacgccagtttaacccgaataaaggattattgggggcgttgcggtttgcggaaaagaacaggcaggacatcgctatcttgcatggaaataagccggtccttattgttttcccctcgatacaacgggttttgctgacagaaagtgtgcaaaaactcgaagaattgtgcaaagacgaaaatttgcaggtcagctgcaagactgttcccgataacccgcaatggcgcgaaaaggctaaagtaggcattatgtcctgtatgtggcagttttccatttggacagcgcagggcaggttgatttatccgatttctcccgatactccgtttacgttgaaatcttggccaaacctgacccggttggcaaatgtgccggggtcgatacgcttgtcggcatttctgaccaaggcatccgtcaaccttaacgtgttgtataaagtgatgcctttaaacctcaatgatattctgaattatcttgcggcaacctatacaaccgggtttttgtcggtagatttaaaaacggtttcacaacaggcatactccgatatggcggataaaataaatatcggagccgattctgcctctgatagtgaaatgatgaaaaaagcggaaaaaatcacaacaccatcccaatcccagtcgcgcggccttctgcaaaggctgatgaaaaaactgttgggcagctaa

SEQ ID NO: 42649 - DNA, 960 bp, Neisseria meningitidis
atgaaacctgtttttttggattttgaacaacccatagccgaactgaccaacaaaatcgatgagctgcgtttcgtccaagacgagtctgccgtcgatatttcggacgaaatacaccgtttgcagaaaaaaagcaacgacctgaccaaatcgattttcagcaaactcacacccgcccaaatttcacaggtttcccggcatccgcagcgtccctatactttggattacattgaggcactgtttaccgattttgaagaactgcacggcgaccgccactttgccgacgattatgcgattgtcggcggattggcgcgtttcaacggacaaagcgtgatggtcgtcgggcatcagaaagggcgcgacaccaaagaaaaaatccgccgcaacttcggtatgccccgtcctgaaggctaccgcaaagccctgcgcctgatgaagacggcagaaaaattcggcttgcccgtaatgacctttatcgatacgccgggcgcgtatcccggcatcggcgcggaagaacgcgggcagtcggaagccatcggcaaaaacctgtacgaactgacgcgcctgcgcgttcctgttttgtgtaccgtcatcggcgaaggcggttcaggcggtgcgttggcggtcgccgtaggcgattacgtcaatatgctgcaatactcgacctattctgttatctcccccgaaggctgcgcgtctattttgtggaaaaccgccgaaaaggcggcggatgcggctcaggctttgggcattactgctgaccgcctgcaaaagctggacttggtcgataccgtcatcaaagaaccattgggcggcgcgcatcgggatttcgggcaaaccatgaaaaacgtaaaagccgttttggaaaaacaactgcacgaagcgcaaagcatcccgcttgccgatttgctttcgcgccgtttcgaccgcattatggcttacggcaaattttcggaacaataa

SEQ ID NO: 42650 - DNA, 1443 bp, Neisseria meningitidis
atgaaacaattggccatgtacatcaacggacgctttgaaaacgatttcaacggcgaatggcgcgacgtattgaacccgtccaccgaagaggccatcgcccgcgaacccaaaggcggcaaggcggacgttgaccgcgccgtcgcggcggcgcgtgcggcgcaaccggcttgggagcgtctgcctgcggtcgaacgcggcgcgtatttgcgtaaaatcgcccaaggcatacgcgaacgtgccgacgagctgaccgacaccatcgttgccgaaggcggcaaaaccaaagacttggcacgcgtggaagtcatgttcaccgccgactatctcgattatcaggccgaatgggcgcgccgctacgaaggcgaaatcatccaaagcgaccgcccgcgcgaaaatattttattgttcaaacgtccgctgggcgtaattgccggcattttgccgtggaacttccccttcttcctgattgcccgcaaaatgggccccgctttggtaacgggcaacaccatcgtcgtcaaacccagcagcgtaaccccgatcaactgccacatcttcgccgaaatcgtcgatgcggtcggactgcccgcaggcgtgttcaacgtggtgaacggtcccggcgcggaaatcggcaatgccttgtccgcccatccgcaagtcgatatggtcagcctgaccggctccgtcgaagcaggccgccaagtgatggaagccgcctccgccaacatcaccaaagtttcgctggaactcggcggcaaagcgcctgccatcgttttgaaagatgcggatttggacttggcggtgaaatccatcttggcttcgcgcgtcggcaacaccggtcaaatctgcaactgcgccgagcgcgtctatgtccacagcagtctgaaagacgcattcattgaaaaaatgaccgccgcgatgaaaggcgtgcgctacggcaaccctgccgaagccgaagcaggcgcgctggaaatgggcccgctgattgaagaacgcgccgtcaaagccgttgccgaaaaagtggaacgggcagtcaaacaaggtgcgaaattggtttgcggcggcaaacgcgccgaaggacgcggttatttcttcgagccgaccctgctgaccgacaccgacaacagtatggacattatgaaagaagaaaccttcggccccgtgctgcccgtttccgctttcgacacgctcgaccaagtcatcgccttggcaaacgattgcgagtttggtctgaccagttctgtttatacgactaatttaaacgaagccttctacgttacccgccgcctgcaattcggcgaaacctacatcaaccgcgaaaactttgaagcgatgcagggtttccacgccggttggaaaaaatccggtatcggcggcgcggacggcaaacacggtttggaagaatatctgcaaacccaagtcgtttatttggaaaccgacatttaa

SEQ ID NO: 42651 - DNA, 378 bp, Neisseria meningitidis
atgtctgccaaaccgcgtcctgtttatttggatttgccgaacatccgtctgccgatacccgggatagtttccatccttcaccgaatcagcggggtcgggctgtttattatgctgcctttcctgctgtatttcctgtccggtaccctgagtcaagagtctgcatttgaaacttaccgtgccattgtttcccatcctttggtcaagctggttttaatcggtgtattgtgggcttatctgcaccattctctcgccggtatccgctttttatttttggatgcgcacaaaggccttgagctgaatactgcgcgcaataccgctaaagccgtatttgcttctgcattggttttgactgtcgttttgggagcgttgttatggtag

SEQ ID NO: 42652 - DNA, 183 bp, Neisseria meningitidis
atgggtgtcttacgggaaatggcggaaaaattgggacataaggtattgcctcttgcaccttattcacctgagctcaacccgattgagaaagtgtgggcgaatattaagcggtatctgcgaaccgttttgtctgattacgcccgatttgacgatgcactactgtcctattttgattttaattga

SEQ ID NO: 42653 - DNA, 1344 bp, Neisseria meningitidis
atgattaaaatcaaaaaaggtctaaacctgcccatcgcgggcagaccggagcaagccgtttacgacggcccggccattaccgaagtcgcgttgcttggcgaagaatatgccggtatgcgcccctcgatgaaagtcaaggaaggcgatgccgtcaaaaaaggccaagtgctgtttgaagacaaaaagaatccgggcgtggtgtttactgcgccggcttcaggcaaaatcgccgcgattcaccgtggcgaaaagcgcgtacttcagtcagtcgtgattgccgttgaaggcaacgacgaaatcgagtttgaacgctacgcacctgaagcgctggcaaacttaagcggcgaagaagtgcgccgcaacctgatccaatccggtttgtggactgcgctgcgcacccgtccgttcagcaaaattcctgccgtcgatgccgagccgttcgccatcttcgtcaatgcgatggacaccaatccgctggctgccgaccctacggtcattatcaaagaagccgccgaggatttcaaacgcggcctgttggtattgagccgtttgaccgaacgcaaaatccatgtttgtaaggcagctggcgcagacgtgccgtctgaaaatgctgccaacatcgaaacacatgaattcggcggcccgcatcctgccggtttgagtggcacgcacattcatttcatcgagccggtcggcgcgaataaaaccgtgtggaccatcaattatcaagatgtaattaccattggccgtttgtttgcaacaggccgtctgaacaccgagcgcgtgattgccctaggtggttctcaagtcaacaaaccgcgcctcttgcgtaccgttttgggtgcgaaagtatcgcaaattactgcgggcgaattggttgacacagacaaccgcgtgatttccggttcggtattgaacggcgcgattacacaaggcgcgcacgattatttgggacgctaccacaatcagatttccgttatcgaagaaggccgcagcaaagagctgttcggctgggttgcgccgcagccggacaaatactccatcacgcgtacaaccctcggccatttcctgaaaaacaaactcttcaagttcaacacagccgtcaacggcggcgaccgcgccatggtgccgattggtacttacgagcgcgtgatgcccttggatatcctgcccaccctgcttttgcgcgatttaatcgtcggcgataccgacagcgcgcaggcattgggttgcttggaattggacgaagaagacctcgctttgtgcagcttcgtctgcccgggcaaatacgaatacggcccgctgttgcgcaaagtgctggaaaccattgagaaggaaggctga

SEQ ID NO: 42654 - DNA, 1677 bp, Neisseria meningitidis
atgagcgtaggtttgctgaggattctggttcaaaaccaggtggttactgttgagcaggccgagcattactacaatgagtcgcaggcgggtaaggaagtgttgccgatgctgttttcagacggtgtcatttcgcccaagtcgcttgcggcattgattgcgagggtgttcagttattcgattcttgatttgcgtcattatccgcgccacagggtgctgatggggggggtgacggaggagcagatggtggagttccactgtgtgccggttttccgtcggggcgacaaagtattttttgcggtttccgatccgacacagatgccgcaaattcagaaaaccgtttctgccgcagggattgaggttgagttggtcattgtcgaggatgaccagttggcgggtttgctcgattgggtgggttcgcgttcgacatcgctgcttcaggagcttggggaggggcaggaggaagaggaaagccacaccctgtatatcgacaacgaggaggcagaagacggccctgttccgaggtttatccataagactttgtcggatgccttgcgcagcggggcatcggacatccatttcgagttttacgaacacaatgcccgtatccgtttccgtgtggacgggcagctccgcgaggtggttcagccgcccattgcggtaagggggcagcttgcttcacggattaaggtaatgtcgcgtttggacatttccgaaaaacggataccgcaggacggcaggatgcagctgacctttcaaaagggcggcaagcctgtcgatttccgtgtcagcacattgccgacgctgtttggcgaaaaggtcgtgatgcggattttgaattccgatgccgcgtctttgaacatcgaccagctcggttttgagccgtttcagaaaaaattgttgttggaagcgattcaccgtccctacgggatggtgctggtaaccggtccgacgggttcgggtaagacggtgtcgctctatacctgtttgaatattttgaatacggagtcggtaaatattgcaacggcggaagaccctgccgagattaacctgccgggcatcaatcaggttaacgtcaatgataagcagggcctgacttttgccgctgctttgaagtctttcctgcgtcaggacccggacatcattatggtcggtgagattcgtgatttggaaactgccgatattgcgattaaggcggcacaaacagggcatatggtgttttccaccctgcacaccaataatgcgccggcgacgttgtcgcgtatgctgaatatgggtgtcgcgccgtttaatattgccagttcggtcagcctgattatggcgcagcgtcttttacgcaggctgtgttcgagctgcaaacaggaagtggaacgcccgtctgcctctgctttgaaggaagtcggcttcaccgatgaggaccttgcaaaagattggaaactttaccgcgccgtcggttgcgaccgttgccgggggcagggttataaggggcgtgcgggcgtgtatgaggttatgcccatcagcgaagaaatgcagcgtgtgattatgaacaacggtacggaagtggatattttggacgttgcctataaggagggtatggtggatttgcgccgggccggtattttgaaagttatgcagggcattacttcattggaagaggtaacggcaaataccaacgattag

SEQ ID NO: 42655 - DNA, 894 bp, Neisseria meningitidis; identical to SEQ ID NO: 36738

SEQ ID NO: 42656 - DNA, 1332 bp, Neisseria meningitidis
atgagcggatggcataccttattgcaggacgcatcttacaagggcgtcggctttgatattgaggtggtggacgagagcaacggcaaggcattggccgagcatgcgcggccgtttgtgcagggtatcgaccttgaagacatgggcatgaccgggcggcaggtgcagattaatgcggtgttttggggcaagggctatgcaggccgtctgaaaaagctgctggatgcgctggagcagccgggcggcggcgtgctggtgcaccctgtttgggggcggatgcacaacatgattgcggcatcatggagttaccgacatgaggccgattatgtggattatgcgggcatcgatattactttccgcgaggcggccgaagcgcaggaaatctttgtttttgaaaacgcctttttggtcgagcttgaggcgttgattgctaatatcgacacctaccgcgaggcggctatcggctttgttgatgcggtgttggcggtggatgcgggcgtatcagctttatggggcagcgcgctgggcatttggagtgcggcatcgggtacgtttggcgcggtgcgccgtttgtttgatttggacaaaattgcctttcccgatcggggcggatacagtgcagcggcgtttaaaaacggctcggccaagctgtttgcggatatatcggtcatggtagatactggcatacgccgtgaggcgggtttggccgataatgccatgcaccatgccggttggtcgccgcgacagcggtttgacggggctgcggctgttgccgaccgcgccgccgctatccctgataatttgctgaccggccgcttttcagacggcctgcaaaaccgcctgaaccggttaaccgccaaacaggtgcagccggtagcgcaggcggtgcgcctgttatccacgtcatcgctgttgtcggtggcaacggcattaatcgaggcgcatggcgaagagatgaccgcgcccgatttgattgaggttaaccgcgccatgcgccgccgtatgcaggccgagattgccgccttgcgggcggtgcagacggctgctgccgagtctggtgggctgacggccaacgccgtgtataccgaggcttaccaaacggcagaatccctgcgcgcggcggcaggccgtctgaatgcgttggttgcggcggtcatcaaccaaaagccgccgctgattgtgcgccaagccccaatcgacggtacgatacaccaaatcgcccacgagttttacggcgatatagcccgcgcagcagagctggtgcggctcaatccccatatccaccaccccgcgtttatcaagcgcggcactttggtcaacagctatgcaaaataa

SEQ ID NO: 42657 - DNA, 594 bp, Neisseria meningitidis
atgcgcaaacagaacactttgacgggaatcccgacttctgacggacagagggggtttgcactgtttatcgtgctgatggtgatgatcgtcgtggcttttttggttgtaactgtcgcgcagtcttacaataccgagcagcggatcagtgccaacgaatcagacaggaaattggctttgtctttggccgaggcggctttgcgggaaggcgaacttcaggttttggatttggaatatgatacggacagtaaggttacatttagcgaaaactgtggaaaaggtctgtgtgccgcagtgaatgtgcggacaaataatgataatgaagaggcttttgacaatatcgtggtgcaaggcaagcccaccgttgaggcggtgaagcgttcttgccctgcaaattctaccgacctgtgcattgacaagaaagggatggaatataagaaaggcacgagaagcgtcagcaaaatgccacgttatattatcgaatatttgggcgtgaagaacggagaaaatgtttatcgggttactgccaaggcttggggtaagaatgccaataccgtggtcgtccttcaatcttatgtaagcaataatgatgagtaa

SEQ ID NO: 42658 - DNA, 957 bp, Neisseria meningitidis
atgaccgcctgtttcaccacatacccgaatgcaacaatgagaatcaggctggggcggcacaacgcgcccgactttccacagggtgccgccgtaaccataggcaatttcgacggcgtacacctcggacacaaacacatcctccaaaaactccgcctcgaagccgacgcgcgcggactgcccgtcgtgaccgtcgttttcgaaccccaacccaaagaatttttcgcactccgcaccggcaggatgccaccgtgtcggatcagccccctgcgcaccaagctcgaattattggaaggcacaggctgtgtcgatgccgtctgggttttgcgtttcgatcaaaatttttccgaaatatccgcgcaagggtttatcgaccgcctgctgcgtcaaaccttgaatacgcgttatttgctcgtcggcgatgatttccgtttcggtgcggggcgggaaggctgttttgaacttttggcacaacagcccgatatgcagaccgagcgtacgccttccgtcatcgtcgaagacatccgcaccagcagtaccgccgtgcgacaagccctttcagacggcaaccttgcctatgcgaaaaaacttttgggacacgactacgtcttgagcggcagggtggtgcacggcagaaaactcggacgcaccttaaacgccccgactgccaacatccgcctgccccgccaccgttatgcactcggcggcgtgtttgtcgtcgaagcagacggcgcattcggcacgcggcgcggcgtggcgagtttcggcttcaatcccaccgttgatagcggctgttctcaaaagcttgaagtccacctgttcgactttcaaggcgacctgtacggacaagggctgaacgtccgcttcctgcacaaactgcgcgatgaggaaaagtttgacggtatggaagaactgaaaaggcagattgaagccgatatggaagccgcaaggcgttggtag

SEQ ID NO: 42659 - DNA, 966 bp, Neisseria meningitidis
atgagctacacgcaactgacccaaggcgaacgataccacatccaatacctgtcccgccactgcaccgtcaccgaaatcgccaaacagctgaaccgccacaaaagcaccatcagccgcgaaatcagacggcaccgcacccaagggcagcaatacagcgccgaaaaagcccagcggcaaagccggactatcaaacagcgtaagcgacaaccctataagctcgattcgcagctgattcagcacatcgacacccttatccgccgcaaactcagtcccgaacaagtatgcgcctacctgtgcaaacaccaccggatcacgctccaccacagcaccatttaccgctaccttcgccaagacaaaagcaacggcagcacgttgtggcaacatctcagaatatgcagcaaaccctaccgcaaacgctacggcagcacatggaccagaggcaaagtacccaaccgtgtcggcatagaaaaccgacccgctatcgtcgaccagaaatcccgtatcggcgattgggaagccgacaccattgtcggcaaaggacagaaaagcgcattattgaccttggtcgaacgcgttacccgctacaccatcatctgcaaattggatagcctcaaagccgaagacactgcccgggcagctgttagggcattaaaggcacataaagacagggtgcacaccatcaccatggataacggcaaagagttctaccaacacaccaaaataaccaaagcattgaaagcggagacttatttttgtcgcccttaccattcttgggagaaagggctgaatgagaacaccaacggactcatccggcaatacttccccaaacaaaccgatttccgtaacatcagtgatcgggagatacgcagggttcaagatgagttgaaccaccgaccaagaaaaacacttggctacgaaacgccaagtgttttattcttgaatctgttccaaccactaatacactag

SEQ ID NO: 42660 - DNA, 1539 bp, Neisseria meningitidis
atgaatatgctgggagctttggcaaaagtcggcagcctgacgatggtgtcgcgcgttttgggatttgtgcgcgatacggtcattgcgcgggcattcggcgcgggtatggcgacggatgcgttttttgtcgcgttcaaactgcccaacctgcttcgccgcgtgtttgcggagggggcgtttgcccaagcgtttgtgccgattttggcggaatacaaggaaacgcgttcaaaagaggcggcggaggcttttatccgccatgtggcggggatgctgtcgtttgtactggttatcgttaccgcgctgggcatacttgccgcgccttgggtgatttatgtttccgcacccggttttgcccaagatgccgacaaatttcagctctccatcgatttgctgcggattacgtttccttatatattattgatttccctgtcttcatttgtcggctcggtactcaattcttatcataagttcggcattccggcgtttacgcccacgtttctgaacgtgtcgtttatcgtattcgcgctgtttttcgtgccgtatttcgatccgcccgttaccgcgctggcgtgggcggtctttgtcggcggcattttgcaactcggcttccaactgccctggctggcgaaactgggctttttgaaactgcccaaactgagtttcaaagatgcggcggtcaaccgcgtgatgaaacagatggcgcctgcgattttgggcgtgagcgtggcgcaggtttctttggtgatcaacacgattttcgcgtcttatctgcaatcgggcagcgtttcatggatgtattacgccgaccgcatgatggagctgcccagcggcgtgctgggggcggcactcggtacgattttgctgccgactttgtccaaacactcggcaaaccaagatacggaacagttttccgccctgctcgactggggtttgcgcctgtgcatgctgctgacgctgccggcggcggtcggactggcggtgttgtcgttcccgctggtggcgacgctgtttatgtaccgcgaatttacgctgtttgacgcgcagatgacgcaacacgcgctgattgcctattctttcggtttaatcggcttaatcatgattaaagtgttggcacccggcttctatgcgcggcaaaacatcaaaacgcccgtcaaaatcgccatcttcacgctcatctgcacgcagttgatgaaccttgcctttatcggcccactgaaacacgtcggactttcgcttgccatcggtctgggcgcgtgtatcaatgccggattgttgttttacctgttgcgcagacacggtatttaccaacctggcaagggttgggcagcgttcttagcaaaaatgctgctctcgctcgccgtgatgtgcggcggactgtgggcagcgcaggcttacctgccgtttgaatgggcgcacgccggcggaatgcggaaagcggggcagctctgcatcctgattgccgtcggcggcggactgtatttcgcatcactggcggctttgggcttccgtccgcgccatttcaaacgcgtggaaaactga

SEQ ID NO: 42661 - DNA, 699 bp, Neisseria meningitidis
ttgccgcttctgtctgtcagccgtttcgggctgcacaccacatctgttcaaaggaaaaccatgtttcaaaattttgatttgggcgtgtttctgcttgccgtcctgcccgtgctgctctccattaccgtcagggaggtggcgcgcggctatacggcgcgctactggggagacaacactgccgaacaatacggcaggctgacactgaaccccctgccccatatcgatttggtcggcacaatcatcgtaccgctgcttactttgatgttcacgcccttcctgttcggctgggcgcgtccgattcctatcgattcgcgcaacttccgcaacccgcgccttgcctggcgttgcgttgccgcgtccggcccgctgtcgaatctagcgatggctgttctgtggggcgtggttttggtgctgactccgtatgtcggcggggcgtatcagatgccgttggctcaaatggcaaactacggtattctgatcaatgcgattctgttcgcgctcaacatcatccccatcctgccttgggacggcggcattttcatcgacaccttcctgtcggcgaaatattcgcaagcgttccgcaaaatcgaaccttatgggacgtggattatcctactgctgatgctgaccggggttttgggtgcgtttattgcaccgattgtgcggctggtgattgcgtttgtgcagatgttcgtctga

SEQ ID NO: 42662 - DNA, 1986 bp, Neisseria meningitidis
atggctaaaaacaaccaatacagcgaatccagcatcaccgtcctcaaaggcttggagccggtcaaagaacgtcccggtatgtacacccgcaccgacagcccgacccatatctgccaagaagtcatcgacaacgcgtcggatgaagcgttgggcggtttcgcgactgcaatcgacgtgcaaattcatgaagacggttcgctttccgtgcacgacaatgggcgcggcattcccgtcggcctgcatcccgaagaaggcgtatccgtagtcgaactcgtattcacccgtctgcacgcaggcggcaagttcaacaaaaaagacggaggcagcgcgtatgccttttcaggcggcctgcacggcgtgggcgtatccgtcaccaacgccctttccacccgccttgaagtaacggtcaaacgcgaaggcaaaatccaccgcatcgtgtttgccggcggcgacgtggtcgaaccgttggcacaagtgggcaaatgcgccgtcaaagacagcggtacagaagtgcgcgtctggccggacggcaaatattttgaaagcccgaattacagcattcccgaactcgaacgcctgctgcgtgccaaagccgtgctgctgccgggtgtgcgcgtttccctgacccgtccggtcaaaggcgaagacgaagcgcacacccaaacctggcattaccccgacggcctgaaaagctatctgaccgacctgattgccgacgcgcaggaagccgtaccgctgttctcttgcgaaaactacatttcagacgaacacaacggcgatttcagcatcggcgaaggagcggcgtttgccctgacttggctggaagaaggctcgtgcgccaacgaaagctacgtcaacctcatccccaccccgctgggcggcacgcacgaagcaggcttgaaacaagccgtgttcaacgcagtcaacaacttcatcaatctgcacaacctcttgccgcgcggcgttaaagtgcaaagcgacgacgtgttcggaaaaaccgccttcgttctctctgcccgcgtcctcgacccgcagttccaaggtcaaaccaaagacaagctgaccaaccgcgacgcgctgaaactcgtcgccaccgtatcgggcgaccctttggaattgtggctgaaccaaaacgtggacttcggcaaaaaaatcgccgaactcgccatccgccaagcacaggcgcggatgcgttcggttaaaaagattgaaaagaaaaaaggcagcggcgtcgccgtcctgcccggtaagctgaccgactgcgaaagcgaagacatccgcgaaaacgaactcttcctcgtcgaaggcgattccgccggcggctcagccaaactcgcccgcgacaaagccacccaagccatcctgcccctgcgcggcaaagtgctcaacagctttgaagtccaccccgaccaactcttcggcaacgccgaaatccacgacatttccgtcgccatcggcgtcgatccgcacggtattaacgaccatcccgatttaagcggcctgcgctacggcaaaatcgccatcctgtccgatgccgacgtggacggctcgcatattcaagttttgctgctgaccctgttctaccgccacttcccgaaactggttgccgacggacacatctacgtcgcccagccgccgctgttccgcgtcgatgtcaacgcacaaggtaagagcaaacctgcccgcaaattctacgccctcgaccaaaacgaactcgacagcattttggagcggctgcaaaaagaaggcgttaaagaaaccgcctattccatcagccgtttcaaaggcttgggcgagatgaaccccgaccagctcaaagatactaccatgcaccccgacacccgccgcctgttgcaggtacaaatcccagaaggtgcagatgacgagacgcgcgacatcttcgtcaaactgatgggcaaaggcgaagccgccgcccgccgcgcttggatggaacgcgaaggcgatacggcggaattggatatttga

SEQ ID NO: 42663 - DNA, 822 bp, Neisseria meningitidis
atgagcagtccgcgccatgtgttttacatttccgaccgtaccggtctgactgctgagaatatcggcgaggcgttgctgaaccagtttggcaatctgtcgttcaaacgccatacgcatccgtttgtcgatacgccggaaaaggcgcgcgcggtggtggagaaggtcaatcggagccggcaggaaaacggtcagcgtccgattgcgtttgtcagtgtggttgatgacgaaatccgtcggattatcaaaggggcggatgcttttcagattaatttctttgagacttttttgggactgttggagaaggaactcaataccgaagccacggcatccgggcaggggcatcacagtatcggtaatacgaagcgttatgatgcgcgtatggaagcggtcaatttttctttgaaccacgacgacggggtcagcgataagaaccttcaggaagcggatgtaatcttgatgggtgtatcgcgttcgggcaaaacgccgacctgcctttacctcgccctgcaatacggcatccgtgcggcaaactatccgctgattcccgacgatttggaatcggccgatctgccgcgtatggtcaagccttatagggataagctgttcgggttgaccatccagccggaacgtttgcaggccatccgccaagagcgccgcccgaattcaacttatgccaaaatcgatacatgccgcagcgaggtggcggacgcgcagagtatgttcagacggcatgggattccgtttgcgaatacgacggataagtcggttgaggaattggcggtacacatccttcaggcgtgcaagctcaaacgcaggttttga

SEQ ID NO: 42664 - DNA, 1566 bp, Neisseria meningitidis
atgacccaagacaaaatcctcatccttgacttcggttcgcaagttacccagctcatcgcccgccgcgtgcgcgaagcccacgtttactgcgagctgcattctttcgatatgcctttggacgaaatcaaagccttcaaccccaaaggcatcatcctctccggcggccccaattccgtttacgaatccgactatcaagccgataccggtatttttgatttgggcattccggttttgggcatctgttacggcatgcagtttatggcgcaccacttgggcggcgaagtgcagcccggcaaccagcgcgaattcggttatgcgcaagttaaaaccatagacagcgagctgacacgcggcattcaagatggtgagccaaacacactcgacgtatggatgagccacggcgacaaagtgtccaaactgcccgacggtttcgccgtcatcggcaacaccccgtcctgcccgattgccatgatggaaaacgccgaaaaacaattctacggcatccagttccaccccgaagttacccacaccaaacaaggccgcgccctgttgaaccgctttgtcttggatatttgcggcgcacaaccgggctggacgatgccgaactacatcgaagaagccgttgccaaaatccgcgaacaggtcggcagcgacgaagtgattttaggtctgtccggcggcgtggactcttccgtagccgccgcgctgattcaccgcgccatcggcgaccaactgacctgcgtgttcgtcgatcacggtttgttgcgcctgaacgaaagcaaaatggtgatggatatgttcgcccgcaacttgggtgtgaaagtgatacacgtcgatgccgaagggcagtttatggcgaaactcgccggcgtaaccgaccccgagaaaaaacgcaaaatcatcggtgcggaatttatcgaagtatttgatgccgaagaaaaaaaacttaccaacgccaaatggttggcacaaggcacgatttaccctgacgtaatcgaatccgcaggtgcaaaaaccaaaaaagcccacgccatcaaatcgcaccacaacgtcggcggcctgcctgaaaacatgaagctcaaattgcttgagcctttgcgcgatttgttcaaagacgaagtacgcgaattgggtgtggctttgggcctgccgcgcgaaatggtgtaccgtcatccgttcccgggtccgggtttgggcgtgcgtattttgggcgaagtgaaaaaagaatatgccgacctgcttcgtcaggcagacgatattttcattcaagaattgcgcaatactaccgatgaaaacggtacatcttggtacgacctgaccagccaggcattcgccgtgttcctgcccgtcaaatctgtcggcgtaatgggcgacggccgcacatacgattacgtcattgccttgcgtgccgtgattaccagcgactttatgaccgcgcattgggcggaactgccgtattccttgttgggcaaagtgtccaaccgcatcatcaacgaagtcaaaggcatcaaccgcgtggtttatgatgtgagcggcaaaccgcctgccaccatcgagtgggaataa

SEQ ID NO: 42665 - DNA, 726 bp, Neisseria meningitidis
atggattttctctctcgttggcggcgcatcgcagacgcgcccactatcaggcgttgcgtattatgccacggttcgtctggcgtttcagacggcatctgcgccggctgccgcgacgatttggcggcataccgcaccgacgcggcaaacagctgccccctgtgtttcagacacatccaaggcggatcggtgtgcggcggctgtcagaaaaaaccgcccgcattcgaccggatgtgggcttcgctgcattacgaaccgcccgtcagcaatatgatacacgcgctgaagcacttggctgatttgagcatggtgcagccgctggcagacctgatgatgcagaatccgcccgaccggcttgcagacgaatgtttcgatttcgtcctgcccgtaccgctaagcagggagcggctgctgcaacgcgggttcaaccaaagtgaaagcatcgtcgggctgctggcacaacgctacggctggcagatactgccccgacacaccgttttccgacaccaccgcccgccgcaaagcacgctcaaaggcggcgaacggcggcgaaacatcaaaaacgcctttgaaatccgcacaccgataccggaaaactgtaatattctgttaatcgacgatgtctttaccaccggcgcgacgctggacgaattggcaaagacgctgaaaaaatcgggcgcaaaccgaatctgctgctggacgctggcacgcacgccaatgaaaaaataa

SEQ ID NO: 42666 - DNA, 159 bp, Neisseria meningitidis
gtggtcgaacagagcttcggtacgctgcaccataaattccgctacgcccgggcagcctatttcggactgattaaagtgagtgcgcaaagccatctgaaggcgatgtgtttgaaccttttgaaagccgccaacaggctaagtgcgcccgctgccgcctaa

SEQ ID NO: 42667 - DNA, 276 bp, Neisseria meningitidis
atgaaaccgaatattcatcctgacaattatcgaaccgtcctttttttcgacagcagcgccaatgaaggctggttaatccgctcctgtgccgaaacacacggaaaaacgatggtttggacagacggcaaagaatatccgctgttttcgctggatacttcttccgcatcccatcccgtctatactggcaaacagcgcaacgtcaacaccgaaggccgtgccagcaaattcaaccaacgtttccaatccgtcatgtcatcgtttagaaaggacaaataa

SEQ ID NO: 42668 - DNA, 1221 bp, Neisseria meningitidis
atggctgtcaacctgaccgaaaaaaccgccgaacaactgcccgacatcgacggcattgccctctacaccgcccaagcaggcgtgaagaagcccgggcataccgacctgacactgattgccgtagccgccggcagcaccgtcggtgcagtcttcacgaccaaccgtttctgtgccgcgcccgtccacatcgccaaatcgcaccttttcaacgaagacggcgtgcgcgccctcatcatcaacacgggcaacgccaacgcgggtacgggcgcacagggcagaatcgatgctttggcagtgtgtgccgccgccgcccggcaaatcggctgcaaaccgaaccaggtgctgcccttctccaccggcgtgattctcgaaccgctgcccgcagacaaaatcatcgccgcgctgcccaaaatgcagcctgccttctggaacgaagcggcacgcgccatcatgaccaccgacaccgtgcccaaagccgcctcgcgcgaaggcaaggtcggcgacaaacacaccgtccgcgccacgggcatcgccaaaggctcgggcatgattcatcccaatatggcgaccatgctcggtttcatcgccaccgatgccaaagtttcccaacccgtcctccaactgatgacgcaggaaatcgccgacgaaaccttcaacaccatcaccgttgacggcgacaccagcaccaacgacagcttcgtcatcatcgccaccggcaaaaacagccaaagcgaaatcgacaacatcgccgacccgcgttacgcccaactcaaagaattgttgtgcagcctcgcgctcgaactcgcccaagccatcgtccgcgacggcgaaggtgcgaccaagttcatcaccgtccgcgtcgaaaacgccaaaacccgcgacgaagcccgccaagccgcctacgccgtggcacgttcgccgctggtcaaaaccgcctttttcgcctccgaccccaacctcggcaggctgctcgccgccatcggttatgccggcgttgccgacctcgataccgacctcgtggaaatgtatctcgacgatattttggttgccgaacacggcggacgcgccgcaagctacaccgaagcacaagggcaggcggtgatgtcgaaggccgaaatcaccgtccgcatcaagctgcatcgcggacaagccgccgccaccgtctatacctgcgacctgtcgcacggatacgtttccatcaacgccgattaccgttcctga

SEQ ID NO: 42669 - DNA, 2295 bp, Neisseria meningitidis
atgcgacgagaagccaaaatggcacaaactacactcaaacccattgttttatcaattcttttaatcaacacacccctcctcgcccaagcgcatgaaactgagcaatcggtggatttggaaacggtcagcgtcgtcggcaaaagccgtccgcgcgccacgtcggggctgttgcacacttcgaccgcctccgacaaaatcatctccggcgataccttgcgccaaaaagccgtcaacttgggcgacgctttagacggcgtaccgggcatccacgcttcgcaatacggcggcggcgcgtctgctcccgtcattcgcggtcaaacaggcaggcggattaaagtgttgaaccatcacggcgaaacaggcgatatggcggatttttcgcccgatcacgccattatggtagataccgccttgtcgcaacaggtcgaaatcctgcgcgggccggttacgctcttgtacagctcgggcaatgtggcggggctggtcgatgttgccgatggcaaaatccccgaaaaaatgcctgaaaacggcgtatcgggcgaactcggattgcgtttgagcagcggcaatctggaaaaactcacgtccggcggcatcaatatcggtttgggcaaaaactttgtattgcacacggaagggctgtaccgcaaatcgggggattacgccgtaccgcgttaccgcaatctgaaacgcctgcccgacagccacgccgattcgcaaacgggcagcatcgggctgtcttgggttggcgaaaaaggttttatcggcgtagcgtacagcgaccgtcgcgaccaatatggtctgcctgcccacagccacgaatacgatgattgccacgccgacatcatctggcaaaagagcttgattaacaaacgctatttacagctttatccgcacctgttgaccgaagaagacatcgattacgacaatccgggcttgagctgcggcttccacgacgacgataatgcacacgcacacacccacagcggcagaccgtggatagacctgcgcaacaaacgctacgaactccgtgccgaatggaagcaaccgttccccggttttgaagccctgcgcgtacacctgaaccgcaacgactaccgccacgacgaaaaagcaggcgatgcagtcgaaaacttttttaacaaccaaacgcaaaacgcccgcatcgagttgcgccaccaacccataggtcgtctgaaaggcagctggggcgtgcaatatttacaacaaaaatccagtgctttatctgccatatccgaagcggttaaacaaccgatgctgcttgacaacaaagtgcaacattacagctttttcggtgtagaacaggcaaactgggacaacttcacgcttgaaggcggcgtacgcgtggaaaaacaaaaagcctccattcagtacgacaaagcattgattgatcgggaaaactactacaaccaccccctgcccgacctcggcgcgcaccgccaaaccgcccgctcattcgcactttcgggcaactggtatttcacgccacaacacaaactcagcctgaccgcctcccatcaggaacgcctgccgtcaacgcaagagctgtacgcacacggcaaacacgtcgccaccaacacctttgaagtcggcaacaaacacctcaacaaagagcgttccaacaatatcgaactcgcgctgggctacgaaggcgaccgctggcaatacaatctggcactctaccgcaaccgcttcggtaactacatttacgcccaaaccttaaacgacggacgcggccccaaatccatcgaagacgacagcgaaatgaagctcgtgcgctacaaccaatccggcgccgacttctacggcgcggaaggcgaaatctacttcaaaccgacaccgcgctaccgcatcggcgtttccggcgactatgtacgaggccgtctgaaaaacctgccttccctacccggcagagaagatgcctacggcaaccgtcctttcatcgcacaggacgaccaaaatgccccccgtgttccggctgcgcgcctcggcttccacctgaaagcctcgctgaccgaccgtatcgatgccaatttggactactaccgcgtgttcgcccaaaacaaactcgcccgctacgaaacgcgcacgcccggacaccatatgctcaacctcggcgcaaactaccgccgcaatacgcgctatggcgagtggaattggtacgtcaaagccgacaacctgctcaaccaatccgtttacgcccacagcagctttctctctgatacgccgcaaatgggccgcagctttaccggcggcgtgaacgtgaagttttaa

SEQ ID NO: 42670 - DNA, 471 bp, Neisseria meningitidis; identical to SEQ ID NO: 41040

SEQ ID NO: 42671 - DNA, 1329 bp, Neisseria meningitidis
atgaaaaaagtatttatccgcaccttcggctgccagatgaacgaatacgacagcgacaaaatgctcgccgtcctcgccgaagaacacggcggcatcgaacaggttacccaagccgacgaagccgacatcatcttgttcaacacctgctccgtgcgcgaaaaagcgcaagaaaaagtcttctccgatttggggcgcgtgcgtccgctcaaagaaaaaaaccccggcctcatcatcggcgttgccggctgcgtcgcctcgcaagaaggcgaaaacatcatcaaacgcgcgccttatgtggacgtggttttcggcccgcaaacgctgcaccgcctgccaaaaatgattgtggacaaagaaaccagcgggctgtcgcaagtcgatatttccttccccgaaatcgaaaaattcgaccacctgccgcccgcccgcgtcgaaggcggcgcggcatttgtatcgattatggaaggctgttccaaatactgctccttctgcgtcgtcccctacacgcgcggcgaagaattctcccgcccgctcaacgacgtattgaccgaaatcgccaaccttgcccagcaaggcgtgaaagaaatcaacctcttgggacaaaacgtcaacgcctatcgcggcgaaatggacgacggcgaaatctgcgacttcgccaccctgctgcgcatcgtccacgaaatccccggcatcgaacgtatgcgcttcaccaccagccacccgcgcgagtttaccgactcgattatcgagtgctaccgcgacctgcccaaactggtttcccacctgcacctgccgattcaaagcggttccgaccgcgtattgagcgcaatgaaacgcggctacaccgctttggaatacaaatccatcatccgcaaactgcgcgccatccgtcctgatttgtgcctgagcagcgatttcatcgtcggcttccccggcgagaccgaacgcgagttcgagcaaaccttgaaactggtgaaagacatcgccttcgacttgagcttcgtgtttatttacagtccgcgccccggcacgcctgccgccaacctgccggacgacacgccgcacgaagaaaaagtgcgccgcctcgaagccttgaacgaagtcatcgaagccgaaaccgcgcgcatcaaccaaaccatggtcggcacggtacaacgctgcctggtcgaaggcatctccaaaaaagaccccgaccaactgcaagcccgtaccgccaacaaccgcgtcgtcaacttcaccggcacgcccgacatgattaaccaaatgatcgatttggaaatcaccgaggcctacaccttctccctgcgcggcaaagttgtcgaagcctaa

SEQ ID NO: 42672 - DNA, 696 bp, Neisseria meningitidis
atgaaactgaaaaccttagctttgacttcattgaccctgttggcattggccgcttgtagcaaacaggctgaaaccagtgttccggcagacagcgcccaaagcagctcatctgctccggcagcccctgctgagttgaacgaaggtgtgaactacactgtattgtctacgcctattccgcaacagcaggccggtaaaatcgaagtattggaatttttcggctacttctgcccgcattgcgcccatcttgagccggtcttgagcgagcacatcaaaacgtttaaagacgatacctatatgcgccgggagcatgtcgtgtggggtgatgaaatgaaacctttggcacgtttggcggccgcagtggaaatggccggtgaatcagataaagccaacagccatattttcgatgcgatggttaatcaaaaaatcaatctggccgataccgataccctgaaaaaatggctgtccgagcaaacagcgtttgacggcaaaaaagtattggctgcatttgaggctcctgaaagccaagcgcgtgcggctcaaatggaagagttgaccaataaattccaaatcagcggcacaccgactgtgattgtcggcggcaaataccaagttgaatttaaagactggcagtccggtatgaccacgattgaccagttggtggataaagtacgcgaagagcagaaaaagccgcaataa

SEQ ID NO: 42673 - DNA, 1485 bp, Neisseria meningitidis
atgaatatgaaatacaaagacctgcgcgacttcatcgccatgctcgagcagcagggcaaactcaagcgcgtcgcacaccccatttccccgtatttggaaatgaccgaaatcgccgaccgcgtgctgcgtgccgaagggccggcgttgctgtttgaaaacccgattaagcccgacggtacgcgctacggttatcccgtgttggcaaacctgttcggcacgcccgaacgtgtggcgatgggcatgggcgcggacagcgtgtccaagctgcgtgaaattgggcagacgctggcgtatttgaaagaacccgaaccgcccaaaggcatcaaagatgcgttttccaaactgccgctgctgaaagacatttggagcatggcgccgaacgtggtgaaaaacgcgccgtgtcaggaaatcgtgtgggaaggcgaagacgttgatttgtatcaacttccgattcagcattgctggccggaagacgttgcgccgctggtaacgtggggcttgaccgtcacgcgcgggccgcacaaaaaacgccaaaatctcggcatttaccgccaacaactcatcggcaaaaacaagctgattatgcgttggctgtcgcatcgcggcggcgcgttggattatcaggagttccgcaaactcaatcccgatacgccgtatcccgtcgccgtcgtactcggctgcgaccccgccaccattttgggcgcggtaacgcctgttcccgataccttgagcgaataccagtttgccggactgctgcgcggttcgcggacggagctggtgaaatgtatcggcaacgatttgcaagtgcctgcccgcgcagaaatcgtgttggaaggcgtcatccatccgaacgaaaccgcgttggaaggcccgtacggcgaccacaccggctattacaacgagcaggattatttccctgtgtttacggtcgaacgcatcaccatgcgcgaaaacccgatttaccattcgacctacacgggcaaaccgcccgatgaacccgccgttttgggcgtggcgttgaacgaagtgttcgtaccgcttttgcaaaagcagttccccgaaatcaccgatttctacctgccgcccgaaggctgctcctaccgcatggcggtggtgagcatgaaaaaacagtacgccggacacgccaagcgcgtgatgatgggctgctggtcgttcctgcgccagtttatgtataccaaattcatcatcgtggtggatgacgatgtgaacgtgcgcgactggaaagaagtcatctgggcggtcaccacgcgcatggaccccgtgcgcgacactgttttggtagaaaacacgcccatcgattatctcgacttcgccagccccgtcagcggactcggcggcaaaatgggtttggatgcgaccaacaaatggccgggagaaaccgaccgcgaatggggacgcgtcatcaaaaaagaccctgcggttacggctaagattgatgggatttgggaggaattggggttgtag

SEQ ID NO: 42674 - DNA, 405 bp, Neisseria meningitidis
atgagaaaaagtcgtctaagccggtataaacaaaataaactcattgaactgtttgtcgcaggtgtaactgcaagaacagcagcagagttagtaggcgttaataaaagtacctcagcctattattttcatcgtttacgattacttatttatcaaaacagtccgcatttggaaatgtttgacggcgaagtagaagcagatgaaagttattttgctgaacgacaaaaccatatcaatggaattgggaacttttggaaccgggcaaaacgtcatttacgcaagtttgacggcattcccaaagcgcattttgagctgtatttaaaggggtacgaacgacgttttaacaacagcgagataaaagttcaaatttccattttaaaacaattagtaaaatcgagtttatcctag

SEQ ID NO: 42675 - DNA, 723 bp, Neisseria meningitidis
atgccgtctgcaccgtcggcgcctattcagacggcattattgtttcaaccgacaaaggacatccacaccatgcaggataatgctttgaccatcgccttatccaaggggcgcatttttgaggagacgctgccgctgcttgccgctgccggcattgttccgactgaagagcctgaaaaatcgcgcaagctgattatcgggacgaaccatgaaaacatccgccttgtcattgtccgcgcaaccgatgtgccgacttatgtccgctacggcgcggcggacttcggcattgcgggcaaagacgtgctgatcgaacacggcggcacggggctttaccggcctttggatttggagattgccaagtgccgcatgatggttgctgtgcgtaaagggtttgattacgaagcagcttcgcaacccggatgccgtctgaagattgccacaaagtatcctgaaatcgcggcatctcattttgccggcaagggtgtccatgtggacattatcaaactgtacggctcgatggaacttgcgccgctggtcggcttgagcgatgcgattgtggacttggtttcgacgggcaacaccttgaaggcaaacggcttggaagcagtcgaacacatcgtcgacatttccagccgcctggtggtcaacaaggctgctttgaaaacgaaatacgcgctgctggagccgattattcaggcgttcggcggcgcagtgaaggcgaagtaa

SEQ ID NO: 42676 - DNA, 1800 bp, Neisseria meningitidis
ttggaggttggtgcaaaacctgcttttttcgcgttacaatctgcacccgatttacttttgaatttgcctgtttggaaaaatacttttatgaaagccagccaatttttcatttccaccctgaaagaagcccctgccgaagccgcgcttgccagccacaagctgatgattcgcgccggcctgattaaagccaacgcgtccggcctttatacttggatgccgatggggctgcgcgtgttgcgcaaagtcgaaaacgtcgtgcgcgaagaaatggcgcgcgcgggcagcgtggagctgctgatgccggtggtgcagcctgccgagctgtggcaggaatccggccgctgggaattttacggtaaagaactgctgcgcctgaaagaccgccacgaccgcgatttctgcatgggcccgacctgcgaggaagtcatcgccgacatcgtgcgcaaagaaatcaacagctacaaacagctgccgaaaaacttttaccacatccaaaccaaattccgagatgaggtgcgcccgcgcttcggcgtgatgcgcgcgcgcgagttcgtcatgaaagacgcttattccttccatgccgactacgcctcgcttcagacgacctatcaagatatgtacgacgcttactgccgtatcttcactcgtttgggtttggcattccgccccgtcgccgcagacaccggcagcatcggcggtacgggttcgcacgagtttcaagtgttggcggaaagcggcgaagatgttattgcgtacagcgacacttccgattacgccgccaatgtcgagctggcaccgaccttgccgcttaaaggcgaacgcgccgctgctcaggccgagttgaccaaagtacacacaccaaacgtcaaaaccattgagtctttggttgaattcctcaatattccggttgaacaaaccctcaaatccatcgtggtcgaaggcgaaaacgaaggcgaaatcgttttattgctgttgcgcggcgaccatgagttcaatgacatcaaagccgaaaaactcgcaggcgtgaaatcgccgctgaccatggcagaccctgccgccatccgtgcgcagttcggcgcaaacggcggttcgctcggccctgtcggcttcacaggcaaagtctatgccgatttcgctaccgaaaaagacgcggactgggtcatcggtgcgaacgaagacggctaccactataccggtttcaacttcggccgcgatgccgccgagcctgagtttgtcgatttgcgcaacgtcgtcgaaggcgacgaaagccccgacgggcaaggccgtctgaaactcacacgcggcatcgaagtcggacacgttttccagttgcgcgacaaatatacccatgccatgaatgtgaacttcctcgacaacaacggcaaatcgcaaattatggaaatgggctgctacggcatcggcatcacccgcgtcgttgccgccgccatcgagcagaataacgacgaaaaaggcatcatctggaccaaagcaatggcgccgtttgaagtcgttatcgtgccgatgaactacaaaaaatcagacaccgtacgcgaagccgccgacaaaatctatgccgaattgctggcggcaggcgcggatgtgctgctggatgaccgcgacgaacgcgcaggcgtattgctgaacgattccgagctgttgggcatcccgcaccgcatcgtcatcggcgaccgcgccttgaaagaaggcaatgtcgaatacgccgaacgccgcaacaacgaagcgcaggcagttgcaatcggagaaattgttgcgcgtgtaacagcttcattaaatgcgtaa

SEQ ID NO: 42677 - DNA, 564 bp, Neisseria meningitidis
atgaaaaaaatcatcatcgccgcgctcgcagccgccgccatcggcactacctccgccgccacctacaaagtggacgaatatcacgccaacgcccgtttcgccatcgaccatttcaataccagcaccaacgtcggcggtttttacggtctgaccggttccgttgagttcgaccaagcaaaacgcgacggtaaaatcgacatcaccattcccgttgccaacctgcaaagcggttcgcaacactttaccgaccacctgaaatccgccgacatcttcgatgccgcccaatatcctaacatccgcttcgtttccaccaaattcaacttcaacggcaaaaaactggtttccgttgacggcaacctgaccatgcacggcaaaaccgcccccgtcaaactcaaagccgaaaaattcaactgctaccaaagcccgatgttgaaaaccgaagtttgcggcggcgacttcagcaccaccatcgaccgcacccaatggggcgtggactacctcgttaacgttggtatgaccaaaagcgtccgcatcgacatccaaatcgaggcagccaaacaataa

SEQ ID NO: 42678 - DNA, 1224 bp, Neisseria meningitidis
atgtcgggcaatgcctcctctccttcatcttcctccgccatcgggctgatttggttcggcgcggcggtatcgattgccgaaatcagcacgggtacgctgcttgcgcctttgggctggcagcgcggtctggcggctctacttttgggtcatgccgtcggcggcgcgctgttttttgcggcggcgtatatcggcgcactgaccggacgcagctcgatggaaagcgtgcgcctgtcgttcggcaaacgcggttcagtgctgttttccgtggcgaatatgctgcaactggccggctggacggcggtgatgatttacgccggcgcaacggtcagctccgctttgggcaaagtgttgtgggacggcgaatcttttgtctggtgggcattggcaaacggcgcgctgattgtgctgtggctggttttcggcgcacgcaaaacaggcgggctgaaaaccgtttcgatgctgctgatgctgttggcggttctgtggctgagtgccgaagtcttttccacggcaggcagcaccgccgcacaggtttcagacggcatgagtttcggaacggcagtcgagctgtccgccgtgatgccgctttcctggctgccgcttgccgccgactacacgcgccacgcgcgccgcccgtttgcggcaaccctgacggcaacgctcgcctacacgctgaccggctgctggatgtatgccttgggtttggcagcggcgttgttcaccggagaaaccgacgtggcaaaaatcctgctgggcgcaggtttgggtgcggcaggcattttggcggtcgtcctctccaccgttaccacaacgtttctcgatgcctattccgccggcgcgagtgcgaacaacatttccgcgcgttttgcggaaacacccgtcgctgtcggcgttaccctgatcggcacggtacttgccgtcatgctgcccgttaccgaatatgaaaacttcctgctgcttatcggctcggtatttgcgccgatggcggcggttttgattgccgactttttcgtcttgaaacggcgtgaggagattgaaggctttgactttgccggactggttctgtggcttgcgggcttcatcctctaccgcttcctgctctcgtccggctgggaaagcagcatcggtctgaccgcccccgtaatgtctgccgttgccattgccaccgtatcggtacgccttttctttaaaaaaacccaatctttacaaaggaacccgtcatga

SEQ ID NO: 42679 - DNA, 3921 bp, Neisseria meningitidis
ttgaactacattatcgccttttcaaactcgcctgaaaccgacttttcagacggcattcaaataaaaactgccaaacacggacacaccatgaccacgactaccgcccctcagcgtattcgggaaatcccctacaactatacttcctacaccgaccgcgaaatcgtcatccgattattgggcgacgaagcgtggcaaatcctgcaagacctgcgcggtcaacgcaaaaccgggcgttcggcgcggatgctgtttgaagtgttgggtgatatttgggtggtcgtgcgcaatccgtatctggtcgatgacttgctggagcacccaaaacgccgcgccgcgctggtacgtgaaatgcgccaccgcttaaatgaaatccgcaaacgccgcgacgataatcggcaagtggatgtgttggttgccgcagcagaaaaagcagtcgagcgttttgatagcagttttgatgaaaccagccaaaaacggcggcagattttggagcgtttgagcaaaatcaccaagccgcacaatattatgttcgacgggctggcgcgggtaacgcacgttaccgatgcaaccgactggcgcgtggagtatccgtttgtcgtcgtcaatcccgacacggaggctgaaatcgcgcctttggtgcgcgccttaatcgagctggatttggtcattattccgcgcggcggcggcacgggttataccggcggcgcgattcctttggacgcaaacagcgcagtcatcaataccgaaaaactcgacaagcatcgtggtgttgaatacgttgagctggcaggcttggacggcaagcatccgattatccggtgcggcgcgggcgtggttacgcggcgggtggaagaaaccgcgcatcaggcaggtttggtgttcgccgtcgatccgacttctgccgacgcgtcatgcgtgggcggtaatgtggcgatgaacgcgggcggcaaaaaagccgtgctgtgggggacggcgttggacaacctcgcctactggaacatggttaaccctcaaggcgaatggctgcgtatcgagcgcgtgcgccacaatttcggcaaaatccacgacgaagaaaccgccgtgttcgacgttcacacgctggattcagacggcatcaatatcgttaaaaccgaacgcttggaaatccccggccacaaattccgcaaagtcggtttgggcaaagacgttaccgacaaattcttgagcggcctgcccggcgtgcaaaaagaaggtacagacggcatcatcaccagcgttgccttcgtgttgcataaaatgccgaaatacacgcgcaccgtgtgtatggagtttttcggtacggtcgccaccgccacgccatctattgtcgaaatccgcgactttttgcttgcccatgaaagcgtgcggctggcgggtttggaacatttggactggcgttatgtccgcgccgtcggctacgccaccaaagcggcgggcaagggacgaccgaaaatggttttgctggcagacgtggtttcagacgacgaagccgccgtagaggcagccgccgaacacatctgtgaactcgcacgcgcccgcgacggcgaaggctttatcgccgtatcgcccgaagcccgcaaaaccttctggctcgaccgcagccgcaccgccgccatcgccaaacataccaacgcctttaaaatcaacgaagacgtggtcatcccgctcgaaaggctcggcgagtattcggacggcatcgaacgcatcaacattgagctttccatccaaaacaagctcaaactctgtgccgccttggagcaatatctttcgggcaaactccccatcgacaaaatgggcactgacctgccgaccgccgaactgttgggcgaacgcggcaaacacgccctggcccacgtttccgccgtcaaaacgcgttgggaatggctgctcgccaatcttgacacgccgcttgccgactacaaagcccgctacggcgcagccgtccacgccgcacccgaagccaaaaacaatgaaagctgctttattgccttccgcgatttccgcctgcgcgtgtctgtcaaagcggacgtaatgaaaccgctttctgaaatcttcagcggcaaaaccgacaccaaaattatccaaggcttgggaaaaatccacgcaaaaaccgtacgcagccgcgtctttgtcgccctgcatatgcacgccggcgacggtaacgttcacaccaatattccggttaactcagacgatgccgaaatgcttcagacggcataccgctcagtcgaacgcattatgaaaatcgcccgttcgcttaacggcgtgatttccggcgaacacggcatcggcattaccaagctcgaatttttaagcgacgaagaaatgcagccgttttgggactacaaaaaccaagtcgatccgaaacacaccttcaaccgtcacaaactgatgaaaggctcggacttacgcaacgcctacacgccgtccttcgagctgttgggcgcggaatcgctgattatggaaaaatcaaacctcggcacgattgccgattccgtcaaagactgcctgcgctgcggcaaatgcaaacccgtctgctctactcacgttccgcgtgccaacctgctgtacagcccccgcaacaaaatcctcggcgtgggcttattgatcgaagccttcttatacgaagaacaaacccgccgcggcgtttccatcaaacactttgaagaactcatggacatcggcgaccactgcaccgtgtgccaccgctgcgtcaaaccctgccccgtcaacatcgacttcggcgacgttaccgtagccgtccgcaactatcttgccgattccggccacaaacgatttgcgcctgccgcagctatgggtatggcgtttttgaacgccaccggcccgaaaaccatcaaagcccttcgcgccgccatgatacagatcggcttcccagcgcagaatttcgcctacaaaatcggcaaacttcttccaatcggcacgaaaaagcaaaaagccgaacccaaggcaaccgtcggcaaagccccgattaaagaacaggttatccatttcatcaaccgcccactgcccaaaaacgtacccgccaaaacaccgcgctccttattgggcatcgaagacggcaaaagcatccccatcatccgcaaccccgccgcgcccgaagatgccgaagccgtgttctacttcccgggttgcggctctgagcgtctgttcagccaaatcggacttgccgttcaagccatgctctggcacgtcggcgtacaaaccgtcctgccgcccggctatatgtgttgcggctatccgcaagacgcaggcggcaataaggcaaaagccgaagaaatgagcaccaacaaccgcgtggctttccaccgtatggcgaacaccctcaactacctcgacatcaaaaccgtcgtcgtcagttgcggcacttgttacgaccagctcgaaaaataccgctttgaagaaatcttccccggctgccgaatcatcgacatccacgaatacctgctcgaaaaaggcgtgaaactcgacggcgtaaaaggtcagcaatacctctaccacgacccctgccatacccccatcaaaaccatgaacgccacccaaatggccagcagcctgatggggcagaaagtcgttttaagcgaccgctgctgcggcgaatccggtatgtttgccgtcaaacggccagacatcgccactcaggtcaagttccgcaaacaagaggaaatcgagaaaaacctcaaagagctgccgcagggcgaacccgtcaaaatgctgacctcctgccccgcctgcctgcaaggcttgagccgctacgccgacgacaacaatatgcctgccgactacatcgtcatcgaaatggcgaaatacatcctcggcgaaaactggctggatgagtttgtaaaaaaagccaacaacggcggtgtagagaaagtgttgctgtaa

SEQ ID NO: 42680 - DNA, 1179 bp, Neisseria meningitidis
ttggcagctcagacaatacaagtagtaaataaatccgatgacttagtagcttcagcaatacagacagcaaataaatcaattgcagtatactgtcgttatattcgtcccaatgatgttggtactactggtagtcaccaatcaggattttatattcaaaaacatttttcagacgacctctttgatgtagtttgccaaaagggaacaaataaaactatttcaatcaaaattaattggcaagatggaagcgtcactaatagcaattttaaatattacggccaaggcacgagaaatgaggcgagaattacgggttttggcaagaattttgaatttttaagtgataaatatagtggttccttattggtattgtgcagagcttgttataaagatttattattccatgcttttgttttatcttcagatgaagatattgaaatatttatcgcagaaactaacattttaccaggaagtttatatttacctaaaaaacaagaagtagaggataacctaacaaaattattttcactatttcctaacttccccaaaactgaagaaatggcagttttggcaagggaaaatattgcattaaataaaactaacgttagtaatgtgttaaaacaatgggtttcaaaggaatatgaattattttccatttttgaaaaacgtgaatttgaaattattaaatcaaaaattactgatttggatagcttcattaattttgcacattcttttacaaatcgcagaaaagcaagagcaggaaaatctttagagttacatttatcaagaatatttgacgaattttccttaaaatttgagacgcaagcgaagacagaagggaaaaagaaaccagattttttatttcctggaagtgaagagtaccatgcgatggatgaatcagggaatttcatatttcaaactgaaaagctgacaatgctaggttcaaagactacttgtaaggatcgctggcgccaagttttaaatgaagcagatcgaattcctcataagcatttatttactctacaagaaggtatatctgatactcaaattcaggaaatgagtgatgagaatttaaccttagttgtccctaaagaatccgtaaaaacatttggaacttttgggaaaacccatgttttaactttagaaaattttattaaatatataaagtctcagcaggttagttaa

SEQ ID NO: 42681 - DNA, 1788 bp, Neisseria meningitidis
atgaaacttcctttatcctatttgcctaatattcgctttttgtcttggtgctgcttattggcaggtatcattgctcctgctactttgttggcctcccccaaccctgccgaaatccgtatgcagcaagatattcagcaacgccaacgcgaagagcagttgcgccaaaccatgcagcctgaaagcgatgtgcgtttgcatcaaaaaaacacgggggaaacggttaatcagttgatgggcgatgacagcagccaaccgtgttttgccattaacgaagtggtgttggaaggcgaacaccatgctcggtttcagtttgccctaaaacgtgccttgcgcgaaacgggttttcaggctggcaagtgtctgcatgcgggcaacattaatcaaatcatgtccttagcacaaaatgctttgatcggcaggggatataccacgacccgtatcttggctgcgccacaggatttgaatagtggcaagcttcaattaaccctgataccgagctatctgcgctccatacgaatcgatcggtctaacgatgatcaaacccatgcaggacgtattgcagcattccagaacaaatttcccacccgctcgaacgatctgttgaatctgcgtgatttggaacaaggactggaaaatctcaaacgtctcccgactgcggaagccgatctccaaatcgttcccgtagagggagaaccaaaccaaagtgatgtcgtggtgcaatggcggcaacgtctgctgccctaccgtgtgagtgtggggatggataattcgggtagtgaggcgacaggaaaataccaaggaaatatcactttctctgccgacaatcctttgggactgagtgatatgttctatgtaaattatggacgttcgattggcggtacgcccgatgaggaaagttttgacggccatcgcaaagaaggcggatcaaacaattacgccgtacattattcagcccctttcggtaaatggacatgggcattcaatcacaatggctaccgttaccatcaggcagtttccggattatcggaagtctatgactataatggaaaaagttacaatactgatttcggcttcaaccgcctgttgtatcgtgatgccaaacgcaaaacctatctcggtgtaaaactgtggatgagggaaacaaaaagttacattgatgatgccgaactgactgtacaacggcgtaaaactgcgggttggttggcagaactttcccacaaagaatatatcggtcgcagtacggcagattttaagttgaaatataaacgcggcaccggcatgaaagatgctctgcgcgcgcctgaagaagcctttggcgaaggcacgtcacgtatgaaaatttggacggcatcggctgatgtaaatactccttttcaaatcggtaaacagctatttgcctatgacacatccgttcatgcacaatggaacaaaaccccgctaacatcgcaagacaaactggctatcggcggacaccacaccgtacgtggcttcgacggtgaaatgagtttgtctgccgagcggggatggtattggcgcaacgatttgagctggcaatttaaaccaggccatcagctttatcttggggctgatgtaggacatgtttcaggacaatccgccaaatggttatcgggccaaactctagtcggcacagcaattgggatacgcgggcagataaagcttggcggcaacctgcattacgatatatttaccggccgcgcattgaaaaagcccgaatttttccaatcaaggaaatgggcaagcggttttcaggtaggctatacgttttaa

SEQ ID NO: 42682 - DNA, 549 bp, Neisseria meningitidis
ttgacaggccgtctgaagacgaaacgcggaacatcggatattcaaggaactttaatgaaaaagaacatattggaattttgggtcggactgttcgtcctgattggcgcggcggcggttgcctttctcgctttccgcgtggccggcggtgcggcgttcggcggttcggacaaaacttacgccgtttatgccgatttcggcgacatcggcggtttgaaggtcaatgcccccgtcaaatccgcaggcgtattggtcgggcgcgtcggcgctatcggacttgacccgaaatcctatcaggcgagggtgcgcctcgatttggacggcaagtatcagttcagcagcgacgtttccgcgcaaatcctgacttcgggacttttgggcgagcagtacatcgggctgcagcagggcggcgacacggaaaaccttgctgccggcgacaccatctccgtaaccagttctgcaatggttctggaaaaccttatcggcaaattcatgacgagttttgccgagaaaaatgccgacggcggcaatgcggaaaaagccgccgaataa

SEQ ID NO: 42683 - DNA, 1458 bp, Neisseria meningitidis
atgtcccggcatcccgcccccaccggagaaaaaacattcttcggccaccccttccagctttccaccctcttccatatcgaattgtgggaacgtttttcattttacggaatgcagggcatcctgctgatttacctctactacaccgccgacaaaggcggcttgggcatagacaaaaccctcgccggcggcattgtcggcgcatacagcggcagcgtgtacctgtccaccattttgggggcgtggtttgccgaccgagtatggggtgcggaaaaaaccctcttcctctcgggcatcgtcgtgatgctcggacacatcgtccttgccgccgccccgggcctgtacggccttttaatcgggctgatattcatcgcattgggcagcggcggcgtgaaatctacggccagttctatggtgggcgcattatacgaacaggacgaaatgcgcccgctgcgcgatgcgggattttccattttctacatcgccatcaacatcggcggcttcctaggcccgctgctgaccggcctactgcaggaaaacatcggtttccattatggtttcggcgcggcggcggtcggtatggcattcggcttgtggcgttattccctgggacgtaaaaacctgccccaccccaccgtcccccatccgctttcaaaaggacagggcaaaactgcggccgccgtcggcatcgccctcatcgccgcacttgcaaccgccatcaaaaccgggcttgtcaacctcgacaatttctccggcatcctattatctaccgtcatccttgccgtcatcgcctatttcgcccgcctgctgaccaacccccgcgtcagttccgacaacaaacggcacatcatcgcctacatcccgcttttcctgaccatctgtatgttttgggccgtctggtttcagatttacaccgtggcaaccgtctatttcgacgaaaccgtcaaccgcaccatcggttcgtttaccgtgcccgtcgcttggaaagattctatgcaaagcctgtgggtcatcctgttttccggactgatggcggcaatgtggacaaaaatggggcgcaaacagcccaaaaccccgctgaaattcgctatggcggtatttgttaccggcgcgtcgtttttgggattcgtcccctttatttcctccggtacgccgatgcctattgcggttttcgcactgatcgtcctcgccatcacgataggcgaactgatgatttccccgattgcgctgtccatctccaccaaaatcgcaccgcctttattcaaaacccaaatggtcgcccttaatttccttgccttttcattaggcttcactttgggcggcgtattgtttgaaaaaggctatcaggcgggcgacgaaatcggcttctatcggctgctgttctacatcggcgcagccacaggcttcctgctgctcctgctcgtccccaaattgaacaaaatgctcgaaggcacagactaa

SEQ ID NO: 42684 - DNA, 381 bp, Neisseria meningitidis
atgccatccgttgaactgctgttggtgattgtcggactgccacgcggcaccttctattaccaattggttgtccaatcggcagaagacaaatatgccgatttgaaacggcatatccatgatatttatcaaaagcagttgaaagacaacggtctggttcagagtatgtcccgcaagggaaactgcttggacaatgcggcaatggaaagtttcttcggaacgttgaaatcggaatgtttccatacgtgcaaatatgattccgttaccgaattggaagctgtactgcacgaatatatccgttactacaacaacgatagaatcaagttgaaattaaaaggactgagccctgttcagtacagaattcagtccctgaaagccgcttga

SEQ ID NO: 42685 - DNA, 174 bp, Neisseria meningitidis; identical to SEQ ID NO: 36913

SEQ ID NO: 42686 - DNA, 897 bp, Neisseria meningitidis
atgaaaggttttaccattattgaatttttggttgcgggcctgctcagtatgattgtcctgatggcggtcggatcgagttacttcacatcccggaaattaaatgatgcggcaaacgagcgtcttgccgcgcaacaggatttgcggaatgcggcaacattgattgtccgcgatgcgagaatggcaggcggcttcggttgtttcaatatgtccgagcatcctgcaactgatgttattcccgatacgacgcaacaaaattctcctttttccttaaaaaggaacggtatagataaacttattcccatagcggaatcttcaaatatcaattatcagaattttttccaggttggtagcgcattgatttttcaatacggaatcgatgatgttaatgcaagcaccgcgactaccgtcgtcagcagctgtgccgcaatatcgaaaccgggcaagcaaatccctactttagaagatgcaaaaaaagaattgaagattccggatcaggataaggagcaaaatggcaatatagcgcgtcaaaggcatgtggtcaatgcctatgcggtcggcaggattgccgatgaggaaggtttgttccgcttccaattggatgataagggcaagtggggtaatcctcagttgctcgtgaaaaaggttagacatatgaaagtgcggtatatctatgtttccggctgtcctgaagatgacgatgccggcaaagaggaaacattcaaatatacggataaattcgacagcgcccaaaatgctgttacgcccgccggggtggaggttttattgagtagcggtactgataccaagattgccgcttcttcagacaatcatatttatgcttaccgtatcgatgcgacaatacgcgggggaaatgtatgcgcaaacagaacactttga

SEQ ID NO: 42687 - DNA, 759 bp, Neisseria meningitidis
atgaatcccaaaatttcctccgaccatacagaagatgccgtgcgcctctccaaacgcatggcgcaactggggctttgttcacgccgcgaagccgacggctatatcgaacagggttgggtaacggtcaacggcaaaaccgccgtactcggtcagaaagtttcaccggcagaccgtatcgaactgaacaagaaagcccacgaacagcaggcggcacgcattaccatcctgttgaacaaacccgtcggctatgtcagcgcacaagcggaaaaaggctataaatccgccgccgaactgattacccctgaaaatcactgggaaggcgataccggccgcatccgtttcgatccgaaacacaaaatcggcctcgcccccgccggcaggctggacatcgactcggtcggattgctggtattgactcaggacggccgtatcgccaagcagcttatcggcgaaaacagcggcagtgaaaaagaatatttggtgcgcgtgcgcggcaaattggacgaaaaaggacttgccttactgaatcacggattgagtttggacggcgagaaactgcgtcccgcccaagtagaatggcaaaacgaagaccaactgcgcttcgtgttgaaacagggtaaaaagcggcaaatccgccgtatgtgcgaactggtcggactgcgcgtcgtcgggctgaaacgcatccgcatgggcaaggtcaaactcggcaggctgccgcccggcaaatggcgttatctcgctcccggcgaatcgttttaa

SEQ ID NO: 42688 - DNA, 1647 bp, Neisseria meningitidis
atgaaacaatccgcccgaataaaaaatatgaatcagacattaaaaaatacattgggcatttgcgcgcttttagccttttgttttggcgcggccatcgcatcaggttatcacttggaatatgaatacggctaccgttattctgccgtgggtgctttggcttcggttgtatttttattattattggcacgcggtttcccgcgcgtttcttcagttgttttactgatttacgtcggcacaaccgccctatatttgccggtcggctggctgtatggtgcgccgtcttatcagatagtcggttcgatattggaaagcaatcctgccgaggcgcgtgaatttgtcggcaatcttcccgggtcgctttattttgtgcaggcattatttttcatttttggcttgacagtttggaaatattgtgtatcggggggggtatttgctgacgtaaaaaactataaacgccgcagcaaaatatggctgactatattattgactttgattttgtcctgcgcggtgatggataaaatcgccagcgataaagatttgcgagaacctgatgccggcctgttgttgaatattttcgacctgtattacgatttggcttccgcgccggcacaatatgccgccaagcgcgcccacattttggaagcagcaaaaaaagcgtcaacatggcatatccgtcatgttgcgcccaagtataaaaattatgttgtggttatcggtgagagcgcgcgttcggattatatgaatgtttacggtttcccattgcccgatacgccttttttgagtcagaccaaagggctgttgataaacggttaccaatcgaccgcccacgcgacgaatctttcgctgccgcagactttggggctgccgggagaaccgaacaataacatcgtcagcttggcgaagcaggcgggttttcggacggcgtggctgtctaatcaaggaatgttggggcattttgccaacgaaatttccacctatgccctacgcagcgattatccgtggtttacccaaaggggtgattatggcaaaagcgcggggttgagcgaccgccttttgttgccggcgttcaaacgggttttgataggaaatgcaggcacgaagcctcggctgattgtgatgcacctgatgggttcgcacagtgatttttgcacacgtttggataaggatgcgcggcggtttcagtatcaaactgaaaaaatatcctgctatgtttccaccatcgcgcaaaccgataaatttttagaagatacagttaagatattgaatgaaaataaagaaagctggtctttggtttacttttccgaccacggtttgatgcatgtcggtaaaggcggcgagcgaacgttgacacatggtgcgtggaagcgtcaaagctacggcgtgccgctggttaaaatttcgtccgatgacacgcggcgcgaaatgattaaagtgaggcgcagcgcgtttaattttttacgcggattcggcagttggacgggtatcgaaaccgacgagttgcccgatgacggctatgatttttgggggaatgttcccgatgtgcagggcgaaggcaataaccttgcctttatcgacggactgcccgacgaccccgcgccgtggtatgcgggaaaaggcaaatcgactaaaaatacgtctaaaaaatga

SEQ ID NO: 42689 - DNA, 480 bp, Neisseria meningitidis
atgccggaaagtattttcaaacagatttcccttgatattttgaaactgcatcgggattctgtttattcgctgcttgccacttccggctgcaactgtcaggtgcatgaagcggcgtatgtcaacatcgacggcaaatattatattgcgctttcatgcgagcccgaggtgggggaagtcaaaacaggcattttgctgattgaggatgaaagccgcaaccttcgtttgagctgggtcggcagtgcgcgggagcttgactgcaaggataatgcctacaaacgcgccctgtccgcgttgtccagaaagctggggcggtgtaaggacaggctgcatacggcggttcaaccgtttctgttggagctggtaccggagaaaggcagattttctgtcggcgatgaagaagtttggatttctcgaaacgatttagtgagggctttatatcctgtcggatacagtatgcggcaggcagtgtttcagatttaa

SEQ ID NO: 42690 - DNA, 738 bp, Neisseria meningitidis
atggctttgcaagatcgtaccggtcaaaaagtaccttccgtagtattccgcacccgtgtcggcgacacttggaaagatgtgtctaccgatgatttgttcaaaggcaaaaaagtagtcgtattctccctgcccggtgcatttaccccgacttgttcttcttcacacctgccgcgttacaacgaattgttcggcgcgttcaaagaaaacggcgttgacgcaatctgctgcgtatctgtaaacgatacgttcgtaatgaacgcttggtctgccgaagaagaatccgacaacatctacatgattcctgacggcaacggcgaatttaccgaaggtatgggtatgctggtcggtaaagaagacttgggcttcggtaaacgctcttggcgttactccatgctggttaacgacggcgtggttgaaaaaatgttcatcgaacctgaagaaccgggcgatcctttcaaagtatccgatgcagatactatgctgcaattcgttgctcccgattggaaggctcaagagtctgtggcaattttcactaaaccaggttgccaattctgcgctaaagccaaacaagctttgcaagacaaaggtttgtcttacgaagaaatcgtattgggcaaagatgcaaccgttacttccgttcgcgccattaccggcaagatgactgcccctcaagtcttcatcggcggcaaatacatcggcggcagcgaagatttggaagcttacttggctaaaaactga

SEQ ID NO: 42691 - DNA, 1224 bp, Neisseria meningitidis
gtgggacgcagaaaactttggtttgccctggcagcagcgggcgttatcggcggtttggtcggcattgtgctgacggaactgatgcacttcatacagcatacggcatacggttatggcgcggacggcgtgtacacttcgttccgcgaaggcgtggcacaggcttccggtatgcggcgcgttgccgtgctgacgctgtgcggcgcggtcgcaggcagcggctggtggttgctgaaacgtttcggcaagccgcaaatcgaaatcaaagccgccttgaaacagccgttgcaggggctgccgtttctgacgacggttttccatgttctgctgcaaatcataacggtcggactcggttcgccgctcggacgcgaagtcgccccgcgcgaaatgaccgccgcgtttgcttttgccggcggcaaacgcttgggtttggatgaaggcgaaatgcggctactgattgcttgcgcttcgggtgcgggtttggcggccgtgtataacgtgccgctcgcctccacacttttcattctcgaagccatgctgggcgtgtggacgcagcaagccgtcgccgctgcattgttaacttcagtcatcgccaccgccgtcgcgcgcatcggcttgggcgacgtgcagcaatatcatccggccaaccttaccgtcaatacttcattactttggttttccgccgtcatcggcccgatactgggcgtagccgccgtctttttccagcgtaccgcccaaaagttcccctttatcaagcgcgacaatatcaaaattattcccttggccgtctgtatgtttgcactcatcggcgtgatttccgtttggtttcccgaaattttgggcaatggcaaagcaggcaatcaactgacctttggcggattgaccgattggcaacacagccttgggctgaccgccgtcaaatggctggtcgtcttaatggcgcttgccgtcggcgcatacggcggtctgattaccccgtccatgatgctcggcagtaccatcgcctttgctgctgccaccgcgtggaacagtgtttttcctgaaatgtcctctgaaagcgcagccattgtcggcgccgcagttttcctcggtgtttcccttaaaatgcccctgaccgccatagcctttattttggagctcacctacgcccctgttgccttgctcatgccattatgtacaggcatggcaggtgcagtatgggtggcaaagaaaatgggatttaaatag

SEQ ID NO: 42692 - DNA, 789 bp, Neisseria meningitidis
atgctcaccctatacggcgaaactttcccctcgcggctgctgctcggcacggctgcctacccgacccccgaaatcctcaaacaatccatccaaaccgcccagcctgcgatgattaccgtctcgctgcgccgcgcgggaagcggcggcgaggcgcacggtcaggggttttggtcgctgcttcaagaaaccggcgttcccgtcctgccgaacacggcaggctgccaaagcgtgcaggaagcggtaacgacggcgcaaatggcgcgcgaagtgtttgaaaccgattggataaaattggaactcatcggagatgacgacaccttgcagccggatgtgttccagcttgtcgaagcggcggaaatcctgattaaagacggcttcaaagtgctgccttattgcaccgaagacctgattgcctgccgccgcctgctcgacgcgggctgtcaggcgttgatgccgtgggcggccccgatcggcacgggtttgggcgcggttcacgcctacgcgttgaacgtcctgcgcgaacgcctgcccgacacgccgctgattatcgacgcgggcttgggtttgccctcacaggcggcacaagtgatggaatggggctttgacggcgtgcttttgaatactgccgtttcccgcagcggcgatccggtcaatatggcacgcgccttcgcactcgccgtcgaatccggacggctggcatttgaagccggaccggtcgaagcacgcgacaaagcgcaagccagcacgccgacagtcggacaaccgttttggcattcggcggaatattga

SEQ ID NO: 42693 - DNA, 288 bp, Neisseria meningitidis
atgaacaaagaaatagtcggtattttctttataccggcgggcatcatcagcatgtgtatggccgcattgtggcagatgtatgtgatgatgaccgaaacttatacgctcaaccgtttcaaagataaagaattggtttggcgcgtggcattgttgtttatcagtttcagccttgccgtttatctgctctgtccgaattcgcgtaaaaaaggcatcgtcttttttattctcgggggaggcggtgcagccatgtatctgctggcgcggatgtggttgcctttcagcaagtga

SEQ ID NO: 42694 - DNA, 1554 bp, Neisseria meningitidis
atgccgtctgaaaggtcggcggattgttgcccggcgcactttgtggtaaagtttagaaaatcaactctaaactgtggcaggcggtttgaccggccgccgattaatgggaaccgacagaggaagccgatgatacacaccgaaccgagcgcgcagccgtcaactatggacacggctgcttttttaaagcacatcgaatccgcattccgccgcattttttcagacggtatcgacctgatgcgatacctgcccgaagacaaatggcttgccttgaagcaggcgggtttgctgttgcccttcctcgacaaaaaatacggcgggcgcaagggcagccagtttgaaatccaagaagtcctgcggattgcggggcattacggcgtgcccgttacgctgcgtaccggcatcgaaggcgcgctggtgttgcagccactgcaagagttcggcgatgaagcgcaagtcgcgcaaggtttggagatgattttcaaaggcgagggcggcggtttgggtgttaccgaacccgaaacctccggcgcggcgattgcacgcgaaatgcagtcctactacgaatatatcgacggacaaaccatttacgtcaacgccgcgaaatactggcagggcaactcgcaaagcgacttcctcctcgttgccgccaaagagcgcaaaaacggcaaactcgccaaagtcatcgacctgctgctcgtccccaaaacatacatccgctgcgaaaccctcgcatccgaaggcttgcgcgccgtccgttacgccgtcaaccgcatcgatgccgaaatgcctgcaaccgccgtgatgaaactctcccagagcgacgctgccggtttgcgcgcgttccaaaacatctttatccgcagccgcctgcaactgatcggcatgacgcacggcattatggaatacatccttgaaaatctggaacgatacgtccgcaacgacatcaaattcgtcgattacgaacgccgcgaaatccggcgccgccatcaggtttccgagattctttaccgctacgtctgccattccgtttcgcctgttgcccccgtcgcccatcagctgatggaggcgaacatcgtcaaaaccctcgccacggaatacacttacgccgccgcgcaaatgttgcaaaaactcttgggtgcgaagggttttgaacgcggacacaccgccggcaatatcgctatcgacatccgccccttcacgatttttgaaggcccgaacgatatgctttatgccgaaatttacgaccagtttgtccgcgccaccgccgaagaaaaagaagcaggcatgaagttggacaaaaaccaaaccctgctcgaccgcctgcaaaccgatgcccgctttgccgccgtcgcccgcgactacactttgcctgaagacatccgcagcttcctgcaggaacacaccctgaccgatgcctgcgccctgcaaaaagtctttatcggcaaaatcatcgcccgactctttgtcttcgtacaggcgaaacacgaagacaccgcagccttcctgctgaacgacatccgcaaagatatattggactgccgatattgcgggtag

SEQ ID NO: 42695 - DNA, 924 bp, Neisseria meningitidis
atgcaatacagcacactggcaggacaaaccgacaactccctcgtttccaataatttcgggtttttgcgcctgccgcttaattttatgccgtatgaaagtcatgccgattgggttattaccggcgtgccttatgatatggcggtttcagggcgttccggcgcgcgtttcggtcctgaagccatccggcgcgcctccgtcaacctcgcttgggagcaccgcaggtttccatggacatttgatgtgcgcgaacgcctgaacattattgattgcggcgacttggttttttcttttggcgacagcagggattttgtcgaaaaaatggaagcgcacgccggcaaattactttcttccggcaaacgctgtttgagtttgggcggcgaccatttcattaccctaccgttgttgcgcgcccacgcccgctatttcggcaaactcgcactgattcattttgacgcgcacaccgacacctacgacaacggcagcgaatacgaccacggtacgatgttctataccgcccccaaggaaggcctcatcgacccgtcccgttccgtacaaatcggcatacgcaccgaacacagtaaaaaattgccttttactgtgttgtccgcccctaaagtcaatgaagacagtgttgaagagaccgtccgtaaaatcaaagaaaccgtcggcaatatgcccgtttacctgactttcgacatagactgcctggacccgtcgttcgcccctgggaccggtacgcccgtatgcggcggcttgagcagcgacagggcattaaaaatcctacgtgggctgacggatctcgacatcgtcggtatggatgttgtagaagttgccccctcttacgaccaatccgacattaccgctttggccggtgccacaattgccttggaaatgctttaccttcaaggtgcgaaaaaggactga

SEQ ID NO: 42696 - DNA, 1050 bp, Neisseria meningitidis
atgtccaaacagcccaccagcaaacgccaatggcgcgacggcgcagccccgtctgccaagaaaaccgccaaaccgttcaaaagcaaagcccgtcccaaagatgaaacgggcaaaaccgcttcccaaccttacggacaaaaagcttcagacggcatcaaacctcaaaacgtccccaaacagcgcgccgccaaagccaaaaaactcgtcgtccgcaatcccaaccaaaaaattatggaacacgcgcgcgatttgaaagaacgccgcagcgacctgtcgcgcatggaacccgaacgcctgcaaaaagtgcttgccgcgtccggcgtcggctcgcgccgcgaaatggaagaatggattaccaacggctggataacggtcaacggcaaaaccgcgcaactgggcgacaaagttacccccgacgaccacgttaccgtcaaaggcagcatcatcaagctcaaatgggcggaccgcctgccgcgcatcatcctgtattacaaacaagaaggcgaaatcgtttcccgtgacgacccgcaaggccgcgtcagcatattcgaccgcctgccgcaggccgccagcagccgctgggtcgccatcggacgcttggacatcaacaccagcggacttctgattcttaccacctccggcgaactcgtccaacgtttcgcccaccccagcttcgaagtcgaacgcgaatacgccgtgcgcgtcttgggcgggctgaccggcgaacaaatgcgcgtcctcaccgaagaaggcgtgatgctcgaagacggcttggcaaaagtcgaacgcatccgcgaacaaggcggcgaaggcgcgaacaaatggtacaacgtcgtgattaaagaaggccgcaaccgcgaagtgcgccgcatttttgaaagccaaggactcaccgtcagccgcctcgtgcgcatcggcttcggtcccatcggactgcccaaccgcctcaaacgcgggcagttctacgaactcaaccccgccgaagtcgccaacatcatcaaatgggcggacatgctgctgccgggcgaacgccgccgcaaaaaagcctaa

SEQ ID NO: 42697 - DNA, 1143 bp, Neisseria meningitidis
atgaatactttatatacacttttcgccacctgcccgcgcggcttggagaccgttttatctcaagaactcgaaagcctcggctgtaccgatgtacaagtgtttgacggcggcgtttcctgccggggcggattggaacaggtttacgccgccaacctgcattcgcgtactgccagccgtatcctgctgcgcctgaccaaagggacataccgcaatgagcgcgacatctacaaactcgccaaaaatatcaactggtttaattggtttactttacagcagacgttcaaagtcaaagtcgaggcaaagcgtgccaacgttaagagcatccaatttgtcggactgaccgtcaaagatgccgtctgcgacgctttccgcgacatttacgacgcacgtccgagcgtggacaaagccgcgcccgatgtccgcatccacgcctttttgaacgaacgcaatgtcgaaatctttattgacacttcgggcgaagccctgttcaaacgcggctaccgcctggataccggcgaagccccgctgcgcgaaaaccttgccgccggactgctgctctcggcaggctacgacggcacgcagccgtttcaagacccgttttgcggcagcggcacgattgctatcgaagccgcttggattgccgcccgccgcgcgccgggtatgatgcgccgtttcggttttgaaaaactgcaaaatttcgataaaacgctgtggtcggatttgcggcgccgcgccgaagcgcaaacccgccccgtccgcgccccgattgcaggcagcgacaacgaccgccgcatcgttcagacggcattggacaacgcacgccgcgccggggtggacgacatcgtttccttcagcgttgccgacgcgcagtccgtccgaccgaacggcgaaaacggcattatggtgtccaatccgccctacggcgtgcgccttgaggaagtccgcgccttgcaggcactgtatccgcagttggggacgtggttgaaaaaacattacgcaggctggttggcggcaatgtttaccggcgatagggaaatgcccaaattcatgtgcctgtcgcccaagcggaaaatcccgctttataacggcaacatcgactgccgcctgttcctgattgatatggtggaaggatcgaaccgttga

SEQ ID NO: 42698 - DNA, 807 bp, Neisseria meningitidis
atgccgacagttttcatctttttgacggcggtttacgcaggattgggtgcatttgcatggcactgccaacagcaggggtgcggccgggattacccgtggaagacggaattgccggttttgggtgcggcattgaccgtccacggcgcggcactgcttatgccggtcattcaagacaaaatcatcattatgggcttcgggtattccggcagcctgattgtttggatgatgctgtttatttattttgccggcagcttcttttatccgctgcgcggagtgcagttgctgctgtatccttgcgccgcactgatgctgctgtcaggtttggtttttcctggaaaattctcgggatatgaaattaccgaccttccctttatgctgcatatcggaacttcgctgctcgcatacgggctgttcggcatcgcaacattattgtccgttttgaccctgctgctgaatcggagcctgcaccgcaggagcttctccaagctcgcaggattcctgccgtcgctgctcagtttggaaaaactcatgttccaggccatgtgggcaggtttcatcctgctgacctattccgtcgtcagtggaacattttttgccgaagccgtattcggcaaacccatgacctttacccataaaaccgtattcggcatattgtcatggctgatttacggcggactgctgctcaagcacagcatgaccgcatggcgcggcaaaaaagccgccgtgtggaccatcatcggatttgtcagccttatgattgcctatatgggcagcaagttcgtattggaaatcattctgaaaagataa

SEQ ID NO: 42699 - DNA, 627 bp, Neisseria meningitidis
atgaacgttaatgttatcaaccatccgctcgtccgccacaaattaaccctgatgagggaggcggattgcagcacctacaaattccggacgcttgccaccgagctggcgcgcctgatggcatacgaggcaagccgtgattttgaaatcgaaaaataccttatcgacggatggtgcggtcagattgaaggcgaccgcatcaagggcaaaacattgaccgtcgttcccatactgcgtgcaggtttgggtatgcttgacggtgtgctcgacctgattccgactgccaaaatcagtgtagtcggactgcagcgcgacgaagaaacgctgaagcctatttcctattttgagaaatttgtggacagtatggacgaacgtccggctttgattatcgatcctatgctggcgacaggcggttcgatggttgccaccatcgaccttttgaaagccaagggctgcaaaaatatcaaggcactggtgctggttgccgcgcccgagggtgtgaaggcggtcaacgacgcgcaccctgacgttacgatttacaccgccgcgctcgacagccacttgaacgagaacggctacatcatccccggcttgggcgatgcgggcgacaagattttcggcacgcgctaa

SEQ ID NO: 42700 - DNA, 504 bp, Neisseria meningitidis
atggctttattgaatatcttgcaatatcccgacgagcgtctgcacacggtggcaaagcctgtcgaacaagtcgacgagcgcatccggaagctgattgccgatatgtttgaaacgatgtacgaatcgcgcggcatcgggctggcggcgacgcaggtcgatgtgcacgagcgcgtggtcgtgatggatttgaccgaagaccgcagcgaaccgcgcgtgttcatcaaccccgtcatcgttgaaaaagacggcgaaaccacttacgaagagggctgcctgtccgtgccgggcatttacgacaccgtaacccgcgccgaacgcgtcaaggtcgaggctttgaacgaaaaaggcgaaaagttcacgctggaggcggacggcttgttggcgatttgcgtgcagcacgagttggaccacctgatgggcatcgtgtttgtcgaacgcctttcccaactcaagcaggggcggattaagaccaagctgaaaaaacgtcagaaacatacgatttga

SEQ ID NO: 42701 - DNA, 375 bp, Neisseria meningitidis
atgatagtccttcacggcatcccaaattgcgatacggtcaaaaaagccaaaaaccggcttgccggatacggcttggagtttgaatttcgggattttaaaaaacagaggccgtctgaagcggaaatctgctcgtggctggaacaagtgcctttggcaaccctgctcaacaaacgcgggacaagctggcgcaaactcgatgccgaaacacagcaaaaagtgctgtcctcgacggcggaggccgtcaaactgatgtccgaaatgccgagcctgatcaagcgtcccgtattggagtgcggcggcaaggtttacgccggcttcagcgaagaaacctacgacggcatcttcaaccggcaagccccgtgcagacagggataa

SEQ ID NO: 42702 - DNA, 876 bp, Neisseria meningitidis
atgagtcaacactctgccggagcacgtttccgccaagccgtgaaagaatcgaatccgcttgccgtcgccggttgcgtcaatgcttattttgcacgattggccacccaaagcggtttcaaagccatctatctgtccggcggcggcgtggcagcctgttcttgcggtatccctgatttgggcattaccacaatggaagatgtgctgatcgacgcacgacgcattacggacaacgtggatacgcctctgctggtggacatcgatgtgggttggggcggtgcattcaatattgcccgtaccattcgcaactttgaacgcgccggtgttgcagcggttcacatcgaagatcaggtagcgcaaaaacgctgcggccaccgtccgaacaaagccattgtatctaaagatgaaatggtcgaccgtatcaaagctgccgtagatgcgcgcgttgatgagaacttcgtgattatggcgcgtaccgatgcgctggcggtagaaggtttggatgccgctatcgaacgcgcccaagcttgtgtcgaagccggtgcggacatgattttccctgaagccatgaccgatttgaacatgtaccgccaatttgcagatgcggtgaaagtgcccgtgttggcgaacattaccgagtttggttccactccgctttatacccaaagcgagctggctgaaaacggcgtgtcgctggtgctgtatccgctgtcatcgttccgtgcagcaagcaaagccgctctgaatgtttacgaagcgattatgcgcgatggcactcaggcggcggtggtggacagtatgcaaacccgtgccgagctgtacgagcatctgaactatcatgccttcgagcaaaaactggataaattgtttcaaaaatga

SEQ ID NO: 42703 - DNA, 174 bp, Neisseria meningitidis; identical to SEQ ID NO: 38300

SEQ ID NO: 42704 - DNA, 1542 bp, Neisseria meningitidis
atgaaaatcggtatcccacgcgagtcattatccggcgaaacccgcgtcgcctgtacgcccgccaccgtcgccctgctgggcaaactgggctttgaaaccgttgtcgaaagcggtgcaggtttggcggcaagtttggacgatgccgcttaccaaacagcaggcgcaaccgttgccgacaaagcggcggtttgggtctgccctttgatttataaggtcaacgcgccgtccgaacaggaactgccgcttttgaacgaaggtcaaaccatcgtcagcttcctgtggccgcgccaaaacgaggctttggtcgaagccttgcgcgccaagaaagtgaacgcgctggcgatggatatggtgccccgcatttcgcgcgcgcaggctttggacgctttgtcttcgatggcaaacatcagcggctaccgcgccgtaattgaagccgccaacgccttcggccgtttcttcaccggtcaaattaccgccgccggcaaagtgccgcccgcgcaggttttggtgattggtgcaggtgtggcaggtttggcggcgatcggtacggcaaactcgctcggcgcagtggtacgcgcgttcgatacccgcttggaagtggcggaacaaatcgaatcgatgggcggcaagttcctgaaactcgacttcccacaagaatcgggcggcagcggagacggctacgccaaagtgatgagcgacgaatttatcgcagccgagatgaagctctttgccgagcaggcgaaagaagtggacatcatcatcaccaccgccgccattccgggcaaacccgcgcccaagctgattaccaaagaaatggtggaaagcatgaaatccggctccgtcatcgtcgatttggcggcggcgacgggcggcaactgcgaactcacccgcccgggcgaattgtccgtaaccggcaacggcgtgaaaatcatcggctacaccgacatggcaaaccgccttgccggacagtcttcccagctttacgccaccaacttggtcaacctgaccaagctgttaagcccgaacaaagacggcgaaatcacgttggacttcgaagacgtgattatccgcaacatgaccgttacccacgacggcgaaatcaccttcccgcctccgccgattcaagtttccgcccagccgcagcaaacgccgtctgaaaaagccgtgcctgccgccaagcccgagccaaaacccgttcccctgtggaaaaaactcgcgcccgccgtcatcgccgccgtcttggtactgtgggtcggcgcggtcgcacccgcagcattcctgaaccactttatcgtgttcgttctcgcctgcgtcatcggctactacgtcgtctggaacgtcagccactcgctgcacacaccgctgatgtcggtaaccaacgccatctccggcatcatcgtcgtcggcgcgctgctgcaaatcggtcagggcaacggcttcgtttcgctgctgtcgtttgttgccatcctgattgccggcatcaacatcttcggcggctttgcggtaacacggcgtatgctgaatatgtttaagaaagggtaa

SEQ ID NO: 42705 - DNA, 441 bp, Neisseria meningitidis
atggggtcttcagattcctttaaggaaaagaaagaaatatttgaaattggaacgcctgcttatcgccaaaagttaattgatgtttggaaaaagagcattaatggaaacgaaaaatcttgggtgctctttgaaaatgggacttgcgtcattttacttgaaccggaaaaagatttggcgaaacaagctaaagagatgttaagcaaatggggcaaggttcaaataggaacaccatctgcagattttggcattatcactttagatagtggcgatggatatgccgtttcatgccatcatcccgaaatttttacgctaatcctaaaagaagaaggattggatgaagatttcaaaatcggtatcgaagggcgctctcatcgcgattgtgatgctgaagaacccaaagttatccatatcgaagataaacgcaccattgaaaccccatga

SEQ ID NO: 42706 - DNA, 531 bp, Neisseria meningitidis
gtgcccgttgagaacgaaaacatgaatccgtttgaaaccaaaagcgttacctttgccgaaccgattgaaatgctgtatgcctgccacggcaaagtgcgccgtttttgcggacaagtcgccatgctgtcggactatatcgccgaaaacggctgcaatcagattgttttgcaaaccatccgccaaatcgcccagtatttcaacgttgccgcgccgctgcaccatgaagacgaagaagaaaacttcttcccgctgctgctgcaatatgcgccgcaagcccaagaaagcgtggacgagcttttgcgccaacatatcgggctgcacgacaactgggcggctgtttccgccgaatttgccaaactcgaagcagacaacgcttatgtccccgatgaggaagcgttcaaacgttttgtggcgggatatgatgttcatttggcgattgaagagccgctgtttgatatgggcaacacctttatcccaaaagaaaaactgaccgaaatcggcgaaattatggcggcgcgccggcgcaaataa

SEQ ID NO: 42707 - DNA, 972 bp, Neisseria meningitidis; identical to SEQ ID NO: 39558

SEQ ID NO: 42708 - DNA, 474 bp, Neisseria meningitidis
atgttatccgcagaatctttaaaacaaatcgacatcgagttggcaaaatatcctgccgaccaacgccgctccgcgattatgggcgcattgcgtattgcccaaaccgaaaaaggctggcttgctcccgagaccatcgcttttgtcgccgactacatcggcatcacgcctgcacaagcctacgaagtcgccactttctacaatatgtacgaccttgagcctgtcggcaaatacaaactgaccgtttgtaccaacctgccctgcgccctgcgcggcggtatggctaccggcgaatacctcaaacaaaaactcggtatcggctacggcgaaactacccctgacggcaagtttacccttgtcgaaggcgaatgcatgggcgcatgcggcgacgctcccgttatgctggtcaacaaccacagcatgtgcagctttatgaccgaagaagcgattgagaagaaactggcggagttggagtag

SEQ ID NO: 42709 - DNA, 1701 bp, Neisseria meningitidis
atgtcagtcaaaatccaaacccgatccgtcaataccgacgtttttaatcatttgctcaccgccggtgccgatcctttaatcgcccagctttgtgcttcgcgcggtgtgcaaagtcctgccgaattggacgacaaactcgcttccctcctgccttatcaatcgttgacgaattgcgaagccgccgcccgccgtttggcggatgcggttgggcgcaaggaaaaaatcctgattgttgccgactatgatgccgacggtgcgacggcgtgtgccgtcggtatgagcggtttggcggcgatgggggcgaaagtggatttccttgtgcccaaccgctttgaacacggctacggcttaacgcccgaacttgccgaaatcgctgccgcgcagggcgtggatttgctgattacggtggataacggtatcgccagcatcgcaggcgtggcgagggcgcaggctctgggtttggatgtcatcgttactgaccaccacttgccggccgagaccgtgcccgactgcatcatcgtcaatccgaaccaaaaaggctgcggttttccaagcaaaagcttggcgggcgtgggcgtgattttttatgtattgatggcgttgcgtgccgaattgcgccgccgcaattatttttcagacggcatcaaagagccgaatttgggcgaacttttggatttggtcgcactcggcacggttgccgatgtcgtccctctcgaccacaacaaccgcatcctcgtgtcgcaaggtttgaaacggatgcgctccggcaaaatgcgccccggtatccgcgccttgtttgaagtggcgcggcgcgattggcgcaaggcgcagccgtttgatatgggttttgcgttgggcccgcgcatcaacgccgccggacggctggacgatatgtcggtcggcatcgcctgcctgttggcgcgagatgattccgaagctcaggaactggcggctcagttaaacaacctcaatatcgagcgccgcgaaatcgagcagtctatgctgcaagacgcactgaatgatttccccgaaaccctgccttcaggtcagatgactttggtggcgtatcgcgacgacttccatcaaggtgtggtcggcattgtcgccagccgcctcaaagaccgtttttatcgtccgaccatcgtgtttgcgcctgccgacaacggcgaagtacgcggttcgggacgttccattcccaatttgcacctgcgcgatgctttggacttggtgtccaaacgccatcccgatttgattttgaaattcggcggacacgcgatggcggcgggtttgagcatacttgaacacaacattcccgcgtttcagacgacctttgaagaagccgtgcgcgaaatggtgtgcgaagacgatttgtcgcaaaccttcatcaccgacggcagcctgcccgcctgcgacatcacgttggaacaggcgcaaaaccttgcccgtcacgtttgggggcagggcttcgcgccgccgagctttaccgacgagttccacgtcgtccgccagcaacctttgggcgcggagggcaaacacaaaaaagtctggctgcaaaaagacggctgcgaatttgaagcgatgttttggcgttgcagcgaagacattcccgaatacatccgcacggtttaccgccccgttgccaacgaatggcgcaacaatctcgaattgcagctgtatatcgattactgggaagccgcgtag

SEQ ID NO: 42710 - DNA, 609 bp, Neisseria meningitidis
atgaaacccaaaccgcacaccgtccgcaccctgattgccgccattttcagccttgcccttagcggctgcgtcagcgcagtaatcggaagcgccgccgtcggcgcgaaatccgccgtcgaccgccgaaccaccggcgcgcaaaccgacgacaacgttatggcgttgcgtatcgaaaccaccgcccgttcctatctgcgccaaaacaaccaaaccaaaggctacacgccccaaatctccgtcgtcggctacaaccgccacctgctgctgctcggacaagtcgccaccgaaggcgaaaaacagttcgtcggtcagattgcacgttccgaacaggccgccgaaggcgtgtacaactatattaccgtcgcctccctgccgcgcactgccggcgacatcgccggcgacacttggaacacatccaaagtccgcgccacgctgttgggcatcagccccgccacacaggcgcgcgtcaaaatcgttacctacggcaacgtaacctacgttatgggcatcctcacccccgaagaacaggcgcagattacccaaaaagtcagcaccaccgtcggcgtacaaaaagtcatcaccctctaccaaaactacgtccaacgctga

SEQ ID NO: 42711 - DNA, 705 bp, Neisseria meningitidis
atgggatttccgatgctcggtacaaccgcattggcttttatcatgccattgtctaaggttgttgccttggtggcattaccaagcctgttaatgagcttgttggttctatgcagcaataacaaaaagggtttttggcaagagattgtttattatttaaaaacctataaattgcttgctatcggcagcgtcgttggcagcattttgggggtgaagttgcttttgatacttccagtgtcttggctgcttttactgatggcaatcattacattgtattattctgtcaatggtattttaaatgtatgtgcaaaagcaaaaaatattcaagtagttgccaataataagaatatggttctttttgggtttttggcaggcatcatcggcggttcaaccaatgccatgtctcccatattgttaatatttttgcttagcgaaacagaaaataaaaatcgtatcgtaaaatcaagcaatctatgctatcttttggcgaaaattgttcaaatatatatgctaagagaccagtattggttattaaataagagtgaatacggtttaatatttttactgtccgtattgtctgttattggattgtatgttggaattcggttaaggactaagattagcccaaatttttttaaaatgttaatttttattgttttattggtattggctctgaaaatcgggcattcgggtttaatcaaactttaa

SEQ ID NO: 42712 - DNA, 1452 bp, Neisseria meningitidis
atgaatttgcctattcaaaaattcatgatgctgtttgcagcagcaatatcgttgctgcaaatccccattagtcatgcgaacggtttggatgcccgtttgcgcgatgatatgcaggcaaaacactacgaaccgggtggtaaataccatctgtttggtaatgctcgcggcagtgttaaaaagcgggtttacgccgtccagacatttgatgcaactgcggtcagtcctgtactgcctattacacacgaacggacagggtttgaaggtgttatcggttatgaaacccatttttcagggcacggacatgaagtacacagtccgttcgatcatcatgattcaaaaagcacttctgatttcagcggcggtgtagacggcggttttactgtttaccaacttcatcgaacagggtcggaaatccatccggaggatggatatgacgggccgcaaggcagcgattatccgccccccggaggagcaagggatatatacagctattatgtcaaaggaacttcaacaaaaacaaagactaatattgtccctcaagccccattttcagaccgttggctaaaagaaaatgccggtgccgcctctggttttttcagccgtgcggatgaagcaggaaaactgatatgggaaagcgaccccaataaaaattggtgggctaaccgtatggatgatgttcgcggcatcgtccaaggtgcggttaatccttttttaatgggttttcaaggagtagggattggggcaattacagacagtgcagtaagcccggtcacagatacagccgcgcagcagactctacaaggtattaatgatttaggaaaattaagtccggaagcacaacttgctgccgcgagcctattacaggacagtgcttttgcggtaaaagacggtatcaactctgccaaacaatgggctgatgcccatccaaatataacagctactgcccaaactgccctttccgcagcagaggccgcaggtacggtttggagaggtaaaaaagtagaacttaacccgactaaatgggattgggttaaaaataccggttataaaaaacctgctgcccgccatatgcagactttagatggggagatggcaggtgggaataaacctattaaatctttaccaaacagtgccgctgaaaaaagaaaacaaaattttgagaagtttaatagtaactggagttcagcaagttttgattcagtgcacaaaacactaactcccaatgcacctggtattttaagtcctgataaagttaaaactcgatacactagtttagatggaaaaattacaattataaaagataacgaaaacaactattttagaatccatgataattcacgaaaacagtatcttgattcaaatggtaatgctgtgaaaaccggtaatttacaaggtaagcaagcaaaagattatttacaacaacaaactcatatcaggaacttagacaaatga

SEQ ID NO: 42713 - DNA, 1515 bp, Neisseria meningitidis
ttgtatttcagatacggctttttggttgtttggtgtgcggcaggtgtttctgccgcctatggggcggatgcgcccgcgattttggatgacaaggcattgttgcaggtgcagcggtcggtgtcggataagtgggcggaatcagattggaaagttgaaaatgatgccccgcgcgtggttgacggggattttttgttggcacatccgaaaatgttggaacatagtttgcgcgacgcgctcaacggcaatcaggcggatttaatcgcttcgttggcggatttgtatgccaagctgccggattatgacgcggttttgtacggcagggcgcgggctttgctggcgaaattggcgggaaggccggcggaggcggtggcgcggtatcgggaactgcacggggaaaatgcggcagacgagcggattttgctggatttggcggcggcggagtttgacgatttccgactgaagtcggcagaaaggcattttgcggaggcggcaaaattggatttgccggcaccggttttggaaaatgtggggcgttttcggaaaaaaacggaggggctgacgggctggcgtttttcgggcggcatcagtccggcggtcaatagaaatgccaataatgccgcgccgcaatattgccggcaaaacggaggccggcagatatgcagtgtcagccgggcggagcgggcggcagggttgaattatgaaatcgaggcggaaaagctgacgccgttggcagataatcattatttgttgttccgttccaatatcggcggcacgagctattatttcagtaaaaaatcagcttatgatgacgggttcggcagggcgtatttgggttggcagtataaaaatgcacggcagacggcggggattttgccgttttatcaggtgcagttgtcgggcagcgacggctttgatgcgaaaacaaaacgggtaaacaaccgccgcctgccgccgtatatgctggcgcacggagtcggcgtgcagctgtcccatacttaccgcccaaacccgggatggcaattttcggtcgcgctggaacattaccgccaacgctaccgcgaacaggatagggcggaatacaataacggcaggcaggacgggttttatgtttcgtcggcaaaacgtttgggcgaatcggcaactgtgttcggcggctggcagtttgtgcggtttgtgccgaaacgcgaaacggtgggcggcgcggtcaataatgccgcctaccggcgcaacggtgtttatgccggttgggcgcaggagtggcggcagttgggcggtttgaacagtcgggtttccgcgtcttatgcccgccgcaactataagggcattgcggctttctcgacagaggcgcaacgcaaccgcgaatggaatgtctcgctggctttgagccacgacaagttgtcgtacaaaggtatcgtgccggcgttgaattatcgtttcggcaggacggaaagtaatgtgccgtatgcgaaacgccgcaacagcgaggtgtttgtgtcggcggattggcggttttga

SEQ ID NO: 42714 - DNA, 618 bp, Neisseria meningitidis
atggtcattgcagccattatggcgatgatagccctccccaatatgagccaatggattgcatcccgccgcattgccagtcacgcggagcggattgccaaccttttgcgtttctccaggggcgaagccgtccggctcaatctccctgtctatatctgtcctgttcaagttaaaaaagacggtacgcccaacaataaatgtgactccggcaagaaggggcagggaatgttggctttcggcgacaaaaacggcaataagggatatgacaatgatacggaggatgttcttctccgcagtgtggtattgaatgatgatatcaatgataagcggattaattatgccttcaaccatatcgctttcggtcagactcagccgaccaccgaccgtgtagtttggacattcaatcaaaacgggacgttcggttatacgaaagaccagcatcttacaaaacaatccagctttttttattctgacggttatatccaaatcgtgttgacagatgcgaaggcggtttctgccgatgaaaagaaattccgttcggcggtggttttgattaacagcagcggcagggtcgaagtttgccctaggggtgatcggcgtactatgtgccagtataaataa

SEQ ID NO: 42715 - DNA, 201 bp, Neisseria meningitidis; identical to SEQ ID NO: 41439

SEQ ID NO: 42716 - DNA, 252 bp, Neisseria meningitidis
atgggcagcatcgaacagcgtttggaatatctggaagaggcgaacgacgtgctgcgtatgcagaaccacgtcctgtccaccgcattcaaagccttaatccgcgcccttcccgccgaaaccgccgaaatcgcggtcgagtcgattcagcttgcttttgaggacgccttggcagaattgagctatgaggacagcccgcatacggatttgttccacgacgttacttatgcgtttttccgtgaaaaagaacgttaa

SEQ ID NO: 42717 - DNA, 1224 bp, Neisseria meningitidis
atgaaaacggtagtctggattgtcgtcctgtttgccgccgccgtcggactggcgctggcttcgggcatttacaccggcgacgtgtatatcgtactcggacagaccatgctcagaatcaacctgcacgcctttgtgttaggttcgctgattgccgtcgtggtgtggtatttcttgtttaaattcattatcggcgtactcaatatccccgaaaagatgcagcgtttcggttcggcgcgtaaaggccgcaaggccgcgcttgccttgaacaaggcgggtttggcgtattttgaagggcgttttgaaaaggcggaactagaagcctcacgcgtgttggtcaacaaagaggccggagacaaccggactttggcattgatgctgggcgcgcacgccgccggacagatggaaaacatcgagctgcgcgaccgttatcttgcggaaatcgccaaactgccggaaaaacagcagctttcccgttatcttttgttggcggaatcggcgttgaaccggcgcgattacgaagcggcggaagccaatcttcatgcggcggcgaagatgaatgccaaccttacgcgcctcgtgcgtctgcaacttcgttacgctttcgacaggggcgacgcgttgcaggttctggcaaaaaccgaaaaactttccaaggcgggcgcgttgggcaaatcggaaatggaacggtatcaaaattgggcataccgccgccagctggcggatgctgccgatgccgccgctttgaaaacctgcctgaagcggattcccgacagcctcaaaaacggggaattgagcgtatcggttgcggaaaagtacgaacgtttgggactgtatgccgatgcggtcaaatgggtcaaacagcattatccgcacaaccgccgccccgagcttttggaagcctttgtcgaaagcgtgcgctttttgggcgagcgcgaacagcagaaagccatcgattttgccgatgcttggctgaaagaacagcccgataacgcgcttctgctgatgtatctcggtcggctcgcctacggccgcaaactttggggcaaggcaaaaggctaccttgaagcgagcattgcattaaagccgagtatttccgcgcgtttggttctagcaaaggttttcgacgaaatcggagaaccgcagaaggcggaggcgcagcgcaacttggttttggaagccgtctccgatgacgaacgtcacgcagcgttagagcagcatagctga

SEQ ID NO: 42718 - DNA, 1794 bp, Neisseria meningitidis
atgcaattagatatagaccgcttggttgcttatttcggcggcgtgaacgcgcttgccgaagcgttgaaacagcacgatcccgaaaatgccgcgacgaccgccgccatctataaatggcgcacgcgcgggtcgctgcctttggcgcaactgcaaaagctgaccgcgcttgccgaatcgcaaggcaggccgctggatttgaatgcttttttacaaaaaaacgaatctctggagagaacagaaatgacacaggccaaccgcgttatcattttcgacaccaccctgcgcgacggcgaacaatcgcccggcgccgctatgaccaaagaggaaaaaatccgcgtcgcccgccagctggaaaaattgggtgtggacatcatcgaagcgggttttgccgctgccagcccgggcgatttcgaggcggtcaatgcgattgcgaaaaccattaccaaatcaacggtctgttcattgtcccgtgccatcgagcgggacatccgtcaggcgggtgaggccgttgcgcccgcgccgaaaaaacgcatccacaccttcatcgccaccagccccatccatatggagtacaaattgaagatgaagccgaagcaggtgattgaggcggcggtcaaagcggtgaaaatcgctcgtgaatacaccgacgatgtggaattttcctgcgaagacgcgttgcgttcggaaatcgatttccttgccgaaatctgcggcgcggtaattgaagcgggcgcgaccaccatcaatattcccgataccgtcggctattcaatcccgtacaaaaccgaagaatttttccgcgaactgattgtcaaaacgcccaacggcggcaaagtcgtttggtcggcacactgccacaacgatttgggcttggcggttgccaattcgcttgccgcattaaaaggcggtgcgcgtcaggtggaatgtactgtcaacggcttgggcgaacgtgcaggcaatgcttcggttgaagaaatcgtgatggcgttgaaagtgcgccacgacttgttcggcttggaaaccggcatcgataccacgcaaatcgtgccttcgtccaaactggtgtccaccattacgggctatcccgtgcagcccaacaaagccattgtcggtgccaatgccttttcgcatgaatcgggcatccatcaggacggggtgctgaaacaccgcgaaacttacgagattatgtccgccgaatcggtcggctgggcaacaaaccgtttgagcttgggcaaattgtccggccgcaacgccttcaaaaccaagctggcggatttgggcatcgagttggaaagcgaagaggcactgaacgcggcatttgcacgcttcaaagaactcgccgacaaaaaacgcgaaatcttcgatgaagacctgcacgcgctggtgtcggacgaaatgggcaatatgaataccgaaagctacaaattcatttcccaaaaaatcagtaccgaaaccggcgaagagccgcgcgccgacatcgtgttcagcatcaaaggcgaagaaaaacgcgcttccgccacaggctccggccccgtggatgcgattttcaaagcgattgaaagcgtggcgcaaagcggcgcggctttgcagatttattccgtcaatgccgtcacgcaaggtacggaaagccaaggcgaaaccagcgtccgtttggcgcgcggcaaccgcgtcgtcaacggtcagggcgcggataccgacgttttggtcgctaccgccaaagcctacctttccgccttgagcaaactggaatttagtgccgccaaaccgaaagcgcaaggcagcggtacgatttga

SEQ ID NO: 42719 - DNA, 423 bp, Neisseria meningitidis
atgcgcccaatcttcctatctttcgttttattccctattttgataaccgcctgcagcacaccggacaagtctgcccgatgggaaaatatcggcacaatctcaaacggcaatattcatacatatatcaataaagacagcgtgagaaaaaacggaaatctgatgattttccaagataaaaaagttgttaccaatctaaaacaagaacgttttgccaacacccccgcatacaagactgccattgccgagtgggaaatccactgcaacaacaaaacataccgcttaagttcgctacagttgtttgatacaaaaaacacggaaatttccacacaaaactacacagcctcttccctccgcccgatgagcatcctgtccgggacattaaccgaaaaacaatatgaaaccgtatgcggaaaaaaactctga

SEQ ID NO: 42720 - DNA, 126 bp, Neisseria meningitidis
atggaaaacattaagacgctactttttttgaccgccgaaaccaacatccctggcaaagttattttggtctccggacgtaccgacgacacccgccacctcgttggtctccggcccgaaaatacctaa

SEQ ID NO: 42721 - DNA, 372 bp, Neisseria meningitidis
atgaaactcctcttcatcctcctagtcctcttcgtcgccgtcgaacatttctacatcgcctggcttgaaatgacacagattcccagcgaaaaagcggcggaaatattcaagctgccttatgaatttatggaacaaaagcaagtgcagaccttgttcagtaatcaagggctgtataacggctttctcggcatcgggctggtgtggtcgcggtttgccgcgccggacaacgccgtttacggcgcgacgactctgtttctcggtttcgtattgattgccgccgcgtggggcgcgttttcgtccggcaacaaaggcatactcgtcaaacaaggactgcccgcgatgctggcggcggcagcggtgttggcggtatga

SEQ ID NO: 42722 - DNA, 540 bp, Neisseria meningitidis; identical to SEQ ID NO: 36581

SEQ ID NO: 42723 - DNA, 1005 bp, Neisseria meningitidis
atgaccatcatcgtaacaggcgcggccggctttatcggcagcaacatcgtcaaagcacttaatcaacgcggtattactgacattgttgccgtcgataatttgagcaaaggcgaaaaattcaaaaaccttgccgagtgcgaaatcgcccattatctcgacaaacacgaattcatccgccaagtgagggaacacattttaccttatcaaaacatcgaagccgttttccatcaaggcgcgtgttccgatacgatgaaccacgacggtttgtatatgatggacaacaactaccagtacacgctggatttgctggactggtgtcaggacgaacgcatccccttcctttatgcctccagtgcggcggtttacggcaaaggagaaatcttccgcgaagagcgcgaactcgaaaaaccgctcaacgtgtacggctactccaaattcctgttcgaccaagtattgcgtcgccgcatgaaagaaggtctcaccgcccaagtcgtcggcttccgctacttcaatgtttacggacaacacgaacaacacaaaggccgcatggcatccgtcgccttccaccacttccaccaataccgcgaacacggttacgtcaacctgttcggcagtaacgacggctacggcaacggcgaacaaacccgcgacttcgtcagcgtcgaagacgttgccaaagtcaacctctacttcttcgaccatcccgaactttccggcatctacaacctcggtaccggccgcagccaacagttcaacgaactcgccgccgccaccgtcaacgcatgccgcgccgccgaaggcaaacctgaaatgagcttgaaagagttggtagaagaagaacttatccgctacattcccttccccgacgcgctcaaaggcaaataccaaagcttcacccaagccgacatcaccaaattgcgcgaagccggatataaggaagaatttttcgatgtcaaatcaggcgtcgaccgctacgtcaaatggatgctggaaaatttggcttaa

SEQ ID NO: 42724 - DNA, 198 bp, Neisseria meningitidis
atgagcaaaatcaaagtaacggcggcagatggcctgcgtgtgccgaccgaacacaacccgcacgaatatatcggccaagagccggtggaggtggacggcaacagcctgtattaccgccgcatgattgatgacggcgatttggtggtggttgaggatgccgccccaaataccaaaacccgcaatactaagggagagtaa

SEQ ID NO: 42725 - DNA, 1050 bp, Neisseria meningitidis
atgtcatctaaccaatatatccagtcgcttgagttgacaaactttaccgttcttccaaacgatacttttgaattttctgaaaatctcaatgttattgttgccgaaaacggttgtggcaaaacacatttgttaaaaattttatacagcctgctagaagtaacatctaacaccaaaaacagattactgaaaacagaattgcaaaaaagttttgccgataaattactgaatgttttccgtcccgattccttgggtaggttgagcaaacgtttgcaggggcgcgggcgtacggaaatcgttttaaaactgcaaaacggcactacgcatagtagtctgaatttttccagtaactcatcatcgcaagtcaatgttcaaagcatcggattgaaagaaaatgaatatactccgacacctatcttcttacccagccgcgaattaattacactttgcccttggttcacttctttgtatcaaaaccaaagcatccctttcgaagaaacttggtttgatacctgtatgcaattaaatcacccgcttgccaaaggccccagagaaacaaaaattcgagaattgctcgaacctattgagaacgcgatgggcggaaaagtatctgaagaacaaggaaggttttatctatcgctgacaaatacgggcggtaagattgaagcacctttggtagcagagggtttgcggaaatttgtcatgattgcccggttaatcgcaacaggggcattgctggataaaggctatctattttgggatgaaccggaagctaatctgaatcctaaattgatcaaagtggctgcccgtattatttggtctttatctcaacagggtattcaggtttttattgcaacacactctttattcttattgagagaattggaacttttgaagcttgaaaataacacggatttacctgtacgttttttctcgttgattgcttccgatgatggaacaaaagtggagcaagggaacagtattaatgatttgaacacattgatattgttagatgaaaacattatgcaggcagacaggtatctgaatatttga

SEQ ID NO: 42726 - DNA, 183 bp, Neisseria meningitidis; identical to SEQ ID NO: 39725

SEQ ID NO: 42727 - DNA, 369 bp, Neisseria meningitidis
atgcgtcattacgagatcgtgtttatcgttcatcccgatcaaagcgagcaagtacccgctatggttgaacgttacaaaaccatgattgccgaagcaaacggtaagattcaccgtctggaagactggggtcgccgccagctggcttacccgattaacaaaatccataaagcccattacgttttgatgaacatcgaaaccactcccgaagtggttgaagagctggaaaccgcattccgcttcaatgatgcagtattgcgtcatctgaccatcaaaaccaaacacgccgttaccgaagcatcccctatgttgggtggtgaaaaggctaagaacctgttgagcggtgcgtctgaagaagcggtcgcccaataa

SEQ ID NO: 42728 - DNA, 234 bp, Neisseria meningitidis; identical to SEQ ID NO: 36270

SEQ ID NO: 42729 - DNA, 567 bp, Neisseria meningitidis
atgctggttcatcccgaagctatgagtgtcggcgcgcttgccgacaaaatccgcaaaatcgaaaactggccgcaaaaaggcatcttattccacgacatcacgcccgtccttcaaagcgcggaatacttccgccttttggttgatttattggtttaccgctatatggatcagaaaatcgacatcgttgccggtttggacgcgcgcggcttcattatcggcgcggcactcgcctaccagctcaacgtcggtttcgtccccatccgcaaaaaaggcaagctgccttttgaaaccgtatcgcaaagctacgcgctcgaatacggggaagctgcggtggaaatccacaccgatgccgtcaaactcggttcgcgcgtgctgctggtcgatgatttgattgccacgggcggcacgatgcttgccggactggaactgatccgcaaactcggcggagaaattgtcgaagccgccgccattttggaatttaccgaccttcaaggcggcaagaatatccgtgcaagcggcgcgcccttatttaccctgcttcaaaacgaaggctgtatgaagggctga

SEQ ID NO: 42730 - DNA, 1533 bp, Neisseria meningitidis
atgtgttgttctcttagttttgcagaaccagcaagaatagatgatcgaataataaaatttaggccatctaaattaaagttttttgaatctacaggatatagaaaaatcaataatgaattttctaaattcacagaagcggcaaatgtcgaacatatccccacgggcgcaaaagcccgaatcaacgcaaagataaccgccagcgtatcccgcgccgccgtcttgtcaggagtcggcaaacttgcccgcttaggcgcgaaattaagcacaagggcagttccttatgtcggaacagcccttttagcccatgacgtatacgaaactttcaaagaagacatacaggcacaaggctaccaatacgaccccgaaaccgacaaatttgtaaaaggctacgaatatagtaattgcctttggtacgaagacaaaagacgtattaatagaacctatggctgctacggcgttgacagttcgattatgcgccttatgtccgatgacagcagattccccgaagtcaaagaattgatggaaagccaaatgtataggctggcacgtccgttttggaattggcataaagaagaactgaataaattaagttctttggattggaataattttgttttaaatagttgcacatttgattggaacggcggagattgtgtggtcaataaaggtgatgattacagaaatggggctgatttttcccttattcgcaattcaaaatacaaagaagaaatggatgccaaaaagctggaagagattttatcgttgaaagtcgatgccaatcccgacaaatacataaaggaaaccggttatcccggttattccgaaaaagtagaagtcgcacccggaacaaaagtgaatatgggtcccgtcacggacaggaacgggaatcccgttcaggttgtcgcaacattcggcagggattcgcaaggcaacaccacggtggatgttcaagtaatcccgcgtcccgacttgacccccggaagcgcggaagcaccgaacgcacagccgctgcccgaagtatcgcccgccgaaaaccccgcaaacaacccgaaccccaatgagaaccccggcacgagccccaatcccgaacccgaccccgatttgaatcccgatgcaaatcccgatacggacggacagcccggcacaagacccgattcccccgccgttccgggacgcacaaacggcagggacggcaaagacggaaaggacggcaaagatggcggccttttgtgcaaattcttccccgacattctcgcttgcgacaggctgcccgagtccaatccggcagaagatttaaatctgccgtctgaaaccgtcaatgtagagtttcagaaatcaggaatctttcaagattccgcacagtgtcccgcacctgtcactttcacagtgactgtgcttgattcaagcaggcagttcgcgttcagctttgagaacgcatgtaccatagccgaacggctaaggtacatgcttctcgcccttgcttgggcggttgccgcctttttttgtatccgcacagtatctcgtgaagtctag

SEQ ID NO: 42731 - DNA, 258 bp, Neisseria meningitidis
atgaaacccagaaatctcttttttgcaggctgcctgctgacttcggcgacgtttgccgaggatatcggcgtacctgtcgaactgattaacgtcggtaatcggattgcgatgccgtctgaaggggaaagcctcgccctcctgccgtttgccgaggatgtaccgccggttcgcgatgcaatgccgtctgaagttcctaaaagcgcggcaggcggcgatgttcggggtgaccggatgagaatgccgattaacatcggatga

SEQ ID NO: 42732 - DNA, 1155 bp, Neisseria meningitidis
atgaaattcatcgacgaagcaaaaatcgaagtcgccgcaggcaaaggcggtaatggcgcaaccagtttccgccgcgaaaaattcgtaccgcgcggcggcccggacggcggcgacggcggcaaaggcggcagcgtctgggcagaagccgacgaaaacaccaacaccctcgtcgaataccgcttcgttaaacgctaccaagccaaaaacggcgaaaaaggccacggttccgaccgttacggcgcaggtgcggacgacatcgtcctcaaaatgcccgtcggcacccttatccgcgacctcgacaccggcgaaaccgttgccgacctcacttatcacggacagcgcgtctgcctcgccaaaggcggcaaaggcggcttgggcaacatccacttcaaatcgtccgtcaaccgcgccccgaaacaatccacccccggcgaagaaggcgaagcccgttccctgcaactcgaacttaaagtcctcgccgatgtcggcttattgggtatgcccaacgccggcaaatccaccctgattaccgccgtatccgccgcacgccccaaaatcgccaactaccccttcaccaccctgcatccaaacttaggcgtggtacgcatcgacgaaaaccacagcttcgtgatggccgacatccccggcctgattgaaggcgcggcagaaggcgcaggcctcggccatcgtttcctcaaacacttatcacgtaccggcctgctgctgcacgtcgtcgatttggcgcccttcgacgaaaccgtcaaccccgccgaagaagcactcgccatcatcaacgaattacgcaaatacgacgaagaactctacggcaaaccgcgctggctggtactgaacaaactcgatatgcttgacgaagaagaagcccaaacgcgcactgccgccttcctcgaagccgtcggctgggactaccccaaacccgacgaccgtttccaatttgacatggaaaccccgcgcctcttccaaatcagtgcgctgacccaccaaggcacgcaggaattggtacaccaaatcaaccaatacctgaccgagaaaaaacgtatcgaagctgaaaaagcagaagcggagaaagcagcggcaaatgttgaaattatcgaacagcagcctaaaacggatacaggcgtgtttaagccggagtga

SEQ ID NO: 42733 - DNA, 1314 bp, Neisseria meningitidis
atgctgacgtttatcggactgctgattatcggggtcatcgtatggctgctgctgacggaaaaagtgtcgcccatcatcgcattaatcttggtgccgctgtttggggcgttgctggcggggtttgatgtatcccaattaaaagaattttattcgggcggcaccaaatcggtgatgcagattgtgattatgtttatgttttccattttgttttttggaatcatgaacgatgtggggctgttccgtccgatgataggcggtttgattaagctgactcggggtaatatcgtggcagtgagtgtggggacggtcttggtgtcggtggtggcgcagttggacggggcgggtgcgacgacgtttttattggtcgtccccgcccttttgccgctttacaagcgtctgcatatgaatccttacctgctgtttttgctgctgacttccagtgcgggattgattaaccttctgccgtggggcgggccgaccgggcgggttgcaagcgtgttgggcgcagatgtgggcgaattgtataaacctttgttgacggtgcaaattatcggtgtggtgtttatccttgcgctgtccctgcttttgggtgtgcgtgaaaaaaggcggattgtccgggagttgggcgcgttgcccgccgtggcggatttgataaagccggtgcctttgtcggaagaagaacaaaaattggcgcgtccgaaactgttttggtggaatgtcctgctgtttttggcggcgatgagcctgcttttttcgggcatcttcccaccgggttatgtatttatgctggctgcaacggcggcgttgcttttgaattaccgcagcccgcaggaacagatggagcggatttatgcccacgccggcggcgcggtgatgatggcgtccattattttggcggcaggtacgtttttggggattttgaagggtgcggggatgttggacgcgatttccaaagacattgtgcatatcctgccggacgcgctgctgccttatctgcatattgccatcggtgtgttgggcattccgcttgagttggttttgagtacggacgcttattatttcggactgtttccgattgtggagcagattacctcgcaggcgggcgtggcgcccgaagcagcaggttatgcgatgttgatcggcagtatcgtcggcacttttgttacgccgctttcgccggctttgtggatgggcttgggtttggcgaaattgtcgatgggcaaacacatccgttattcgtttttctgggcgtggggtttgtcgctggcgatattggccagttcgatagcggcaggaatcgtgcctctgccgtaa

SEQ ID NO: 42734 - DNA, 276 bp, Neisseria meningitidis
atgaccgaacaaaaaaacaaaacatccctcatcgaatttccctgcaccttcccattgaaagtaatgggcgcggtgcatcccgagttcgagcaggcggttttagacaccgtccgcctccacgcccccgacacgcaggcgcaccacatcaccacgcgtccgagcagcaaaggcaactatactggcgccaccgtacaggtaaaggttgaaaaccaagaacaattggacaacatctaccgtgcgctgacttcgcacgaactggtcaaagtggtactttga

SEQ ID NO: 42735 - DNA, 1371 bp, Neisseria meningitidis
atgttagacaatttaaccggccgcttcagcaatgtcttcaaaaacatccgggggcaggccaaactgaccgaagacaatattaaagaggccttgcgcgaagtccgcctcgccctgcttgaggcggatgtcgccctgcctgtcgtcaaagagttcatcaacaacgtcaaagaaaaggccctcggtcaggaagtagcgggcagcctgacgccggatcaggcatttatcggcgtggtcaacaaagccctgaccgaactgatgggcagggaaaacaaaacgctggatttgtcggttgcgccgcccgccgtcgtgttgatggcaggtttgcagggcgcaggcaagacgacgaccgtcggcaaactcgcccgcctgttgaaaaacgatcagaagaaaaaggttttggtggtatccgccgacgtttaccgtcctgccgcgattgaacagctgcgtctgttggccgaacaggtcggcgtggattttttcccgtccgataccaaccaaaaaccggttgaaattgcaactgccgccgtcgattacgccaaaaaacatttttacgatgtattgatggtcgataccgccggccgtttggcaatcgatgaagagatgatgaacgaaatcaaagcccttcacgcggcggttaacccggtggaaactttgttcgtcatcgatgcgatgctgggtcaggatgcggtgaacactgctcaggcatttaatgaagccctgccgctgaccggagtcgtattgaccaagatggacggcgactcgcgcggcggtgcggcattgtccgtacgccacgtaaccggcaaaccgattaaatttatcggtgtcggcgaaaaaatcaacggcctcgaacctttccaccccgaccgtcttgccggccgcattttgggtatgggcgacgtattgaccctgattgaagacgttcaaaaaggtatagacgaagaagccgccgctaaaatggcgaaaaagctgcacaaaggcaaaggcttcgacctcaacgactttaaagaacaaatccagcaaatgcgcaatatgggcggtttggaaaacctgatgtcgaaaatgccgggcgaactgggtcaaatctcgaaacaaatccccgaaggaacggctgaaaaagcgatgggcaaagtagaagccatcatcaactcgatgacccctaaagaacgcgccaaccctgccctgctcaaagccagccgcaaacgccgtattgcaatgggtgcgggcacaaccgtgcaggaagtgaacaaattgctcaaacagtttgaacaaatgcaacaaatgatgaagatgttcagcggcaacggcttgggcaaactgatgcgtatggcgaaaggaatgagggggataaaagggatgttcccgggtttgtaa

SEQ ID NO: 42736 - DNA, 1380 bp, Neisseria meningitidis
atgttcgctttcaaatccttactcgatatgccgcgcggtgaggcacttgccgtcgtcgtcgctctgattgccgcgatgggctataccatcatttcattggagtggttgccgcatatgtccattattgccgccatcgtcgtgctgattttgtacggcttggcgcgcggtttgaaatacaacgatatgcagcagggcatgataggcgcgttgaatcagggtatgggcgcgatttacctgtttttcttcatcgggctgatggtcagcgcgctgatgatgagcggcgcgattccgacgctgatgtattacggtttcggactgatttccccgacttatttttatttttcctccttcgcgctgtgttccgtcatcggcgtgtccatcggcagcagcctgaccacctgcgccactgtcggcgttgcctttatggggatggcggcggcgtttcaggccgatatggcgatgacggcgggcgcgattgtttcgggcgcattttttggcgacaaaatgtccccgctttcggatacgacgggtatttccgcgtccatcgtcggcatcgacttgtttgagcacatcaaaaatatgatgtacaccaccatccccgcgtggctcattagtgcggcactgatgctttggcttttgccgaatgtcgccgcgcaggatttgaacagcgtcgaatccttccgcagccagcttgaagccacgggattggtgcacggctattcgctgattccgtttgcgctgttggtcattttggcattgatgcgcatcaacgccgtcgtcgccatgctctttaccgtcatggttgccgttgctgtaacgtatctgcacagcacgcccgatctgcgtcagctcggtgcgtggttttacggcggctacaaactcgaaggcgaagcgtttaaagatgttgtcaaactgatttcgcgcggcggtttggaaagtatgtttttcacgcaaaccatcgtgattctcgggatgagtttgggcggactgttgtttgcgctcggtgtgattccttccctgttggaggccatccgtaccttcttgacgaatgccggacgcgcgacgttcagcgttgccatgacttcggtcggggttaatttcctgatcggcgagcaatatttgagtattttgttgtcgggtgaaacgttcaaacccgtttacgataagctcggtctgcattcgcgcaatctgtcgcggacgctggaagatgcggggacggtgattaacccgctcgtaccgtggagcgtatgcggcgtgttcatcagccacgcgctgggcgtgccggtttgggaatatctgccgtatgcctttttctgctatttgagtttggctttgaccctgttattcggttggacggggctgactttgagcaaaaaataa

SEQ ID NO: 42737 - DNA, 636 bp, Neisseria meningitidis
atgattgtttccattgatgttgatgcacaaaaaacgtttacgccactgtgtcctgacgaactgcccgtgaacgaggggcatttgattgtcgaggagttgaatgcgcaagccgctttggcggatttgcgcgtgatgacgaaagatgcgcatcatatggtagcgaaatggcttgtggataaccctgttgatatgttgaagccgacaggtttgcctgatgcggatttgacttgggtggctcatgcgatggtcggtacgcgcggctatgaattattggacgggctgccttctgctaaagaatacgattattgcgtttggaaaggtgttgatcctgaattgcatccttacggcgcgtgttttcacgatattgaggaaaaactaagcacagggctgattgaatggctgcgttgtcaaaatacggatacggttattatcggtgggttagctacggattattgtgttaaaacaacggttttgcagttactcaaaggcggtcgttggcaggttgtcgtcaatgaagcggcttgtcggggtattgcgccggaaaccatcgaaacagcatggcaggaaatgcattctgctggggcaatcatcttaaaaaacgctgatgaaataaataaatatattaataatcaataa

SEQ ID NO: 42738 - DNA, 930 bp, Neisseria meningitidis
atgattcacgtttcggcagtgcaggcaccggcgcatattcaggataccggacgctacggacaccggcgttacggcatcggtcatgccggtgcgatggacacggttgctttggcggcgggcaatattttattgggcaacgacgaaggcacggccgcaatcgaaatcgctttgggcgggataatgctggtgtttgaacgggatacgccgttttgtctcaccggtgccgtgtatcaggcggaattggacggcgaaccggtctattcgtattggcgttataccgcccgcaaagggcagaccttgaaactggtgcgtgccgtgcagggcatgtacggctatgtgtgcgtggcgggcggatttgatgtgccggaagtgatgggttcgagaagcaccgacctgaaagccggtttcggcggccatcagggcagaatgctgcaaaaaggcgattatctccccatcggcaaaggtgcgcaggaattgtccaaagtcggcattgccccgataccgtttaccgataccgtccaccttgttccttcgtcggaatatgccgctttcagtgaaaaagggcgtctgaatctggaacgggaaacgtggacgctgcaaagcgatagcaaccgcatgggctaccgcttcgacggacagccgctgaccctgtcgcaacctttggaaatgctgtcccacgctgttcaggcaggaaccgtgcaggtgccgcccggcggcaaaccgattatcctgctggccgatgcgcaaaccaccggcggttatccgaaaatcgctaccgttgccgccgccgatttgggcaggctggcacaggtgcgcttcggcagcaaagtcaaattcaaaataatcggcttgaaagaagccaccgccctgcggcgcaaaaaccaagcctatctgaaccaaatacggagaatcacccatgaagcaggttga

SEQ ID NO: 42739 - DNA, 1362 bp, Neisseria meningitidis
atgctgaaaaaagttttaatcgccaaccgaggcgaaatcgcattacgcgtactccgtgcctgccgcgaaatgggcattgccaccgtcgccgtgcattccgaggccgacaaagacagcctgcacgtcaaactcgccgacgaatccgtgtgcatcggccctgccgcttccgcgcaaagctaccttaacgtccccgccattatcgccgccgccgaagtaagctgcgcggacgctgtccatccgggttacggtttccttgccgaaaacgccgatttcgccgaacaggtcgagcagtccggctttacctttatcggcccgaaacccgacaccatccgcctgatgggcgacaaagtctccgccaaacacgcgatgatagcggcaggcgtaccctgcgtccccggttctgacggcgcattgcccgacgacggcgaagaaatcctcaaaatcgccgataaagtcggttatcccgtcattatcaaagcctctggcggcggcggcggccgcggtatgcgcgtggtcgagaaaaaagaagacctcctccaatctgtcgaaatgaccaaagccgaagcaggcgcggcattcggcaacccgatggtttacatggaacgctatttgcaacgtccgcgccacgtcgaaatccaagtgattgccgacgaacacggcaacgccatctaccttgccgagcgcgactgttcgctgcaacgccgccaccaaaaagtcatcgaggaagcaccggctccgttcatcactgaaaaagaacgcgccaaaatcggcaacgcctgtgccgatgcctgcaaacgcatcggctaccggggcgcgggtacgtttgagtttttatacgaagacggcgaatttttctttatcgagatgaacacgcgcgttcaggtcgagcatccggttaccgagctcatcaccggcgtggacatcgtgcaggagcaactccgcatcgccgccggcctgcctttgcaatacaaacaaaaggatattcaagtcgaaggccacgcgtttgagtgccgtatcaacgccgaagacccgtacaacttcattccaagcccgggcctgattgaaagctgccacctgcccggcggcttcggtatccgcgtggacagccacatttaccaaggctaccgcatcccaccgtactacgacagcctgatcggcaaaatctgcgtacacggcaaaacgcgtgaacaggcaatggcgaaaatgcgcgtcgcactcgccgagctggcggtaaccggcatcaaaaccaatacgccgcttcaccgcgacctgttcgccgatgcgggtttccaaaaaggcggcgtcagcatccactatttggaacactggctggaagatcgcaaagccaaacaggacaagtaa

SEQ ID NO: 42740 - DNA, 465 bp, Neisseria meningitidis
atgtttaccatcgttttataccagccggaaatcccgccgaacacgggcaacatcatccgcctgtgcgccaataccggcgcggatttgcaccttgtcaaaccgctcggcttcccattggattccgccaaaatgaaacgcgccgggctcgactaccacgagttcgccagcctgacggtgcacgaaaacttcgacgactgcctcaaggcactcgcaggcaggcgcattttcgccctgaccaccaaaggcacggcgcgccccgatgaaaccgcgtttcaaaaaggcgacgttttactgttcgggccggaaacgcgcggactgcctgccgacatcctcgacagcctgcccgccgcgcaaaaaatccgcctgccgatgcagcccggcagccggagtatgaacctttccaacaccgtcgccgtgattctctttgaagcgtggcggcaacacggttacgcaggcggcgtttga

SEQ ID NO: 42741 - DNA, 780 bp, Neisseria meningitidis
atgcttaaaatcatttccgccaacgtcaacggcatccgctccgcctacaaaaaaggtttttacgaatacatcgccgcatcgggcgcggacattgtctgcgtgcaggaactcaaagcgcaggaggctgatttgtctgccgatatgaaaaatccgcacgggatgcacggtcattggcattgcgccgagaagcgcggttacagcggcgtggcggtgtacagcaaacgcaaacccgacaatgtgcaaatcggtatgggcattgaagaattcgacagggaagggcggtttgtgcgttgcgatttcggcaggttgagcgttatctcgctttatttgcccagcggcagcagcgcggaagaacgccagcaggtgaaataccgtttccttgatgcgttttaccctatgctcgaagcgatgaaaaacgaagggcgcgacattgtcgtctgcggcgactggaacatcgcccaccaaaacatcgacctgaaaaactggaaaggcaaccagaaaaattcaggtttcctgcctgaagagcgcgagtggataggcaaggttatccacaagctcggttggacggatatgtggcgcacgctttatcccgatgtgccgggctacacttggtggagcaaccgagggcaggcgtatgcgaaagatgtcgggtggcgcatcgattatcagatggttacgcccgaacttgctgccaaagccgtgtccgcacacgtttataaagatgaaaaattttctgaccatgcgccgctggtcgtggagtatgactatgctgccgaataa

SEQ ID NO: 42742 - DNA, 1524 bp, Neisseria meningitidis
  misc_feature 6, 7, 8, 9, 10: 'n' is a, c, g or t
gtgtgnnnnnccgtactctctgcccccggcggctatatcgttgatattccgaaaggcaatctgaaaaccgaaatcgaaaagctggccaaacagcccgagtatgcctatctgaaacagctccaagtagcgaaaaacgtcaactggaaccaggtgcaactggcttacgataaatgggactataagcaggaaggcttaaccagagccggtgcagcgattatcgcgctggctgttaccgtggttactgcgggcgcgggagtcggagccgcactaggcttaaacggcgcagccgcagcagcggccgatgccgcctttgcctcactcgcttctcaggcttccgtatcgctcatcaacaataaaggcgatgtcggcaaaaccctgaaggaactgggcagaagccgcacggtaaaaaatctggttgtagcggcggcaacggcaggcgtatccaacaaactcggtgcctcttcccttgccacttggagcgaaaccccttgggtaaacaacctcaacgttaacctggccaatgcgggcagtgccgcgctgatcaacaccgctgttaacggcggcagcctgaaagacaatctggaggcaaatatcctggcggcattggtgaataccgcgcatggggaggcggcgagtaagatcaaaggactggatcagcactatgtcgcccacaaaatcgctcatgccgtagcgggctgtgcggctgcagcggcgaataagggcaaatgtcaggacggcgcgatcggtgcggctgtgggtgagattgtcggggaggctttggttaaaaataccgattttagcgatatgaccccggaacaattagatctggaagttaagaaaattaccgcctatgccaaacttgcggcaggtacagttgcaggcgtaacgggaggagatgtcaatactgctgcacaaaccgcacaaaacgcggtagaaaataatgcggttaaagctgttgtaactgctgcaaaagtggtttataaggtagccagaaaaggattaaaaaacgggaaaatcaacgttagagatttaaaacagacgttgaaagacgaaggttataatttagccgacaacctgaccaccttattcgacgaaacattggattggaacgatgccaaagccgttattgatattgtcgtcggaacagagctgaatcgcgctaataaaggggaagcggcacaaaaggtcaaggaagttttagaaaaaaatcgtccttatatccctaataaaggtgctgtaccgaatatgagtacatacatgaaaaataatccttttggaaaacagctggctcaaatttcagaaaagacaacgcttccgacgcagcaagggcagtctgtcttcttggtaaaaagaaaccaagggttattaaaaaccggtgataggttttatttagatggccaacataaaaatcatttagaggtttttgataaaaatgggaactttaagtttgttctaaatatggatggttcgcttaaccaaatgaaaactggggcagcaaaaggtcgtaaattaaacttaaaatag

SEQ ID NO: 42743 - DNA, 747 bp, Neisseria meningitidis
gtgcagcctgaaacctccgcccaataccagcaccgtttcgcccaagccatacgcgggggcgaagccgcagacggtctgccgcaagaccgactgaacgtctatatccgcctgatacgcaacaatatctacagctttatcgaccgttgttataccgaaacgctgcaatactttgaccgcgaagaatggggccgtctgaaagaaggtttcgtccgcgacgcgtgcgcccaaacgccctattttcaagaaatccccggcgagttcctccaatattgccaaagcctgccgcttttagacggcattttggcactgatggattttgaatatacccaattgctggcagaagttgctcaaattccggatattcccgacattcattattcaaatgacagcaaatacacaccttcccctgcggcctttatccggcaatatcgatatgatgttaccgatgatttgcatgaagcggaaacagccttgttaatatggcgaaacgccgaagatgatgtgatgtaccaaacattggacggcttcgatatgatgctgctagaaataatggggttctccgcgctttcgtttgacaccctcgcccaaacccttgtcgaatttatgcctgaggacgataattggaaaaatattttgcttgggaaatggtcaggctggactgaacaaaggattatcatcccctccttgtccgccatatccgaaaatatggaagacaattccccgggccaaaaccatctatccgcataa

SEQ ID NO: 42744 - DNA, 4296 bp, Neisseria meningitidis
atgcgcttcacacacaccaccccattttgttccgtattgtccaccctcggtctttttgccgtttcccctgcttactcatccattgtccgcaacgatgtcgattaccaatattttcgcgactttgccgaaaataaaggcgcgttcaccgtaggtgcaagcaatatttccatccaagacaagcaaggcaaaatattaggcagggttctcaacggcatccccatgcccgacttccgcgtcagcaaccgccaaaccgccatcgccaccctggttcacccccaatacgtcaacagtgtcaaacacaacgtcggctacggttccatacaattcggcaacgacacccaaaatccagaagaacaagcctatacctaccgcctcgtatcacgcaacccgcacccggactacgactaccaccttccccgcctcaacaaactggttaccgaaatctcacctaccgcactcagcagcgtacccttgcttggaaacggccagccaaaggccaatgcctacctcgataccgaccgcttcccctactttgtacgactcggctcaggcacgcaacaagtccgcaaagcagacggcacgcgtacacgaaccgccccggcataccaatacctgaccggcggcacgccgctgaaagtattggggttccaaaaccacggcttactcgtcggcggcagcctgaccgaccaaccccttaacacctacgcaatcgccggagacagcggttcccccctgtttgccttcgacaagcatgaaaaccgctgggtgcttgcgggcgtactcagcacctacgccggcttcgataatttcttcaacaaatacatcgtcacgcaacccgaattcatccgttccaccatccgccaatacgaaacccggctggatgtcgggctgaccaccaacgaactcatatggcgcgacaacggtaatggcaacagcaccctgcaagggctcaacgaacgcatcaccctgcccattgcaaacccttcgcttgccccacaaaacgacagcaggcacatgccgtctgaagatgccggcaaaacgctcatcctatccagcaggttcgacaacaaaacactgatgctggcagacaatatcaaccaaggcgcaggcgcattgcagttcgacagcaacttcaccgtcgtcggtaaaaaccacacatggcaaggtgcaggcgttatcgtagccgacggcaaacgcgtcttctggcaagtcagcaaccccaaaggcgaccggctctccaaactgggcgcaggcacgcttatcgccaacggacaaggcatcaaccagggcgacatcagcatcggggaaggcactgtcgtactcgcccaaaaagctgcttcagacggcagcaaacaagcattcaaccaagtcggcatcaccagcggcaggggcacggccgtcctcgccgacagccagcaaatcaaacccgaaaacctctatttcggcttcaggggcggacggctcgacctcaacggcaacaaccttgcctttacccatatccgccatgcggacggcggcgcgcaaatcgtcaatcacaaccctgaccaagccgcgacactgacgctgaccggcaaccccgtcctcagtcccgagcatgtcgagtgggtgcaatggggcaaccgtccgcaaggcaacgcggcggtttacgaatacatcaacccgcaccgcaaccgtcggaccgactacttcatactcaaacccggcggcaacccgcgcgaatttttcccgttaaatatgaaaaactcaacaagctggcaatttatcggcaacaacaggcaacaggccgccgaacaagtcgcccaagccgaaaatgcccgccccgacctgattaccttcggcggatacttgggtgaaaacgcgcaaacgggcaaagccgcgccgagttacagcaaaaccaatgaagcagccatagaaaaaacccgccatatcgcaaatgccgccgtatacggccggcccgaataccgttacaacggcgcactcaacctgcactatcgtcccaaacgcaccgacagcacgctgttgctcaacggcggcatgaaccttaacggggaagtcttgattgagggcggcaatatgattgtgtcaggcaggcccgtaccccatgcctacgaccaccaggccaaacgcgaacccgttcttgaaaacgaatggaccgacggcagcttcaaggctgcacggttcaccctgcgaaaccatgcccgactgacggcagggcgcaataccgcgcatctggacggcgacataaccgcatacgatctgtccggcatcgacctcggctttacccaaggcaaaacaccggaatgctaccgctcctaccatagcggcagcacccactgcacacccaacgccgttttaaaagccgaaaactatcgtgcactacctgcaacgcaagtacgcggcgacattacccttaacgaccgttcagagctccgcctgggcaaagcacacctgtacggcagcatccgtgccggcaaagacaccgcagtccgcatggaagcagacagcaactggacactttcccagtccagccacaccggcgcactgacgcttgacggcgcacaaattaccctgaaccccgatttcgccaataatacacacaacaaccgcttcaacacactgaccgtcaacggcacacttgacgggttcggcacattccgattcctgaccggcatcgtccgaaaacaaaatgccccccccctcaaactggaaggggacagccgcggcgcattccaaatccacgtcaaaaacaccggacaagaacctcaaacaaccgaatcgcttgcacttgtgagcctcaatccgaaacacagccaccaagcccgattcaccctccaaaacggctatgccgatttgggtgcctaccgctacatcctccgcaaaaacaacaacggatacagcctgtacaacccgctcaaagaggccgaacttcaaattgaagccacgcgtgcggaacatgagcgcaaccaacaggcatacaaccaattacaggcaaccgacatcagcagacaggttcaacatgactctgacgcgaccaggcaggcactacaggcctggcagaacagtcaaaccgaacttgcccgcatcgacagccaagtccaatatctgtccgcccaattgaaacagacagacccgctgaccggcattctgacgcgtgcccaaaacctgtgtgccgcacaaggatacagtgccgatatctgccgtcaggttgccaaagccgccgacacgaacgacctgacactcttcgaaaccgaactggatacgtatatagaacgtgtagaaatggccgaatccgaacttgacaaagcacggcaaggcggcgatgcgcaagccgtcgaaacagcccggcacgcctacctgaacgcactcaaccgtctgtcccgacaaatccacagtttgaaaaccggcgttgccggcatccgtatgccgaacctggccgaactgatcagccggtcggccaacaccgccgtttccgaacaggccgcctacaataccggccggcaacaggcgggacgccgcatcgaccgccaccttaccgatccgcagcagcaaaacatctggctggaaaccggtacgcaacaaaccgactaccatagcggcacacaccgtccctaccaacaaactaccaactatgcacatatcggcatccaaaccggcatcaccgaccgtctcagtgtcggtacgattttaaccgatgagcgcacaaacaaccgttttgatgaaggcgtatccgcccgaaaccgcagcaacggcgcacatctgttcgtcaaaggggaaaacggcgcactctttgccgcggcagatttaggctacagcaacagccgtacccgatttaccgattatgacggggctgccgtccgccgccacgcatgggatgcaggcatcaacaccggcatcaaaatcgataccggcatcaacctcagaccctatgccggcatccgtataaaccgcagcaacggcaaccggtacgtactcgacggcgcagagataaacagcccggcgcaaatccaaaccacatggcatgccggcatccgtctcgataaaaccgtcgaactgggtcaagccaagctgacccccgccttcagcagcgattactaccatacccgccaaaacagcggttccgccctcagcgtcaacgaccgtaccttactgcagcaagccgcccacggcacactgcataccctgcaaatcgacgccggatacaaaggctggaacgccaaacttcatgccgcttacggcaaagacagcaacaccgcccgccacaaacaggcaggaatcaaaataggctacaactggtaa

SEQ ID NO: 42745 - DNA, 1074 bp, Neisseria meningitidis
atgagtatcaccatccaaaacttaaacaaacacttcggcaattttcacgcgctgaaaaacatcaacctcaacgtccccaccggcaaactcgtttccctgctcggcccgtccggctgcggcaaaaccacacttttacgcattatcgccggactggaaaacgccgacggcggcaatatcctgtttgacgggcaagacgtaaccgccaaacatgtgcgcgagcgcaaagtcggcttcgtgttccaacactacgcccttttccgccatatgaacgtgtttgacaacgtcgctttcggtttgaccgtattgcccaagtccgaacgcccgtccaaaggacaaatccgcgccaaagtcgaagaattactcaagctcgtgcagctctctcatttggcaaaatcctatccgcaccaactctccggcgggcaacgccagcgcatcgccctcgcccgcgcgcttgcggtcgaacccaaactcttgcttttggacgaacccttcggcgcgttggatgccaaagtacgcaaagaattacgcacctggctgcgcgacatccatcacaacctgggtgtaaccagcattctggttacgcacgaccaagaagaagccctcgaagtttccgacgaaatcgtcgtgatgaaccacggcaaaatcgaacaaaccggcagcgccgaagctatttaccgcaaacccgaaaatgccttcgttaccgagttcctcggcgaaaccgacgcttttgaaggacgcatcgaaaaaggcttctggcattacaacggcttcgcgtggaaattggacgcgcaatacaaatggcaggaacaaaccgccaccggctatatccgcccgcacgaatggcagatcgccgccgaacacgaaacaccgatgatttgtgccgaaatcgaaaaaatccacgccgtcggcgcattgacgcatattctggtaaaacacgacaaacaggacgtacatatcacgctggcaggcagcgatgccgcgcgttacccaatcgccgaaggcaaagaattgaagctgattccgaaacaggtttatgtcttctctcaaaacgaactgattgaatattcgatttaa

SEQ ID NO: 42746 - DNA, 1257 bp, Neisseria meningitidis
atgaaagtgcttgttttaggtgcgggtgttgccggcgtgtcttccgcgtggtatctggcagaggccggacatgaagtaacggtcatcgaccgcgccgagggtgtggcgatggaaaccagttttgccaacgcaggccagctttcttacggctataccacgccttgggctgcacccggtatcccgaccaaagcgctgaaatggctgtttaaaagccatccgcctttgctgtttcgccccgacggcagcctgtatcaaatcgaatggctgtggcaaatgctgcaaaactgcacggcagcgcactatcaaaccaataaagagcgcatggtcaggatttccgaatacagccgtgaaatgttccgccgttttgaagcgcaaaccggcatgaattttgagggacgcaaaaaagggacgttgcagattttccgccaaaccaaagaagtcgaagcggcaaaacaagacattgccgttttggaacgctacggcgtgccgtaccgccgtctgaaacccgaagaatgtgcagaatttgagcctgcgctggcacgcgttaccgccaaaattgccggcggcctgcacctgcctgcagatgcgaccggcgactgccgcctcttcactgaaaacctatacaaattgtgtcaggaaaagggcgtacggtttcatttcaaccaaaacatcagccgcatcgaccacaacgggctgcgcatcaaaaccgttgaaaccgaaacagggcggtttgaagcagatgccgttgtctgcgcgctcggttgcttcagcaggacggttttggcgcagttggatctcaatctgcccatttatcccgtcaaaggctattccttgaccctgccggtcaccaattcagacggcgcaccggtgtccaccgttttagatgaaagctacaaagtcgccatcacgcgctttgacaacagaatccgcgtcggcggtatggcggaattgtcgggctacgaaatcaaactgcccgaaaaacgccgcgaaaccttggctttggtcgtcaacgacttgttcccggaaggcggcgatttgagccaagcatcgttctggagcggcctcagaccgatgacgcccgacagcacgccgttaatcggtcgcacccgctttgacaacctgtttctgaataccggccacggtactttaggctggaccatgtcgctgggttcggcaaaattaaccgccgatatcgtgagcggcaaagacaccgaaatccgcagcgacgatttgagcctgtcgcgttatcaggcttaa

SEQ ID NO: 42747 - DNA, 297 bp, Neisseria meningitidis
atgaacaaaaaattaaactatatttttatgttggactgtttagggttggtgatattgtttacttgtataatagctacttttgaaagagattatggatttaaaatttttactaattctaagagacctgaattttattattggattggaatgttttattatggaattatttcttgctggtttgattatcaattaatttcaacaaaggcgaattcgtataaaagaaaagttaaacaatataaaattttttcagtaatattttcagttttgatatttatttctactatagtaaaactttaa

SEQ ID NO: 42748 - DNA, 1116 bp, Neisseria meningitidis
atgaagattgtaattgcaccggattcgtttaaggaaagcttgacagctcaacaggtagctgaagcaataaaaagaggcttccaacaatcgatagcagatgtggaatgtctcctctgtcctgtcggtgatgggggagaaggcactgtagatgctatccgacattctcttgacctagaagaaaaatgtctccaagtgacaggaccttttggacaaaaagaagtcatgcgctattttcaaaaagaacaactagccctattcgaagttgctgatttggttggtcttggaaaaatcccgctagagaaacgaaatccattacaaatccaaactcgtggtattggagaattgattcgccacctcattagtcaagaaattaaagaaatctatattggcgttggcggtacggccagtaatgatggaggtattgggattgctgctggtttaggttatcaattttatgatgaggatggaaatgccttacccgtttgcggtcaatccttactaaacctagcttctgtttcaacagaaaatcgctatgaaattcctgaagatgttcacattcgtattttagcagatgttgtgagtcccttatgtggacaccaaggtgcgacctatacgtttggcaagcaaaaagggttggattctactatgtttgaggccgtagatcaggcaatacaagatttttatgaaaaagtctcccctgcaacattaaaacttaaaggagcaggagctggtggaggcatcgctggtggtttgtgcgcctttgctcaggcaagtatcgtatctggaattgacacctgcctggacttgattgactttgataagaaagtgtcagatgttgacttggttatcgttggtgaaggaagactagatcgtcaaagtttagcagggaaagcgcctattggtgtagcaaaaagaacccctgtcggagttcctgttgtcgctatttgtggcagtctcgttgaagatttgccttccctgccatttgaaaatatccaagctgccttttctattttggagaaaagtgaacctttagaagatagtttgaaaaatgccagcctctatttggagcatacggcttctaatattggacacttattaaatatgcctaagatttag

SEQ ID NO: 42749 - DNA, 375 bp, Neisseria meningitidis
atgattattcaaaatgaatttaatttatatcctagtaatatgcttcctgaaaggttttgttatcctgaaaagtatgttcgtatctctaacgatacatctttaataccttatattcagccacataattttcactggtggtttgagaattatggaacagaaggggcagaagtagcttatatatttagaaattctatcctgcctgatttaaatcttatcccattcgctagtaatggagaatgggaagcttattttgatggtaatgatgtaacaggaaattctagggttattgtcattaatttagataatatagaaaaccatgaattttttaatagttttgaagattggcttgaattagcaattaaggatacttggtaa

SEQ ID NO: 42750 - DNA, 342 bp, Neisseria meningitidis
atgcccaaaatcaccgtacttccacacacgacattatgccccgagggtgcagtcatcgataacgcacccgaaggtaaaaccgtccttgacgtgctgctcgaccatgatatcgaagtcgatcacgcctgcgaaaaatcctgcgcctgcacaacctgccacgtgattatccgcaaaggtttcgacagcctagaagagccgaccgaattggaagaagacctgctcgatcaggcttggggtttggaagccgattcgcgcctgagttgtcaggcggttgtcgccggcgaggatttgattgtggaaatccccaaatacaccatcaaccacgcgcgcgaagaacactga

SEQ ID NO: 42751 - DNA, 966 bp, Neisseria meningitidis
atgagctacacgcaactgacccaaggcgaacgataccacatccaatacctgtcccgccactgcaccgtcaccgaaatcgccaaacagctgaaccgccacaaaagcaccatcagccgcgaaatcagacggcaccgcacccaagggcagcaatacagcgccgaaaaagcccagcggcaaagccggactatcaaacagcgtaagcgacaaccctataagctcgattcgcagctgattcagcacatcgacacccttatccgccgcaaactcagtcccgaacaagtatgcgcctacctgtgcaaacaccaccagatcacgctccaccacagcaccatttaccgctaccttcgccaagacaaaagcaacggcagcacgttgtggcaacatctcagaatatgcagcaaaccctaccgcaaacgctacggcagcacatggaccagaggcaaagtacccaaccgtgtcggcatagaaaaccgacccgctatcgtcgaccagaaatcccgtatcggcgattgggaagccgacaccattgtcggcaaaggacagaaaagcgcattattgaccttggtcgaacgcgttacccgctacaccatcatctgcaaattggatagcctcaaagccgaagacactgcccgggcagctgttagggcattaaaggcacataaagacagggtgcacaccattaccatggataacggcaaagagttctaccaacacaccaaaataaccaaagcattgaaagcggagacttatttttgtcgcccttaccattcttgggagaaagggctgaatgagaacaccaacggactcatccggcaatacttccccaaacaaaccgatttccgtaacatcagtgatcgggagatacgcagggttcaagatgagttgaaccaccgaccaagaaaaacacttggctacgaaacgccaagtgttttattcttgaatctgttccaaccactaatacactag

SEQ ID NO: 42752 - DNA, 483 bp, Neisseria meningitidis
atgacgaacatccgtatcggacagggctacgatgtccaccaactgaccgaaggcagaaagctgatacttggcggagttgaaatcccatttgaaaaagggctgctcggacactccgatgccgatgcgctgctgcacgccgttaccgacgcgctgctcggtgcggcaggtttgggcgatatcggcagccatttccccgacaccgccgcagagttcaaagatgcggacagccgcgtccttttgcgtgcggcgtatcaaagcgttcaggcgcagggttggcaggcggtcaatgtcgatacgaccgtgattgcacagaaacccaaactcgcgccgcacattccgcaaatgcgtgccaacatcgccgccgatttgggcatagacatttcgtgcgtcaacatcaaaggcaaaaccaacgaaaaactcggctatctcgggcggatggaaggcatagaggcgcaggcggcggtattgctggtacgcatttga

SEQ ID NO: 42753 - DNA, 261 bp, Neisseria meningitidis
atgaacgacttggaaaaccaaatcaaacaactgattatcgacagtttggctttggaggatataaccgccgccgacatcggcagcgaagacgcgctgttcggcgacggagggctgggactggattccgtcgatgcgctggaattgggcttggcggtgcaaaaacatttcggtttccgattggacggcgagcaggagaacttgcgcgaacattttgccaatgtcaaaacactcgccgcctttgtcaaaagccgccaagcataa

SEQ ID NO: 42754 - DNA, 786 bp, Neisseria meningitidis
atgggttttctgcaaggcaaaaaaattctgattaccggcatgatttccgagcgttccatcgcttatggcatcgccaaagcctgccgcgaacaaggcgcggaactggcgtttacctacgttgtggacaaactggaagagcgcgtccgcaaaatggcggcggaattgggttccgaactcgtattccgctgcgatgtcgccagcgacgacgaaatcaaccaagtgttcgccgacttgggcaaacattgggacggcttggacggtttggtgcattccatcggcttcgcgccgaaagaagccttgagcggcgacttcctcgacagcatcagccgcgaagcgttcaacaccgcacacgaaatttccgcatacagcctgcccgcattggcaaaagccgcccgtccgatgatgcgcggcagaaactccgccatcgttgccctgagctacttgggcgcggtgcgcgcgattccaaattacaacgtgatgggtatggcaaaagccagccttgaggcgggcatccgttttaccgccgcctgtctgggcaaagaaggcatccgctgcaacggcatttccgccggtccgattaaaacactcgccgcctccggcatcgccgatttcggcaaactcttgggacacgtcgccgcccacaatccgctgcgccgcaacgttaccattgaagaagtcggcaatgccgccgccttcctgctgtccgacctgtcgtccggcattaccggcgaaatcacttatgttgacggcggttatagcatcaatgccttgagcaccgagggataa

SEQ ID NO: 42755 - DNA, 867 bp, Neisseria meningitidis
atgtggaaaatgttgaaacacatagcccaaacccaccgcaagcgattgattggcacattttccctggtcggactggaaaaccttttgatgctggtgtatccggtgtttggcggccgggcgatcaatgccgtgattgcgggggaggtgtggcaggcgttgctgtacgctttggttgtgcttttgatgtggctggtcggtgcggtgcggcggattgccgatacgcgcacgtttacgcggatttataccgaaatcgccgtgccggtcgtgttggaacagcggcagcgacaagtcccgcattcggcggtaactgcgcgggttgccctgtcgcgtgagtttgtcagcttttttgaagaacacctgccgattgccgcgacatccgtcgtatccatattcggcgcgtgcatcatgctgctggtgctggaattttgggtcggcgtgtcggcggtgggcatacttgcgttgtttttatggcttttgccacgttttgccgccatcagcgaaaacctgtatttccgcctgaacaacagcttggaacgcgacaaccactttatccgaaaaggcgaccggcggcagctgtaccgccattacggactgcttgcgcgcctgcgtgtgctgatttccaaccgcgaagccttcggctatctctgcgtcggcacggcgatgggtattttgttcggctttgcttttgtgatgatgacgctcaaaggctacagcagcgcggggcatgtctattcggtcggcacttatctgtggatgtttgccatgagtttggacgacgtgccgcgattggtcgaacaatattccaatttgaaagacatcggacaacggatagagtggtcggaacggaacatcaaagccggaacttga

SEQ ID NO: 42756 - DNA, 921 bp, Neisseria meningitidis
atgaccttaaccgaattgcggtacatcgtcgcagtcgcccaagaacgtcatttcggcagggcggcgcggcgttgttttgtcagccagcccactttgtctattgccattaagaaattggaagaagagcttgccgtctctttgtttgaccggagcagtaacgatattattacgaccgaggcgggggaacgtatcgttgcacaggcgcgtaaggtattggaagaggcggagcttatcaggcatttggcaaatgaagaacaaaacgagctggagggtgcgttcaaactcgggctgatttttacggttgcgccgtacctgctgccgaaactgattgtttcgttgcgccgtactgcaccgaaaatgcctttgatgttggaagagaattacacgcatactttgaccgagtcgctcaaacgcggggacgttgatgcgattatcgttgccgaaccgtttcaagagccgggcattgttaccgaacccttgtatgacgaaccgtttttcgtgattgtcccgaaagggcattcatttgaggaactggatgccgtttcgccccggatgctgggtgaggagcaggttttgctgctgacggaaggcaactgtatgcgggatcaggtactctcaagctgttccgaattggcggcgaaacaacgtatacaggggttgaccaatacattgcagggcagctcgattaatacaatccgccatatggttgccagcggtttggcaatcagcgtgttgccggcaaccgcactgaccgaaaacgatcatatgctgttcagcattattccgtttgagggtacgccgccaagccggcgggtcgtattggcgtaccgccgcaattttgtccgtccgaaggcgttgtcggcgatgaaggcggcgattatgcagtcgcagcttcacggggtaagttttatctgcgactag

SEQ ID NO: 42757 - DNA, 186 bp, Neisseria meningitidis; identical to SEQ ID NO: 37303

SEQ ID NO: 42758 - DNA, 891 bp, Neisseria meningitidis
atgaatcctaaatcccctttatttttacgcctgtccgaccgtttggatgtgtacctgcgcctgatgcgggcggacaagcccattgggacgctgcttttactgtggccgacctactgggcattgtggctggcttcagacggcattcccgatttggcggtattggcggcgtttacaatcggcacgtttttaatgcgcagtgccggctgcgtcatcaacgactttgccgaccgcgattttgacggtgctgtcgagcgtacaaaaaaccgtccgttcgcacagggcagggtcaagaaaaaagaagcgctgctgctgacggcatttttgtgcctgcttgccgcattgtgcctgattccgctgaatcatctgacttggctgatgagcctgcccgcgctgtttcttgcgctgacttacccgtttaccaaacgtttttttccgattccccaactctatctcgggcttgccttttccttcggtatcccgatggcgtttgccgccgttgccggaaacgtgccgcctcaagcgtggatactctttgccgccaatgtgttatggactctggcgtatgacacggtttatgcaatggcggacaaagaagacgatttgaaaatcggcatcaaaacctccgccgtcacgttcgggcgttacgacatcgccgccgttatgctgtgtcacggaggctttaccctgctgatggcagtattgggtgcggttatcggtgcggcatgggcatattggacggcaatccccatcgtcctgctgctgcaataccgccaatatgccgccatcaaaagccgcgtccggcaaatctgttttgaaacgtttttggcaaacaacagaattggttgggtgtggtttaccgccatttttgcccatacgtttttcgcgaaataa

SEQ ID NO: 42759 - DNA, 1980 bp, Neisseria meningitidis
atgcctaaaattttacaacaaacaaccttacatcgcttttttcgcgcaaacacgcaccatccgatcagcccgtccgttttgcagcaggctggcgatttgataagatggttatgtttttcagacggcatttcagatttccgtccatgccatctgaagccgcaaaacccgattggaggaactgttatgaataccgtatcgaattatctgtccgcattacgcgaagccatgaaggcgcaaggcttggatgcactcgtcatcccttccgccgacccccacctgtccgaatacctgcccgagcattggcaggcgcgccgcgaattatcgggctttaccggctcggtcggcacgtttgtcctgaccaccgatgaagcgggcgtgtgggtggacagccgctattgggaacaagccgccaaacagcttgcgggcagcggcattgtgctgcaaaaaagcgggcaagtgccgccgtacaacgaatggctcgcggcaagcctgcccgaaaacgccgccgtcggcatcccttccgatatggtctcgctcaccggcaaacgcactttggcgcaatcactcgccgccaaaaacatccgcatcgaacacccggataatttactgaatcaagtgtggacaaaccgccccgccctccccgccgaaacggtgttcatccacgaccccgactatgtttctgaaaccgccgccgaaaaactcgcccgcgtgcgcgccgtgatggcggaaaaaggcgcggattaccacttggtttcctcgctcgacgacatcgcctggctgaccaacctgcgtggcagcgacgtacctttcaaccctgttttcgtgtccttcctgctgattggcaaagacaacgccgtcctgtttaccgaccgatgccgtctgaacgccgaagccgccgccgcgctgcaaaccgcaggcatcacggtcgaaccttatgcccaagttgccgacaaactcgcgcaaatcggcggcgcgctgcttatcgaaccgaacaaaaccgccgtcagcacgcttgtgcgcctgcccgaaagcgtgcgccttatcgagggaatcaacccatccacgctgttcaaatcctgcaaatccgaagccgacatcgcccgcatccgcgaagcgatggaacacgacggcgcggcgttgtgcggtttcttcgccgagtttgaagacatcatcggcaacggcggcagcctgaccgaaatcgacgtggacaccatgctttatcgccaccgcagcgtgcgcccaggcttcatttcattgagtttcgacaccatcgcaggcttcaacgccaacggcgcactgccgcattacagcgcaacgcccgaaagccacagcaccatcagcggcaacgggcttttgctcatcgactccggcgcgcaatacaaaggcggcacgaccgacatcacccgcgtcgtccctgtcggcacgccgagtgccgaacaaaaaagcgacaacaccctcgttctcaaagcccatatcgcgcttgccgaagccgtattccccgaaaacatcccctcgccgctgattgatgcgatttgccgcaaacccctgtggcaggcgcaatgcgactacggccacggcaccggacacggcgtaggctatttcctcaacgtccacgaaggcccgcagcgcatcgccttcgccgcccccgccacgcccgaaaccgccatgaaaaaaggcatggttacctccatcgaacccggactctaccgcccgggaaaatggggcatccgcattgaaaaccttgccgccaaccaagccgtcgccgcccctcaagaaaccgaattcggcagcttcctctgttttgaaaccctgaccctctgccccatcgatacacgcctgatggacaccgccctcatgaccgacggcgaaatcgactgggtcaaccgctaccacgccgaagtccgccgccgcctcgagccgctgaccgaaggcgcggcaaaagcgtggctgatcaaacgcaccgaaccgctggcgcgttaa

SEQ ID NO: 42760 - DNA, 663 bp, Neisseria meningitidis
atgaatttgaaattagtgtttgaatcgggcgatcccgtcctgattggtgtgtttgtgttgatgctgttgatgagtatcgtaacgtggtgtttggttgtcttgcgctgcatcaagctgtatcgggcgcgcaaagggaatgccgccgtcaaacggcatatgcgcgatactttgtcgctgaacgacgcggtcgaaaaagtgcgcgccgtcgatgcgcctttgtccaaactggcgcaagaggcattgcagtcttaccgcaactaccgccgaaacgaagcgtccgaactggcgcaggctttgccgttgaacgagtatttggtcattcaaatccgcaacagtatggcgcagattatgcgccggtttgattacgggatgaccgcgcttgcctccatcggcgcgaccgcgccgtttatcgggctgttcggcacggtttgggggatttaccacgccctgatcaatatcgggcaaagcgggcagatgagtattgcggcggttgccggcccgattggcgaggcactggtggcgacggcggcgggtttgttcgtggcgattccggcggtgttggcatacaacttcctcaatcgcggcacaaaaatactgccccaggatttggatgcgatggcgcacgatttgcacgtccgcctgcttaatcaaaaggatagctga

SEQ ID NO: 42761 - DNA, 492 bp, Neisseria meningitidis
atgaattccctctttgtggacaatactgttttcattacacggctgaaagccgggcatatcggcaggttggttcaggcgttgtttgaggagtggcacggatttgaaccgtggtcttctgtggataagattcatgcctattacggcaggtgtttgaaggatgacgaactgccgctggcatttgcggctgtggatgattccggaatcctgttgggttcggctgcggtcaagcggcatgatatggaaagttttccacggtatgaatattggttgggggatgtctttgttttacctgaatatcgcggaaaaggcattggcaggaggctggtcgcccactgcataggcgcagcgcgttcgctggggataaagttcttgtatctttatacgcctgatgtgcaaatattttatgaatcattcggctgggtggttgtcgggcgacatttccataacggtgaatgggttacggttatgcgtttggatgtggataaggtttaa

SEQ ID NO: 42762 - DNA, 915 bp, Neisseria meningitidis
atgaaacacctcaaactcacccttattgccgcattgctgaccgcctccgcaactgccgcccccctgccggttgtaaccagcttcagcattttaggcgacgtagccaaacaaatcggcggagagcgcgtatccatacaaagtttggtcggagccaaccaagatacgcacgcctatcatatgaccagtggcgacattaaaaaaatccgcagtgcaaaactcgtcctgctcaacggcttaggacttgaagctgccgatgtgcaacgcgccgtcaaacaaagcaaagtatcctataccgaagcgaccaaaggcatccaacccctcaaagccgaagaagaaggcggacaccatcacgaccacgatcatgaccacgaaggacaccaccatgaccacggcgaatatgacccgcacgtctggaacgaccccgtccttatgtccgcctatgcccaaaacgttgccaaagccctgataaaggccgatcccgaaggcaaagtttattatcaacaacgcttgggcaactaccaaatgcagctcaaaaaactgcacagcgacgcacaagccgcatttaatgccgtccctgctgccaaacgcaaagtcctgaccgggcacgatgccttttcctatatgggcaaacgttaccatatcgaattcatcgccccgcaaggcgtgagcagcgaagccgagccttcggccaaacaagtcgccgccatcatccgacaaatcaaacgcgaaggcatcaaagccgtctttaccgaaaacatcaaggacacccgtatggttgaccgtatcgccaaagaaaccggtgtcaacgtcagcggcaaactgtattccgacgcactcggcaacgcgcccgcagacacctacatcggaatgtaccgccacaacatcaaagccttgaccaacgcgatgaagcaataa

SEQ ID NO: 42763 - DNA, 1728 bp, Neisseria meningitidis
atgcagttatcaggcgcgcaaatcatagtgcagagtctcaaagccgaaggtgtcgagtacgttttcggttatcccggcggtgcggttatcgaaatctacgatgcccttttccaactcaataaattcaaacacattcttacccgccatgagcaggcggcagtacacgcggcagatgcgtatgcgcgcgtcagcggtaaggtgggcgtggcattggttacatccggcccgggcgttaccaatgcactgaccggtattgctactgcctatacggattcgattccgatggtggtcatcagcgggcaggtaggcaattccctgattggtacggatgcgttccaagaagttgatacggtgggtattacccgtccgtgcgtcaaacacaatttcctggttacggacatcaatgagttggcggaaaccattaaaaaggcgttccaaattgccgcaagcggccgaccggggcccgtggtggttgatgtcccgaaagatgttacgcaggcgatggcgaaattcagctatcctcaggaagacatttttatccgttcgtatcaaccggttgttcaaggacatatcggtcagattaaaaaggccgtgcagatgttggcatctgccaaacgtccggtcgtctattttggcggcggcgtggtgttgggtaatgcttctgaagagctgacccgatttgtccgaatgacgggtgctccgtgcacgggtacgctgatgggcttgggcgcttatccttccggcgaccgccaattcctcggtatgctcggtatgcacggtacttacgaggcaaaccttgccatgcagaatgcggatgtcgttcttgccgtaggtgcgcgttttgacgaccgtgtggtttccgtaccgtccaaatttttcgagaaggcgaagaaggttatccatatcgatgtcgatccttccagcatcgccaaacgcgtgaaggtggacattccgattgtcggcgacgtgaaaaacgttttgtccgagatggttgcgctgtggcaaaaacaagagtccgtgccgtctgaagatgctttgggcaaatggtggaaaaccatagaggaatggcgttcccgagattgcttgtggtttgacaacggcagcgaaattatcaagccacaatatgtgattcagaagcttgccgagattaccggcaattcggcaatcatcacatcggatgtagggcagcatcaaatgtttgcggctcaatattatcccttcgaacgtccgcgccaatggctcaattccggcggtttgggtacgatgggcgtgggtctgccttatgcgattggtgcaaaacttgccgccccggatcaagacgtattctgtatcaccggcgacggctcgatccagatgaacatccaagagctgtccacctgtttccaatatcggattccggttaacgtcattacgctgaacaacggttatctcggtatggtacgccagtggcaggaaatatattacggcggacgagagtcggaaacctatttcgattctttgcccgatttcgtcaaacttgccgaggcatacggccatatcggtatccgcgtggacaagaagtctgatgtggaaggtgcgttgttggaagcattgaaccaaaaagacaggctggtgtttatcgacttcctgaccgaccagaaacagaatgtgatgcccatggtcggcaacggcaaaggtttggacgaaatggtacttccgccgcatatgcgtgcggacggaaaggcgtaa

SEQ ID NO: 42764 - DNA, 168 bp, Neisseria meningitidis
gtgccggaacaggcacgcgcccgcccgattcaaaccgcgatgacgctttgccgccggttcggggcaggatggcggcacacacgccgtctgccgcgtttcatttcacaccgctcttccgaaacccgaaacccgcccggtccgacgtgcggtatgaaacgcttaagctga

SEQ ID NO: 42765 - DNA, 390 bp, Neisseria meningitidis
atgagcacgcacgagaaacttttaaccgccgacaaccccgtcctgcatcaacgcgccaaagccatgcgccaagaaatgagcgaggcggaagcaaaattgtggcagcacctgcgggcaggccgtctgaacggctataaattccgccgccagcagccgatggggaattatattgttgattttatgtgcgtaacgcccaagctgattgtcgaagcagacggcgggcagcacgcggaacaagccgtatacgaccacgcgcggacggcatatctcaacagcctgggctttaccgtgctgcgtttttggaatcacgaaattttgcagcagacaaacgatgtactggcggaaatcctgcgcgtattgcaggaattggaaaagcagtatgcgcaataa

SEQ ID NO: 42766 - DNA, 1092 bp, Neisseria meningitidis
atgaacgcccaaaccctgattgccaacgttgccgaattcgtcaaaaccaagctcaaacccatagtggacgacatcgaccgcaaaggatactaccccgaagcatttatgcgcgaactcggcgcaatcggtggattcggcgcagtcggtacagaagccgaaggcggcaacggcttgggtttggcaacgcaaatcgccgtattgcgcgaaatcggcaaagaatgcggcgcaacctctttcagtgcgtggtgtcaggcggcttgcgcgtggtatctgcaccaaacgcccaaccgggccgtcaaagacaaataccttgccgacatcctgcaaggcaaagtattggcgggtacgggcatgtccaataccgtcaaacaccttgccgacatcgaaaaacacaacctccaagccgaacgcgtggaaggcggctacacagtcaacggcgcgctgccgtgggtgtccaacatcggtgaagaccacatctgggcgaataccgcccaaatcggcgacggctacgttatgttcatcacaggcggacaatgggaaggcgtaagcctgcaaaactgccccgaattttgcgccctcgaaggtacgcgcaccttcagcctgaatttcaaagacgtatttatccccgacgaagacatcatcgccgcgcccgaacagtttgccgactacatccaaagcatcaaagcaggctttatcctcctgcaaatcggcatcggcgcgggcgtaatcgacggcagcctcggcatcatccgcctcgccaacgtcgtcaacgccgaagtcaacaactacctcaacgacggctacgacagcctcaaaacaaggctggacggcgcgtgggcagaaaccgaacggctcgccggcttggcttggagcggcacgcccgacaaccttgctaccctcaagctgcgcgaagccgccgccgtactggcacttgccgccgcccaatccgccgccctgcattccggcgcaaaaggctacctgatgcgcagtcccgcccaaaggcgcgtccgcgaagcaatgtttgttgccatcgtaacccccgctatcaaacacctacgcaaagaaatagcggcaatcgaagccgcaaaataa

SEQ ID NO: 42767 - DNA, 1056 bp, Neisseria meningitidis
atgaccattttatcggacgttaaagcattaggacaacaaatctggctggacaacctttcccgctcgctagtgcaaagcggcgaattggcgcaaatgttgaaacagggcgtgtgcggcgtaacttccaatcccgccatcttccaaaaagccttcgccggcgacgcgctttacgccgatgaaatcgccgccctcaagcagcaaaacctcagccccaaacaacgctacgaaacaatggcggttgccgatgtgcgtgccgcctgcgacgtttgccttgccgaacacgaatccaccggcggcaaaaccggcttcgtcagcctcgaagtttcgcccgaattgtccaaagacgcgcaaggcacggttgaagaagcgcgccgcctctacgccgccatcgggtgcaaaaacgcgatgattaaagtgcctgccaccgacgcaggcatcgatgcgctcgaaaccctcgtttcagacggcatcagcgtgaacctgaccctgctgttctcacgcgcccaaaccctcaaagcctacgccgcctacgcgcgcggcatcgccaaacgcttagcagccggacaaagcgttgcccatatccaagttgtcgccagcttcttcatctcccgtgtggacggcgcgctggacacaacactgcccgaccacctcaaaggcaaaatcgccatcgcccttgccaaagccgcctaccaagactgggcgcaatacttcggcagccccgaatttgccgcgctggaaaccaaaggcgcaaaccgcgtgcagcttttatgggcatctaccggcgtgaaaaacccggcctatcccgacacgctctacgttgacagcctgatcggcgcgcacaccgtcaacaccgttcccgatgccacgctcaaagcctttatcgaccacggcacagccaaagccacgctgaccgaaggcgtagaagaagcacaagcgcagctcgccgaaaccgccgcgctcggcatcgatgtcgaaaccttggcaacgcgtttgcaggaagacggtttgaaacagtttgaagaagcgtttgaaaaactgctcgcgcctttggcttag

SEQ ID NO: 42768 - DNA, 537 bp, Neisseria meningitidis
atgcaggcaatttctcccgaattacaggcgcgcgccgccaaaatcaaactgttgatcctggatgtggacggcgttttgaccgacgggcgcatctttatccgcgataacggcgaagaaatcaaatcgtttcacacactggacggacacggtctgaaaatgcttcaggcaagcggcgtgcagactgcgattatcacgggccgggacgcgccctccgtcggcatccgcgtcaaacagttgggcataaattactatttcaaaggtatcagcgacaaacgtgccgcctatgaagaattgcgcgcgcaggcgggcgtggaagaagccgagtgcgcctttgtcggcgacgacgtggtcgatttgccggtaatggtgcgctgcggattgccggttgccgtccccggcgcgcattggtttacgcggcaacacgccgcctatatcacggaacacgcgggcggcgcaggcgcggtgcgcgaagtgtgcgacctgattatgcaggcgcaagggactttgggcgcggctttgaacgagtacatcaaatga

SEQ ID NO: 42769 - DNA, 300 bp, Neisseria meningitidis; identical to SEQ ID NO: 37288

SEQ ID NO: 42770 - DNA, 2121 bp, Neisseria meningitidis
atgcgccgttttctaccgatcgcagccatatgcgccgtcgtcctgttgtacggactgacggcggcaaccggcagcaccagttcgctggcggattatttctggtggattgttgcgttcagcgcaatgctgctgctggtgttgtccgccgttttggcacgttatgtcatattgctgttgaaagacaggcgcgacggcgtattcggttcgcagattgccaaacgcctttctgggatgtttacgctggttgccgtactgcccggcgtgtttctgttcggcgtttccgcacagttcatcaacggcacgattaattcgtggttcggcaacgatacccacgaggcgcttgaacgcagcctcaatttgagcaagtccgcattgaatttggcggcagacaacgccctcggcaacgccgtccccgtgcagatagacctcatcggcgcggcttccctgcccggggatatgggcagggtgctggaacattacgccggcagcggttttgcccagcttgccctgtacaatgccgcaagcggcaaaatcgaaaaaagcatcaacccgcacaagctcgatcagccgtttccaggtaaggcgcgttgggaaaaaatccaacgggcgggttcggtcagggatttggaaagcataggcggcgtattgtacgcgcagggctggctgtcggcgggtacgcacaacgggcgcgattacgccttgtttttccgtcagccggttcccaaaggcgtggcagaggatgccgtcttaatcgaaaaggcaagggcgaaatatgctgagttgagttacagcaaaaaaggtttgcagacctttttcctggcaaccctgctgattgcctcgctgctgtcgatttttcttgcactggtcatggcactgtatttcgcccgccgtttcgtcgaacccgtcctatcgcttgccgagggggcgaaggcggtggcgcaaggcgatttcagccagacgcgccccgtgttgcgcaacgacgagttcggacgcttgaccaagttgttcaaccacatgaccgagcagctttccatcgccaaagaagcagacgagcgcaaccgccggcgcgaggaagccgccaggcattatcttgaatgcgtgttggaggggctgaccacgggcgtggtggtgtttgacgaacaaggctgtctgaaaaccttcaacaaagcggcggaacagattttggggatgccgcttacccccctgtggggcagcagccggcacggttggcacggcgtttcggcgcagcagtccctgcttgccgaagtgtttgccgccatcggcgcggcggcaggtacggacaaaccggtccatgtgaaatatgccgcgccggacgatgccaaaatcctgctgggcaaggcaaccgtcctgcccgaagacaacggcaacggcgtggtaatggtgattgacgacatcaccgttttgatacacgcgcaaaaagaagccgcgtggggcgaagtggcgaagcggctggcacacgaaatccgcaatccgctcacgcccatccagctttccgccgaacggctggcgtggaaattgggcgggaagctggatgagcaggatgcgcaaatcctgacgcgttcgaccgacaccatcgtcaaacaggtggcggcattgaaggaaatggtcgaagcattccgcaattatgcgcgttccccttcgctcaaattggaaaatcaggatttgaacgccttaatcggcgatgtgttggcattgtatgaagccggtccgtgccggtttgcggcggagcttgccggcgaaccgctgacggtggcggcggatacgaccgccatgcggcaggtgctgcacaatattttcaaaaatgccgccgaagcggcggaagaagccgatgtgcccgaagtcagggtaaaatcggaaacagggcaggacggtcggattgtcctgacggtttgcgacaacggcaaagggttcggcagggaaatgctgcacaacgccttcgagccgtatgtaacggacaaaccggcgggaacgggattgggtctgcctgtggtgaaaaaaatcattgaagaacacggcggccgcatcagcctgagcaatcaggatgcgggtggcgcgtgtgtcagaatcatcttgccaaaaacggtaaaaacttatgcgtag

SEQ ID NO: 42771 - DNA, 642 bp, Neisseria meningitidis
atgaaactgtatatttacgaccattgcccgttttgcgtgcgtgcgcggatggctgccgggctgtttggcgcggacgttgaagaagccgtgctggcaaacgacgacgaggcaacgccgatcggtatgatcggtgcgaaacaagtgcccgtcctgcaaaaagaagacggttcgtttatgggcgagagtttggacattgtgcggcatttcgaccgcgaagaccgtctgaaagacgaagtccgccccgagatacgggcgtggctggacaaggtgggcggatacaacgacaaactggtgcagccgcgcgtgatcaaaatcgggctgcctgaatttgcaacgccggaagcggtgaaatattttacagacaaaaaagagaaaagcatcggcagcttttccgccaatttgaataaaaccgcccaatacctcgaacggataaacgcagatttgcaagagttggaaaatttgatggacggtgcttcagacggcatcaacggcggaatcggtatggaggatattttggttttccccgttttgaggaatctgaccgtggtgcgcggcatcgaatggccccaaaaggtgatgggttatttgatgacgatgagtgaaaaatcgggcgtgccgctttattttgacagggcattgtaa

SEQ ID NO: 42772 - DNA, 3963 bp, Neisseria meningitidis
atgtctgtcgttttgcccttgcgcggcgttaccgccctttccgatttccgtgttgaaaaactcttgcaaaaagccgccgcactcggtctgcccgaagtcaaattaagcagcgaattttggtatttcgtcggcagcgagaaagcacttgatgccgcgactgtcgaaaaactgcaagccttgttggcggcgcaaagcgttgaacaaacgccaaaagcgcgcgagggcttgcatttgtttttggtcacgccccgtttgggtacgatttcgccgtgggcttccaaggcgaccaatatcgcggaaaactgcggtttggcaggcatcgaacgcatcgagcgcggtatggcggtgtggctggaaggtcgtctgaacgatgaacagaaacagcaatgggcggctttgctgcacgaccgcatgaccgaaagcgtgctgcccgattttcagacggcctccaaattattccaccatctcgaatccgaaactttctccggcgtcgatgttttgggcggcggtaaagaagctttggtcaaagccaataccgaaatgggcttggcactttccgccgacgaaatcgattatctggtcgaaaactatcaggctttgcagcgcaatccgtccgatgttgaattgatgatgttcgcgcaggcaaacagcgaacactgccgccacaaaatcttcaacgccgatttcatcctcaacggcgaaaagcagcccaaatccctcttcggtatgatacgcgacacacacaacgcgcatcccgaaggcacggtcgttgcctataaagacaattcgtccgtaatcgaaggcgcgaaaatcgagcgtttctatccgaatgcggcggaaaaccaaggctaccgtttccacgaggaagacacgcatatcatcatgaaagtggaaacgcacaaccacccgaccgccatcgcgccgtttgcgggtgcggcgacgggcgcgggcggcgaaatccgcgacgaaggcgcgacgggcaaaggttcgcgtccgaaagcgggcctgaccggctttaccgtgtccaacctcaatattcccgacctcaaacagccgtgggaacaagactacggcaagccggaacatatttcctcgccgctggacatcatgattgaaggcccgatcggcggcgcggcgttcaacaacgaattcggccgccccaacctcttgggctacttccgcacttttgaagaaaaatttgacggtcaggttcgcggctatcacaaaccgattatgattgccggcggcttgggcagcattcaggcgcagcagacgcataaagacgaaatccccgaaggcgcattgctgatccaactgggcggcccgggtatgcttatcggcttgggcggcggcgcggcttcttcgatggataccggcacaaacgacgcgtctttggacttcaactccgtgcaacgcggcaaccccgaaatcgaacgccgcgcgcaggaagtcatcgaccgctgctggcagctcggcggcaaaaacccgattatctccatccacgacgtaggcgcgggcggcctgtccaacgccttccccgaactggtcaacgatgccagacgcggcgcagtattcaagctgcgcgaagtgccgcttgaagaacacggcctcaacccgctgcaaatctggtgcaacgaatcgcaagagcgttatgtgttgtcgattttggaaaaagatttggatgctttccgcgccatctgcgaacgcgaacgctgcccgtttgccgtagtcggcacggcgactgacgacggtcatttgaaagtacgcgacgatttgttcgccaacaatcccgtcgatttgccgttgaacgtcttgctcggcaaactgcccaaaaccacgcgcaccgacaaaacggttgcaccgtccaaaaaaccgtttcacgcgggcgatatcgacattaccgaagccgcctaccgcgttttgcgcctgcctgccgtagccgccaaaaacttcctgattaccatcggcgaccgcagcgtcggcggtttgacgcaccgcgaccaaatggtcggcaaatatcaaactccagtagccgactgcgccgttaccatgatgggcttcaacacctatcgcggtgaagcgatgtctatgggcgaaaaaccgaccgtcgccctgtttgatgcgcctgcttcgggcagaatgtgcgtcggcgaagccatcaccaacatcgcggcggtcaacatcggagacatcggcaacatcaaactctccgccaactggatggcggcgtgcggcaacgaaggcgaagacgaaaaactctaccgcactgtcgaagccgtttccaaagcctgtcaggcattggatttgagcatccccgtgggcaaagacagcctgtcgatgaaaaccgtttggcaggacggcgaggagaaaaaatccgtggtttcaccgttgagcctgattatctcagcgttcgcgcctgtgaaagacgtacgcaagactgttacgcctgagttgaaaaacgtcgaagacagcgtattgttgtttgtcgatttgggcttcggcaaagcgcgtatgggcggttcggcgtttggtcaggtgtacaacaatatgagcggcgacgcgcccgatttggacgatacaggtcgtctgaaagccttttacagtgtgattcagcagcttgttgccgaaaacaaactcttggcgtatcacgaccgcagcgacggcggcttgtttgccgttttggtagaaatggcgtttgcggggcggtgcggcttggatatagatttaaatttattgcttgcacaaacatttattaccaaccataccgctctgtctcaatcattgcggactgaagaggtaaaagcgttggctgaatggcaagaaaccattgcccgcacattatttaatgaagagttgggtgctgttatccaagttagaaaacaagatgttgccgatattatcaatttattctatcaacaacagctgcatcataatgtctttgaaatcggtacgttaactgatgagaacacgttaatcatccgcgacgggcaaacgcaccttatttctgacaacctaatcaaactgcaacaaacctggcaagaaaccagccatcaaatccaacgcctgcgcgacaaccctgcctgcgccgacagcgagttcgcactgattggcgacaacgaacgcagcgcattgtttgccgacgtgaagttcgacgtgaacgaagacatcgccgcgccgtttatcaacagcggcgcgaaacccaaaatcgccatcctgcgcgaacagggcgtaaacgggcaaatcgaaatggccgccgcctttacccgcgccggattcgatgcttacgacgtgcatatgtccgacctgatggcaggccgcatccacctcgccgacttcaaaatgctggcggcgtgcggcggcttcagctacggcgacgtactcggcgcgggcgaaggctgggcgaaatcgattctgttccaccctgctctgcgcgaccagtttgccgccttcttcgccgacccggacacgctgacattgggcgtgtgcaacggctgccaaatggtcagcaaccttgccgaaatcatccccggcacggcaggctggccgaagttcaaacgcaacctgagcgaacagtttgaagcacgcctgagcatggttcacgttccgaaatcagcgtcgctgattctgaacgaaatgcaaggctccagcctgcctgtcgtggtcagccacggcgaaggccgcgccgacttcgcgcttcacggcggcaatatttccgccgatttgggcattgcgctgcaatacatcgacggacaaaaccaagtgacccaaacttatccgctcaaccccaacggctcgcctcaaggcatcgccggcgttactaacgccgacggccgcatcaccatcatgatgccccaccccgaacgcgtgtaccgtgccgcgcaaatgagctggaaaccggaaggctggacggaactgtccggctggtaccgcctctttgccggcgcacgtaaagccttgggctaa

SEQ ID NO: 42773 - DNA, 441 bp, Neisseria meningitidis; identical to SEQ ID NO: 37247

SEQ ID NO: 42774 - DNA, 690 bp, Neisseria meningitidis
atgaagcgcaaaaatatcgcgctgattcccgccgccggcatcggggcgcgtttcggtgcggacaaacccaagcaatatgtcgaaatcggaagcaaaaccgttttagaacatacgattgggatttttgaacggcatgaggccgtcgatttgaccgtcgttgtcgtctcgcccgaagacacgtttgccgataaggttcagacggcatttccacaggttcgggtgtggaaaaacggcggacagacccgcgccgaaaccgtccgcaacggtgtggcaaaactgttggaaaccggtttggcggcggaaaccgacaatattctggtacacgatgccgcgcgttgctgcctgccgtctgaagctttgacgcggttgatagaacaggcgggcaacgccgccgaaggcgggattttggcaattcccattgccgatacgctcaagtgcgcggacggtgggaacattagtgcaaccgtcgagcggacgagcctttggcaggcgcaaacgccgcagcttttccgcgccgggctgctgcaccgcgcattggctgcggaaaacttggacggcattaccgatgaagcgtccgccgtggaaaaattgggtgtgcgtccgctactgatacagggcgacgtgcgcaatttgaaactgacgcagccgcaggacgcatacatcgtcaggctgctgctcgatgccgtctga

SEQ ID NO: 42775 - DNA, 813 bp, Neisseria meningitidis
ttgacggcagacgctacacgcttcatcatatggagctcccgtaacgacaacctgcaacggcaaatgccgtctgaaagaaaagacatgatcaaattcaaaaacgtacacaaacatttcaaagacctgcacgtcatcaacggcgtaaacttggaaatcaaaaaaggcgaagtggtcgtcgtctgcgggccttcgggcagcggcaaatccacactcatccgcactgtcaaccagcttgaaagcatcgaaagcggcgagatttgggtggacggtgtcaacgttgccgaccccaaaaccgatttgaacaaaatccgcgaagaagtcggcttcgtattccaaggcttcaacctctacccgcacctgaccgtgttggaaaacattaccctcgcaccgatgaaggttaaggggcaaaatgcggaacaggcggagaaaaaggcaatggagcttttggaacgcgtcggactggcacacaaaaaagacgccttcccttcccaactttccggcggccagcagcaacgcgtggcgattgcacgcggtttggcgatggaaccgcgcgtaatgttgtttgacgaaccgacctccgcactcgaccccgaaatggtcggcgaagtgttgaaagtgatgaaagacttggcagaaagcggcatgacgatgatgtgcgtaacccacgaaatggggtttgcccgcgaagttgccgaccgcgtgattttcgtcgataaagggcaaatcctcgaagacgaaacgcccgaagcgttttttaccaacccgaaacacgaacgcgccaagcagttcctgcaacaggtcatgacccactga

SEQ ID NO: 42776 - DNA, 2361 bp, Neisseria meningitidis
atgctccctatcgccgcgctggtcggcagtattttcggcaatccggtcttggcagcagatgaagctgcaactgaaaccacacccgttaaggcagagataaaagcagtgcgcgttaaaggtcagcgcaatgcgcctgcggctgtggaacgcgtcaaccttaaccgtatcaaacaagaaatgatacgcgacaataaagacttggtgcgctattccaccgatgtcggcttgagcgacagcggccgccatcaaaaaggctttgctgttcgcggcgtggaaggcaaccgtgtcggcgtgagcatagacggtgtaaacctgcctgattctgaagaaaactcgctgtacgcccgttatggcaacttcaacagctcgcgtttgtctatcgaccccgaactcgtgcgcaacatcgaaatcgtgaagggcgcagactctttcaataccggcagtggtgcattgggcggcggtgtgaattaccaaacgctgcaaggccgtgatttgctgttggacgacaggcaattcggcgtgatgatgaaaaacggttacagcacgcgtaaccgtgaatggacaaatactctcggtttcggtgtgagtaacgaccgcgtggatgctgctttgctgtattcgcaacgtcgcggtcatgaaaccgaaagtgcgggaaaccgaggctatgctgtggaaggggaaggcagtggcgcgaatatccgtggttcggcacgcggtatccctgattcgtccaaacacaaataccacagctttttgggtaagattgcttaccaaattaacgataaccaccgcatcggcgcatcgcttaacggccagcagggacataattacacggttgaagagtcttataacctgaccgcttcttcctggcgcgaagccgatgacgtaaacagacggcgcaatgccaacctcttttacgaatggatgcctgattcaaattggttgtcgtctttgaaggcggacttcgattatcagaaaaccaaagtggcggcggttaacaacaaaggctcgttcccgatggattattccacctggacgcgcaactataatcagaaggatttggacgaaatatacaaccgcagcatggacacccgattcaaacgttttactttgcgtttggacagccatccgttgcaactcgggggggggcgacaccgcctgtcgtttaaaactttcgtcagccgccgtgattttgaaaacctaaaccgcgacgattattacttcagcggccgtgttgttcgaaccaccagcagtatccagcatccggtgaaaaccaccaactacggtttctcactgtctgaccaaattcaatggaacgacgtgttcagtagccgcgcaggtatccgttacgaccacaccaaaatgacgcctcaggaattgaatgccgagtgtcatgcttgtgacaaaacaccacctgcagccaacacttataaaggctggagcggttttgtcggcttggcggcgcaactgaatcaggcttggcgtgtcggttacgacattacttccggctaccgtgtccccaatgcgtccgaagtgtatttcacttacaaccacggttcgggtaattggctgcccaatcccaacctgaaagccgagcgcagcaccacccacaccctgtctctgcaaggccgcagcgaaaaaggcatgctggatgccaacctgtatcaaagcaattaccgcaatttcctgtctgaagagcagaagctgaccaccagcggcactcccggctgtactgaggaaaatgcttactacggtatatgcagcgacccctacaaagaaaaactggattggcagatgaaaaatatcgacaaggccagaatccgcggtatcgagctgacaggccgtctgaatgtggacaaagtagcgtcttttgttcctgagggttggaaactgttcggctcgctgggttatgcgaaaagcaaactgtcgggcgacaacagcctgctgtccacacagccgctgaaagtgattgccggtatcgactatgaaagtccgagcgaaaaatggggcgtattctcccgcctgacctatctaggcgcgaaaaaggtcaaagacgcgcaatacaccgtttatgaaaacaagggctggggtacgcctttgcagaaaaaggtaaaagattacccgtggctgaacaagtcggcttatgtgtttgatatgtacggcttctacaaaccggctaaaaacctgactttgcgtgcaggcgtgtacaacctgttcaaccgcaaatacaccacttgggattccctgcgcggtttatatagctacagcaccaccaatgcggtcgaccgcgatggcaaaggcttagaccgctaccgcgccccaggccgcaattacgccgtatcgctggaatggaagttttaa

SEQ ID NO: 42777 - DNA, 1104 bp, Neisseria meningitidis
atggcagagatctgtttgataaccggcacgcccggttcagggaaaacattaaaaatggtttccatgatggcgaatgatgaaatgtttaagcctgatgaaaacggcatacgccgtaaagtatttacgaacataaaaggcttgaaaataccgcacacctacatagaaacggacgcaaaaaagctgccgaaatcgacagatgagcagctttcggcgcatgatatgtacgaatggataaagaagcccgaaaatatcgggtctattgtcattgtagatgaagctcaagacgtatggccggcacgctcggcaggttcaaaaatccctgaaaatgtccaatggctgaatacgcacagacatcagggcattgatatatttgttttgactcaaggtcctaagcttctagatcaaaatcttagaacgcttgtacggaaacattaccacatcgcttcaaacaagatgggtatgcgtacgcttttagaatggaaaatatgcgcggacgatcccgtaaaaatggcatcaagcgcattctccagtatctatacactggataaaaaagtttatgacttgtacgaatcagcggaagttcataccgtaaataaggtcaagcggtcaaagtggttttacactctgccagtaatagtattgctgattcccgtgtttgtcggcctgtcctataaaatgttgagcagttacggaaaaaaacaggaagaacccgcagcacaagaatcggcggcaacagaacagcaggcagtacttccggataaaacagaaggcgagccggtaaataacggcaaccttaccgcagatatgtttgttccgacattgtccgaaaaacccgaaagcaagccgatttataacggtgtaaggcaggtaagaacctttgaatatatagcaggctgtatagaaggcggaagaaccggatgcgcctgctattcgcatcaagggacggcattgaaagaagtgacggagttgatgtgcaaggactatgtaaaaaacggcttgccgtttaacccatacaaagaagaaagccaagggcaggaagttcagcaaagcgcgcagcaacattcggacagggcgcaagttgccacattgggcggaaaaccgtag

SEQ ID NO: 42778 - DNA, 732 bp, Neisseria meningitidis
gtgtcgcgcgaaatcaatgcgggcaggcatcatttcctctacggcggcatcagcggcggcggcgtgcattattgggataacaaagatttcagcgaacagagcctgcgcctgtcgttcggctataaaaaccgttcggtaacgcgctcgttcggcatcgtgccgtttgtcgagcaaaacctcttaggcggcagccgatacaatttcgtcggcggcttcaatgccgatttctcccaacgcttgagcgaacgctggcggttgacactaaacgcgggcaatatgtggaagcattatcaggaagaccgcaccgccgcccgatacgacagccatatgccgctggcgggcgcgacgctgatgtattccgcgccgaaagactggctgctttacggcggtgcggactggtcgcacaacataacgaaagaggcggaacaggcttccatccgcaagggtttgcgtgtcggcgcggtcaaaacgttcgacggcggcttgggtctgcgggcaaacctgcgctatacccgcaggatgtttgacgcacccgggaccattgtgtaccgcttcccgcgcaaagaccacgaatatcaggcaaacctgtcgttgtggcatgacaaaatctcttggaagggctttacgccgcaactcaatttccgctatctgaaaatcgacagcaatatgaaaagtttttacacacgcaaaaacatgcagattttcatgagcgtggaaaaggatttcaaataa

SEQ ID NO: 42779 - DNA, 1413 bp, Neisseria meningitidis; identical to SEQ ID NO: 38542

SEQ ID NO: 42780 - DNA, 534 bp, Neisseria meningitidis
atgcccgtatttgccagcctgccgccgcaatatatggacacactgccagaatgcccgattaccaacaccgcctccctgctgccgcacagcgggcgtatggttctgatagaccgcattacccgatacggcgatgattttgtcgaagcaggggcacaggtaagccccaatcacatccttttacttgacgacaaactgccctacacggcatttatcgaactgatggcacaggctgtcggcgcgtatgccggtatccaagcccgaaaaaacgcacggtcggtccggctcggcttcctgctcggcacgcgcaaacttgaaatcttcgcccaatccgtcccaatcggcacgcatctgctggcaacggcgcatatgtctattcaggatgccgggggtatgggcgtgtttgactgcgaactgcgttggacagacgcgccggaaacttcgtccgaaacactcccttcagacggcattttggcgcgcgcctcactcaacgtgtacagccccgaacaccctgccggaacaaccgatgccgtctga

SEQ ID NO: 42781 - DNA, 204 bp, Neisseria meningitidis; identical to SEQ ID NO: 38753

SEQ ID NO: 42782 - DNA, 474 bp, Neisseria meningitidis
atgaaaaaattattggcggccgtgatgatggcaggtttggcaggcgcggtttccgccgccggagtccacgttgaggacggctgggtgcgcaccaccgtcgaaggtatgaaaataggcggcgcgttcatgaaaatccacaacgacgaagccaaacaagactttttgctcggcggaagcagccccgttgccgaccgcgtcgaagtgcatacccacatcaacgacaacggcgtgatgcggatgcgcgaagtcaaaggcggcgtgcctttggaggcgaaatccgttaccgaactcaagcccggcagctatcacgtgatgtttatgggtttgaaaaaacaattaaaagagggcgacaagattcccgttaccctgaaatttaaaaacgccaaagcgcaaaccgtccaactggaagtcaaaatcgcgccgatgtcggcaatggaccacggtcatcaccacggcgaagcgcatcagcactaa

SEQ ID NO: 42783 - DNA, 480 bp, Neisseria meningitidis
atgagtaaacacacttatccgataacacctgccgtgcgcgttttgcgtgaaaacggcatcgaatttgaaccttttacctatgcctatgaggaacacggcggcacggcgcagtttgcccgactattcggcaaagacgaacacttggtcattaaaaccattgttttgcaagatgaaaacggtaaggggctgattgtcttgatgcacggcgacaagcagatttcaacccgcaatctggcgcggcatttgggtgcgaaacacattgaacccgccacgcccgtacaggcaaacaagtggacgggctatctggtcggcggcacaacgccgttcggcatccggacaaagttggatatttacgtcgaacagtcggtgatggatttggaaaccatctatatcaacggcggaaaacgcgggttcattatcggcatccgtcccggagatttaaatattttgaacccgaaaacaatacaggcggcggtttga

SEQ ID NO: 42784 - DNA, 165 bp, Neisseria meningitidis
atgggacaggttgcgttttacgaaaagatgattgggctgtggtcggccaaaagccgtgaggcaagcgaacaggcggacttggctgcgtttgaatttgcggagggcgaactggccaattatcgggaaatgctgaaacggcacctgcaaaccaaaagtgtggaatag

SEQ ID NO: 42785 - DNA, 354 bp, Neisseria meningitidis
atgaagcagattatcatcctacaatccgccgtattgtccatatgcgccgcagttgcctttgctgtatggggttttgccggattcctttcggcggtcggtggcggtttgtcctacctgcttcccacgtttgttgcagttttacttttaaaacttttcaggggaaaccccttcctgcaaagcaggatgttcgtcttcggagagattttaaaagtagtgctgtcgctgttgtccatgcttgccgtatttgcaatatggcatcaatcgctggtgttcgccccgtttctgatggggctgctcggtgtcagccatttggtttttttagtattgttgagagtgaaagattatggcaggtga

SEQ ID NO: 42786 - DNA, 717 bp, Neisseria meningitidis
gtgttcaataatttccttgcttcgctgccgtttatgacggaaacacgcgccgatatgattgtcagcgcgtttttgcctatggtcaaagccggcttcgcggtctctctgcctttggcggcagcttctttcgttatcggtatgatgattgcggtagccgtggctttggtgcggattatgcccgccggcggcatcgtgcggaaaatcctgctgaaattggtggaattttatatttccgtcattcgcggtacgccgctgttggttcagcttgtgattgtgttttacgggctgccttccgtcggcatctatatcgacccgattcctgccgccatcatcggcttttcgctcaatgtcggcgcatacgcttccgaaaccatacgcgcggcaattttgtccgtacctaaaggccaatgggaagcaggtttctccatcggcatgacctatatgcagacgttccgccgcattgtcgcgccgcaggcattccgcgttgccgtgccgcctttgagcaacgagtttatcggtttgtttaaaaacacctcgctcgcggcagtcgtgacggtaacggaattattccgcgtcgcgcaggaaacggcaaaccgcacttatgactttttgcccgtctatatcgaagccgctttggtttactggtgtttttgtaaagtgctgttcctgattcaggcgcgtttggaaaaacgtttcgaccgctacgtcgccaaataa

SEQ ID NO: 42787 - DNA, 1230 bp, Neisseria meningitidis
atggcgttcggcaaatccttatttcatgcgatcggccgcgtcagcctggtcaggcagattgccgccggtttggcgttgggcatcgtaatcggttcggtttccccgcaactgggcttggcggcaggcttgttcggcagcctgtttgtcggtgcgctcaaagcggtcgcgccggttttggtatttattttggtggcggccacaatcgcgcagcaccaaaaaggcaacaaggcgcatatcaggccgattatcgtcctttacctcatcggtacgttttccgcagccctgaccgccgtcatcgccggtatggttttcccgacgcacattgttttggcgggcgcgggcgatgtgtccgccgcgccgccttccggcattgtggaagtattgaaatcgctgctgatgaacctggtcgccaacccgattaacgcgattgccaatgccaactatatcggcattttggcttgggctttggttttgggcgcggcgttgcggaatcacggttcggacgttacgcggcaggtcgttgccgatttggcggaagcggtttccaccgtcgtgaaatggattatccgttttgcccctttgggcattttcgggctggtgtcgtccacaatcgcggagacgggtttcggcgcgctggcggggtacgcgaagctgcttgcagtgctgttgggctgtatggcgtttatcgcgctggcggtcaatcccgccatcgtgtggtggaaaatccgccgcaaccctttcccgctggtgtttacctgcctgcgtgaaagtggcgtttatgccttctttacccgttcttccgccgccaatatccctgtgaacatggcattggcgaaaaagctgggtttgcacgaagacacttactccatctccattccattgggtgcaaccatcaatatggccggtgcggcaatcaccattaccgttttggcgatggctgcggcgcacacgcaaggcattacggttgacttcgccactgccctgctgctgagcctggtggctaccgttagcgcgtgcggtgcatccggtgtggccggtggctcgttgctgctgattcctttggcgtgcagcctgttcggtatcgataacgatgtggccatgcaggtggttgccgtcggcttcattatcggcgtgattcaggattcggcggaaactgcgctgaactcttcgaccgacgttttgtttaccgctgccgccgatttgggccgacagaggaaccgggcggaataa

SEQ ID NO: 42788 - DNA, 1098 bp, Neisseria meningitidis
atgaaccagacatttaccttgcccgatacgcgcccgtatccccaaaatccgattaaaaaccacctgctgctcaatgcctaccagttggcgcataattcttcccaggcttcgcgcaaactctcgtccggccaacttcaaaccgaaatcaggggaatgcttgagcaaaaccactatatcaacctttccctcgcgctgacgatgtcgcccgatgccggaacttatgccgcgctgctttccagtgtgaacgcggtactcgattgcgagaaagaaggcgaagtgcagtggttcgccctgccggtcgtgctggtgtccggctgcaaaaaagaacgtgcaatcgagatgaagctgccgacggaggcattgtttgcctgcctgcaaaactatccgcacctgcgcgcgttgacgcaagagacgcaatggctgccttatcttgtgcattcttccgatttgagcgcggtcgcgccggatgagtggtggcgtgccaaacaaaataccgaagcggcggcgcaacacttgcgccgtttcgccccgcgccctttgctgttgcccgaagggcagtccgtccacgtcgtttacgcgctgggtttcggcagcggcaaagttcagacggcattgggtcagaaccttcttcaggcaggtctgcccctgatgcaggtatggcaggaaaatcttgcatcggaaggcgttacgctgtttgccaatccgctttccccggattctccggtacgcgcgctttcagacggcagccacacgcgccaacgtatggcgatggatgtgtttgcggcaaacgcgatacgcgccgtccgtatgcagagtccgcgcgtcggcgtggtcgctgcggcaaaggcgggcggacagattttattcgggtttaatgcgaccgacggcgcgtttgaagtcgtgccgcaggtgttttcgtggcagctttcctttaccgacaacatcgccgtcatccagcaaaatttcctcgacctgatggcggagtgccgcgtggaacacgtttacctgttgcacaatcccttgggcgaacaggaaagcatcccgagctatgcggaagcattgaaacgggaagggcacaatccgtttttcagcgcatag

SEQ ID NO: 42789 - DNA, 951 bp, Neisseria meningitidis
atgtacttaggaatagacgtttcaaagctcacaatagattgctgtttgattgtagacggtcaaaattatcaaaagaagtttcagaacaacaaaggaggatttgaacaattaataaattggctacaaagtcataaagtaaacgataagctccattgcgtgtgcgaagcaacaggcacatattacgaagcattagccgaatatctttattcaagatatacaattaccgtagagaatccacgaaagataaaaggatatgcgatagcagaactacaacgatcaaaaacagatacacaagacgcaaagttgatagcccaatattgccaagaccgaaagcacaaattaaaagcatggaaaccgccgacaaaagaacagaagcaattacaggaaatcgcccgatatttagactatctgaaacagcaacgcgcaacagaaaaagctaaacaacacgaagcacccgactatatcaaatcccatattcaaacaactatttcaaacctgacagcacaaatacagatagtcaaaaagcaattactccagttctacaaagacaatccaagttataacaatctacgcaaaaggctgaaaacaataacaggcataggcgagcaagcgacagcagtattgctatcaacctataaaagacatgaatttaaaaatgcaagacagttcacggcttatctaggcctagaccctagaaaatttcaatcaggaacaagcgtgaacggaaaaagcagaatatcaaaaataggaagttcggaaataaggaaaagcctttatatgcctgcacttgttgcatatcgttgtaatgccttccctgaatttgtagggcgtctgaaaaataaagggaagcatataaaattgatattaattgccatcatgcggaaactggcggtaatagcgtttacgattttgcaaaacggccaagatttccaagtggaaagatataaataa

SEQ ID NO: 42790 - DNA, 318 bp, Neisseria meningitidis; identical to SEQ ID NO: 39936

SEQ ID NO: 42791 - DNA, 1209 bp, Neisseria meningitidis; identical to SEQ ID NO: 38616

SEQ ID NO: 42792 - DNA, 1146 bp, Neisseria meningitidis
atgaccgaaactcaatccctagagcttgccaaagagctgatttcccgaccatccgttacccctgacgacagggattgccaaaaactccttgccgaacgcctgcacaaaatcggttttgcggctgaagaactccatttcggcgacaccaaaaacatctggttgcgacgcggcacgaaagctcccgtcgtctgttttgcagggcataccgacgttgtaccgacaggtcctgtcgaaaaatgggattcgcccccgttcgaaccggccgagcgcgacggaagattatacgggcgcggcgcggcagacatgaaaaccagcattgcctgtttcgttaccgcctgcgaacgcttcgttgccaaacatcccaaccaccaaggcagcattgcgcttctgattacttccgacgaagagggcgacgcgttggacggcacgaccaaagtcgtcgatgtattgaaagcgcgcgacgagcttatcgactactgcatcgtcggcgaaccgaccgccgtggacaaattgggcgatatgattaaaaacggtcggcgcggctcgctgtcgggcaacctgaccgtcaaaggcaagcaaggccatattgcctatccgcatttggcaatcaatcccgtgcatacttttgccccggccttgttagagctgacgcaggaagtctgggatgaaggcaacgaatatttcccgccaaccagctttcaaatttccaatatcaacggcggcacaggcgcgaccaacgtcattccgggcgagctgaacgtcaaattcaatttccgcttctccaccgagtccaccgaagcagggctgaaacaacgcgtccacgccattttggacaaacacggcgtgcaatacgatttgcagtggtcgtgttcggggcagccctttctgacccaagcgggcaaactgaccgacgtggcacgcgcagccattgccgaaacctgcggcattgaggccgaattgtccaccaccggcggcacttcggacggacgcttcatcaaagccattgcgcaagaacttatcgaattaggcccgtccaatgcgaccatccaccaaatcaacgaaaacgtgcggctaaacgacattccgaagctgtctgcggtgtatgaggggatattggcgcgcttgttggctggaaatgccgtctga

SEQ ID NO: 42793 - DNA, 483 bp, Neisseria meningitidis
atgccccaactcactttagacaaaaccgatattaaaatcttacaggttctccaggaaaacggcaggctgaccaatgtcgaactgtccgaacgtgtcgcactttcgccttctccgtgcctgcgccgtctgaagcagttggaagatgccggtatcgtccgccaatatgccgcgctgctgtctccggaatctgtcaacttgggacttcaggcatttatccgcgtttccatccgcaaagcaaaagacgcgcgggaagactttgccgcatcggttcgaaaatggcctgaagtcttgagctgcttcgccctgacaggggaaaccgactacctgcttcaggcgttttttaccgatatgaacgcgttttcccattttgttttggatacgctcctgtcccaccacggcgtacaagatgcgcaatcgagctttgttttaaaagaaatcaaacacaccacctccctgccgctcaaccacctgctgaaggaatag

SEQ ID NO: 42794 - DNA, 1194 bp, Neisseria meningitidis
atgtaccgacacatcgaatactatcctggcgacccgattttgagtttggtcgaaaccttcaaaaacgacccgcgccccgaaaaagtcaatttgagcataggcatttatttcgacgacgaaggcaaaatgcccgtgttggaatccgtgagccgagccgaaaccgcccgtgccgccgcgcctgcgccgtcgccctacctgccgatggaaggcttggacacttaccgcagcgcggtgcagcatttattgttcggcaaagacaatcccgcgcttgcgcaagggcgcatcgttaccgtacaaaccttgggcggctcgggcgcgctcaaagtcggggcggacttcctgcaccgctggtttcccgaagcgcgcgcctacgtcagcgacccgacttgggacaaccatcgcggcatttttgaaggcgcaggtttcgaggtcggcacttacccatattacgaccctgccactgtcggcgtgaaattcgacgaaatgaccgcgtttttcaacaccctgcccgaaaacagcgtcctgatcctccatccctgctgccacaacccgaccggcgtggatatgtcggaacggcaatgggacgaagtgttgcacatcatcaaaacgcgcaaactgattccgtttatggacattgcctaccaaggattcggcggcgatttggacagcgatgcctacgccgtccgcaaagcggtggaaatggaattgcccttgttcgtcagcaattccttctcaaaaaacctgtcgctctacggcgagcgcgtcggcggcttaagcgtggtttgcccgaataaggaagaagcggatttggtgttcggacagctcaaattcaccgtccgccgcatctactccagcccgcccgcgcacggcgcgtatatcgccgccgacgtgatgaacagccccgaactttacgccttgtggcaaaacgaggtttatatgatgcgcgaccgcatccgtgcgatgcggcagaaactttatgatgtcttaactgcgcaaatccccaatcgcgatttcacttatttcatcaaacagcgcggcatgttcggctacacaggattgagcgtggaacaagtccgcaggctgcgcgacgaatttgccgtttacctgctggattccggcaggatgtgcgtcgccggactgaatacgtcgaataccgactatgttgcccgcgcatttgcggaagtcttgaaataa

SEQ ID NO: 42795 - DNA, 519 bp, Neisseria meningitidis
gtgaaagatagtttaatggacgcctttgatttttttatgcaaggcaattttaaaaaaattgcaactgaacaaggtttagaccgtaaatattttatattccaatatatcgtatgtaatttatctgccatttcttctttttgtctaatgaagattattcatacttatactattctctatatattaatagctgtcatcggtattattaatggctttctcttgagaagcaaggttctatctatagtaaaaaataaacaaaagtttttatctgacatgtttcccttggaaatgcctttcttttttgtagaatacaaaatacctatcttggctagattcttgaataggggaatgaaatggctttatctcccaagttttttctgtttagttgcgatttgtttctcaatatatatccttaatgaagaaggggggtggatgccttattttgcctgctattggtttggactttgttatccagtaagcacttattacgtttttttatccagagattataaacatatctaa

SEQ ID NO: 42796 - DNA, 897 bp, Neisseria meningitidis
atggagtctgaaaacattatttccgccgccgacaaggcgcgtatccttgccgaagcgctgccttacatccgccggttttccggttcggtcgccgtcatcaaatacggcggcaacgcgatgaccgaacctgccttgaaagaagggtttgcccgcgatgtcgtgctgctgaagctggtcggcattcatcccgtcatcgttcacggcggcgggccgcagatcaatgcgatgcttgaaaaagtcggcaaaaagggtgagtttgtccaaggaatgcgcgttaccgacaaagaggcgatggatattgtcgaaatggtgttgggcgggcatgtcaataaagaaatcgtgtcgatgattaacacatatggcggacacgcggtcggcgtaagcggacgcgacgaccatttcattaaggcgaagaaacttttgatcgatacgcccgaacagaatggcgtggacatcggacaggtcggtacggtggaaagcatcgataccggtttggttaaagggctgatagaacgtggctgcattcccgtcgtcgcccccgtcggcgtaggtgaaaaaggcgaagcgttcaacatcaacgccgatttggtagcaggcaaattggcggaagaattgaacgccgaaaaactcttgatgatgacgaatatcgccggtgtgatggacaaaacgggcaatctgctgaccaaactcacgccgaaacggattgatgaactgattgccgacggcacgctgtatggcggtatgctgccgaaaatcgcttctgcggtcgaagccgccgtcaacggtgtgaaagccacgcatatcatcgacggcaggttgcccaacgcgcttttgctggaaatctttaccgatgccggtatcggttcgatgattttgggcggtggggaagatgcctga

SEQ ID NO: 42797 - DNA, 1290 bp, Neisseria meningitidis
atgaaaaaactcaacacccaatcgcccgatttccaagccggactcaaagccctgctggcttttgaaaccgcgcaaaaccccgaaaccgaacgcatcgtcgccgacatttgcgccgacgtgcaaaagcgcggcgatgcggctttgattgaatacaccaacaaattcgatcagacaaacgctaaaagcatcgatgatttaatactcacgcaagccgatttgaacgcggcgttcgagcgcattccgaacgacgttcagacggcattgcagaccgccgcccgccgtgtcgaaagctaccaccaacgccaaaaaatggaatcgtggagctacaccgatgaagacggcacgctgttgggacaacaaatcacaccgcttgaccgcgtcggcatttacgtccccggcggcaaggcggcgtatccgagttccgtcatcatgaacgccatgcccgcccacgtcgcaggtgtgaaagaaatcatcatggtcgtgccgacaccaaaaggcgaacgcaacgacatcgtacttgccgccgcatacgtcgccggcgtaaccaaagtcttcaccgtcggcggcgcgcaggcggttgccgccctcgcctacggcacggaaaccatcccccaagtcgataaaatcaccggtccgggcaacgccttcgtcgccgccgccaaacgccgcgtgttcggcgtggtcggcatcgacatggtggcggggccgtctgaaatcctggtcatcgccgacggcacgacacctgccgattgggtggcgatggatttgttcagccaggccgaacacgacgaaattgcccaagccatcctcatcggcacgtcgcaagcgtatctcgacgaagtagaagcagctatggaccgcctgatcgaaactatgccgcgccgcgacatcatcgaagcctcgctcggcaacaggggcgcgatgatactcgccaaagacttggacgaagcctgcgaaatcgccaactacatttcccccgaacacttggaactgtcagtcgaaaacccgcaggaatgggcgaaaaaaatccgccacgccggtgcgattttcatgggacgctacaccggcgaaagcctcggcgactactgcgccggtccaaaccatgtgttgcccaccagccgaaccgcccgcttttcctcgcctttggggacatatgatttccaaaaacgctccagcctgattcaggtttcggaacagggcgcgcaaaaattaggcgaaaccgccagcgtgctggcacacggcgaaagcctgaccgcccacgcccgcgcggcagagttccgtatgaaataa

SEQ ID NO: 42798 - DNA, 771 bp, Neisseria meningitidis
atgaaaatcaccacttggaatgtcaattcgctcaatgtgcggctgccgcaggtgcaaaacctgcttgccgacaatccgcccgatattttggttttgcaggaactcaaactcgatcaggacaaatttccggccgccgctttgcaaatgatgggctggcactgtgtttggagcgggcagaaaacctacaacggcgtggcaatcgtcagccgcagcgtgccgcaggacgtgcatttcggtttgcccgcactgccggacgatccgcaacggcgcgtgattgcggcaaccgtcagcggcgtgcgcgtcatcaatgtctattgcgtcaacggcgaggctttggacagccccaaattcaaatataaggaacagtggtttgccgcactgacggagtttgtccgcgatgaaatgacccgccacggcaaactggtgttgctgggcgatttcaatatcgcgcctgccgatgcggactgttacgaccctgaaaaatggcacgaaaaaatccactgttcgtccgtcgaacggcagtggtttcaaaacctgctggatttgggactgaccgacagcctgcgccaagtccatcccgaaggcgcgttctatacctggttcgactatcgcggcgcgatgttccaacgcaaactgggcctgcgtatcgaccatattttggtgtcgcctgcgatggcggcggcgttgaaggatgtccgcgtcgatttggagacgcgcgcgctggagcgtccgagcgaccacgcgccggtgacggcagaattcgattggtaa

SEQ ID NO: 42799 - DNA, 1977 bp, Neisseria meningitidis
atgtccaaactcaaaaccatcgctctgaccgcatcaggtctgtccgtttgtccgggtttcctatacgcccaaaacacctcatcacaccaaatcggtttggcgattatgcgcttaaactcttcaatactcgacctgcccccgacaaaacaatatttccaatccggcagcctgtggggcgagctgcgccaaggcttccggatgggcgaagtcaatcccgaactggtacgccgccacgaaagcaaattcatcgcaagccacagctatttcaacagggtcatcaaccggagtagaccctatatgtaccatatcgccaacgaagtcaaaaaacgcaatatgcccgccgaagccgccctgcttcccttcatcgaaagcgcgttcgtcaccaaagccaaatcacacgtcggcgcatcaggattatggcagtttatgcccgctaccggcaggcattacggcctggaaaaaacaccggtttacgacggcaggcacgacgtttacgccgccaccgatgccgcactcaactatctgcaatacctctatggactgttcggcgactggccgcttgcctttgccgcctacaactggggtgaaggcaacgtcggacgcgccatcaaccgcgcccgcgcccaagggctcgaaccgacctacgaaaacctgcgtatgcccaacgaaacgcgcaactatgtccccaagctgctcgccgtgcgcaacattattgccactccccaatctttcggcatgaatatcagcgacatagacaacaaaccctattttcaggcagtcgaaccggatcgtccgctcgacaacgaagccatcgcccggcttgccggcatcacgcaaagcgagctgctcgccctaaaccccgcattcaacgtccccgcgtttatccccaaaagcaaacgcaaactgctgcttcctgtcgcgtccgtacaaaccttccaaagcaactacctcaacgccgcacccgacagcctgttttcatgggaagtctatacgcctgccgccaaaaccagcctgtccgacatctcgacggcaaccggcatgagcattgccgacatcaaacgcctcaacaacctgaacggcaaccttgtcaacgcaggacgcagcatccttgtcgccaagaacggcaaaacccttcagacggcatcggaatccgtcgtttccatcgacatcgacaatacgcccgacacctaccgttccaatatgccggcaggcacggtgaacgtcggcattgcccgaatccgacccgccgccgcacagacagcggacattaccgtcgcacctttgccgcagaaaaccgtccgtacggaacccgatccccttgtccgtattgccgaacctgcccttgcgacagccgcagcgcaacctcaaaccgaaaaacagaccgccatgccgtctgaaacccaaaccgcaacactcgcgcagatcatcccccaaaacgacatgcaggcggcagacgaactcatgcagcttgttgcccgaaacaacctgcgccgacaggctgaagaaaccatctccgccgtcatcggcacgcctgacacagttgccgaacacaaaatttccgcatctccgcaacataccgctgccgccgacggcaaacgccgggtacgtttggaaacgcgcgtagccaaagctgccgacggcgaagccgaaatctccccgctccatgccagcatccaccgcgttgtagaaggcgacaccctgttcaacattgccaaacgctacaacgtcagtgtagccgacctgattgtcgccaacaacatcaaaggcaacaccatccaaaaaggacaggtactccgcctggcgcaggcagcccctgcccaaacccgtattgaaaaagtatcctacaccgcgcgcaaaggcgacaccttcaaaagtatcgccgcgcgcttcaatatccatatcgacgacatccgccggctcaatcccaacctgaacaccatcaatccgggacagagggtcaaactgattggaagctga

SEQ ID NO: 42800 - DNA, 759 bp, Neisseria meningitidis
atgaaacagaaaaaaaccgctgccgcagttattgctgcaatgttggcaggttttgcggcagccaaagcacccgaaatcgacccggctttggtggatacgctggtggcgcagatcatgcagcaggcagaccggcatgcggagcagtcccaaaaaccggacgggcaggcaatccgaaacgatgccgtccgccggctacaaactttggaagttttgaaaaacagggcattgaaggaaggtttggataaggataaggatgtccaaaaccgctttaaaatcgccgaagcgtctttttatgccgaggagtacgtccgttttctggaacgttcggaaacggtttccgaagacgagctgcacaagttttacgaacagcaaatccgcatgatcaaattgcagcaggtcagcttcgcaaccgaagaggaggcgcgtcaggcgcagcagctcctgctcaaagggctgtcttttgaagggctgatgaagcgttatccgaacgacgagcaggcttttgacggtttcattatggcgcagcagcttcccgagccgctggcttcgcagtttgccgcgatgaatcggggcgacgttacccgcgatccggtcaaattgggcgaacgctattatctgttcaaactcagcgaggtcgggaaaaaccccgacgcgcagcctttcgagttggtcagaaaccagttggagcagggtttgagacaggaaaaagcccgcttgaaaatcgatgcccttttggaagaaaacggtgtcaaaccgtaa

SEQ ID NO: 42801 - DNA, 585 bp, Neisseria meningitidis
atgatcagcagactgaccggcaaactggttgaaaaaaaccctccgcaaatcgtcatcgatgtcaacggtgtcggctatgaggccgacgtatcgatgcagaccttctacaacctgccgcccgtgggtgaaagcgtacaactgtttacccagcttatcattcgggaagacgcacatcttttatttggttttgccactgcggaagaacgcaagaccttccgccaactgatcaaggtcggcggcatcggcgcgaaaacggctttgggcattttgtcggcaatgactgccgacgaactggcgcgggcggttgcagaagaagatgtcaaacgcctctcctccgccccgggaatcggcaaaaaaaccgccgaacgtatggttttggaactgcgcggcaagctggtcgcgcatacggtaacggacgggctgtttgccgccgcacccgccgccgacgaaacggaagacatcgtcagcacgctgcttgcgctgggttacagcgaacgcgaagcaaaagcggcggtcaaaggcgttccggaggggacggacgtgggcgaaggcgtgcgccttgctttgaaaaacctgctgaaataa

SEQ ID NO: 42802 - DNA, 474 bp, Neisseria meningitidis
atggaacaaaaagggtttacattgattgagatgatgatagtcgtcgcgatactcggcattatcagcgtcattgccataccttcttatcaaagttatattgaaaaaggctatcagtcccagctttatacggagatggtcggtatcaacaatatttccaaacagtttattttgaaaaatcccctggacgataatcagaccatcgagaacaaactggaaatatttgtctcaggctataagatgaatccgaaaattgccaaaaaatatagtgtttcggtaaagtttgtcgataaggaaaaatcaagggcatacaggttggtcggcgttccgaaggcggggacgggttatactttgtcggtatggatgaacagcgtgggcgacggatacaaatgccgtgatgccgcttctgcccaagcccatttggagaccttgtcctcagatgtcggctgtgaagccttctctaatcgtaaaaaataa

SEQ ID NO: 42803 - DNA, 537 bp, Neisseria meningitidis
atgtcgaaaaaatggtatgttgtacaggcgtattcggggtttgagaagaatgtccaacgaatattggaagagcgcattgcccgtgaggagatgggagattatttcggacaaattctggtgcctgtagagaaagttgttgatatccgcaatggtcgtaagactattagtgaaagaaagtcatatcctggttatgtgctagttgagatggaaatgacagatgactcttggcatcttgtaaaaagcaccccccgtgtttccggttttattggagggagggctaatagacctacgccgattagtcagagagaggctgaaattattttacagcaggttcagaccggcatagagaagccgaaaccaaaagttgaatttgaggtcggtcaacaggttcgtgtaaatgaagggccgtttgcggattttaacggggtggttgaggaggtcaattatgaacggaataagttacgcgtgtctgttcagatatttggtagagaaacacccgttgagctggagttcagccaggttgaaaagattaactga

SEQ ID NO: 42804 - DNA, 1815 bp, Neisseria meningitidis
atgcccgctgaaacgaccgtatccggcgcgcgccccgccgccaaactgccgatttacatcctgccctgcttcctttggataggcatcatcccctttaccttcgcgctcaggctgcaaccgtcgcccgacttttaccacgatgccgccgccgcagctggcctgattgtcctgttgttccttacggcaggaaaaaagctgtttgatgtcaaaatcccacccatcagcttccttctgtttgcaatggcggcgttttggtatcttcaggcacgcctgatgaacctgatttaccccggtatgaacgacatcgtctcttggattttcatcttgctcgccgtcagcgcgtgggcctgccggagcttggtcgcacacttcggacaagaacgcatcgtgaccctgtttgcctggtcgctgcttatcggctccctgcttcaatcctgcatcgtcgtcatccagtttgccggctgggaagacacccccatgcttcaaaacattattgtttacagcgggcaaggcgtaatcggacacatcgggcagcgcaacaacctcggacactacctgatgtggggcatactcgccgccgcctacctcaacggacaacgaaaaatccccgccgccctcggcgcaatctgcctgattatgcagaccgccgttttaggtttggtcaattcgcgcaccatcttgacctacatagccgccatcgccctcatccttcccttctggtatttccgttcggacaaatccaacaggcggacgatgctcggcatagccgcagccgtattccttaccgcgctgttccaattttccatgaacaccattctggaaacctttaccggcatccgctacgaaactgccgtcgaacgcgttgccaacggcggtttcacagacttgccgcgccaaatcgaatggaataaagcccttgccgccttccagtccgccccgatattcgggcacggctggaacagttttgcccaacaaaccttcctcatcaatgccgaacagcacaacatacacgacaacctcctcagcaacttgttcacccattcccacaacatcgtcctccaactccttgcagagatgggaatcagcggcacgcttctggttgccgcaaccctgctgacgggcattgccgggctgctgaaacgccccctgacccccgcatcgcttttcctaatctgcacgcttgccgtcagtatgtgccacagtatgctcgaatatcctttgtggtatgtctatttcctcatccctttcggactgatgctcttcctgtcccccgcagaggcttcagacggcatcgccttcaaaaaagccgccaatctcagcatactgaccgcctccgccgccatattcgcaggattgctgcacttggactggacatacacccggctggttaacgccttttcccccgccactgacgacagtgccaaaaccctcaaccggaaaatcaacgagttgcgctatatttccgcaaacagtccgatgctgtccttttatgccgacttctccctcgtaaacttcgccctgccggaataccccgaaacccagacttgggcggaagaagcaaccctcaaatcactaaaataccgcccccactccgccacctaccgcatcgccctctacctgatgcggcaaggcaaagttgcagaagcaaaacaatggatgcgggcgacacagtcctattacccctacctgatgccccgatacgccgacgaaatccgcaaactgcccgtatgggcgccgctgctacccgaactgctcaaagactgcaaagccttcgccgccgcgcccggtcatccggaagcaaaaccctgcaaatga

SEQ ID NO: 42805 - DNA, 483 bp, Neisseria meningitidis; identical to SEQ ID NO: 37555

SEQ ID NO: 42806 - DNA, 546 bp, Neisseria meningitidis
atgagcaaaattatttgtctgactgccggacacagtaacaccgacccgggcgcagtcaacggcagcgaccgtgaggcggacttggcgcaggatatgcgcaacattgtggcttcaatcctgcgtaacgattacggcctgaccgtacgcaccgacggcgaaggcaaaggcaatatgcccttgcgcgatgcggtcaagctgattcgcggctcggatgtggcgattgagttccacaccaatgcggcggcgaacaaaacggcgacaggcatcgaagccttgtccacgccgaaaaataaacgctggtgtcaggtgctgggcaaagccgttgccaagaaaaccggctggaaactgcgcggcgaagacggctttaagccggataacgcagggcaacattcgcgcctggcttatgcgcaggcaggcggcattgtgtttgagccttttttcatcagcaacgacactgatttggccttgtttaagacgaccaaatggggcatctgccgcgcgattgcggacgcgattgcgatggaattgggagcggcgaaggtatga

SEQ ID NO: 42807 - DNA, 855 bp, Neisseria meningitidis
gtgggtcaaagtggcgagttgttttgtttcggacagatgcctgtatggaaagtggaaaacctgccggaagttttgttgtcgggctattcgtctgaggaaggggagtgggtctgcctgaatgtgttgcagggcgatgtcgaagttcgtgcaccggacgggtcggcagaagtttggtcggcagacggcggcgattgtgtgtttgcgccgcagcaggtgttttctgtcaaaccgaaaacggacgatgccgaaatccgtttgtcgctgtattgcgcggcggcagactattttcacaaaaaatacgggatgagtgccacgcattctgcggtcgcggcggcacgggataccgtaccggcgggcagggcgttggatatgggctgcggacaggggcgcaacgcgctgtttctcggtttgaaggggtttgaagttactgcagtcgatcacaatcccgccgccttggcaaacgtggcggagctggcagaggcggagggtttgaacgtccgcacgctggaatatgatttgaacgccgccgccttgcagggcgagtttgattatattgtggcaacagtggtgctgatgttcctgatgccgcagcgcgtacccgacgtgattgccgatatgcaggcgcatacggcggcgggcgggtacaacttgattgtatcggcaatggatacggcggatttcccctgtccgatgccgttcccttttaaatttaaagagggcgagctgaaggattattatcgggattgggaactggtcgaatataaagaagaattgggttctatgcatgccaaagacgaaaacggcaatccgatacggtttaaatttgtaacgatgctggcgaaaaagcctgaataa

SEQ ID NO: 42808 - DNA, 528 bp, Neisseria meningitidis
atgaaacagaaaatctggtacacctacgatgatatccaccgcgtcatcaaagcattggcagaaaaaatccggaacgccggcgtcaaatacgacgccatgatcgctatcggcggcggcggctttattcctgcacgtatgctgcgctgttttctggaaattccgatttatgccgtaaccaccgcctattacgacagcgacaacgaaggacaagttaccgaagaagtcaaaaaagtccaatggctagaccccgtccccgaagccttacggggtaaaaacgtccttgttgtcgacgaagtggacgacagccgcgttaccatggaattttgcctgacagagctgctcaaggaagacttcggcactgtcggcgtcgccgtactgcacgaaaaaatcaaagccaaagcaggcaaaatccccgaaggcattccctatttcagcggcatcaccgtagaagactggtggatcaactatccgtgggacgcactcgacatcgacgaacacaaccgccttgccgaggccggccgaagctga

SEQ ID NO: 42809 - DNA, 258 bp, Neisseria meningitidis
atgcagaccgttaccatgtacacaggtccgttttgcccctactgcgcgatggcgaaaaggctgctgcacgcggcaggtgtcggacatatcgacgaaatccgtgtcgatgcaagccccgaagcctttgccgaaatgcagcagctttcgggacagcgcagcgtgccgcagattttcatcggcgaaacgcacgtcggcggatttaccgacctctaccgcctccagcaggaaggcgggctggacggactgctgaacccttaa

SEQ ID NO: 42810 - DNA, 366 bp, Neisseria meningitidis
gtgattaccgtcaaactgacccacgggctgacctacaatggcaaagtcgtatctgaattacgcctcaagccactgaccgtcggcggcgaactggcggcgttcgccctgattgatgacttgcccgagctgcccgaaaacgccacaaaagccgaactgctgcaacgcgacgtcctagagacgctgacctactggtcgcagcagattgaagcccaaggtatcccatccgacatcctgacggcgcagtggctgatggaaaacctctctaccgaagactaccataccgtgatggcggctcaggaggatttgcgcctaaaaccgtccgccgctacggcgagccccgatgcgccgtcggcggcggagcagtaa

SEQ ID NO: 42811 - DNA, 963 bp, Neisseria meningitidis
atgcccagtatctccgtccgccgcctgtttgatgacaaccaatacaaactgcaactcgcttgggccgccggcaattcgggtgcggacaaccgtatcggcgtagaggcggacaagcccgtcctcgccctagtcggacacctgaatttcattcatcccaaccaaatccaagtggtcggtttggcagagtcggaatatctgaaccgcctcgaatcgggggaaacgggttatcagtttggcgacctgttcgatatttctatgtctttggttattgtggcaaacggcttgccggtttccccgggactgcgcgactattgtcataaaaacgatattccactgctgacttccaaactcgaaagcccctatctgatggacgtgttgcggatttacctgcaacgcaccttggcggcatcgtccgtcaaacacggcgtatttctcgatgtgtttgaaatcggcgtgctgattaccgggcattccggcctgggtaagagcgaattggcattggaactgatttcgcgcggccacagcctgattgccgacgatgcggtcgagctgttccgcatcggcccggaaacgctggaagggcgttgttcgcctatgctgcgcgattttttggaagtgcgcggcttggggatactcaatatccgccatattttcggcgaaacttccatccgccccaaaaaaatcctgcaactcattatcaatttagtcgaggcggacgacgagtatatgaagcagcttgaccggttgagcatccgcaccgaaaccgaatccatcctcaacgtcaacgtccgttcggttacgctgcccgtcgccgtcggacgcaacctcgccgttttggttgaggcggcggtacgcaattacattttgcagttgcgcggtaaggacagtacgcgcgaatttttggaacgccatcagacgcaacttaaagaaaacgaacaacacaatgaagatcgtcctgattag

SEQ ID NO: 42812 - DNA, 519 bp, Neisseria meningitidis; identical to SEQ ID NO: 38951

SEQ ID NO: 42813 - DNA, 567 bp, Neisseria meningitidis
atgttattgcaaaacatccttccattcgcccattgccttttgcggaaggcacttcccgaaggtggcaatgctttggacggcaccgccggcaacggacacgacacccttttcctcgcacaaaccgcaggcatccgggggaaagtgtgggcattcgacatccagccgcaagccctgaacaacacccgatgccgtctgcaggaagcaggttacagcaatgtacggctcatcttggacggacatgaaaacctgaagcaatatattccaaagccgctggatgcagccattttcaatttcggctggctgcccggcggggacaaaagccttaccacccgcacggaaaccagcattgccgccctttctgccaccttatccctactgaaagaaaacggtatgcttattgccgtcctctatccgggacacgaaaacggcaaacaggaggcagaagcaatcgaacaatgggcaaaaaacctgcctcaagaacagtttgccgttttgcgttacggctttaccaaccggaaaaacagcccaccctatcttttggtatttgaaaaactgcgtcaaaaataa

SEQ ID NO: 42814 - DNA, 450 bp, Neisseria meningitidis
atggacgttcaactccccatcgaagccaaagacatccaaaaactcatcccccaccgctatccgtttctccagctcgaccgcatcaccgccttcgagccgatgaaaaccctgaccgcgattaaaaacgtcaccataaacgaaccccagttccaaggccattttcccgacctgcccgtgatgcccggcgtactcatcatcgaagcgatggcgcaggcgtgcggcacgttggcgattttgagcgaaggcgggcgcaaagaaaacgaattcttcttcttcgccggcatagacgaagcccgtttcaaacgccaagtcatccccggcgaccaactcgtctttgaagtcgagctgctgaccagccggcgcggcatcggcaaattcaacgccgttgccaaagtggacgggcaagtcgccgtcgaagccatcatcatgtgtgccaaacgcgtggtttga

SEQ ID NO: 42815 - DNA, 1131 bp, Neisseria meningitidis
atgaccaaacatctgcccctggccgtcctgactgctttgctgcttgcagcgtgcggcggttcggacaaaccgcctgccgaaaaaccggcaccggcggaaaaccaaaacgtattgaaaatttacaactggtcggaatatgtcgatccggaaaccgttgccgattttgaaaagaaaaacggcatcaaggttacttatgatgtgtacgacagcgatgaaacgctggaaagcaaggtgctgacaggcaagtccggttacgacattgtcgcgccgtccaatgcgtttgtgggcaggcagattaaggcaggtgcgtatcagaaaatcgataagtcgctgattcccaattataaacacctcaaccccgaaatgatgaggctgatggacggggtcgatcccggccacgaatacgccgtgccgttttattgggggacaaataccttcgccatcaataccgaacgcgtgaaaaaggctttgggtacggacaagctgccggacaaccagtgggatttggtgttcgaccccgaatacacgtccaaactcaagcaatgcggcatcagctatttggacagcgcggcggaaatctatcctatggtgttgaactatttgggtaaaaacccgaacagcagcaatacggaagacatcagggaggcaaccgccctactcaagaaaaaccgccccaatatcaaacgctttacttcgtccggctttatcgatgatttggcgcgcggcgatacctgcgtaacaatcggtttcggcggcgatttgaacatcgccaaacgccgtgccgaagaagcgggcggcaaggaaaaaatccgcgtgatgatgcccaaagagggcgtggggatttgggtggattctttcgtgattccgaaagatgcgaaaaacgtcgccaacgcgcacaaatacatcaacgacttcctcgacccggaagtgtcggcgaaaaacggcaatttcgttacttacgcgccttcgagcaagcctgcgcgtgagctgatggaagacgaatttaaaaacgacaatacgattttcccaaccgaggaggatttgaaaaacagctttatcatggtgcctatccagccggcggcattgaagtttatggtgcgccagtggcaggatgtgaaggcggggaaataa

SEQ ID NO: 42816 - DNA, 1335 bp, Neisseria meningitidis
atgactgacctgaacaccctgtttgccaacctcaaacaacgcaatcccaatcaggagccgttccatcaggcggttgaagaagtcttcatgagtctcgatccgtttttggcaaaaaatccgaaatacacccagcaaagcctgctggaacgcatcgtcgaacccgaacgcgtcgtgatgttccgcgtaacctggcaggacgataaagggcaagtccaagtcaaccggggctaccgcgtgcaaatgagttccgccatcggtccttacaaaggcggcctgcgcttccatccgaccgtcgatttgggcgtattgaaattcctcgcttttgaacaagtgttcaaaaacgccttgaccaccctgcctatgggcggcggcaaaggcggttccgacttcgaccccaaaggcaaatccgatgccgaagtaatgcgcttctgccaagcctttatgaccgaactctaccgccacatcggcgcggacaccgatgttccggccggcgacatcggcgtaggcgggcgcgaaatcggctacctgttcggacaatacaaaaaaatccgcaacgagttttcttccgtcctgaccggcaaaggtttggaatggggcggcagcctcatccgtcccgaagcgaccggctacggctgcgtctatttcgcccaagcgatgctgcaaacccgcaacgatagttttgaaggcaaacgcgtcctgatttccggctccggcaatgtggcgcaatacgccgccgaaaaagccatccaactgggtgcgaaagtactgaccgtttccgactccaacggcttcgtcctcttccccgacagcggtatgaccgaagcgcaactcgccgccttgatcgaattgaaagaagtccgccgcgaacgcgttgccacctacgccaaagagcaaggtctgcaatactttgaaaaacaaaaaccgtggggcgtcgccgccgaaatcgccctgccctgcgcgacccagaacgaattggacgaagaagccgccaaaaccctgttggcaaacggctgctacgtcgttgccgaaggtgcgaatatgccgtcgactttgggcgcggtcgagcaatttatcaaagccggcatcctctacgccccgggaaaagcctccaatgccggcggcgtggcaacttcaggtttggaaatgagccaaaacgccatccgcctgtcttggactcgtgaagaagtcgaccaacgcctgttcggcatcatgcaaagcatccacgaatcctgtctgaaatacggcaaagtcggcgacacagtaaactacgtcaatggtgcgaacattgccggtttcgtcaaagttgccgatgcgatgctggcgcaaggcttctaa

SEQ ID NO: 42817 - DNA, 363 bp, Neisseria meningitidis; identical to SEQ ID NO: 37674

SEQ ID NO: 42818 - DNA, 1836 bp, Neisseria meningitidis
gtgaacactactcctatccactccaaactcgccgaaatcaccgggcgcattattgaacgcagccgtccgacgcgtgaaaaatatctggcgaagatccgcagtgccaaacaaatgggacgcttagagcgcaaccagctcggctgcagcaacttggcacacggctatgctgccatgcctaaaagtatcaaaatcgaaatgcttcaggaaaccgtccccaacttaggcatcatcaccgcctacaacgacatggtttccgcacaccagccgtttaaagacttccctgaccaaatcaaagacgaagcgcagaaaaacggcgcgaccgcccaagtcgccggcggcacgcccgccatgtgcgacggcatcacgcaaggctacgccggcatggaattgtcgctgttctcccgcgacgtgattgccatgagtaccgccatcgggctgtcgcatcaaatgtttgacggcagcctgtttatgggcgtatgcgacaaaatcgttccaggtttgatgataggcgcgctttcgttcggtcatattccgggtatcttcgtccccgcaggcccgatgtccagcggtatcggcaacaaagaaaaagcccgcacccgccagcttttcgccgaaggcaaggtcggacgcaacgaacttttgaaaagcgaaatgggttcttaccacagcccgggcacctgcactttctacggcacggcaaactccaaccaaatgatgatggaaatgatgggcgtgcacctgcctgccgccgccttcgtccacccttacaccgacctgcgcgaagcgctgacccgctacgccgccggacacctcgcgcgcggcatcaaaaacggcacgattaaacctttgggcgaaatgttgaccgaaaaatcctttatcaacgccttgattggcctgatggcaaccggcggttcgaccaaccacaccatgcacctcgtcgctatggcgcgtgcggccggcgtgattttgaactgggacgacttcgacgaaatttcctccatcatcccgctgctcatccgcgtttatccgaacggcaaggccgacgtgaatcactttaccgcagcgggcggactgcctttcgttatccgcgaattgctgaatgcaggcctgttgcacgacgatgtcgataccgtcgtcggacacggtatgcgccactacaccaaagagcctttccttatcgacggcaaactcgaatggcgcgaagcccccgaaaccagcggcaacgacgacatcctgcgcaaagctgacaacccgttctcccccgacggcggtctgcgcctgatgaaaggcaacatcggacgcggcgtgattaaagtgtccgccgtgcgcgaaggctgccgcattattgaagcgcctgccatcgtgttcaacgaccaacgcgaagtgttggctgcgtttgaacgcggcgagttggaacgcgattttgtgtgcgtcgtccgctaccaaggcccgcgtgccaacggtatgcccgaattgcacaaactgaccccgcctttgggcatcctgcaagaccgcggcttcaaagtggcgctgctgaccgacggccgtatgtccggcgcgtccggcaaagttccagcctccatccacatgacacccgaagccctgatgggcggcaacatcgccaaaatccgtaccggcgacctgatccgcttcgactccgttagcggcgaactcaacgtcctgattaacgaaaccgaatggaatgcccgcgaagtcgaaagcatcgacttgggcgcgaaccaacaaggctgcggccgcgaactcttcgccaacttccgcagcatgaccagcagcgcggaaaccggtgccatgagtttcggcggcgaatttgcctga

SEQ ID NO: 42819 - DNA, 741 bp, Neisseria meningitidis
atgaatcctttaatctccgacttccaaactccgcaacaacgcacccccgttatcgtcgcccttgatttttccaacgaaaaagacacgctcggattcgtccgcaaccttgacccgacattgtgtcaaatcaaaatcggcaaagagctgtttaccgcgacgggacgcaatttggcagaaagcttaatcaatcaaggtttcaaacttttcctcgatttgaaataccacgatattccccacaccgtcgcgcaagcctgcaaagtcgctgccgatatgggcgtttggatggtcgatatgcacgcatcgggcggccgccgtatgatggaagccgcagcagaagccgttgccggatacggcacgaagccgctcttaatcggcgtaaccgtgttgaccagcatggaacaaagtgatttggcggaaatcggtttgaacaccgcccctgaagaacaagtcatccgcttggcaaaactggcgcaaagttcgggcttggacggcgtggtctgttccgcccaagaagccgcgccgctgcgccgcgaattgggacaggattttgtcttggtcacgcccggcatccgcttggacgttgccggcaataatgatgaccagcgccgcatcatgacaccggccgaagccttggctgccggttcgacttatttggtaatgggtcgtcctgtaacccaagctgccgatccggtagccgtattgcgcgaagtgaaccgcgtggcaaaccttgaagcaaactga

SEQ ID NO: 42820 - DNA, 372 bp, Neisseria meningitidis
atgagattttatattgataacaaagagtgtgattatattttttttcggaaggctgttaatataagtgatgactttatacaaagtggttttattactccggaaggattaattactaaaaatagtaatccaaaattatttaatcaatattcaaaaatggcatctaaaaataaatgtcaatatgagatggttacatttctttcggatgaaatgaaaaatattattgaattattatcgaatgatgatgcatatatagagtttgcctattctgaggatttttatgtactccctgagattgaaattgataagagaactttaaaatcactaaatttctatattgacttcggggttaaatatataattaataaaatatag

SEQ ID NO: 42821 - DNA, 1668 bp, Neisseria meningitidis
atgcttctaacactttctttgcgtgattttgtcattgttgaaaatctgaatctggattttcaaagcggctttaccgtattgaccggagaaactggcgcgggcaagtccattactttggatgcgattggtctgctgttgggcgataaagccgattacagccaagtccgcagcggcgcaaaagaagcccaactatcggcactgtttgatatttcccacttgcctgttctaaaagaagaattgcgtgaacaaggattgttggatgacggcggggaagaacttagcatccgccgtattatcgatgccaaaggcaaaagccgaagctttatcaacaatcaggcatctaccttggcgcaactcaaagccgtcggcagtcagcttatcgatatccatggacaaaatgcccatcattcgcttaatcaggaagccgctcagcgcgaattgttggacgcatttgcgggcagcagggcgcaggcggaaaccgtcagacagttgtatcaaaactgggtcaatgcgaaaaaagcccttcaagaggcgcaggaacacgccgatgccgtcattatcgagcgggaacgtttggaatggcagtttaacgaactgaaccagttggacattaaacaaggcgaatgggaagctctcagccaaagccacgacagccttgcccattctgccgagctgttgcaggctgccgaagaagtcggaagcaagattgacggcgacaacggcatccaacgccatatctatcaatgtcaaaaactattggccaatctgcaaaacatcgagccgcgctttgccgagagcctgaatatgttggcaagcatcgaagccgaattgggcgaaatcagtgccaatatgcgcgatgtggcaggtcgcagcgacatcaaccccaatgaattggcggcacaggaacagcgtatgggcgaactgatggggatagcgcggaaataccgtatcgagcccgaagagttgcctgccaagttggcagaaatcgaagaacgcctgcaaagcctgcaagctgccgccgatttggacgcgctcgagcataatgttgcccacaattttgccgaatatcaggaagctgcccacatcctttctgccatgcgccatcaggcggcagagcgtttgagcggcgaaacgaccgagcatatgcaacaccttgccatgaaaggtgcacgtttcgacatcgtcctgttgccctcgtcgccgacggcacacggtttggagcaggttcaatttcaagttgccgccaacaaaggcaatccgccccgtccgctgaataaagttgcctccggcggcgaattggcgcgtatcagccttgccttacaggttgttgccagccaatatacccaagttcccaccctgatttttgatgaggtcgataccggtattggagggggagtggctgaaatggtcggcaaggcattacgtgcgttgggcagaaaacatcaggtgcttgccgttacccatcttccgcaagtcgcatcctgcggcgaaaaccactggcgggtgcgcaagcacagcgagggagagcaaaccgtcagcgaaatcagtatattggatgaaatccaacggatcgaagaggttgcccgtatgttgggcggagaagtcattaccgatacgacgcgccgtcacgctgcggaattgctgcaactcgcatcaaaaaatagttaa

SEQ ID NO: 42822 - DNA, 2247 bp, Neisseria meningitidis
ttgagaaatttcgaccataccggcgctcagacggcatcccgcagccttaactgccgtctgaatatcaaagcaggaatcacgcttatgcaacaaaaaatccgtttccaaatcgaaggcatgacctgccaggcctgcgcttcgcgcattgaaaaagtgttgaacaaaaaagattttgtcgaatcggcgggggtaaacttcgccagcgaagaggcgcaggtagtgtttgacgacagcaaaacctcagtagccgacattgccaaaatcattgagaaaaccggttacggcgcgaaggaaaaaacggaagatacattgccgcaacccgaagcagaacaccatatcggctggcggctgtggctgctgttcaccatcaacgtcccgttccttatcggcatggcggggatgatgatcggcagacacgattggatgattccgccgttgtggcagttcgcattggcaagcgtggtgcagctttggctggcaatcccgttttacaaaagcgcgtgggcgagcattaagggcggactggcgaatatggacgtgctggttaccatcggcacggtctcgatttacctgtattccgtctatatgctgtttttcagcccgcacgcggcgtacggtatggcgcatgtgtattttgaagtgggcgtgatggtgatcggttttgtgtcactgggtaaatttttggaacaccgtaccaaaaaatccagcctcaacagcttgggcttgctgctcaaacttacaccaacccaagtcaacgtgcaacgcaacggcgaatggaaacagcttcccatcgaccaagtgcaaatcggcgaccttatccgcgccaaccacggcgaacgcattgccgcagacggcatcattgaaagcggcagcggttgggcggacgagagccatcttaccggcgaatccaatcctgaagaaaaaaaggcgggcggcaaagtgttggcgggcgcgttaatgaccgaaggcagtgtggtgtaccgcgccacgcagctcggcagccaaacccagctcggcgacatgatgaacgcgctctctgaagcacaaggcagtaaagcaccgattgcgcgcgtagccgataaagcggctgcggtattcgtgcctgccgtcgtgggcattgcgttgttgacttttattgttacttggctgattaagggcgattggacggttgcgctgatgcacgccgtcgccgttttggtgattgcctgcccgtgcgcgctgggtctggcaacccctgccgcgattatggtcggtatgggcaaagcggttaaacacggtatttggtttaaagacgcggcagcaatggaggaagccgcccacgtcgatgccgtcgtgttggacaaaaccggtacgctgaccgaaggcagcccgcaggttgccgccgtttattgcgttcccgacagcggctttgacgaagacgctttgtaccgcatcgccgccgccgtcgaacaaaacgccgcccatccgctcgcccgtgccatcgtctccgccgcccaagcgcgcggtttggacattcccgccgcacaaaacgcacaaaccgttgtcggcgcaggcattaccgccgaagtggaaggcgtgggtttggtgaaagcaggcaaagccgaatttgccgaactggccttgccgaagtttttagacggcgtttgggatattgcaagcattgttgcggtctcagtcgataacaaacccatcggcgcattcgcacttgccgacgcgttgaaagccgataccgccgaagccataggccgtctgaaaaaacacaatatcgatgtctatattatgagcggcgacaaccaaggcacggtcgaatacgtcgccaaacaactgggcatcgcacacgccttcggcaacatgagtccgcgcgataaagctgccgaagtgcaaaaactcaaagccgccggcaaaaccgtggcgatggtcggcgacggcatcaacgacgcgcccgcgcttgccgccgctaacgtcagcttcgccatgaaaggcggagcggacgttgccgaacataccgcatccgccacgctgatgcagcattcggtcaaccaactcgccgatgctctgctggtgtcgcaagccactttgaaaaacatcaagcaaaacctgtttttcgccttcttctacaatattttgggcattcctctcgccgcgcttggctttttaaatcccgtcatcgctggcgcggcaatggcggcaagctcggtttccgtgttgagcaatgccttgcgcctgaaacgggtaaaaatcgattag

SEQ ID NO: 42823 - DNA, 1593 bp, Neisseria meningitidis
atgtttcggattctaataatttcttttctgtttcttttgagtgctaaatctttttcagcagatttagaaattaaaaatgggaaattgatgtatgcactttcggaaaaatataacgataatggatttaaggcatacaaagttttaggtgagggaggaggaattcatacagaatataattacaaatttgataaaagtttgaatttgaatgtattagaaagttcaacaggcgcacgctctcttgaaaaagtccccgttaaagtaactgcatcagtttcccgcgccgccgtcttgtcaggagtcggcaaacttgcccgcttaggcgcgaaattaagcacaagggcagttccttatgtcggaacagcccttttagcccatgacgtatacgaaactttcaaagaagacatacaggcacaaggctaccaatacgaccccgaaaccgacaaatttgtaaaaggctacgaatatagtaattgcctttggtacgaagacaaaagacgtattaatagaacctatggctgctacggcgttgacagttcgattatgcgccttatgtccgatgacagcagattccccgaagtcaaagaattgatggaaagccaaatgtataggctggcacgtccgttttggaattggcataaagaagaactgaataaattaagttctttggattggaataattttgttttaaatcgttgcacatttaattggaatggcggagattgtttggtcaataaaggtgatgatttcagaaatggggctgatttttcccttattcgcaattcaaaatacaaagaagaaatggatgccaaaaagctggaagagattttatcgttgaaagtcgatgccaatcccgacaaatacataaaggcaaccggttatcccggttattccgaaaaagtagaagtcgcacccggaacaaaagtgaatatgggtcccgtcacggacaggaacgggaatcccgttcaggttgtcgcaacattcggcagggattcgcaaggcaacaccacggtggatgttcaagtaatcccgcgtcccgacttgacccccggaagcgcggaagcaccgaacgcacagccgctgcccgaagtatcgcccgccgaaaaccccgcaaacaacccgaaccccaatgagaaccccggcacgagccccaatcccgaacccgaccccgatttgaatcccgatgcaaatcccgatacggacggacagcccggcacaagacccgattcccccgccgttccggaccgcccaaacggtaggcatcgcaaagaaaggaaagaaggcgaagacggcgggcttttgtgcgattattttccggaaatcctagcctgtcaggagatgggcaaaccttcagacggcatgtttcacgatataagcataccgcaggttatagacgataaaacatggtcttcacataactttttaccgtctaacggcgtatgtccgcagccgaaaacctttcatgttttcggtaggcaatatcaggcaagctatgagccgttatgcgtgtttgccgaaaaaatccgttttgccgtactgctcgcctttatcattatgtcggcttttgtcgttttcggttcgttgaaggggaaataa

SEQ ID NO: 42824 - DNA, 1098 bp, Neisseria meningitidis
atgaaatccgtccgctccttcatccgcgacgacatacaagctatgtcggcatatcagattgccgacgttccgcccggctttgccaaactcgattcgatggaaagtcccgtccacccttttgccggacatgaaacgctgttgcaggaatggcaggcacggcttgccgccgcgcccatccatctttaccccaatccctccggcagcggtttacaggaagcattacgttcggcgttcgacattcccgactgcgccgacatcgcgctgggcaacggttcggacgaactgatacagttcatcacgatgctgaccgccaaaccgggcgcggcaatgttggcagccgaacccagtttcgtcatgtaccgccacaacgccgcgctgtacggcatggattatgtcggcgttccactgaacggagatttcaccctcaacctgcccgccgtcctcgaagccgtcaggaaacaccgccctgccctgacctttatcgcctaccccaacaaccccaccggcgtatgcttcacgcgtgccgaaatcgaagccgtcatcgaagcttcagacggcatcgtcgtcgtcgatgaagcctacggcgcattcaacggcgacagcttcctgccgcaggcaggcaggattcccaacctgatagtcttacgcaccctcagcaaaatcggttttgccggactgcgtatcggttatgcggcaggctgccccgaagtcatcggcgaactgcaaaaaatcctgccgccctacaatatgaaccaattgagcctgaccactgccaaactcgccctgcggcactacggcattatctctgccaacatcgacagcctgaaaaacgaacgcgaacggatgttcgccgaattgggcaaaatatgccgtctgaacaccttttcaagtcaggcaaacttcattaccatacgcgtacccgatgccgatttgttgtttgacacgctcaaacaaaaccgcatcttggttaaaaaactgcatggcgcgcacccgcttttggaacactgcctgcgcattaccgtaggcagccccgcacaaaacgatgccgttctcaacatcattcgccaactttactgccaaccaacggatttcctatga

SEQ ID NO: 42825 - DNA, 1011 bp, Neisseria meningitidis
atgagcatcatcctatacaccgccaacgacggcactgcccaatttgccttgcaggaatttggcggacagctttggctgacgcaggcggacatggcagaactgtaccaaaccaccaaacaaaatatcagcaaacacattaaaaccattcttgcagagcaagaattggaagagaaggcaactgtcaacttccagttgacagttcaaaatgaaaacgggcgcaaggtaaaccgcaaaatcgcccattattccctgcccatgattattgccgtcggctaccgcgtccgttccgcgcggggcatccaattccgccaatgggcaaccgaacggctggacgaatatctgaccaaaggctttgccatagacgacgaacgcctgaaaggcacaggcggcggcgactattggaaagaactgctcaaccgcattcgcgacatccgcagcagcgaaaaagccctataccggcaagtgcttgatttatatgccaccagccaagactacaaccccaaaagcagcgaaagccaaaccttttttgccgccgttcaaaacaaactgcactatgccgccagccggcaaaccgcagctgagctgatatacagccgtgccgacagcagcaaagactttatggggctgaccacctttcaaggcgcaatccccacgctgaatgaagccaaaatcgccaaaaactatctgaccgaagacgaactgttccgcctgaaccgtctggtttccgccttcttcgacctagcggaaatcaaagcgcaggagcaaagccccatgtatatgcgcgactggatagccgaattggacaaattttccgggctgtacggacaaggcacattacagggtgcaggcagcatcagccgcaaacaggcagagcagaaagccgaacgcgaataccgcgcctatgaagcgcgcatcctgtcgccggtggagcaagcctatctggaaagcgttaaagcgttggaaaaaacagccgtgcaacagatcaaacagaaaaaagaccgcacaaaataa

SEQ ID NO: 42826 - DNA, 822 bp, Neisseria meningitidis
atgtctttgcaaaacattatcgaaaccgcctttgaaaaccgcgcggacatcaccccgaccaccgttactcccgaagtcaaagaagccgtgttggaaaccatccgccaactcgattccggcaaactgcgcgttgccgaacgtttgggcgtgggtgagtggaaagtcaacgaatgggcgaaaaaagccgtgttgctgtccttccgcatccaagacaacgaagtcctcaacgacggcgtgaacaaatacttcgacaaagtgccgaccaagtttgccgactggtctgaagacgagttcaaaaacgcaggcttccgcgccgttccgggtgcggttgcccgacgcggcagctttgtggcgaaaaatgtcgtgctgatgccgtcttatgtcaacatcggcgcatacgtcgacgaaggcgcgatggtcgatacttgggcaaccgtcggctcttgcgcgcaaatcggcaaaaacgtccacttgagcggaggtgtcggcatcggcggcgtactcgaacccctgcaggccgcccccaccatcattgaagacaactgtttcatcggtgcgcgttctgaaatcgttgagggcgtgattgtcgaagaaggcagcgtgatttcgatgggcgtgttcatcggtcaatccaccaaaatcttcgaccgcaccaccggcgaaatctaccaaggtcgcgtaccggcaggttcggtcgtcgtgtccggcagtatgccttccaaagacggcagccacagcctttactgcgccgtcatcgtcaaacgcgtggacgcgcaaacccgtgcgaaaaccagcgtgaacgaattgttgcgcggcatctga

SEQ ID NO: 42827 - DNA, 966 bp, Neisseria meningitidis
atgagctacacgcaactgacccaaggcgaacgataccacatccaatacctgtcccgccactgcaccgtcaccgaaatcgccaaacagctgaaccgccacaaaagcaccatcagccgcgaaatcagacggcaccgcacccaagggcagcaatacagcgccgaaaaagcccagcggcaaagccagactatcaaacagcgtaagcgacaaccctataagctcgattcgcagctgattcagcacatcgacacccttatccgccgcaaactcagtcccgaacaagtatgcgcctacctgtgcaaacaccaccagatcacgctccaccacagcaccatttaccgctaccttcgccaagacaaaagcaacggcagcacgttgtggcaacatctcagaatatgcagcaaaccctaccgcaaacgctacggcagcacatggaccagaggcaaagtacccaaccgtgtcggcatagaaaaccgacccgctatcgtcgaccagaaatcccgtatcggcgattgggaagccgacaccattgtcggcaaaggacagaaaagcgcattattgaccttggtcgaacgcgttacccgctacaccatcatctgcaaattggatagcctcaaagccgaagacactgcccgggcagctgttagggcattaaaggcacataaagacagggtgcacaccattaccatggataacggcaaagagttctaccaacacaccaaaataaccaaagcattgaaagcggagacttatttttgtcgcccttaccattcttgggagaaagggctgaatgagaacaccaacggactcatccggcaatacttccccaaacaaaccgatttccgtaacatcagtgatcgggagatacgcagggttcaagatgagttgaaccaccgaccaagaaaaacacttggctacgaaacgccaagtgttttattcttgaatctgttccaaccactaatacactag

SEQ ID NO: 42828 - DNA, 1338 bp, Neisseria meningitidis
atgctgccttccggtcggagcagtaaaaaagcggaaagtaaaacggtcattcctgccgaaagacacaacatccgtgccgaaatgttgagctttgccgccgaaaacgtcatacgccgcctgaaagggacggggtttcaggcttatgtggtcggcggcgcggtcagggacctgctgctcggcatcgaacccaaagatttcgatgtcgcaaccgatgccacgcccgaacaggtgcacaaactcttccgccgcagccgcatcatcggcaggcgttttcagattgtccatgtgatgaacggtgcagagactatcgaagtaacgacgtttcgcggcggtgcgaaagtacatcagaatgcacgcggcaggattatgaaagacaatacctatggcagcatcgaagaagatgcgatgcggcgcgattttacctgcaatgccttgtattacgatcctgaaaaagaagagattttggatttccacaacgggattgccgatgttgccgcccacaggctggttatgattggcgatgccgccgaacgctatcaggaagaccctgtcaggattttgcgcgccatccgcctgtcgggcaaattgggctttgagctgtcggaagaaaccgccgcaccgattgccgaatcgatatgccgtctgaagcacgaaccggtagcgaggctgttcgacgaaattatgaaattgctgttttcagggcacgctcgcgagtgtctaaaacgtttgaacggatttgacataccggacgacatccatctgctgctcaatgccttgcgcgtttcagacggcatcgccggaaaaatgacggtgcttgccctgaaaaataccgatgagcggctgcgtgccgacaaatcggtttcggtcggttttgtattggcggctctgatgtggcccgagttggaacgccattggaaaagcaatctgcaacagggtttgaaacccgcgcccgccctgtccgatgcaatcaatacgatgcgcgaaaccgtcgaacgcggttggggcgtgccgcaacgcttttccgccacgatgcgcgaaatttggatgttccagccgcagtttgaaaaccgcaaaggcgcaaggccgcacaaactgtttgcacaggcgcgtttccgtgccgcctatgatttcctgctcttgcgcgccgaaaccggcaatgcggaccgcgcccttgccgagtggtggacggcgtttcagacggcatcgacggaacagcggtcggagatgaccaaaaacgaagccgccgcccgacacgaaaaaaacgaaggacaggcgaaaaaacgccgccgtcgcaggcgcaaacccaagccgaaggttgtgggaacggattgggaataa

SEQ ID NO: 42829 - DNA, 216 bp, Neisseria meningitidis
atgaaaaccctgctccttaccttcggcatcttcctgaccgtcatcatcggtatggcggtcggctatattttctccaaacgcagcatcaaaggcagttgcggcggcattactgccttgggtatgaaaaaaatgtgcgactgcgacacaccttgcgacaccctgcaaaagaaactggatgaagaaaaacaggcaggcggcatacgggttgaccgttaa

SEQ ID NO: 42830 - DNA, 603 bp, Neisseria meningitidis
atgactaatgtgcttcagacggtattttatattatgttatttccgagaattatcgcagcatcagcgcaacgtaagttaagcgtttatttgaaaaaaggtggtttggtcgcttatccgaccgaatcttgttatggcttggggtgtcttccgacattagccaaagcactcggtaagttggcgcatttgaaaaaaagaccgcaacacaagggtatgattgtcatcgggaatcaatttgaacaattgcagcctttacttcaaatgccgtctgaaaatcttcaggatatgcttagaaaagaatggcccgcccctaaaacgttcctattatccgccaaatcctgtgtcttacccgagttacgcgggaaacagcgcagcaagttggcggtcagggttcccgcccatgtaggtgcgcgccgcttgtgtcaggctttgcaaacgcctttggtctcgacttcgtgcaaccgcgcaggcaaacgcgcgtgtcggacggagagggaagtcagaaggcaattcggacgcgatgtgtggattgttggtgggagaatcggcaggcagaaatcgccgagtcagattattgacggggaaacaggtaaacgtttgcgttag

SEQ ID NO: 42831 - DNA, 696 bp, Neisseria meningitidis
atgtttgtttggcacgaatacgaaaatgcggcagaagcggcgcagtctttggctgacgcagtggcggatgctttgcagggcgcactggacgagaagggcggtgcggtgttggcagtttccggcggacgttcgccgattgcatttttcaacgccctgtcgcaaaaagatttggattggaaaaacgtcggcatcaccttggcagatgaacgcatcgtgccgaccgtccacgccgacagcaataccggtttggtgcgcgaatacctgttgaagaacaaagcggaagcggcaatgtggattcctatggtggaagacggaaaaactgaaaccgaattacatcccgatgctgttgtcgattatgcactgaaacattacaaacagcccgatgttttggttttgggtatgggaaacgacgggcatacggcttcgattttcccgaaagctccacagtttcagacggcaatcgacggttcggcaggtgtcgcgctggtgcataccacgcccgttaccgcgccgcacgagcgcgtcagtatgaccttggatgcgattgcccatacggggcatgtgtttttggcgatacggggcgaagagaaaaaagccgtgttcgaccaagccgcacaaggcgaaaaccgcgaatatccgatcaacctcgttttgaaccatcaaggagtgaactgccatgtcttctacgccgaataa

SEQ ID NO: 42832 - DNA, 426 bp, Neisseria meningitidis
atgttttcttggttcaagctgtttcacttgttttttgtcatttcgtggtttgcagggctgttttacctgccgaggattttcgtcaatatggcgatgattgatgtgccgcgcggcaatcccgagtatgtgcgtctgtcgggcatggcggtgcggctgtaccgttttatgtcgccgttgggcttcggcgcggtcgtgttcggcgcggcgataccgtttgccgccggctggtggggcagcggctgggtacacgtcaaactgtgtttgggcttgatgctcttggcttaccagttgtattgcggcgtgctgctgcgccgttttcaggattacagcaatgctttttcacaccgctggtaccgcgtgttcaacgaaatccccgtgctgctgatggttgccgcgctgtatctggtcgtgttcaaaccgttttga

SEQ ID NO: 42833 - DNA, 798 bp, Neisseria meningitidis
atggataccgcacaaaaacaacgctgggcaataaccctatcctatgacggcagccgcttttacggctggcagaaacaggctgacggcgtaccgaccgttcaggcggcattggaaaccgcgctcgcccaaatagcaggggaagcggtttccaccaccgttgccggcaggaccgacaccggcgtgcatgccaccgcccaagtcgtccacttcgacacaactgccgcccgtccccaacaggcatgggtgcgcggcgtaaatgcccacctgcccgaaggcattgccgttttgcacgcccgacaggtcgcccccgaatttcatgcacgatttgacgcatacggacggcactaccgctacctgctcgaatccgcccccgtccgttcccccctgctcaaaaacagggcaggctggacacacctcaaactcgacatcgaaccgatgcgtcgggctgccgcctatttgatcggcgaacaagacttctccagcttccgcgccgccgaatgccaagcaaaatcccccgtcaaaaccatctaccgcgccgaccttacccaaagctcaggactcgtccgcctcgatttgcacggcaacgcctttttgcaccacatggtacgcaacatcatgggcgcgctcgtttatgtcggcagcggcagactcagcgtcgaaggcttcgccgcactgattcaagaacgcagccgcctcaaagccccaccgacctttatgcccgacgggctttacctgaccggcgtcgactatcccgaggcatacggcatcatccgcccccaaatccccgaatggctttaa

SEQ ID NO: 42834 - DNA, 354 bp, Neisseria meningitidis; identical to SEQ ID NO: 39616

SEQ ID NO: 42835 - DNA, 1557 bp, Neisseria meningitidis
ttgcacccgcgctgcgcggcggaacggatgcaaaatatttttattacattttcaggaaaaaccatgttgtcaggactccccatccccaaagacatcgcgcgcccgcccgaaacgatattggtcaacatcacgccgcaggaaacgcgcgtagcggtgttggaggaaaacaatatctgcgagctgcacatcgagcgcaacagcgaacacagcctagtcggcaatatctatctgggcgtggtgcgccgcgtgctgcctgggatgcagagcgcgtttatcgacatcggcttggaacgcgcggcgtttttacacatcgtcgatgtcctcgaacaacgccgcaaccccgaagaaacccagcgcatcgaacatatgctgtttgaagggcagtctgttttggtgcaggtcatcaaagacccgatcaacaccaaaggcgcgcggctttccacccaaatctcgctggcggggcgtttcctcgtccatcttccgcaagaagaccacatcggcgtgtcccaacgcatcgaagacgatgccgaacgcagcagcctgcgcgaacgcctcgacaagctcctgccggaaaatgcctgccggggctacatcatccgcaccaacgccgaaaacgccaccgacgaacagctccagtccgacatcgactacctgaccaaagtgtgggaacacatccaagaacaggcgaaaatccggccgcccgaaaccctgctttatcaggatttgcctttaagcctgcgcgtgttgcgcgatatggtcggctgcgacacgcaaaaaatcctcgtcgattccaccgtaaaccacgggcgcatgacgcgttttgccgaacaatacgtccacggcgcattgggcaggatagagctgttcaaaggcgaacgcccgctgtttgaaacccacaacgtcgaacaggaaatcagccgcgccctgcaaccgcgcgtcaacctcaacttcggcagctacctgattatcgaatccaccgaagccatgaccacgatagacgtgaacaccggcggcttcgtcggcgcacgcaacttcgacgaaaccatcttccgcaccaacctcgaagcctgccacaccatcgcccgcgaattgaggctacgcaacctcggcggcatcatcatcatcgacttcatcgatatggcacaggaaagccaccgcgaagccgtgttgcaggagcttgccaaagccctcgccttcgaccgtacccgcgttaccctgcacggttttaccagcctagggctggtcgagctgacgcgcaaacgctcgcgcgaaaacttaaaccaagtcctctgcgaaccctgcccttcctgccaaggcagaggccgtctgaaaacgccgcaaaccgtatgctacgaaatccagcgcgaaatcgtccgcgaagcgcgccgttacgatgccgaaagtttccgcatcctcgccgcccccaacgtcatcgatttgtttttggacgaagaatcgcaatccttggcaatgctgatagatttcatcggcaaaccgatttctctggcggtcgaaaccgcttacacgcaggaacaatacgacatcgttttgatgtaa

SEQ ID NO: 42836 - DNA, 930 bp, Neisseria meningitidis
atgttaagatgccgtccgaaatccgttttggattcagacggcatttttttgaaatttaattttttaaggagtaaacctaaatatgaaatttccttccttccttcctttaaacggatactctgcctgtcggcagtaatctcggtattgggggcttgtgcggtcgttgctgatgtttacggtcatgattccgccacaatgaacgctgcggctgccaaagattatatgaaaacggttgagttaaacaagtctgccggcaatgtcgataccacatccagaacagcccgcagggtgcaggcagtatttcgacgtatgctgccttatgccgatgcggcaaataataccagccataagtttgactggaaaatgacggttttcaaaaacgatgagctgaacgcgtgggcaatgcccggtggaaaaatggcgttttatacggggatagtcgacaaactcaagctgaccgatgacgaaattgccgccattatggggcatgaaatgacgcacgccctgcatgaacacggtaaaaataaggtcgggcagcaaatcttgaccaatacggcggcgcagataggcacgcagattatattagacaaaaaaccggatactaatccggaattggtcggattgggtatggatattttggggacgtacggtcttaccttgccttatagccgcagcttggaagaagaagccgatgaggggggaatgatgttgatggcgcaggcaggctatcatccggcggccgctgtcagggtttgggaaaaaatgaatcaggaaaacgaccaaaacggctttatttatgctattacctctactcatccgacaaacaatgcccgtatagaaaatctaaaacggttgttgccgaccgttatgccggtttatgagcaaagtgtcagaaataaggggcgcgttaataaaaaacgtcggcgttaa

SEQ ID NO: 42837 - DNA, 621 bp, Neisseria meningitidis
atggcacagtttttcgctattcatcccgacaatccccaagaacgcctcatcaagcaggcggttgaaatcgtcaataaaggcggcgtggtcgtttatccgaccgattcctgttatgccttgggctgcaaactcggcgataaggcggcgatggaacgcatactctccatccgcaaaatcgatttgaaacaccacctgaccctgatgtgcgcagatttgagcgagttgggcacatacgccaaagtcgacaacgtacagtttcgtcagcttaaagccgccacacccgggccttatacttttattttacaggcgacgaaggatgtgccggcgcgcacgctgcacccgaaacgcaaaaccatcgggctgcgtattcccgataatgccattgcacaagccctgctgggggaattgggcgagccgcttttaagctgcaccctgatgctgcccgaagacggcgaaccattgaccgatccttatgaaatccgcgagcgtttggaacacgccgtcgatttggtgattgacggcggctggtgcggaaccgagccgaccaccgtcgtcgatatgaccgacggcacggaattggtgcgccaaggttgcggcgatacggcggtgttcggtttgtag

SEQ ID NO: 42838 - DNA, 798 bp, Neisseria meningitidis
atggcggctgttttttctgtgtgtgcctgttttatgtgttcctgccttgttgtcaaaaataccgttatcggaagcggacgcaccaaaatcgccgtgccgcttgtcgcccgcgatgccgccgaactttccgccgtacttgagcaaatcaaaaatatgcccttcgatattgcggagttccgcgccgactttttggaatgcgcgggcagtatcggcgaaatattgcaccacacgcagaccgtccgcgacgcgctgcccgacaagccgctgctgtttacgttcagacggcatggcgaaggcggctcgttcccgtgttcggacgattattattttgaactgctcgacgcgctgatcgaaagccgcctgcccgacatcatcgacatcgagctgttttccggcgaaaccgccgtccggtgcgccgtggcaaatgctcaaaaaaacggcatcgccgccctgctctgcaatcatgagtttcaccgcacgccgccgcaagaagaaatcgtatgccgtctgaaacagatggaggactgcggcgcggacatctgcaaaattgcggtgatgccgcaaagcgcggaagatgtgctgactttgctttccgccacgctcaaagcgaaagagcttgccgccaaaccgattgttacgatgtcgatggggcagacgggggcggtcagccggcttgccggacaggtgttcggctcaagcatcacgttcggttcgggaacgcaaaactccgcgccggggcaaatcggcgtatccgccctccgtgcgacactcgactgcctcgaaaacggcgcagactga

SEQ ID NO: 42839 - DNA, 1194 bp, Neisseria meningitidis
atgaaccccaaacacctcatcgcattttccgccctattcgccgccacgcaggcagaagccctacctgtcgcctccgtcagcctcgacaccgttaccgtttccccgtccgccccctacaccgatacaaacgggctgctgaccgactacggcaacgcctccgcctcgccttggatgaaaaaactccaatccgtcgcacaaggcagcggcgagaccttccgtatcctgcaaatcggcgactcgcataccgccggcgacttctttaccgacagcctgcgcaaacgcctgcaaaaaacttggggcgacggcggcataggctgggtttaccccgccaacgtcaaagggcagcgcatggcggccgtccggcacaacggtaactggcaaagcctcaccagcaggaacaacaccggagacttcccgctcggcggcatcctcgcccacaccggcagcggcggcagcatgaccctgaccgcatcggacggcatagcaagcaagcagcgcgtttccctgtttgccaaacccctgcttgccgaacaaaccctgaccgtcaacggcaacaccgtctccgccaacggcggcggctggcaggtactggatacgggcgcggcactgcccctgaccatacacaccgaaatgccgtgggacatcggcttcatcaacatcgaaaatcccgccggcggcattaccgtttccgcgatgggcatcaacggcgcacaattaacccagtggtcgaaatggcgtgccgaccgtatgaacgacctcgcccaaaccggcgccgatttggttatcctttcctacggcaccaacgaagctttcaacaacaacatcgacattgccgacaccgaacaaaaatggctggataccgtccgccaaatccgcgacagcctgcctgccgccggcatcctcatcatcggcgcacccgaatccctgaaaaacacgctcggcgtatgcggcacacgccccgtccgcctgaccgaagtccaacagatgcagcggcgcgtcgcccgtcaggggcagacgatgttctggtcttggcaaaacgccatgggcggcatatgcagcatgaaaaactggctcaaccaaggatgggccgccaaagacggcgtacacttctccgccaaaggctaccggcgcgcggcggaaatgctcgccgacagcctcgaagaactcgtccgctccgctgcaatcaggcaataa

SEQ ID NO: 42840 - DNA, 810 bp, Neisseria meningitidis
atgattcaagacacccgaccccttatccgcgtcgttgccggcatcctgctcgattcagacggcaactacctgctcagctcgcgccccgaaggcaaaccctatgccggatattgggaatttgccggcggcaaggtcgaagcgggcgaaaccgacttccaagccctgcaacgcgagtttgaagaagaactcggcatccgcatcctcgccgccacgccttggttgaccaaaatccattcctacgaacacgcccgcgtctgcctgaaattcctatgggtcaaccccgaccaatggacgggcaaaccgcaatcccgcgaagggcaggaatggtcttggcagaaggcgggtgattttaccgttgcccccatgctgcccgccaacggcgcgcttttgcgttcgctgtccgtcccgcgccgtttgtacggcagcctgaaaacgggtttgcacggagaaaacagtatgggcgcgtaccgcgtcctgcctttgggttcggcagagggaagcggtgcgaacgttttgatggaggcggcgcaatggcaggacagacccgaacacgccgacagcgtgtggatggtggtgcagacccgcgaacaatggcggcgggcgcaggaaaagggcgcggatgcggtcgtttggcgcgtgtgcgatgatgttcaggcacaagaggcggcagaagccctgcggcagggcgtatccgtgccgctcgtacttgcagcaaacggacagacggttgcacgttatggaaaactatggctcggattgggggcgcacgtggtggtaagggatgaaacaatagggaagaatcatgaataa

SEQ ID NO: 42841 - DNA, 744 bp, Neisseria meningitidis
atgctcatcatccgcaacctgatttactggctgatactctgttccaccctgattttcctctttccctttatgctgctcgcctcgcctttccgggacggggcgcacaagatggcgcgggtctgggtcggcattctcaactggtcgctcaaacacatcgtcgggctcaaataccgcatcatcggcgcggaaaacatccccgaccgccccgccgtcatctgcgccaaacaccaaagcggctgggaaacgctcgcccttcaggacatttttccgccgcaggtttacgttgccaaacgcgagttgttcaaaatcccctttttcggctggggcttgaaactggtcaaaaccataggcatagaccgcaacaaccgccgcgaagccaacgagcagctcataaaacaggggttggtgcgcaaaaacgaaggctattggattaccattttccccgaaggcacgcgccttgcgcccggaaaacgcggcaaatacaaactcggcggcgcgcgcatggcgaaaatgtttgagatggacatcgtccccgtcgccctcaacagcggcgaattttggccgaaaaactcctttctgaaatatccgggggaaatcaccgtcgtcatctgtccgaccatcccgcacgcaagcggcagcgaagccgaattgatggaaaaatgcgaacatctcatcgaaacgcaacaaccgcttatttccggcgcaggcccgtttgccgccaaaatgccgtctgaaaccgcatga

SEQ ID NO: 42842 - DNA, 117 bp, Neisseria meningitidis
atgctctatgttggtaatattaaaaatttttttgagtttctcaaaagcgatatgattagactgttgagaggtgaaagtaaaacaacagactttcaatggccgcaatttgatgaatag

SEQ ID NO: 42843 - DNA, 447 bp, Neisseria meningitidis
atgagactgaccaccaaagggcgtttcgccgttaccgctatgctggatttggcgatgaacgcgcaaaccggcgccgtcaaactcagtgccatcagcgaacgccaaaacatatccctctcctatctcgagcaattgttcggcaaactccgccgcgccggacttgttgaaagcctgcgcgggcccggcggcggctacatcctcgccgcaccggcggcacgcatcaacatcgcccaaatcatcgccgccgccgaagaccggctggacgcaacccaatgcggcagcaaagccaactgccaccacggcgcgccctgcctgacgcacgatctttgggagaatttaaacaaaaccatcaacgactacctcggcagcgttaccctgcaaagcatcatcgaacagaaaaacaacggcgacggcagccgcgtcgtccaatttacacacatccattaa

SEQ ID NO: 42844 - DNA, 624 bp, Neisseria meningitidis
atggatcaattcgaattgtgccaaaaagaacatgtcaatccatttgccttgtcaaagcaatatctattggttgtaacattcgtcaaatccagcagtaaaaattttcaggcagcattactttgggcaagaagtgccaaattatttgagaatcttgagattggaaaagaaaccatctattgctgcgctttcgataaaacagcagaacaggctgggatggccggggtatttttgaattatattgaaaattggaatggcaaacagatttacatcaatggccgaatccatagtggcagtatttatgatttgttaggggttttagactgctatcaaaaatcacagtcctgtcccaaccctaaaagccactgttgctttgtttcagacgacatttttctatggcatggatcaagaccaacgtttgaaatcagtcttgatctaactggaaagaaaaaagaaacatcctctgcaaagaaatttgtgatgccttgtattaatttccgtcaccataggattgaaaaagaaacctacttaggaaattggaatgaacaaattgccgcattggcagtaaaacaaaatatagattggtgtccaagttttgatattgagaattttagacagtatgaataa

SEQ ID NO: 42845 - DNA, 1104 bp, Neisseria meningitidis; identical to SEQ ID NO: 42777

SEQ ID NO: 42846 - DNA, 2385 bp, Neisseria meningitidis
atggccgacaactacgtaatctggtttgaaaacctgcgtatgacagatgttgaacgcgtgggcggtaaaaacgcctcgctgggcgaaatgatcagtcagctgaccgaaaaaggcgttcgcgtccccggcggctttgccaccacggccgaagcctaccgcgcattcctcgcacacaacggtctgagcgaacgcatttccgccgcactggcaaaattggatgtcgaagacgttgccgaactggcacgcgtcggcaaagaaatccgccaatggattttggatacgcctttccccgaacagctcgatgccgaaatcgaagcggcatggaacaaaatggttgccgatgccggcggtgcggacatttccgttgccgtacgttcttccgcaactgccgaagacctgccggacgcatcattcgctggacaacaggaaaccttcttgaacatcaacggcttggataacgttaaagaagcgatgcaccatgtattcgcttccctgtataacgaccgtgccatttcttaccgtgtccacaaaggcttcgaacacgacatcgtcgccctttccgccggcgttcaacgcatggtgcgttccgacagcggcgcatcaggtgtgatgttcaccctcgacaccgaatccggctacgatcaagtcgtctttgttacctcctcttacggtctgggcgaaaacgtcgtacaaggtgcggtcaacccggacgaattttatgtgttcaaacccacgctcaaagcgggcaagcccgccatcctgcgtaaaaccatgggttcaaaacacatcaaaatgatttttaccgacaaagcagaagccggtaaatccgtaaccaacgtcgatgtccccgaggaagaccgcaaccgcttctccattaccgacgaagaaattactgagttggcgcattacgcactgaccatcgaaaaacactacggccgcccgatggatatcgaatggggacgcgacggcttggacggcaaactctacatcctgcaagcccgtcccgaaaccgtaaaatcccaagaagagggcaaccgcaacctgcgccgcttcgccatcaacggcgacaaaaccgtattatgcgaaggccgcgccatcggtcagaaagtcggtcagggcaaggtgcgcctgattaaagatgcttccgagatggattccgtcgaagccggcgacgtactcgttaccgacatgaccgatccggattgggaacccgtgatgaaacgtgcttctgccatcgttaccaaccgcggcggccgtacctgccacgccgccatcatcgcgcgtgaattgggcattcctgccgttgtcggctgcggcaatgcaaccgaattgctgaaaaacggtcaagaagttaccgtatcctgtgccgaaggcgataccggctttatctatgccggtctgttggacgtacagattaccgatgtcgccttagacaatatgcctaaagcacctgtaaaagtcatgatgaacgtcggcaatcccgaactcgcattcagcttcgccaacctgcccagcgaaggcatcggcttggcgcgtatggaatttatcatcaaccgccaaatcggtatccaccccaaagccttgttggaatttgacaaacaagacgacgaattaaaagcggaaattacccgccgtatcgccggttacgcgtcccctgtcgacttctacgtcgataaaatcgccgaaggcgtggcgacattggccgcatcggtttatccgcgtaaaaccatcgtccgtatgtccgacttcaaatccaacgaatacgccaacctggtcggcggcaacgtatacgaaccgcatgaagaaaacccgatgttgggcttccgtggtgcggcgcgttatgtcgccgacaacttcaaagactgtttcgccttggaatgcaaagccttgaaacgcgtccgcgatgaaatggggttgaccaacgttgaaatcatgattccgttcgtccgcactttgggcgaagccgaagccgttgtcaaagccctgaaagaaaacggcttggaacgcggcaaaaacggcctgcgcctgattatgatgtgcgagctgccgagcaacgcggtattggcggaacaattcctgcaatacttcgacggcttctccatcggctcgaacgacatgacccaactgaccctcggtctcgaccgcgacagcggcttggtatccgaatcgtttgacgaacgcaaccctgccgtcaaagtgatgctgcaccttgccatctccgcctgccgcaagcagaacaaatatgtcggcatctgcggtcaaggcccgtccgaccatccggacttcgccaaatggctggttgaggaaggcattgaaagcgtttccctgaacccggataccgtcatcgaaacttggctatatttggcgaatgaattgaacaaataa

SEQ ID NO: 42847 - DNA, 1497 bp, Neisseria meningitidis
atgttttccaactacctactcagcttggcaatatggatacccatcgccgcaggcgtgctggttttggcaacggggtcggacagccgtgcgccgtttgcccgcgtgctcgccttcatgggtgcgcttgccggtttcttggtaacactgcccctgtttaccggtttcgaccgtttgagcggcggctatcaatttaccgagttccacgagtggattccgcttctgaaaatcaactacgcattgggcgtggacggtatttcagtgctctttatcatcttgaatgcgtttattacgctgttggtggtattggcaggttgggaagtcattcagaaacgtccggcgcagtatatggcggcattcctgatcatgtcgggtttgattaacggcgcgtttgccgcgcaggatgcgattctgttttatgtgttcttcgagggtatgctgattccgctgtacctgattatcggtgtatggggcggtccgcgccgcgtctatgcgtcggtcaagctcttcctctacacgctgatgggttcgctcctgatgctggttgcgatggtttacctttattatcaaacaggcagcttctctattgtcgatttccaaaacatcgaacagattccgttgggcgtacaacagcttttgtttgtggcgttcttcctgtcatttgccgtaaaagtgccgatgttccctgtgcacacttggttgccggatgcccacgttgaagcgccgaccggcggttcgatggtgttggcggccattacgctgaaactgggtgcgtatggtttcttgcgctttatcctgccgattatgccggatgcggcacgctattttgcccccgtgatcatcgtattaagtctgattgccgtgatttatatcggtatggtggctttggtgcaaaccgatatgaaaaaactggtggcgtattcgtccatcagccatatgggttttgtaacgcttgggatgtttttgtttgttgacgggcagttggacgactgggcattgaaaggtgcaatcattcaaatgatttcgcacggtttcgtgtctgccgcgatgtttatgtgtatcggcgtgatgtacgaccgcctgcacacgcgcaatattgctgattatggcggcgtggtcaatgtgatgcccaagtttgcggcgtttatgatgctgttcggtatggcgaacgcgggtttgcctgcgacttccggcttcgtgggcgagtttatggtgattatgggcgcggtcaaagtgaatttctgggtcggcgcgttggccgccatgaccctgatttacggtgcatcttataccctgtggatgtacaaacgcgttatttttggtgcgatccacaatccgcacgttgccgaaatgcaagacatcaattgccgcgaatttgcgattttggcaattttggcggtggctgttttgggtatgggcctgtatccgaacgcatttatcgaagtggtgcatcaggcggcaaacgatttgattgcccatgtggcacaaagcaagatttga

SEQ ID NO: 42848 - DNA, 1059 bp, Neisseria meningitidis
atgattacaccgcaacaggccatcgaacgattaatcagcaataacgagttgttttacgatgaaatgaccgacttgatgcgtcagattatgagaggacaggttctgccggagcagatagcggccattttgacaggattgcgtatcaaggttgaaaccgtttccgaaattaccgcagctgcagccgtcatgcgcgagtttgcgacaaaagtgccgctggagaatgcagaggggctggtcgatatcgtcggtacgggcggggatggcgcgaaaaccttcaatatttcgacgacttcgatgtttgttgccgcagcggcaggcgcgaaggttgccaaacacggaggccggtcggtctcttcctccagcggtgcggctgacgtggtggagcagatgggcgcaaacctcaacctgactcccgaacaggttgcccaaagtatcaggcagaccggcatcgggtttatgttcgcgcccaatcaccacagtgccatgcgccatgtcgcccctgtacgccgttcgctcggtttccgaagtattttcaacatattgggtccgttaacgaatcctgcgggcgcgccgaaccagcttttgggcgtgttccacaccgatttgtgcggcattttgtcgcgggtcttgcaacaacttggttcaaaacacgttttggttgtttgcggggagggcggtttggatgaaattacactgacgggcaaaacacgcgttgccgagctcaaagacggaaaaatcagcgaatacgacatccgcccagaagatttcggtatcgaaacccgccgcaatttggatgaaatcaaagttgccaatactcaggaatctttgttgaaaatgaatgaggtgctggaaggaagagaaggggctgcgcgcgatatcgtattgctcaacaccgccgccgccctgtatgccggaaatgtcgctgcttcgctttcagacggcatatctgccgcacgggaagccatcgattcaggcagggccaaatcgaaaaaagaggagtttgtcggttttcaaccacaacaaagatgccattttcttggaaagatggagcttgggtga

SEQ ID NO: 42849 - DNA, 684 bp, Neisseria meningitidis
atgcaacacgacgtttacgactacaccgcgcatacggtttctaaaaacaccgtcctgcagaaaacctaccgcctgctcggattttcatttattccggcttccgcaggcgcggcacttgccgccaatgccggtttcaatttttacgccgccttcggttcgcgctggatagggtttgccgtcgtgttggcgtttttctacggtatgatccacttcatcgagaaaaaccgttacagcaataccggcgttaccctgctgatggtattcacattcggtatgggcgtattgatcggccccgtgctgcaatacgcgctccatattgccgacggtgcgaaaatcgtcggcattgccgccgcgatgaccgccgccgtctttttaacgatgtccgccttggcgcgccgaacccggctcgatatgaacgcgctcggacgcttcctgaccgtaggtgcggtcattctgatggtcgccgtggttgccaatctgtttttgggtattcccgcactcgccctgaccatttccgccggttttgtcttgttcagttccttaatgattatgtggcaggtacgcaccgtcatcgacggcggcgaagacagccacatcagcgcggcactgacactgtttatctcgctttacaacatcttcagcagcctgctgaacatcctgttgtctttaaacggcgaggattga

SEQ ID NO: 42850 - DNA, 621 bp, Neisseria meningitidis
atgaagaataatgattgcttccgcctgaaagattcccagtccggtatggcgctgatagaagtcttggttgctatgctcgttctgaccatcggtattttggcactattgtctgtacagttgcggacagtcgcttccgtcagggaggcggagacacaaaccatcgtcagccaaatcacgcaaaacctgatggagggaatgttgatgaatccgaccattgattcggacagcaacaagaaaaactataatctttacatgggaaaccatacactaccgcatacactatcagctgtggatggcgattttgcgattgatgccatgaaaactaaggggcaattggcagaggcacaattgaagagatttagttatgagctgaaaaatgccttgccggatgcggcagccatccattacgccgtctgcaaggattcgtcgggtaacgcgccgacattgtccggcaatgctttttcttcaaattgcgacaataaggcaaacggggatactttaattaaagtattgtgggtaaatgattcggcaggggattcggatatttcccgtacgaatcttgaggtgagcggcgacaatatcgtatatacttatcaggcaagggtcggaggtcgggaatga

SEQ ID NO: 42851 - DNA, 576 bp, Neisseria meningitidis; identical to SEQ ID NO: 37908

SEQ ID NO: 42852 - DNA, 330 bp, Neisseria meningitidis; identical to SEQ ID NO: 37077

SEQ ID NO: 42853 - DNA, 2955 bp, Neisseria meningitidis
ttgacgcacaaagacagagacctccaatttacccatataagtaattttaacgttgccaaaaaaaacgtaactttatcattcaataataccgatgaagttgttgctcaaaaagacggtactgtcgttttcggcgcggcgacctacctgccgccctacggcaaggtttccggttttgataccgctaagctgaccgagcgcggcaaagccgttgattggattcgtacgacccacccagggttgataggctatagctacgaagatatcacatgcaacagcaacaactgtcctgaaattgcctatagaacccaatttaccttcggcaatcacggtttggcaaaaaataaaacaaacaacaagctggatatatacgaagacaaaagccgcgacaattcgcccatttacaaattgaaggatcatccttggttgggcgtgtctttcaatttgggcggagagagctccttcaaaccaaagagaaacggttctttggtatcttcttttagcgaggttgtgacgaacaaccaacaccaaaacctcgtttatacgacagacgattacaagagtcagggtaataaaaaccatcagaacaaacaccacgccgtcgccttttatctgaacgccaaactgcacctgctggataaaaaacaaatcaaaaatatcgcgcaaggcagtgcacttaatttgggtaccttgaaaacacgcatcgagccgacggcagcgtggaaaaaccgggcagggagcttttttaataatggtaattggacgtttgaagataaaggagtagtcagcgtcaaactcaaattgccggaagttaaagcaggccgctgcatcaataaaccgaaccccaataagaataccaaagccccttcgccggccctgaccgcccccgcgctgtggttcggacctgtgcaaaatggtaaggcggagatgtattccgcttcggtttccacctaccccgacagttcgagcagccaaattttcctgcaaaacctttcccgcaaggatgacacaagcaaaccgggccgctattccctcaaacccttgagtgatacgcagattaaaagtaaagagccgaatttcacggggcggcaaaccgtcatccgattggataaaggcgtacatcagatcaaacttcaaggcaatgaggtcgccaattttaatggaaatgacggcaaaaacgacactttcggcattgttagtgaagggagcttcatgcctgatgccagcgagtggaaaaaagtattgctgccttggacggttcgtgcttccaatgatgacggtcaatttaacacattcaacaaagaagaaaacaacggcaagccaaaatacagccaaaaataccgcagccgcgacaacggcaagcacgagcgcaatttgggcgacatcgtcaacagccccatcgtggcggtcggcgagtatttggctacttccgccaacgacgggatggtgcatatcttcaaacaaagcggcggggacaagcgcagctacaatctgaagctcagttatatcccgggtacgatgccgcgcaaggatattcaaaacaccgaatccacccttgccaaagagctgcgcgcctttgccgaaaaaagctatgtgggcgaccgctacggcgtggacggcggctttgtcttgcgcaaagtcgaacggaacgggaaagaccatgtgtttatgttcggcgcgatgggctttggcggcagaggcgcgtatgccttggatttaagcaaaatcgacagcggcaacggcaacctggcagacgtttccctgtttgatgtcaaacatgacaagaatggcaataacggcgtgaaattaggctacaccgtcggcacgccgcaaatcggcaaaacccacgacggcaaatacgccgctttcctcgcctccggttatgcgactaaagacattaccagcggcgacaataaaaccgcgctgtatgtgtatgatttggaaagcagcggcacgctgattaaaaaaatcgaagtacccggtggcaagggcgggctttcgtcccccacgctggtggataaagatttggacggcacggtcgatatcgcctatgccggcgatcgcggcggcagtatgtaccgctttgatttgagcaatcaagatcctaatcaatggtctgtacgcgccatttttgaaggcacaaaaccgattacttccgcgcccgctatttcccaactgaaagacaaacgcgtggttatcttcggcacgggcagtgatttgagtgaggatgatgtactcagtacgagcgaacaatatatttacggtatcttcgacgacgatacggtggcgaataacgtaaatgtaaaactcagcggtttgggaggcgggctgctcgagcaagagcttaagcaggaggataaaaccttattcctgaccgattacaagcgatccgacggatcgggcagcaaagggtgggtagtgaaattgaagggcggacagcgcgttaccgtcaaaccgaccgtggtattgcgtaccgcctttgtaaccatccataaatatacgggtacggacaaatgcggcgcggaaaccgccattttgggtatcaataccgccgacggcggcaagctgaccaagaaaagcgcgcgcccgattgtgccggccgagaatcaggctgtcgcgcaatattccggccataagaaaggcatcaacggcaaatccatccctataggttgtatgcaaaaaggcaatgaaatcgtctgcccgaacggatatgtttacgacaaaccggttaatgtgcgttatctggatgaaaagaaaacagacggattttcaacaacggcagacggcgatgcgggcggcagcggtatagaccccgccggcaagcgttccggcaaaaacaaccgctgcttctcccaaaaaggggtgcgcaccctgctgatgaacgatttggacagcttggacattaccggcccgatgtgcggtatgaaacgaatcagctggcgtgaaatcttctactga

SEQ ID NO: 42854 - DNA, 369 bp, Neisseria meningitidis
atgcggatattcaaaaaccaatggatagtgaaatttgccaagaagcacaaaatcaacgattccgagctgctggaagcggtagagcgggcggataacgggctgatagacgcagatttaggcggcggtgtgattaagcagcgcatagcaaggcaaggacaaggcagaagcggcggttatcgcagtctgatactgttcaaacaggcagacaaggcattttttgtttacgcctttgccaagaacgacagggaaaacatttcggataaagaacttgacgtttaccgaaaagccgccgcatattatctgaaatacacgcgggcagagctggcggctttgaaagaagacggcattatcacggagatagaatcatga

SEQ ID NO: 42855 - DNA, 669 bp, Neisseria meningitidis
atgaagacttttaaaaatatattttccgccgccattttgtccgccgccctgccgtgcgcgtatgcggcagggctgccccaatccgccgtgctgcactattccggcagctacggcattcccgccacgatgacatttgaacgcagcggcaatgcttacaaaatcgtttcgacgattaaagtgccgctatacaatatccgtttcgagtccggcggtacggttgtcggcaataccctgcaccctacctactatagagacatacgcaggggcaaactgtatgcggaagccaaattcgccgacggcagcgtaacttacggcaaagcgggcgagagcaaaaccgagcaaagccccaaggctatggatttgttcacgcttgcctggcagttggcggcaaatgacgcgaaactccccccggggctgaaaatcaccaacggcaaaaaactttattccgtcggcggtttgaataaggcgggtacaggaaaatacagcataggcggcgtggaaaccgaagtcgtcaaatatcgggtgcggcgcggcgacgatgcggtaatgtatttcttcgcaccgtccctgaacaatattccggcacaaatcggctataccgacgacggcaaaacctatacgctgaaactcaaatcggtgcagatcaacggccaggcagccaaaccgtaa

SEQ ID NO: 42856 - DNA, 1044 bp, Neisseria meningitidis
atgagtaaaaaaatcaaagtcggcattgtcggcgcgacgggctacaccggcgtggaactgctgcgcctgcttgccgcccatcccgatgtcgaagtcgccgccgtaaccagccgcagcgaagcgggaaccgcagttgccgattactttccgagtttgcgcggcgtgtacggcctcgccttccaaacgcccgacgaggcaggtttggaacaatgcgacatcgtcttcttcgccacgcccaacggcatcgccatgaaagacgcgccgcgcctgattgaacagggcgtgcgcgtcatcgacctttccgccgacttccgcatacgggacattccgacctgggaacactggtacggcatgacccacgccgcccccgacctcgtttcccaagccgtgtacggattgagcgaactcaaccgcgaagccgtcgcacaggcgcgcctcgtcgccaaccccggctgctacccgacctgcgtatccctaccgctcgtgccgctgttgcggcaatgccgtctgaagcccggtatgccgctgattgccgactgcaaatccggtgtgtccggcgcgggcaggaaaggcaatgtcggttcgctgttgtgcgaagccggcgacaacttcaaagcctacggcatagccggacaccgccacctgcccgaaatcaggcagaccatcgccgggcttcaggacggcatcgccgaaggattcgtgttcacgccgcacctcgcgccaatgatacgcggtatgcacgccaccgtttacctccacctttcagacggcagcgaccccgaaaccgtcctgcgcgactactaccgcgacagcccgttcgtggacatcctgccgaccggttccgcccccgaaacccgcagcgtgcgcggcgcaaacctctgccgcatcagcatccaacaggcggcgcaatccgatgtgtgggtcgtcctttccgtcatcgacaacctcgtcaaaggcgcggcgggtcaggcagtccaaaatatgaacattatgttcggactggaggaaacacacggcttggacgcaatccccctgctcccctga

SEQ ID NO: 42857 - DNA, 1071 bp, Neisseria meningitidis
atgtatcggaggaaagggcggggcatcaagccgtggatgggtgccggtgcggcgtttgccgccttggtctggctggttttcgcgctcggcgatactttgactccgtttgcggttgcggcggtgctggcgtatgtattggaccctttggtcgaatggttgcagaaaaagggtttgaaccgtgcatccgcttcgatgtctgtgatggtgttttccttgattttgttgttggcattattgttgattatcgtccctatgctggtcgggcagttcaacaatttggcatcgcgcctgccccaattaatcggttttatgcagaacacgctgctgccgtggttgaaaaatacaatcggcggatatgtggaaatcgatcaggcatctattattgcgtggcttcaggcgcatacgggagagttgagcaacgcgcttaaggcgtggtttcccgttttgatgaggcagggcggcaatattgtcagcagtatcggcaacctgctgctgcttcccttgctgctttactatttcctgctggattggcagcggtggtcgtgcggcattgccaaactggttccgaggcgttttgccggtgcttatacgcgcattacaggcaatttgaacgaggtattgggcgaatttttgcgcgggcagcttctggtaatgctgattatgggcttggtttacggtttgggattggtgctggtcgggctggattcggggtttgccatcggtatgcttgccggtattttggtgtttgtcccttatctcggggcgtttacgggattgctgcttgccaccgtcgccgccttgctccagttcggttcgtggaacggcatcctatcggtttgggcggtttttgccgtaggacagtttctcgaaagttttttcattacgccgaaaatcgtgggagaccgtatcgggctgtcgccgttttgggttatcttttcgctgatggcgttcgggcagctgatgggctttgtcggaatgttggcgggattgcctttggccgccgtaaccttggtcttgcttcgcgagggcgtgcagaaatattttgccggcagtttttaccggggcaggtag

SEQ ID NO: 42858 - DNA, 780 bp, Neisseria meningitidis
atgaaactggtaaggcctcagaaaatcagcgatcaggtattgtcggtattggaggagcgcattgcggaaggggtttacgcggaagggggcaagattccgcccgaacgcgttttggcggaagagttcggcgtttcgcgcccgtcggtcaggtcggcattgaatgttttggtcgcccgtcaggttttggaagcgaggcagggagacggttattatgtttcggtcaagccgcagcaggattttttgcaaagttggcaggagcttttgggcaagcattccaattgggaacaggatgtttttgatttcagttgccacatcgagggctgtatggcggcattggcggcagaacgccgcacggatgccgatttgaagcggattgggttttggcttgaaaagtttgaggaggcgtgcgaaagcggcaatttggaacatcagagcgaagctgatgtcagctttcatcagacgattgccgatgcggcgcacaatttgttgttcagccatttgtcgggcggtttgttgaaaatgctgtaccggcagacgcgcagcagccttatttatctgaatcaggaagaagatccgcgtccgaagctgatggcgcagcaccgtgtattgtatgaggcaatatcaaaccgccggccgggcgaggcttcggaggcggcaaaggcacatttgaattatgtggcgagcagcatcttgaaagacagggaatatcagagccgtaaccgccacgcagatactttggcgcaaaatgatttgaagcgcgtgcaggattgggcggtgtga

SEQ ID NO: 42859 - DNA, 225 bp, Neisseria meningitidis
atggaaaaacctttgaatttcaagcctatttcctatccgcaaacgcgcgagagcgcggccgggtggtttaagcgcaacggggtgtgcaaggcgcattgggcgaaatatttcaatctggagcgcaccacggtggagcacctcttgcgcggcaagctgaaaggcaattttggcaaaagccacgaagcggcggttttgctggggatgaaggagaaaagcgatgattaa

SEQ ID NO: 42860 - DNA, 402 bp, Neisseria meningitidis
atgaaattaaaaagcttagatttcccaactggctatttctattttgataatgcagcaataaactctgataaagtagaagttatagcagttggttatagaaatacggataaaaccataaaaatttttattgaagatgttattcattttagggttgttgatgaatcgtattttatagatacttttatggatttaatttcggaagatgcagatagagctttgcttcatgaaaatggtggtcaatctttttttgaacttcttgatgagtgttatgcggaatggatattgaaagaaagttattttcctttgaatagagaattctttaaatactatatttttatgtttgagcaaacattcatagaaataattggttctagtgcaacgtattcaattattgagggctag

SEQ ID NO: 42861 - DNA, 1077 bp, Neisseria meningitidis
atgatttgccgaaaacctatcggacacacaccatattttgatatgaataaaacaatctgccgcactgctgcactattgataagcggtttttcatacgcaaacaccatcattcccgatgtctcccccgtcgcacaaggtcaacatgtcttcattaacatccctcagcaacgcctgttcctctacaccgacggcaaactgaccaaggtttatcccgttgcagtaggtcgggcgatgacgcaaaccaatctaggcgaacataaaatcggtgcgaaagcctataaccctgtttggtacatccccaaatccatacagaaagaacgcggcgacggcgtaaaaaccatagccgccggcccggacaaccctttggggccggtttttgtccgcttaggcgaccccaaactcggtttgggcatacacgggaccaatgcgccggccagcgtccccggggttcggagtcacggctgcgtccgcatgaaatcgcccgacgcgctcgagtttgccaaaaccatcgccagcggctcgcccgcctccgtcatctatcaaatggcgggtctcaatgaagatgcggatcgcaacctgtggcttgccgccttccgcgacccttacggtaagaacaaccttgacatcgcctctctgaaaaaaagtattgcgcaatgggcaaaaacacagggtaaaaccatcgcgcccgagaaagtcgatgctgtactcaaagaccgcaccggatcggccgtctgcctgacctgcggcaaaaacggcaagatgaagatgccgctcaaatcgctggcgtggatacagggttcttcctcatacagccaagctgaagtcattgaacaaactgaggaaaccaactctgccgaaatatccgagacacgcacgcccgaagtgcctgatgtacacacgcccgaggcacaaccgcatttaaatacccaatccgacggcacgccgactgcctataccgaaccggctgccgattcatcgccgcaagtagaaacacctgatcaggctgcttccgagccggttgatgtattattttcaatagatgtgatacggcagggaaatttgcgtttaggtaattga

SEQ ID NO: 42862 - DNA, 477 bp, Neisseria meningitidis
atgccgatagaaatcgaacgccgttttttgattggaaacgacaactggcggcaatacgccgacgaaccgctgctgttgaggcagggttatctgtctgttgaaaaagaacgcaccgtccgtgtccgcattgccggaaaacaggcgtggctgacgctgaaaggctatatttcggaaatcagccgcagtgagtttgaatacgaaatcccgcttgccgatgcggaaaagatgatggaaacgatgtgcccgtttaaaatggaaaaatggcgttatccggtcagatggggcggcagcctgtttgaaatcgatgtttttcttggcgataatgcgcctttggtcgtcgcggaaatcgagttgcccgacgagaatgccgattttgaccgtccggactggctgggacgggaaatcactgccgacggtatgtttaccaatgcttatttgagcaggcatccgttctcaagctggaaaaatgccgtctga

SEQ ID NO: 42863 - DNA, 1635 bp, Neisseria meningitidis
atgaccaaattcattttcgtcaccggcggcgttgtctcctcactgggtaaaggtatcgccgccgcttctattgccgccatcctcgaatcgcgcggcttgaacgttaccatgctcaagctcgatccttatatcaacgtcgatcccggcacgatgagcccgttccaacacggcgaagtgttcgtaaccgacgacggcgcggaaaccgacctcgacttgggacactacgaacgctttatcgattccacgatgacccgccgcaacagcttcagcacgggacaggtgtacgaaaacgttatcgccaaagaacgacggggcgactacctcggcggtacggttcaagtcattccgcacattaccgacgaaatcaaacgacgcatccacgaaggcgcggcaggttacgatgtggcgattgtcgaaattggcggcacggtcggcgacatcgaatcgctgccgtttttggaagccatccgccagatgcgaagccagttggggcgcaacaacaccttgtttgcccacttgagctacgtcccctacatcgccgccgcaggcgaaatcaaaaccaagccgacccagcacaccgttaaagaaatgttgagcatcggtttgcaacccgacatcctgatttgccgtatggacaggacaatgcctgcggacgaacgccgcaaaatcgccttgttctgcaacgtggaagaacgcgcgattgtcggcagctacgatgtggacagcatctacgaatgccccgaaatgctgcacgaccaaggcatcgacaacatcattaccgagcagttgcagcttaatgtgcagcaggcggatttgaccgcgtggaaaaaaatcgtccacgccatccaaaacccgaaacacaccgtcaaaatcgccatggtcggcaaatacgtcgatttgaccgagtcctacaaatcgctgatcgaagccttgaaacacgcaggcattcacaccgaaaccgacgtgcagattacctttgtcgacagcgaaaacatcgagaaaaacaagggcgacgtttccatgcttaaagacatggacgccatcctcgttcccggcggtttcggttcgcgcggtgtggaaggcaaaatcgccgccgtgcgctacgcccgcgaaaacaacgtgccatacttgggcatctgcctcggtatgcagattgcgctgatcgaatacgcccgcgacgtggcaggcttgaaaggcgcgaattccaccgagttcgacctcaaatgcgccgcgccagtcgttgccctgattgacgaatggcaaactgccgacggcagcgtcgaaacccgcgacgaatccaccgatttgggcggcacgatgcgtttgggcgcgcaagaagtcgaattgaaagcaggcagcctcgccgccaaaatctacggcagcggacatatccgcgaacgccaccgccaccgctacgaagtcaacaacaactacgttcctacactggaacaggcaggtttggtcatcggcggtgtatctgccggacgcgaacgcttggtcgaaaccatcgaactgccgaaccatccttggttcttcgcctgccagttccaccccgagtttacctccaatccgcgcaaagggcatcctttgttcaccgcgtttgtcaaagctgcgttgaacaataaaaaagcctga

SEQ ID NO: 42864 - DNA, 876 bp, Neisseria meningitidis
atggaagaaggtttgatcgacaggctgcttgaaacgctgtggttggacaggcggctcagtcagaatactttaaacggttaccggcgcgatttggaaaaaatcgcccgccgcctgtcccaatcgggcagaatgctgaaggatgcggacgaagcggatttggcggcggcggtttatgttgacggagagcaacggagttcgcaggcgcgcgcattatcggcatgcaaacgcctgtatatatggatggagcgtgaaggcataaggacggacaatcccacccgtttgctgaaaccgcccaaaatcgacaagaatattccgaccctgatcaccgagcagcagatttcccgactgcttgccgccccggataccgacacgccgcacggtttgcgggacaaggctttgctcgaattgatgtacgcgaccggcttgcgcgtcagcgaggcggtcgggctgaacttcggcaatgtggatttggacaggggctgtattaccgcgctgggaaagggtgataagcagaggatggtcccgatggggcaggagtcggcgtattgggtggaacgctattatacggaggcacgcccacttctgctgaaaggcaggaattgcgacgcattgtttgtcagtcagaaaaagacgggcatttcccgtcagttggcatggatgattgtcaaagaatatgcaagtcaggcaggcatcgggcacatcagcccgcacagcctgcgccacgcctttgccacgcatctggtgcggcacggcttggatttgcgcgtggttcaggatatgttgggacatgccgatttgaatacgacgcagatttatacccatgttgccaacgtatggttgcagggtgtagtgaaggaacaccattcccgaaactga

SEQ ID NO: 42865 - DNA, 330 bp, Neisseria meningitidis
atgtcattacccccatgcccgcaatgcgcctccgaatacacctatgaagacggcggacaatacatctgccccgaatgcgcccatgaatggaatgaaaccgaatccgccgccgaccttgcggctcaagtgcgcgatgccaacggcgcagtgctgcaaaacggcgataccgtcatcctcatcaaagacctcaaggtaaaaggcagctcgatggtgatcaaacaaggcacaaaagtcaaaggcatacgcctgcaagaaggcgatcacaacatcggctgcaaaatcgacggcagcgcgatgaatttaaaatccgaattcgtcaaaaaagcctga

SEQ ID NO: 42866 - DNA, 468 bp, Neisseria meningitidis
gtgcgtttaatcagtgagtcaggcgaacagcttggtgtcgtttcagttcgtgaagctttggctatggccgaagggcaggatgtcgatttggtagagatttccccaactgctaaaccgcctgtgtgcaaactgatggattacggtaaatacaaataccagcaggccaagaaacgcgacgaagccaagaaaaaccaaaagcaggtgcaaatcaaggaaatcaaattccgtccgggtacggatgagggcgattatcaaatcaagatgcgcaacattaaccgcttccttgccgacggcgataaagtcaaagtgacattgcgtttccgcggccgtgaaatggctcaccagcaactcggcgcgcaacttttggaacgtgtaaaagaagatttggctgaagtggcgcaaatcgagtcctttcccaaaatggaaggtcgccaaatggtgatgatgattgcgccgaagaaaaaataa

SEQ ID NO: 42867 - DNA, 645 bp, Neisseria meningitidis
atggaatcaacactttcactacaagcaaatttatatccccgcctgactcctgccggtgcattttatgccgtatccagcgatgcccccagtgccggtaaaactttgttgcacagcctgttgaaagcagatgcggacgaaatggtcagcagtgagaagctgcttacttgggcggacaccgccgacatcgataccgctttgaacctgttgtaccgtttgcaaaaactcgaattcctctatggcgatgaaaacggtcattcagacggcatcaatttgtcggacgagcaattgccgttgctgatggaacaattgtccggcagcggtaaggcgttattggtcgatcggaacggtctgtatcttgccaacgccaatttccatcatgaggcggcggaagagttggggttgttggcggcagaagtcgcacagatggaaaagaaataccggctgctgattaagaacaacctgtatatcaacaataacgcttggggcgtttgcgatccttccggtcagagcgaattgacatttttcccattgtatatcggttcaaccaaatttattttggttatcggcggcattcccgatttgggcaaagaggcatttgttactttggtaaggattttataccgccgttacagcaaccgcgtgtaa

SEQ ID NO: 42868 - DNA, 423 bp, Neisseria meningitidis
atgaatttggaacagttgggcaggcgggacgcgctgctttccggacttttgaaacaggcgggacagtggcggcggttggatgccgccgtgaaaaaactgctgcctgccaacctgcacccgcattttcagacggcatgtatcgaagacggcaggcttgtccttttggcggcaaacaatatggcggcatcgcgcttgaaaatgattgcaccgtcggtattgccgcagttggcagggcttgatgcttcgatacgctctgtttcggtcaggctggtcccgaaaccggaaaaaccgccgaaaaccaataccctgcatttgagtaaggctgcgctggagagtttcggttcggcggcggcaaagttggaaaaacggcatcccgaattggcggaggcattggcaaacttggttagaaggcatggcgcataa

SEQ ID NO: 42869 - DNA, 948 bp, Neisseria meningitidis
atggaatttttcattatcttgttggtagccgtcgccgttttcggtttcaaatcctttgttgtcatcccacaacaggaagtccacgttgtcgaaaggctggggcgtttccatcgcgccctgacggccggtttgaatattttgattccctttatcgaccgcgtcgcctaccgccattcgctgaaagaaatccctttagacgtacccagccaggtctgcatcacgcgcgacaatacgcagctgactgttgacggcatcatctatttccaagtaaccgaccccaaactcgcctcatacggttcgagcaactacattatggcgattacccagcttgcccaaacgacgctgcgttccgttatcgggcgtatggagttggacaaaacgtttgaagaacgcgacgaaatcaacagtactgttgttgcggctttggacgaggcggccggggcttggggtgtgaaggttttgcgttatgagattaaagacttggttccgccgcaagaaatccttcgctcaatgcaggcgcaaattactgccgaacgcgaaaaacgcgcccgtatcgccgaatccgaaggtcgtaaaatcgaacaaatcaaccttgccagtggtcagcgcgaagccgaaatccaacaatccgaaggcgaggctcaggctgcggtcaatgcgtcaaatgccgagaaaatcgcccgcatcaaccgcgccaaaggtgaagcggaatccttgcgccttgttgccgaagccaatgccgaagccatccgtcaaattgccgccgcccttcaaacccaaggcggtgcggatgcggtcaatctgaagattgcggaacaatacgtcgctgcgttcaacaatcttgccaaagaaagcaatacgctgattatgcccgccaatgttgccgacatcggcagcctgatttctgccggtatgaaaattatcgacagcagcaaaaccgccaaataa

SEQ ID NO: 42870 - DNA, 1071 bp, Neisseria meningitidis
atgaccaaacatatcgccatcctccgaggtgacggcatcggcccagaaatcgtcgccgaaaccgtccgcgtactcgacaaactcatcgcccaaggcttggacgccagctacgaatacgccccattaggcggcgaagcctacgacgaatacggccatccctatccccaattcacgcaaaacctttgccgtaaagccgatgccgtcctgcttggtgcagtcggttctcctcaatacgacaatctcgaccgtccattgcgtcctgagcgcggcttgttggccatacgtaaagacttgaatctgtttgccaatttgcgccctgctatcctctatcccgaactagccaacgcctccacgctcaagcctgaaatcgtcgccggtttggatattttgattgtgcgcgaactcaccggcgatatttatttcggcgaaccgcgcggcatccgtgttttagaaaacggcgaacgcgaaggctacaacaccatgaaatacagcgaaagcgaaatccgccgtattgcccacgttgccttccaatccgcccaaaaacgcagcaaaaaagtctgctccgtcggcaaagccaacgttttggaaaccaccgaattgtggcgcgaaatctttgaggaaatcggcaaagaataccccgatgtcgagctttcccatatgtacgttgataacgcagccatgcagctcgtgcgcgcgcccaaacaatttgacgtgattgccaccggcaacatcttcggcgatattttatcggacgaagcctctatgctgaccggctccatcggtatgctgccttccgcttctttggacgaaaacggcaaaggcctgtacgaaccgtcccacggctccgcccccgacatcgccggacaaaacaaagccaacccgcttgccaccatcctctcgctcgcaatgttgctgcgttacagcctgaacgacgaagcgcgcgcgcaacaagttgaaaacgccgtacaaaaagtgctgcaacaaggcttgcgcaccggcgatatttacgaagaaggcacgaaactcgtttcctgctccgaaatgggtgatgcggtactcgccgccttgtaa

SEQ ID NO: 42871 - DNA, 1332 bp, Neisseria meningitidis
atgctgttcaaccacaccgcttccgaactcctcgacctctgccgccgcacgctcgacttggcaaaagcgacgggcgcaaccgccgccgaagccgatttcagcgaatcattgggacaaagcgtcagcgtgcggctgggcgaaatcgaacaaatcgagttccagcaggacaagtcgctggacattaccgtttacgtcggcaaacgcaaaggccgcgccagtactgccgacttctccgaaaaagccctgcaagacaccgtcaaagccgccatcgacatcgcccgccacaccgccgaagacggttgcgccggacttgccgatgcctgtctgatggcaaaacacatcggcgaccccgacctttaccacgaatgggatttggatacggaagccgccgtcggcttggcaaaacaatgcgaacaagccgccctgaacgaggatgagcgcatcgaaaactccgaaggcgcggcggtgcaaaccggccattaccaatacgtttacggcaacacccacggttttgccgcacaccggcaaggcacgcaccacagcatttcctgcagcgtcgttgccgccgacgaaaacggcatgcagcgcgactactggtacgattccgcctgccgccatccggatatggacagccccgaaaccatcggtcaaaccgccgcccgccgcactttgcgccgactcggcagccgcagcatcccgacaggcagctaccccgtcctcttcgataccaccgtttcgggcggtcttatcggacacctcgtcggcgcactctccggcggcgcgctctaccgccaaagcagtttcctgatcgacagcatcggcaaaaaagtcctgcccgatttcctcaacctgcgcgaagaaccgcacatcccccgctctttccgcagcagctattttgatgcggaaggcgttgccaccgcaccgcgcttcgtgattcaaaacggcattgtcgaaggctatttcctcagcagttacagcgcgcgcaaactcggtatgcagaccacgggcaacgccggcggcgcgcacaacctgtatttgaaccatacgcacgaaacgcaatccgacctgctgaaagaaatggggacgggattgttggtaaccgaactgatgggacagggcgcgaacaccattaccggtgactactcgcgcggcgcggcgggtttttgggtggaaaacggcgtgattgcctaccccgtccacgagattaccgtagccggacgcttgcaggatatgtaccgcgacattgtcggcgtggcggatgacgctttgcggcgttcgtccaacaaaatcggctcgattctgattgcggggatgacggttgccggaagctga

SEQ ID NO: 42872 - DNA, 582 bp, Neisseria meningitidis; identical to SEQ ID NO: 37778

SEQ ID NO: 42873 - DNA, 486 bp, Neisseria meningitidis
atgatacaaatcggcatcatcatgggcagcaacagcgattggcccgttatgcggcaggcagcgcagtttcttgaagagttcggcgtagaatatgaggcgcgcgttgtttccgcacaccgcaccccggatttgatgttccaatacgccgaaaccgcacgggcgcgcggcatcaaagccatcatcgcgggtgcgggcggcgcggcgcatttacccggtatggttgccgccaagaccaccgtccccgttttgggcgtacccgtccccagcaaatacctgcgcggcgaagattcgcttttatcgattgtacaaatgcccaaaggcgtacccgtcgccacattcgccatcggcgaggcaggcgcggcaaatgccgcattgttcgccgtttccatgctcgccaacgaaacccccgaactggcgcaaaaactggcagacttccgagccaaacaggaacaggctgttttgaatatggaattggaacaaatttaa

SEQ ID NO: 42874 - DNA, 1407 bp, Neisseria meningitidis
atgaaactgttccaacgcattttcgccacattttgcgcggttatcgtctgtgcaatctttgtggcgagtttttctttctggctggtgcagaacacccttgccgaaaaccagttcaaccaacgccgcaccatcgaaaccactttgatgggcagcatcatttccgcattccgggcacgcggggacgcgggtgcgcgcgaaatcctgacggaatggaaagacagccccgtctcatcgggcgtgtacgttatacagggcgacgagaaaaaagatatcctgaaccggtatatcgacagctataccatcgaacgcgcccggcttttcgccgccggacacccgcattccaacctcgtccatatcgaatacgaccgcttcggcgaagaatacctgttcttcaccaaagactgggacaaactccaagcccgccgcctgcccagccccctgttgatccccggcctgccgctcgccccgatttggcacgaactcatcatattgtccttcatcatcatcgtcggactgctgatggcatatatcctcgccggcaacattgccaaacccatcagaatcttaggcaacggcatggacagggtggcaaacggagaacttgaaacccgtatctcccaacaggtcgacgaccgcgacgacgaattgtcccatcttgccatccaattcgacaaaatggtggaaaaactcgaaaaactcgttgccaaagaacgccacctgctccatcacgtctcccatgaaatgcgttctccccttgcgcgcatgcaggcaattgtcggactgattcaggcgcagccccaaaaacaggagcaatatctcaaacggctggaaggcgaactgacccgcatggatacgctggccggggaactgttaaccctgtcccgtctcgaaacttccaatatggctttggaaaaagaaagcctgaaactcctgcccttcctgggcaacctggtagaagacaatcaaagcattgcccagaaaaacggacaaacggttaccctgtctgccgacggaaaaatccccgaaaacacaaccatccttgccaacgaaagctacctgtaccgcgccttcgacaacgtcatccgcaacgccgtcaactacagtcccgaaggcagcaccatcctgatcaacatcggacaagaccacaaacactggataatcgacgttaccgacaacggccccggcgtggacgaaatgcagctcccgcacatcttcaccgctttctaccgtgcagactccagtgccaacaaacccggaacaggactggggcttgcattgacccaacatattattgaacagcactgcggcaaaatcatcgccgaaaacatcaaaccgaacggtctgcggatgcgctttatcctgcccaagaaaaaaaccggttccaaaacagaaaaaagtgcgaactga

SEQ ID NO: 42875 - DNA, 993 bp, Neisseria meningitidis; identical to SEQ ID NO: 36422

SEQ ID NO: 42876 - DNA, 285 bp, Neisseria meningitidis
atgttcggcggtcgtctgaaaaacgctccatccattaccgccaaacactttttgaaggaaaatatcatgaaatttattaacacctgccgtaaatacggcgcaaaactggctgttgtaacagctgctcccctggctttggccgcacatgcaaatgcaacgttgcccgatacggcaaaaaacgctttggaagccgcaaaagcggacggtatggaagccggttggattgtagtgggcattttcgccgcgctttttgtattttccatcgttaagagagtgatgaagtaa

SEQ ID NO: 42877 - DNA, 690 bp, Neisseria meningitidis
atgctgtttgaaggcttgccgtgtttggcggtttggtgcaaaaaccggctgtctgccgttttgcctgttggaggattgaacgtgtctgaaaatctgcttgaaatcgaaacccatcccttcgatcccgtgttgccgccgaaggctgctgtcatgatgatggggacgtttccgcccaaggaagacaaacgcgcgatgcagtttcattatccgaatttccaaaacgatatgtggcgcgtttatgggctggtgttttttaatgatgcggcgcatttccaaaggttgtctgaaaaagcgtttgatgccgagaaaatcaaggcgtttttgcacgaacgggggattgcgtcctgtccgaccgttttgaaggcggtacgtcagcacggcaatgcgtccgacaagtttttaaaggtagttgaaaccgtcgatttggcggcggtgttggcaaaaatacccgagtgccgccatatttgtacgacaggcggcaaggcgacggaaatcctgctcgatattcagggcggcggtatcaaaatgccgaaaacgggcgaaaccgtgccgtttccgtttgccggacgggatttgacgctgacgcgcctgccttcgacttcgcgcgcctatcctttgagtttggcgaaaaaagcggcggcgtatcgggcgttttttgaaatggcgggcttgtgtgaaaaacagttataa

SEQ ID NO: 42878 - DNA, 288 bp, Neisseria meningitidis
atgtggtcgggcagatgttcagacggcattataacggcttttaaatgcaaatgttttgaaaaggagcaggttgtgaatacggttttaggcgtgctgatgttggtttttctgaaccgacagcttgattgccgccttcaggtagtcggacaccaaaccgggatgccggttcagatagcctatggattcttttttcaaatccttgaaacgttcatcgtagcgtttgtctttcgcgaattcgatgatgcgccctatattttgacggcactcttgctaaaacctcttaattaa

SEQ ID NO: 42879 - DNA, 2838 bp, Neisseria meningitidis
atgttagacaaatacaatccagccgaaatcgaatccaaacattatcaaaactgggaagagcagggctatttccaacctgatatggatttgacgaaaccgtctttctccatccaactgccgccgcccaacgtaaccggcacgctgcacatgggtcatgccttcaaccaaaccattatggacggtctgacccgctactaccgcatgaaaggctgcaacaccgcctggattcccggcacagaccacgcgggcatcgccacgcagattgtggttgagcgtcagcttgctgcgcaaaacgtgtcccgccatgacttgggtcgcgaaaaatttttggagaaagtgtgggaatggaaagaagtttccggcggcacgattacccaacaaatgcgccgcgtgggctgctctgccgactggacgcgcgagtatttcacgatggacgacgtgcgcgccgaaaccgtaaccgaagtgttcgtgcgcctgtatgagcaaggcttgatttaccgcggcaaacgcttggtgaactgggatcccgtgcttggcacggcggtatcggatttggaagtggaaagcgtggaagaacaaggctctatgtggcacatccgctatccgctggcggacaatcccgccgaagccgttatcgtggcgaccacccgtcctgaaacgctgctgggcgacgttgccgttgccgtcaatcctgaagacgaacgttatacccacttaatcggcaaggaattaatcctgccgctgaccggccgtactatccccgtgattgccgacgaatacgttgaaaaagacttcggcacaggctgcgtgaaaatcacgcctgcacacgacttcaacgactacgaagtcggcaaacgccacgacacgcgcctgattaatgtgttcaacttggaagccaaagtgctggcaaacgccgaagtgttcaacttcaaaggcgaagcgcaactaggctttgccctgcctgaaaaatacgcaggcttagaccgctttgccgcgcgcaaacaaatggttgccgatttgcaggaacaaggtttcttggtcgaaatcaaaccacacacgctgatgacgccgaaaggcgaccgtacaggttcggtgattgaacctatgctgaccagccaatggtttgtcgccatgtccgccaccccaaacggcggcgagccggacagcgagttcaaaggcttgagcctcgccgataaagccaaaaaagccgttgatagcggcgcggtacgctttatccctgaaaactgggtcaacacttacaaccaatggatgaacaacatccaagactggtgtatctcacgccaactgtggtggggccatcaaatccctgcatggtacgacaacgaaggcaatgtgtatgttgcccgcaatcaggaagaagccgaaaaacaagccggcaaaacaggcttgactcgcgaagaagacgtattggatacatggttctcctccgcgcttgtgccgttctccacactcggctggccgtctgaaaccgacgaactcaaagccttcctgccgtccaatgtcttagtaaccggctacgaaatcatcttcttctgggtggcgcgtatgattatgatgaccacccacttcaccggcaaagtaccgtttaaagacgtgtacatccacggcatcgtgcgcgaccacgaaggcaaaaaaatgtccaaatccgaaggcaacgtcattgaccctgtggatttgatcgacggcatcggcttggaaaaactgctggtaaaacgcaccaccggcctgcgcaaacccgaaaccgcgccgaaagtggaagaagccacgaaaaaactcttccccgaaggcattccgagtatgggcgcggacgctttgcgcttcactatggcgagctacgccagcttggggcgttcggtcaacttcgacttcaaacgcgccgaaggctaccgcaacttctgcaacaaaatctggaacgccaccaacttcgtcttgatgaacaccgaaaaccaagactgcggttacggcgcaaccgctgccgaaccgcgcggctactccttccccgatatgtggattgtaggccgtctgaatcagaccatcgaacaggttacgcaagcctacgaaacctaccgctttgatttggcggcggaaaccctgtacagcttcgtatggaacgactattgcgactggtatttggaactcgccaaagtgcagcttcaaaccggctgcgccagccgccaacgcgccacacgccataccttattgcgcgtactcgaagccgccctgcgcctgctgcacccgattatcccgttcatcaccgaagaactgtggcaaaccgtcgctcctatgtgcgacgcgaaaaccgccgacagcatcatgctcgcccgcttccccgaagccgacagcggcgagattgttcagacggcattcgagcaaatgaccgtgttgcaggatttgattggcgcagtccgcaacctgcgcggcgaaatgggcatccagcccaacgtaaaagccccgctgtttgtcgaaagcacggacgacttggcggactacctcaaatacctgccgatgatgacccgcctgaccgaagcacagcaagtcgccgccctacccgaaagcgaagacgcgcccgtcgccgtctgcaacggcgcgcgcctgatgttgaaagtcgaaatcgacaaagccgccgaaaccgcccgtttgagcaaagaagccgagaagctgcaaaaagccttggacaaactcaacgccaaactctccaaacccggctacaccgaaaaagcccctgcgcatctggtggaaaaagacaaagccgatttggcggaattggaagacaaaatggcaaaagttcaaaatcagttggcgaagttgaaagactga

SEQ ID NO: 42880 - DNA, 1350 bp, Neisseria meningitidis
atgaaattaccggtgatgtcgcccgaacattcggcgcaacttcaggcgtttgaggcaaaaatcctgtccaatcacgccaaaatcgaggcgtggttccgcacgcagtggagcgtacaccgcccgccgttttacggttcggtcgatatacgcaatgccggttacaaaatttcgtctatcgatatgaatttgttccccggcggcttcaataatctgaatcccaactttatcccgctggcggcggttgccgcgcaagatgcggtgcaacgcgcctgcgaaacggcgaaatccgtattgattattcccgaaaaccacacgcgcaatacgttttacctgcaaaacatttacgccctcggcgagattttgcgttcggcagggtatgaagtgcgcttgggcagcctgaatccggaagtaaccgaaccgaccgaatttgaaactgcattgggcgacaaaatcctgttggaacctttattgcgtacccgcgaccgcgtccatcttgcagacggcttttcgccttgcgtggttttgttgaacaacgatttgtctgccggcattcccgacatcctcaaaggcatcagccaaaccgttttgccgccgttgcacggcggttggacgacgcgccgcaaaacaaatcatttcggcgcgtacaaccaagttaccgccgaatttgccaagttaatcggcatcgacgaatggcaaattaacccttattttgaaaaaatcggcggtttggacttccaagggcgtgaaggcgaagacgcgttggcggaagcggtagaacgtgtgctggcgaaaattcaagccaaatacgacgaatcgggcattaccgacaaacctttcgtcatcgtcaaagccgatgccggcacttacggcatgggcgtgatgagcgtcaaatccgccgacgaagtgcgcggattgaaccgtaaaaaccgcaataaaatggcgaaagtcaaagaaggcttggaagtcagcgaagtgattgtccaagaagggatttatacttatgaaaccttaaacggcgcggtgtgcgaacccgtcgtctatatgatggaccgcttcgtcatcggcggctttttccgcgtacacgaagggcgcggtgcggacgaaaacctcaacgccggcggtatggtgtttgttccgctgtccaacagcatccccaccggcaacggcgacaactcccaagaagctcccgaagcctgcaagcgcgtattcgaacaatgggactcgctgggtatgccgcgctctgaaaaagactgcgacgtggacaacgaacacaaccgcctctacgtttacggcgtaatggcacgcctgtcgcttctggcggcgtccatcgagttggaagaaacggcgtaa

SEQ ID NO: 42881 - DNA, 1320 bp, Neisseria meningitidis
atgccgtctgaaagcaaacccgtgtcgcgcatcgtaaccgacagccgcgacatccgcgcgggcgatgtgtttttcgcattggcgggcgagcggtttgacgcgcatgattttgttgaagacgtattggctgctggtgcggcggcggttgtggtttcgcgcgaagattgtgctgcaatggatggcgcgttgaaagtcgatgacacgcttgccgcattgcaaacgctggcaaaggcgtggcgtgaaaatgtgaatccgtttgtgttcggcattaccggttcgggcggcaagacgacggtgaaggaaatgctggctgcggtattgcgccgccgtttcggcgatgatgccgtgttggcgacggcaggcaacttcaacaaccatatcggattgccgctgactttgttgaagttaaacgaaaaacaccgctatgccgtgattgaaatgggcatgaaccatttcggcgaactggcggttttaacgcaaatcgccaaaccaaatgccgcattggtcaacaacgccatgcgcgcccatgtcggctgcggtttcgacggagtgggcgatattgccaaagcgaaaagcgagatttaccaaggtttatgttcagacggcattgcactgattcctcaagaagatgccaatatggctgtcttcaaaacggcaacgcttaatttgaatacgcgcactttcggcatcgatagcggcgatgttcacgcggaaaatattgtgctgaaaccgttgtcgtgcgaatttgatttggtgtgcggcgatgagcgcgccgccgtggtgctgcctgttcccggccgccacaatgtccacaacgccgccgctgccgccgcgctggctttggctgcgggtttgagtttgaacgatgtggcggaaggtttgaaaggcttcagcaatatcaaaggccgtctgaacgtcaaatccggaatcaagggcgcaaccctgattgacgatacttataatgcgaaccctgacagcatgaaagctgcgattgacgtgttggcgcgtatgcctgcgccgcgtattttcgtgatgggcgatatgggcgaactgggcgaactgggcgaggacgaagccgccgctatgcacgccgaagtcggcgcgtatgcccgcgaccaaggcatcgaagcggcttattttgtcggcgacaacagcgtcgaagcggcggaaaaatttggcgcggacggtttgtggttcgccgccaaagacccgttgattcaagtgttgcgccacgatttgcccgaacgcgccaccgtgttggtgaaaggttcgcgctttatgcagatggaagaagtggtcgaggcattggaggataagtga

SEQ ID NO: 42882 - DNA, 843 bp, Neisseria meningitidis
atgattcaacacgcaggcttgggctaccgccgcgacttggcggaagactttctctcgctttccgaaaacagcccgatatgctttatcgaagccgcaccggaaaactggctgaaaatgggcggctgggcgcgcaaacagtttgaccgtgtggcggaacggctgccgctggcgttgcacggattgtctatgtcgctgggcgggcaagcaccgctggatactgatttgatagacggcatcaaagaaatgatgcgccgttacgattgcacgtttttctccgaccatttgagctactgccacgacggcggtcatctttacgatttgttgccgctgccctttaccgaggaaatggtgcatcatacggcgcggcgtatccgcgaagtgcaagaccgtttgggctgccgcatcgccgtggaaaacacgtcctactatctgcattccccgcttgccgagatgaacgaggtcgagttcctcaacgccgtcgcacgtgaggccgattgcggcattcatctggatgtgaacaatatctacgtcaacgccgtcaatcacggtctgctgtcgccggaggcttttttggaaaatgtggatgcagagcgcgtgtgctatatccatattgccggacatgacgtggaaacgccggaattgttgattgatacacatggcgcggcagttttgccgactgtttgggacttgctcgaacttgcctatgccaagctgccgacgattccgcccaccctgttggaacgcgattttaatttcccgcctttttccgaactcgaagccgaagtcgccaaaatcgccgattatcaaacgcgtgccggaaaggaatgccgccgtgcagcctga

SEQ ID NO: 42883 - DNA, 372 bp, Neisseria meningitidis
atgaaaccatacaaaatctacacccatcccgccctgccgccccaagccgtcaaacaaggctggtcatggccggggctcttgttcggcacgctgtgggcgtgtttcaaaagaatgtggggtttggggctggggctgacgggcgcgatattcgtgctggctgtgtttgcccaactggtttacggcgacacgcccgccacagactcggcgtttaacgtattgggcttggcggtttccgtctggttcggcgcaaagggcaacagcctttatgcacgccaccttttatcgcgcggctataccgaattgcccgaaacggttgaggcagccaatccccaagccgcattggcgcaatatttcgggcgcgggggccgataa

SEQ ID NO: 42884 - DNA, 249 bp, Neisseria meningitidis; identical to SEQ ID NO: 38918

SEQ ID NO: 42885 - DNA, 1134 bp, Neisseria meningitidis
atgtttaaaaaattcaaaccggtactgttgtcattttttgcacttgtatttgccttttggctgggaacgggtattgcctatgagattaatccgcgttggtttttgagcgatacggcaactgaagtacctgaaaatccgaatgcttttgtggcgaaacttgcccgcctgttccgaaatgccgacagggcggttgtcatcgtgaaggaatcgataaggacggaggaaaatcttgccggaactgtggatgacggtccgttgcagtcggagaaggattatctcgcgctcgctatccggctcagtcgtttgaaagaaaaggcgaaatggtttcacgtaacggagcaggaacatgggaaagaggtttggctggattaccatatcggcgagggcggtttggttgcggtttcgctttcgcaacgctcgccggaagcatttgttaatgccgaatatctgtatcggaacgatcgtccgttttctgtaaatgtgtacggcggaacggttcacggggaaaattatgaaacgacaggagaatatcgggttgtttggcaaccggacggttcggtatttgatgcgtcggggcgcgggaaaatcggggaagatgtttatgagcattgtctcgggtgttatcagatggcccaggtatatttggcgaaatatcgggatgtcgcgaatgatgagcagaaggtttgggacttccgcgaagagagcaaccggattgcgtcggactcgcgcgattctgtgttttatcagaatatgcgggaattgatgccccgggggatgaaggcgaacagtcttgtggtcggctatgatgcggacggtctgccgcaaaaagtctattggagtttcgacaatggaaaaaaacgccagagtttcgaatattatttgaaaaacggaaatctttttattgcacaatcttcgacggtagcattgaaagcggatggcgtaacggcggatatgcagacctatcatgcgcaacagacgtggtatttggatggcgggcggattatccgcgaagagaaacagggagacagactgcctgattttcctttgaacttggaagatttggaaaaagaggtgagccgttatgcagaggctgcggcgagacgttcgggcggcaggcgcgacctttctcactga

SEQ ID NO: 42886 - DNA, 432 bp, Neisseria meningitidis
atgatggggttcgaaaaagttgaacatttattgccggataccgtgttggacattgtggatgtcatcggactggcagcgacggaacagctggtcaaggcgattggcggggcgcggtttaaatttggtaagggcaaggtggacaccgagcgtttggcaattttggtcgaagccatcggcgaagtgaaaacacatgagctgttgcaggtatatggtggcgaggaattgtatgtcccacggtgcggcaaggcgttaatacagttgagaaaccataggttttatcaggagtttgtcaaattgcgcgatattgataagaagagcgggcttatggcgatgacgaagctatgccctaaatacggcatctcttcacgaacgggatatacgattatcaatgaaatgagccgacctgcggcacagcaggcagctttattttag

SEQ ID NO: 42887 - DNA, 687 bp, Neisseria meningitidis
atgacggtgttgcaagaacgttatcgggaggtgtccgaccgtatcggaaaattggttctgcaggcgggaaggaagccgcattccgtcagcctgattgccgtcggtaagactttcccttcagacggcatccgcgaagtttacgccgccggacagcgtgatttcggcgagaactatattcaggagtggtacggcaaaacggaagagttggcggatttgaccgacatcgtgtggcacgtcatcggcgatgtgcagtccaacaaaaccaagtttgtcgccgaacgcgcgcattgggtgcataccgtatgccgtctgaaaaccgctgtccggttgagcgaacagcgtccttcctcaatgccgcccttgcaggtgtgtattgaggtgaacattgcgggcgaggcggtgaagcacggtgtcgcgcccgaagaagcagtcgcgcttgctgtggaagtggcgaagctgccgaatatcgtcgtacgcggactgatgtgtgttgccaaagccaacagcagtgaaacggagttgaaggtgcaatttcaaacgatgcggaaactgcttgccgacctcaatacggctggcgttaaggcagacgtgctgtctatggggatgtcggacgatatgcctgccgccattgagtgcggtgcgacacacgtccgtatcggcagcgcgattttcgggaaaaggggctga

SEQ ID NO: 42888 - DNA, 1248 bp, Neisseria meningitidis
atgttgaaacaaacgacacttttggcagcttgtaccgccgttgccgctctgttgggcggttgcgccacccaacagcctgctcctgtcattgcaggcaattcaggtatgcaggacgcgccgtcttcggcagtttacaacaacccctatggagcaacgccgtacagcccggctcctgccggcgatgcgccttatgtgccgccggtgcaaagcgcgccggtttatacgcctcctgcttatgttccgccgtctgcacctgccgtttcgggtacatacgttccttcttacgcacccgtcgacatcaacgcggcgacgcatactattgtgcgcggcgacacggtgtacaacatttccaaacgctaccatatctctcaagacgatttccgtgcgtggaacggcatgaccgacaatacgttgagcatcggtcagattgttaaagtcaaaccggcaggatatgccgcaccgaaagccgcagccgtaaaaagcaggcccgccgtaccggctgccgcgcaaccgcccgtacagtccgcacccgtcgacattaacgcggcgacgcatactattgtgcgcggcgacacggtgtacaacatttccaaacgctaccatatctctcaagacgatttccgtgcgtggaacggcatgaccgacaatatgttgagcatcggtcagattgttaaagtcaaaccggcaggatatgccgcaccgaaaaccgcagccgtagaaagcaggcccgccgtaccggctgccgtgcaaacccctgtgaaacccgccgcgcaaccgcctgtgcagtccgcgccgcaacctgccgcgcccgctgcggaaaataaagcggttcccgcgcccgccccgcaatctcctgccgcttcgccttccggcacgcgttcggtcggcggcattgtttggcagcgtccgacgcaaggtaaagtggttgccgatttcggcggcaacaacaagggtgtcgatattgccggtaatgcgggacagcccgttttggcggcggctgacggcaaagtggtttatgccggttcaggtttgaggggatacggaaacttggtcatcatccagcataattcttctttcctgaccgcatacgggcacaaccaaaaattgctggtcggcgaggggcagcaggtcaaacgcggtcagcaggttgctttgatgggcaataccgatgcttccagaacgcagcttcatttcgaggtgcgtcaaaacggcaaaccggttaacccgaacagctatatcgcgttctga

SEQ ID NO: 42889 - DNA, 750 bp, Neisseria meningitidis
atggtattgtgcagggattttctgacttggtgtaatgaaacattgcagacagcgttgtttaaagattacgcccctaacggtttgcaggttgaagggagggaatatatcgggaaaatcgttacgtcggtaacggcaagcagggcagcgattgattttgctgtggagcagaaggcagatttgcttttggtacatcacggtatgttctggaaaaacgagttgccgaccgttactggttggaaaaaagaacggattgccgcactgttacggcacgacatcaatatggcaggctaccatctgcccctggatgcacatcccacactgggcaacaatgcccaactcgccgacagattgggttttgcgacagaaaaacggttcggcgaacaaaacctgctcaactcgggcagcctgaaacaagccaagacactcggcgcattggcggcgcatattgaaacagttttgcaacgtaagcctgtcgttatcggcaatcccgaacgcgaaatccgacgggttgcatggtgcagcggcggggcgcaggggttttttcagacggcaatagacgaaggtgtcgatctgtatttgacgggggaaatctctgaagcccaataccaccttgccaatgaaacgggtacggctttcatttcggcagggcatcacgcgacggaacgttacggcgtacgcgcgctggcagaatcggcggcagaggttttcgggttggaagtgtgccattttgacgaaaacaatccggcttga

SEQ ID NO: 42890 - DNA, 1662 bp, Neisseria meningitidis
atgacagaatccatcacccgcgacagtatgcaatacgatgtcgtgattgtcggcgcaggcccgtcgggtttgtctgccgccatcaaactcaagcagcttgccgaacaaaacgggcgcgaaatcagcgtttgcgtggtggagaaaggttcggaggtgggggcgcattcgctggctggcgcagttatcgatccgattgcgctgaatgagttgatttccgactggaaagaaaaaggcgcaccgctgacacgcacagtaacgcaggacaaagtgttgttcctgaccgagaaaaaagcgttcaacctgccgattaccccgaatttcgacaatcacggcaactacatcgtcagcttgggcgaagtcgtgcgctggttggcggagcaggcggaaaatatgggcgtggaaatctatccgggctttgccgccgccgaagtgctgtatcacgaagacggttcggtcaaaggcattgcaaccggcaatatgggcattggcaaagacggcgagccgaccgattcattccaacccggcatggagctttgggcgcagcaaaccctgtttgccgaaggttgtcgcggttcgctttccaaacaaatcatcgaacgtttccaactcgaccaaaacagccagccgcaaacttacggcttgggcattaaagaagtttgggaagtgccgtccgaacagcatcagcccggtttggtggtgcacagcgcaggctggccgctggacagcaaaacctacggcggcgcgtttgtttaccatttcgacgacaacaaagtcgccgtcggcttcgtggtcggtttggactatcaaaatccttatctgtcgccgtttgaagagttccaacgtttcaaaacccatcccgaaatccgcaaaacctttgaaggcggccgccgcattgcttacggcgcgcgttcgctgattgaaggcggtttgcaaagtttgccgaagctctcgttcaaaggcggcattttggtcggcgatgcggcgggtttcctcaatatgccgcgcatcaaaggcattcataccgcgatgaaatccgccatgctcgccgccgaagccgtgttccccttgttggaaaaccttgaagaagtggagggtttcgacagcggcaaagaggcggcggattatcagcaacgttttgaacaaagctggctgtatcaagagctttacgccgcgcgcaatgtccgtccgtcattcaaatggggcgtttacctcggctcaatctacaccggcatcgatcagatgattttcagaggcaaagccccgtggaccttgaaacatcacggcaaagacaacgagcagcttaaaaaagccgccgcgtgtaagccgattgattatccgaaacccgacggcgtgttgaccttcgaccgcttgagcagcgtcttccttgccaatctcgcgcacgaagaaaaccagcccgaccatttggtgctgaacaatccgcaaacgatgatagacgtgaactacaaagaatacgcctcgcccgaaacgcgctattgtccggccggcgtgtacgaaattgttgaagaaaacggcaatccgcgcctgcaaatcaacgcggcaaactgcgtgcactgcaaaacctgcgacatcaaagacccgacgcaaaacatcacttggatttgccccgaaggcgcgagcgggccgaattacggcgggatgtga

SEQ ID NO: 42891 - DNA, 1089 bp, Neisseria meningitidis
atgtcccaaactatcgacgaactcctccttccccaccgcaacgccatcgacaccatcgatgccgaaatcctgcgcctgctcaacgaacgtgcgcaacacgcccacgccatcggcgagctgaaaggcacgggcgcagtgtaccgccccgaacgcgaagtcgccgtgttgcgccgcattcaggatttgaacaaaggcccgctgcccgacgaatcggtagcacgcctgtttcgggaagtgatgagcgagtgcctcgccgtcgaacgcccgctgaccatcgcctatctggggccgcagggcacgtttacccagcaggcggcaatcaaacatttcggacacgccgcgcacaccatggcgtgtccgaccatagacgactgcttcaagcaggttgaaacgcgtcaggcggattatctggtcgcccccgtggaaaattcgaccgaaggctcggtcggtcgcacgttagacctgcttgccgttaccgcgttgcaggcgtgcggcgaaatcgttttgcgcatccaccacaaccttttgcgtaaaaacaacggcagcaccgaaggcattgccaaagtcttttcccacgcgcaggcgttggcgcagtgcaacgactggttgggcagacacctgcccaacgccgaacggattgccgtgtccagcaatgccgaagccgcaaggctggttgccgaatcggacgacggtacggttgccgccatcgccggacgcacggcggcggaaatctacggactcgatatggttgccgagtgcatcgaagacgaaccgaacaacaccacgcgcttcttggtgatgggacatcacgaaaccggtgcaagcggcagcgacaagacttcgctggccgtttccgcgcccaaccgggcaggcgcggttgcctcgctgctgcaaccgctgaccgaatcgggtatttccatgaccaagtttgagagccgtccgagcaaatccgttttgtgggaatacctgttcttcatcgacatcgaaggacaccgccgggacgcgcagattcagacggcattggaacgcttgggcgaacgcgcttcgttcgtcaaagtcatcggttcgtacccgaccgccgttttgtag

SEQ ID NO: 42892 - DNA, 1194 bp, Neisseria meningitidis
atgtctgatcaaaaaaaccgcagaaatgccttaatcggcgctgcattcctgatggcgacttccgccatcggcccgggctttctgacccaaaccgccaccttcacccaagcactggcggcaagtttcggctttgtgattctgctctcgattctgctcgacatcggggcgcagctcaatatttggcggattgtcgccgtttccgaaaaacaggcgcaggatattgccaatcaggtcttgcccggcgcaggctatttcttggctgtgctgattgtgatgggcggtttggcgttcaatattggcaacgtcggcggcgcaggcttgggtctgaacctgctgaccggactgtcaccggaaaccggtgccgtgatcagcggcgtgattgccatcggtgtgtttctgtttaaagaagcaggcaaagtgatggacaaattcgcccaagtgatgggtttcgtaatgattgcgctgacggtttatgtggcatggcaggcgaatccgccgctggcagatgccgccgtgcatacctttatgccggaaaaactcgatgcaatggcgattgttacactggtgggcggcacggtcggcggctacatcaccttcgccggtgcgcaccgtctgctggacgcaggtatcaaaggcaaatcggcgttgccggaagtgagccaaagctcggtgcgggcgatcctgattgcctcgattatgcggattgtattgtttttggcggttttgggcgtggtcagccaaggcgtacagctcaatcccgacaaccctgcttccacaccgtttgaatatgcggcgggatacatcggcctgctgattttcggcgtggtgatttgggcggcttcgattacttcggtgattggtgcggcttatacttcggtgtcgttcttctccggtctcagcccgtctatcgaacgcaataaaaacaaatggattattgcctttatcgccgtgtccaccgccgtattttccaccatcggcaaaccggcgcaggtgctggtgttcgtaggcgcattaaacggcctgattttaccgatttccctcggtctgattctgattgccgcctacaaaaccaaaattgtcggcgactacaaacacccgctgtggctcaccgtttccggcgtgattgtggtcggtttgatggcagtactcagcgccatcaccatcagcaaatatatcggcggcttgttcggctga

SEQ ID NO: 42893 - DNA, 1410 bp, Neisseria meningitidis
atgatgaaaaatcgagttaccaacatccattttgtcggtatcggcggcgtcggcatgagcggcatcgccgaagtcttgcacaatttgggctttaaagtttccggttcggatcaggcgcgaaatgccgctaccgagcatttgggcagcctgggcattcaagtttatcccggccataccgccgaacacgttaacggtgcggatgtcgtcgttacctctaccgccgtcaaaaaagaaaatcccgaagttgtcgctgcgttggagcagcaaattcccgttattccgcgcgccctgatgttggcggagttgatgcgcttccgtgacggcatcgccattgccggcacgcacggcaaaaccacgaccaccagcctgaccgcctccatcctcggcgcggcaggacttgacccgactttcgttatcggcggcaaactcaacgccgcaggcaccaacgcccgcttgggcaaaggcgaatacatcgttgccgaagccgacgagtcggatgcatcctttctgcacctgacaccgattatgtccgtcgttaccaatatcgacgaagaccatatggatacctacgggcacagcgtcgaaaaactgcatcaggcgtttatcgatttcatccaccgtatgcccttctacggcaaagcctttttgtgtattgacagcgaacacgtccgcgcgattttgcccaaagtgagcaaaccttatgctacttacggtttggacgataccgccgacatctacgccaccgacatcgaaaacgtcggcgcgcaaatgaaattcaccgtccatgttcaaatgaaaggacatgagcaggggtcgtttgaagtcgtgctgaatatgcccggcagacacaacgtgctgaacgcattggcagccatcggcgtggcgctggaagtcggcgcatcggttgaagcgatccaaaaaggcttgctcggctttgaaggcgtcggccgccgcttccaaaaatacggcgacatcaagttgccaaacggcgggaccgcgctcttggtggacgactacggacaccaccccgtcgaaatggcggcgacccttgccgccgcacgcggcgcgtatctggaaaaacgtttggtactcgccttccagccgcaccgctatacccgcacgcgcgatttgtttgaagactttaccaaagtcctcaataccgttgacgcgctggtgctgaccgaagtttatgccgccggtgaagagccgattgccgccgccgattcccgcgctcttgcccgcgccatccgcgtgttgggcaaactcgagccgatttactgcgaaaacgttgccgatctgcccgaaatgctgttgaacgttttgcaggacggcgacatcgtgttgaatatgggcgcgggaagcatcaaccgcgtccccgccgcgctgctggcattgtcgaaacagatttga

SEQ ID NO: 42894 - DNA, 171 bp, Neisseria meningitidis
atggcgcaatatatgtgcggcccctgcggctggatttacgatgaagaacacggcgaccccgaacacggcatcgcccccggaaccaagtttgaagacatccccgacgactggaaatgccccgaatgcggcgtgggcaaagaagatttctacctgttggatttcgtgatatag

SEQ ID NO: 42895 - DNA, 687 bp, Neisseria meningitidis
atgtacgcatttaccgccgcacagcaacagaaggcactcttccggctggtgctttttcatatcctcatcatcgccgccagcaactatctggtgcagttccctttccaaattttcggcatccacaccacttggggcgcattttcctttcccttcatcttccttgccaccgacctgaccgtccgcattttcggttctcacttggcacggcggattatcttttgggtgatgttccccgcccttttgctttcctacgtcttttccgttttgttccacaacggcagttggacaggcttgggcgcgctgtccgaattcaacacctttgtcggacgcatcgccttagccagctttgccgcctacgcgatcggacaaatccttgatatttttgtattcaacaaattacgccgtctgaaagcgtggtggattgcaccgaccgcatcaaccgtcatcggcaacgccttggatacgctggtatttttcgccgttgccttctacgcaagcagcgatggatttatggcggcaaactggcagggcatcgcttttgtcgattacctgttcaaacttaccgtctgcaccctcttcttcctgcccgcctacggcgtgatactgaatctgctgacgaaaaaactgacaaccctgcaaaccaaacaggcgcaagaccgccccgcgccctcgctgcaaaatccgtaa

SEQ ID NO: 42896 - DNA, 1680 bp, Neisseria meningitidis
atggaaattattaacgatgcagaacttatccgttccatgcagcgtcagcagcacatagatgctgaattgttaactgatgcaaatgtccgtttcgagcaaccattggagaagaacaattatgtcctgagtgaagatgaaacaccgtgtactcgggtaaattacattagtttagatgataagacggtgcgcaaattttcttttcttccttctgtgctcatgaaagaaacagcttttaaaactgggatgtgtttaggttccaataatttgagcaggctacaaaaagccgcgcaacagatactgatcgtgcgtggctacctcacttcccaagctattatccaaccacagaatatggattcgggaattctgaaattacgggtatcagcaggcgaaataggggatatccgctatgaagaaaaacgggatgggaagtctgccgagggcagtattagtgcattcaataacaaatttcccttatataggaacaaaattctcaatcttcgcgatgtagagcagggcttggaaaacctgcgtcgtttgccgagtgttaaaacagatattcagattataccgtccgaagaagaaggcaaaagcgatttacagatcaaatggcagcagaataaacccatacggttcagtatcggtatagatgatgcgggcggcaaaacgaccggcaaatatcaaggaaatgtcgctttatcgttcgataaccctttgggcttaagcgatttgttttatgtttcatatggacgcggtttggcgcacaaaacggacttgactgatgccaccggtacggaaactgaaagcggatccagaagttacagcgtgcattattcggtgcccgtaaaaaaatggctgttttcttttaatcacaatggacatcgttaccacgaagcaaccgaaggctattccgtcaattacgattacaacggcaaacaatatcagagcagcctggccgccgagcgcatgctttggcgtaacagacttcataaaacttcagtcggaatgaaattatggacacgccaaacctataaatacatcgacgatgccgaaatcgaagtacaacgccgccgctctgcaggctgggaagccgaattgcgccaccgtgcttacctcaaccgttggcagcttgacggcaagttgtcttacaaacgcgggaccggcatgcgccaaagtatgcctgcaccggaagaaaacggcggcgatattcttccaggtacatctcgtatgaaaatcattactgccagtttggacgcagccgccccatttattttaggcaaacagcagtttttctacgcaaccgccattcaagctcaatggaacaaaacgccgttggttgcccaagataaattgtcaatcggcagccgctacaccgttcgcggatttgatggggagcagagtcttttcggagagcgaggtttctactggcagaatactttaacttggtattttcatccgaaccatcagttctatctcggtgcggactatggccgcgtatctggcgaaagtgcacaatatgtatcgggcaagcagctgatgggtgcagtggtcggcttcagaggagggcataaagtaggcggtatgtttgcttatgatctgtttgccggcaagccgcttcataaacccaaaggctttcagacgaccaacaccgtttacggcttcaacttgaattacagtttctaa

SEQ ID NO: 42897 - DNA, 2106 bp, Neisseria meningitidis
atggctcgtaagaccccgatcagcctgtaccgtaacatcggtatttccgcccatattgacgcgggtaaaaccacgacgacagaacgtattttgttctataccggtttgacccacaagctgggcgaagtgcatgacggtgcggctactaccgactacatggaacaagagcaagagcgcggtattaccattacctccgctgccgttacttcctactggtccggtatggcgaaacaattccccgagcaccgcttcaacatcatcgacaccccgggacacgttgactttaccgtagaggtagagcgttctatgcgtgtattggacggcgcggtaatggtttactgcgcggtgggcggtgttcaaccccaatctgaaaccgtatggcggcaagccaacaaataccaagtgccgcgcttggcgtttgtcaataaaatggaccgtcagggtgccaacttcttccgtgttgtcgagcaaatgaaaacccgtttgcgcgcaaaccctgtacctatcgtcattccggttggtgcggaagacaacttcagcggtgtggttgatttgttgaaaatgaaatccatcatttggaatgaagtcgataaaggtacaacctttacctatggcgatattcctgccgaattggtcgaaactgccgaagaatggcgtcaaaatatgattgaagccgcagccgaagccagcgaagaactgatggacaaatacttaggcggcgacgagctgaccgaagaagaaatcgtaggcgcgttgcgtcaacgtactttggcaggcgaaattcagcctatgctgtgtggttctgcatttaaaaacaaaggtgttcaacgtatgttggacgcagttgtagaattgctgccagctcctaccgatattcctccggttcaaggtgtcaacccgaataccgaggaagccgacagccgtcaagccagcgatgaagagaaattctctgcattggcgttcaaaatgttgaacgacaaatacgtcggtcagctgacctttatccgcgtttactcaggcgtagtaaaatccggcgataccgtattgaactccgtaaaaggcactcgcgaacgtatcggtcgtttggtacaaatgactgccgcagaccgtactgaaatcgaagaagtacgcgccggcgacatcgcagccgctattggtctgaaagacgttactaccggtgaaaccttgtgtgcggaaagcgcgccgattatcttggaacgtatggaattccccgagccggtaatccatattgccgttgagccgaaaaccaaagccgaccaagagaaaatgggtatcgccctgaaccgcttggctaaagaagacccttctttccgtgtccgtacagacgaagaatccggtcaaaccattatttccggtatgggtgagctgcacttggaaattattgttgaccgtatgaaacgcgaattcggtgtggaagcaaatatcggtgcgcctcaagtggcttaccgtgaaactatccgcaaagccgttaaagccgaatacaaacatgcaaaacaatccggtggtaaaggtcaatacggtcacgttgtgattgaaatggaacctatggaaccgggtggtgaaggttacgagtttatcgatgaaattaaaggtggtgtgattcctcgcgaatttattccgtctgtcgataaaggtatccgcgatacgttgcctaacggtatcgttgccggctatcctgtagttgacgtacgtatccgtctggtattcggttcttaccatgatgtcgactcttcccaattggcatttgaattggctgcttctcaagcgtttaaagaaggtatgcgtcaagcatctcctgccctgcttgagccaatcatggcagttgaagtggaaaccccggaagaatacatgggcgacgtaatgggcgacttgaaccgccgtcgcggtgttgtattgggtatggatgatgacggtatcggcggtaaaaaagtccgtgccgaagtacctttggcagaaatgttcggttactcgaccgacctgcgttctgcaacccaaggccgcgctacttactctatggagttcaagaaatattctgaagctcctgcccacatagctgctgctgtaactgaagcccgtaaaggctaa

SEQ ID NO: 42898 - DNA, 1446 bp, Neisseria meningitidis
atggcgcattttttcaatattaattatccgacttacaaaggtaaaaacatgactgtccgtatcgaacacgatttattgggcgaccgcgagattcccgccgaagtatattggggcatccacaccctgcgcgccattgaaaactttaaaatctccacacaaaaaatttctgacgtgccgcagtttgtccgcagtatggtgatggtgaaaaaggcgacggcacaggcaaacggtaagttgggcgcggtcaagcccgaaatcgcagccgccattgaaaaagcctgcgacgaagttctgctgaacaaccgctgcctcgaccaattcccctccgacgtgtatcagggcggtgcgggtacttcggtcaatatgaacaccaacgaagtcatcgccaacctcgcattggaagccttgggctatgagaaaggccgctacgacatcgtcaatccgatggaccatgtcaacgccagccaatcgaccaacgatgcctatcccacgggcttccgccttgccgtgtattacagtatcggcgaattgctcgacaaactggtcgttctgaaaaacgcctttgccgccaaagccgaagaatttaaagacgttttgaaaatgggccgcacccagcttcaagatgccgtgccaatgactacaggacaagaattccaatctttccaagtgttgttggaagaagaaatcctcaacctcgaccgcacgcgccaactgcttttagaagtcaatttgggcgcaacggcaatcggcacgggcgtgaacacgcccaaaggctacgccgaactggtggtcaaaaaactctccgaagtcagcggcttgccttgcaaactgaccgaaaacctgattgaggcgacctccgactgcggcgcatatgtgatggtacacggcgcattgaagcgcacggcggtcaaactctccaaaatctgcaacgacttgcgcctgctctcttccggcccgcgtgccggcttgaaagaaatcaacctgcccgaattacaggccggttcttccattatgcctgccaaagtcaatcccgtgattcccgaagtggtcaaccaagtctgcttcaaagtcatcggcaacgatacgacgattaccttcgccgccgaagccgggcaactgcaattaaacgtgatggagccggtcatcgcccaatgtatgtttgaaaccatttccctcttgggcaatgcagcaatcaacctgtccgacaaatgcgtcaaaggcattacggtcaaccgcgaaatatgcgagcgttacgttttcaactccatcgggctggttacttatctgaatccgtatatcggacaccacaacggcgatttggtcggcaaaatctgcgcccaaaccggcaaaggcgtgcgcgaggttgtcttggaacgcgggctgttgagcgaagaagaactcaaccgcatcctctctcctgaaaacctgatgaacccccatctgtaa

SEQ ID NO: 42899 - DNA, 513 bp, Neisseria meningitidis; identical to SEQ ID NO: 37445

SEQ ID NO: 42900 - DNA, 882 bp, Neisseria meningitidis
ttgagaaaaccgtttacggtacctattttaagacgaccgaatattcagaccgtcttaaaacaaaacaataataaaccgacacaccctatcattaatattccgaccgttggaaattcagacggcccaactccgaccgacgacattcaagaaagcaaggtatccatgacacagcaaatcaaatacaaacgcgtattactgaaactctccggcgaatccctgatgggttccgatccgttcggcatcaatcacgataccatcgttcaaactgtcggcgaaattgccgaagtcgttaaaatgggcgtgcaagtcggtattgttgtcggcggcggcaatattttccggggcgtatccgcccaagcaggcagcatggatcgcgccaccgccgactacatgggcatgatggcgaccgtgatgaacgcgttggcactcaaagacgcatttgaaactttaggcatcaaagcgcgcgtacaatccgcactgtctatgcagcaaatcgctgaaacctacgcccgccccaaagccatccaatatttggaagaaggcaaagtcgtgatttttgccgccggtaccggtaacccgttcttcacgaccgacactgccgccgcattgcgcggtgcggaaatgaactgcgacgtgatgctcaaagccaccaacgtcgacggtgtgtacaccgcagacccgaaaaaagacccgtccgccacgcgctacgaaaccattacttttgacgaagccttgttgaaaaacctcaaagtcatggacgcgaccgctttcgccctctgccgcgaacgcaagctcaatattgtcgtcttcggcatcgccaaagaaggctcgctcaaacgcgtcattaccggcgaagacgagggaacgctggttcactgctga

SEQ ID NO: 42901 - DNA, 2262 bp, Neisseria meningitidis
atgttacaaatcgaaatcgacggcaaacaagtatctgtggagcagggcgcgacggtgattgaagccgcgcacaagctcggtacttatattccgcatttctgttaccacaaaaaactttccatcgccgccaactgccgtatgtgtctggtgaacgtagaaaaagccccaaaacccctgcctgcctgtgccacgccggttacagacggcatgattgtgcgtacgcattcggcaaaagcccgagaggcgcaggaaggcgtgatggagttcctgctcatcaaccatccgcttgattgtccgacctgcgaccaaggcggcgaatgccagttgcaggatttggcggtgggctacggcaaaaccaccagccgctacaccgaagaaaaacgttccgtcgtcggcaaagatatggggtccttggtttccgccgaggaaatgagccgctgtatccactgcacccgctgcgttcgtttcactgaagaaatcgccggtttgcaggaaattgcgatggtgaatcgcggcgaacactccgaaatcatgccctttatcggcaaaacggtggaaaccgaattgtcgggcaacgtcattgatttgtgtcccgtcggcgcgctgaccagcaaaccgttccgcttcaacgcgcgtacttgggaattgaaccgccgcaaatccgtttccgcccacgatgctttgggcagcaacctgattgtgcagaccaaagaccataccgtccgccgcgtgttgccgttggaaaacgaagcgattaacgaatgctggctgtctgaccgcgaccgtttcgcctacgaaggcctgtatcacgaaagccgtctgaaaaacccgaaaatcaaacagggcggcgagtggatggacgtggattggaaaaccgcgttggaatatgtccgcagcgcgattgaatgtatcgccaaagacggcaagcaaaaccaagtcggcgtttgggcgaacccgatgaatacggttgaagaactgtatctggcgaagaaactcgccgacggcttgggtgttaaaaactttgcaacccgtttgcgccaacaagacaaacgtctttcagacggccttaaaggtgcgcaatggttgggacaaagcattgaatctttggctgacaacgatgccgtattggtagtcggtgcgaacttgcgcaaagaacagccgctcctgaccgcccgcctgcgccgcgccgccaaagaccgtatggcattgagcgtattggccagcagtaaagaagaattgtttatgccgcttctgtctcaagaagccgcacatcccgacgagtgggcaggccgtctgaaaaacctgtctgtcaatgcggaacacgccgttaccgccagcctgaaaaatgctgaaaaagcagcggtgattttgggcgcggaagtgcaaaaccatcctgattacgccgcggtttacgccgccgcgcaagagctggctgacgcgaccggcgcagtgctgggcattttgccgcaagccgccaacagcgttggtgcggatgtcttgaatgtaaactccggcaagagcgttgtcgaaatggtaaacgcgccgaaacaggcagtcttgctgctcaacgttgagcctgaaatcgatacggcggacggtgcaaaagccgtagccgcgttgaaacaggcaaaaagcgtgatggcgtttacgccgtttgtcagcgaaacgctgctggacgtgtgcgacgtgttgttgccgattgcaccgtttaccgaaacctcaggcagcttcatcaatatggaaggccgtctgcaatccttccacggcgtggtacaaggcttcggcgattcgcgtccgctgtggaaagtgttgcgcgtattgggcaacctgtttgacctgaaaggttttgaataccacgataccgctgcgattttgaaagacgcgctggatgtggaaagcctgccgtccaaactggacaaccgcaacgcatggacaggggagggcgttcagacgacctcagaccgcctcgtccgtgtcggcggcgtcggtatttatcacaccgattctatcgtgcgccgttccgcaccgttgcaagaaaccagccatgccgccgtgcctgctgcgcgtgtaaatccaaatacattggcacgcttgggcctgcaagacggacaaaccgctgtcgccaaacaaaacggcgcaagcgtatcggttgccgtcaaagccgatgccggactgcctgaaaacgtggtgcatctgccgctgcataccgaaaatgccgcgctgggtgcgttgatggacactattgaactggcgggagcttga

SEQ ID NO: 42902 - DNA, 858 bp, Neisseria meningitidis
atgaattacgccctagacgcattatggtggaagctcaccagccaacccgtccgcgacctcgcctcgctgctgactgcgccgcctttgtggcaaagcggttgcgaattgggcgtgcgcgaactattgggggaacgcggtttccgctatcttttggcattggatgccgattccgctccgctgacggattacctcgcccgacgcgccccgttcggacaccgcttgggcatttacgccgaagaactgctggcattttggtttgccaacgcgccacacgccgaactgctcgcgcacaacctcacggtttccggttcggacggcaatacgcaaggcgcggcggattttgtggtaaggcttaacggcaagccctaccatatcgagctgacctgcaaatattacggcggcggcacgggcaggctcgaagacatgcgcggactcgaccccaaagacacgctgttgggaaaagccgccaaactgaccgcccaactcggtctgccgcacacttcagacggcatccgaaccttgcggcaacacggtctgccgcttgacgtaaaacccgtttccatcgtgcgcggcatcggattttttccacaaagtttccatgcttttgagccgccgcttaacccatacggctggcgcggcatctatattcaagactgggcggaatacgggtttgaacgccaagaagtccgctaccatctgctcgaccgcatggcctacctcgcacctgcgcgtgccgccgaaaccgaaacattgaacgaaaccgaaatccgccgtatcgaccaaggcttgattgccgttttggaatgtcggccggacggcttttggcacgaaatcgaacgcattatgaaggccgtctga

SEQ ID NO: 42903 - DNA, 2526 bp, Neisseria meningitidis
atgaatccaaactcaaaacataacactaactttaccaatcttcttaaaccgtctgatagtgatataaaacaatttgccgcacaacacatctgccgcctcaccgacctcctcaaccgctacgcctacgaatactacaccctcgacgcgcccagcgtacccgatgccgaatacgacaaattgttccgcgaactcgaagcgttggagttaaaccatcccgagctcaaactgcccgacagcccgacccagcgcgtcggcggcgagcctttggcgggatttgccgaagtacgccacgaagtgccgatgctgtcgctgaccaacgctttttccccgcaagatgaaaacggcgtgttcgaccatgccgaaatgtacgccttcgaccaacgcgtgcgcgacggcttggacggcggcaatcccgaatacgttatcgaacccaaattcgacggcctcgccatcagcctgctctaccgcgacggcgtattggtgcaggcggcaacgcgcggcgacggcacgacgggcgaagacgttacccaaaacatcaaaaccgtatccaacatccccttgcggctgcacggcgaaaatacgcccgaactcatcgaggtacgcggcgaagtgctgatgctcaaagccgattttgtcgccctcaataaaagacaagccgaaaacgggcaaaaaccctttgccaatccgcgcaacgccgccgccggcagcctacgccaactcgattcgcgcatcaccgcgcaacgcaaactgcactttttcccctactccgtcgcccgccagcaagatggtttcgtcgcggaagaacacatccaggaactcgcctatttccaagcactcggcttcagtctgcccaatggcaatttcggctgtttcaaaaatatcgacgaagtattggcgttttacgaacacatgcagcaaaaacgccccgaactgccctacgaaatcgacggcatggtcgtcaaagtcaacagcttggcgcaacagcacgaactcggcttcatctcccgcgcgccgcgttgggcggttgcccacaaattccctgccgaagaagccctgaccattgtcgaagcgattgacgtgcaaatcggcaggacgggtgcggtaacgccggttgcccgattacagcccgtattcgtcggtggcgtaactgttaccaacgccaccctgcacaatcaggacgaagtatcgcgcaaagacgttcgcgtcggcgataccgtcgtcgtacgccgtgccggagacgtgattcccgaagttgtgcgcgtgatttttgaacgccgcccgatgcgggaaaccgccgttgccgtttcagacggcatcgggcatcggcaggacgatttgtttgccgaaacaccgtccgccaatcaaacccaatccgttccgctccacaagccctaccgcctgccgacccactgccccatctgccgcagcgaaatcgaacgcgaagaaggcgaagccgtcgcccgatgcagcggcggtatgctttgtcaggcacaacgcgcgcaaggcttaatccacttcgcctcgcgcaaagcgatggacatcgacggcttgggtgaaaaacaaatcgaacagcttgtcgcgcaagacctcgtccgccacttcgccgatctctaccgcctcgacatcccgaccttgcaaaaaatgaaggaaacagcggacaaaaccgttgccgaatcggatcaaatgccgtctgaaggcagttcggtcggcgcgtcgggcaaacataaaaaacaaccagtcaagtgggcggaaaacatcctcgcaggcatagaagccagcaaaacgcccgaactcgcccgcttcctgttcgcgctcggcatccgccacgtcggcgaacgcaccgccaaaacgctggcacaggcattcggcacattggaacgcgtccgccgcgcccccgaacccgtcctcgcctgcctgcccgacatcggtacggtagtggcgcgttccattgcccacttcttcgcccaagccgaacagcaggcgatgatagacgaactgctcgccgcaggcgttgccccgcaaacccaagccgttaccatcccgcccgcccgccacgccgaaccgcaacgctggatcgcccgcctgcccggtttcaaaatcagcgaaaacaaagcccaagccttatgggaactcgccggcaaaaacatagaagggctgcaaaccgacaaagccctccccaccgactggcaggcgtggcgcagcgaaccacaaaacgccgccctgctcgaaaacctgaaaaccttcttcgcgcaaatgccgtctgaagacgaggcggcgcaaggttcagacggcatcaataaagccgtggcgggcaaaaccttcgtgttaaccggcaccctgcccaccctcaaacgcgaccaagcccaatccctaatcgaagccgcaggcggcaaagtttccggcagcgtgtccaaaaaaaccgattacgtcgtcgccggagaagccgcgggcagcaagctggaaaaagccaatgccttgggcgtttccgtcctcagcgaagccgaactgcttaccctgctcggctga

SEQ ID NO: 42904 - DNA, 861 bp, Neisseria meningitidis
atgtctgatttgtctgtattgtcgccgtttgccgtgcctttggcagcggtgttcgggctgctggtcggaagtttcttaaatgtcgtcatttaccgcgtgccggtcatgatggaacgcggctggacggtatttgccaaagaatatttaaacctgccgctgaccgaagaggaaagccgtaccttcaacctgatgaaaccggattcctgctgtcccaaatgccgcgtgccgatacgcgcgtggcagaacatcccgattgtcagctacctgctcctgcgcggcaaatgcgcttcctgccaaaccaaaatcagcatacgttatcccttaatcgagctgctgaccggcgtattgttcgggctggtcgcctggcaatacggctggtcttggattacgctgggcggattggtactgaccgcgtttctgatttccctgacctttatcgatgcggacacccaatacctgcccgactcgatgacactgcccttaatttggctgggtctgatatttaatttggacggcggcttcgtgcctttgcagtctgccgttttaggtgcggtcgccggctatggttcattatggctcttatgtgcagtgtataaactgctcacaggaaaaaccggtatgggcaacggagatttcaaactgattgccgcattgggcgcgtggctcggcatatccgcattgcccgtactgatttttgtttcctcgctgatcggtttggtcgcggcaatcgttatgcgcgtcgccaaggggcagcattttgccttcggccccgcactgacagtttcgggctggataatttttacggcaaacgattccgtatggcgggcggtcaactggtggctgacccatccggtgctgtaa

SEQ ID NO: 42905 - DNA, 141 bp, Neisseria meningitidis
atgccgtctgaaaaaatctattacggcgtattgattttcttatgtatcgcttctatgctgctgtcgccgtttttttatgcgggtgctttgaagcccaagaaggcggcattgcggaaggacgggcagtggaaactcatctga

SEQ ID NO: 42906 - DNA, 1011 bp, Neisseria meningitidis
atgaacgacaatacacacacccttcccccgcgccacctgtccgtcgcccccatgctcgactggacggacaggcactaccgttaccttgcccgccagattacccgaaatacttggctgtacagcgaaatggtcaatgccggtgcgattgtttacggcgacaaagaccgctttttgatgttcaacgaaggcgagcagcccgtcgccctgcaactgggcggcagcgatccgtccgatttggcgaaagccgccaaagccgccgaggcatacggttacaacgaggtcaacctcaactgcggctgccccagtccgcgcgtgcagaaaggctcgttcggcgcgtgtctgatgaacgaagtcgggctggttgccgactgcctcaacgccatgcaggatgcggtcaagattcccgttaccgtcaaacaccgcatcggtgtggacaggcagaccgaataccaaaccgttgccgatttcgtcggcacgctgcgcgacaaaaccgcctgcaaaacctttatcgtccacgcccgcaacgcttggctggacggtctttcccccaaagaaaaccgcgacgttcccccgttgaaatacgattacgtttaccgcctcaagcaggagtttcccgggctggaaatcatcatcaacggcggcatcaccaccaacgaagcaatcgcaggacacctgcaacacgttgacggcgtgatggtcgggcgcgaggcgtaccacaacccgatggtgatgcgcgaatgggacaggctgttttacggcgatacccgcagcccgattgaatacgccgatttggtgcagcgtctctacacatacagccaagcccaaatccaagccggacgcggcacaatcttgcgtcacatcgtccgccacagccttgggctgatgcacggtctgaaaggcgcgcggacttggcggcgtatgctttccgacgcaacgctcttgaaagacaacgacggcagcctgattctcgaagcgtggaaagaggtcgaacgggcaaatatgcgcgaatag

SEQ ID NO: 42907 - DNA, 432 bp, Neisseria meningitidis; identical to SEQ ID NO: 42471

SEQ ID NO: 42908 - DNA, 147 bp, Neisseria meningitidis
ttggtagtttcaaaggaaatagaattaaatcagcatcccgttttcattaaactgactaccgcgcttgccgtattggtcggcaaattcgccattgatgatggcggagatggtaacttccatgatgattctcctgtgttttcggattga

SEQ ID NO: 42909 - DNA, 387 bp, Neisseria meningitidis
atgaaaaacgttcaaaaaggctttacgctgctcgagctgatgattgccgtcgccatcctcggcatcctgacgctcatcacctacccttcctataaaacctacatccggcgcgtccgcctgtcggaagtcaaatccaccctgctgatgaacgcgcaaaacttggagcgttactaccgccaaaaagggacgtttgacaactacgaccaaaccaaactgaaacaaaacaaatatttcaagattaccttaagcaaaagccccgaccacttcacccttaaggcaacgcccaatcccgccaccaacgacggtgaaacctgcgtcgttacactcaacgacggcggcacactttccgccgccggcaacgggcagtcctgcccagacttcgactaa

SEQ ID NO: 42910 - DNA, 786 bp, Neisseria meningitidis
atgctgtctgaaccctttttacaaagcaccatcatggcaaaccaaagacccatctacggcttccacgccgtcaacgcccgattgtggcaaaaccccaaatccatcgtcgaactctacatccaagaaggcaaatcagacgcacgcacgcgcgaagtgttggaaaaggcggcaaacgaaaacatccgcgtatattttgccgatgccgaccgcctcaacgccatcagcaaaggcgcgcgccatcagggcgtggtcggatttatcgatgcctccaaaaaccacgtccacctcgaagacgtattggaaaacctcagcgaaccgccgctgctgctgatactcgacggcatcaccgatccgcacaacctcggcgcgtgcctgcgtaccgccgacgcaatgggcgtacacgccgtcatcgcaccgaaagacaaaagcgcggggctgaacgccaccgtcagcaaagtcgcctgcggtgcggcggaaaccgtcccctatatcaccgtaaccaacctcgcccgcaccctgcgcgaattgaaagaatacggcatttggattatcggcaccgatatgagcggcgagtccgacctttaccattgcaatctgcccgacagcgcggcgtgggtaatgggcaacgaaggcgacggtatgcgccgcctcacgcgcgaacattgcgacatgctggtgtctatacccatgttcggcacagtcgaaagcatgaacgtctccgtgtctgccggaatggtattaagtgaaacacgccgacaacgcgtattaaaaaacgaaaaagtataa

SEQ ID NO: 42911 - DNA, 669 bp, Neisseria meningitidis
atgaaaaacctcgccatcttcgacctcgacaacaccctcatcaacaccgattccgaccacgcctggccgcaatacctcatcaaaaaaggcttggttgacgctgccgaaaccgaagcgcaaaacgaaaaattctaccgcgactaccaaaacggctgcctcgacatcgacgcattcctcaaattccaccttgccccgctcgctcgttacagcaaagaagagctggcagagtttcaccgcgaatttatggcggaatacatcatcccccacatctcgcctatgcagcgtatgctggtgcagagccaccaaatggcaggcgacgaaacccttgtgatttcctcaaccaacgagttcatcatcacccccgtctgccaccttttcggcatcaccaacatcatcggcacacaactcgaaaccggttctgacggccgctacaccggcaattacatcggcacgcccagcctcaaagaaggcaaaatcacccgcctgaaccaatggcttgccgaacgcggcgaaacgctccaaagctacggcaaaacctatttttacagcgactccaaaaacgacctgccgctgctgcgccttgtcagcgaacccgtcgccgtcaaccccgatgccgagctggaaaaagaagccaaagaaaaaggctggccggttttgaatttcaaatga

SEQ ID NO: 42912 - DNA, 501 bp, Neisseria meningitidis; identical to SEQ ID NO: 37418

SEQ ID NO: 42913 - DNA, 2019 bp, Neisseria meningitidis
atgaataaatctttatccagttcggtagaagaataccgcgagctgacgctccgaggcatgatactcggtgcattgatcactgtaatttttactgcgtccaatgtttacctcggtttgaaagtcgggctgacctttgcctcgtcgattccggcggcggtgatttcgatggcggttttaaagtttttcaaaggcagcaatattttggaaaacaacatggtgcagacccaagcctcggctgcgggtacgctttcgaccatcatcttcgtcctgcccggtttgctgatggcgggctactggagcggtttcccgttctggcagacgacgcttttatgtattgccggcgggattttgggggtgattttcaccattcctctgcgttacgcaatggtggtgaaaagcgatttgccttatccggaaggtgtggcggctgctgaaattttgaaagtgggcggtcatgaagaaggggataaccgtcagggcggcagcggcatcaaagagctggcggccggcggtgcgttggcgggattgatgagcttttgcgccggaggtctgcgcgtgattgccgacagcgcgagttattggtttaaaagcggtacggcgattttccagctgccgatgggcttttcactggcattgttgggcgcgggctatttggtcggactgacgggcggtatcgccatcctgttgggcatttcgattgcttggggcattgccgtgccgtatttctcctcacacattccgcaaccttccgatatggaaatggcggcgtttgcgatgaagctgtggaaggagaaagtgcgttttatcggtgcggggactattggcattgcggcggtttggacgctgttgatgctgctcaagccgatggtggaaggcatgaagatgtcgttcaagagttttggcggcggtgcgcccgctgcggaacgcgccgaacaggatttgtcgcctaaggctatgattttttgggtgctggcgatgatgtttgttttaggcgtgtcgttttaccactttatcggcgattcgcacattacgggcggcatggcttggcttttggtggtcgtttgcacgcttttggcttccgtcatcggctttttggtcgccgccgcctgcggttatatggcaggtttggtcggctcgtcttccagcccgatttccggcgtgggcatcgtgtccgtcgtcgttatttcactggttttgctgctggtaggcgaatccggaggtttgttggcggatgaggctaaccgcaaatttttgctggcactgactttgttttgcggctcggcagtaatctgcgtggcttcgatttccaatgacaacctgcaagacttgaaaaccggctacctgctcaaagccacgccttggcggcagcaagtcgccctgattatcggctgtatcgttggtgcgctggttatttcgcccgtgttggaactgctttacgaagcctacggctttaccggcgcaatgccgcgcgaaggcatggacgcggcgcaggctttggcagcccctcaagcgactttgatgacgaccatcgcgtcgggcattttcgcccacaaccttgaatgggtctatatctttaccggtatcgtgattggagcagtattaatcgtcgtcgatttggtgttgaaaaaatcatcaggcggcaaacttgccctgcccgtccttgcggtcggtatgggtatttatctgccgccgtccgtcaatatgcccatcgtggcaggcgcggtgttggcggcggtgttgaaacacatcatcggtaaaaaagcggaaaaccgcgaaggccgtctgaaaaacgccgagcgcatcggaaccttgttctccgccggcctgattgtcggtgaaagcctgatcggtgtgattatggcgtttattattgccttctccgtgaccaacggcggctcggatgcgccgctcgcgttgaatctgcaaaactgggatgccgccgcttcttggctgggtttggcgttcttcgttaccgggatgtttttctttgcacagcgcgtactgaaggcgggcaagtag

SEQ ID NO: 42914 - DNA, 630 bp, Neisseria meningitidis
atggcagcccatctcgaagaacaacaagagttagacaactttaaatatttttggaaaaccacgggcaaatggctgtttgccttgctgattttggcggcactcggctacttgggatacacggtttaccaaaaccgtaaagtttcccaaaatcaggaagcggcggcggtgctggcaaacatcgtagaaaaggcgcaaagcaaagccccgcaaagcgaaatcaatgccgaattgaccaaactccaacaaagctacccgcattccatttccgccgcccaagccacactgatggcggcggcaaccgaatttgacgcgcagcgttacgatgttgccgaaggccatttgaaatgggtgttgtccaaccaaaaagacagcctgattcaagcgttggcggcgcagcgtctgggcgttgtgttgttgcaacaaaaaaaatacgatgccgcgcttgccgcgctcgatacgccggttgaagcggacttcgcccccctgctgatggaaaccaaaggcgatgtctatgccgcacagggaaaaagccaggaagccttaaaaaactacggacaggctttagaaaaaatgcctcaagattctgtcggtcgcgaattggttcaaatgaaacttgattcgctgaaataa

SEQ ID NO: 42915 - DNA, 1338 bp, Neisseria meningitidis
atgacttttcaaaacaaaaaaatcctcgtcgccggactcggcggtacgggtatttccatgattgcctacctgcgcaaaaacggcgcggaggttgctgcgtatgatgcggagctgaagccggaacgcgtgtcgcaaatcggtaagatgtttgacgggttggtgttttacacgggccgtctgaaagatgcgctggacaacggtttcgatattctggctctcagtcccggcatcagcgagcggcagccggatattgaggcgttcaagcaaaacggcggacgcgtgttgggcgacatcgaattgctggcggacattgtgaaccgccgggacgacaaggtaattgcgattaccggcagcaacggcaaaaccacggtaacgagcctggtcggctatctctgtatcaagtgcgggctggataccgttatcgcgggcaatatcggcacgccggttttggaggcggaatggcagcgcgaaggcaaaaaggcggacgtgtgggtgttggagctttccagcttccaactggaaaacaccgaaagcctgcgtccgactgcggcgacggtgctgaacatttccgaagaccatctcgaccgctacgacgacttgctcgactatgcgcataccaaagccaagattttccgtggcgacggcgtgcaggttttgaatgcggacgatgcgttctgccgcgcgatgaagcgtgccgggcgcgaggtaaaatggttttcgttggaacacgaagctgatttctggttggaacgcgagacaggccgcctgaaacaaggcaatgaagatttgattgtcacgcaagacattccgttgcaaggtctgcacaacgccgctaacgtcatggctgccgtggctttgtgtgaggccatcggtttgtcgcgcgaagcattgctcgaacacgtcaaaaccttccaaggcctgccgcaccgcgtggaaaaaatcggcgagaaaaacggcgtggtgtttatcgacgacagcaaaggcacgaatgtcggcgcgactgccgccgcgattgccggtttgcaaaatccgctcttcgtgattttgggcggcatgggtaaagggcaggacttcacgcccctgcgcgatgcactggtaggcaaggcaaaaggcgtgttcttgattggtgtcgatgcgccgcaaatccgccgcgatttggacggctgcggcttgaatatgaccgactgcgccactttgggagaagccgttcagacggcatatgcccaagccgaagcaggcgatattgtgttgctcagccccgcctgcgcgagctttgatatgttcaaaggctacgcgcaccgttcggaagtgtttatcgaagcgtttaaggctttgtga

SEQ ID NO: 42916 - DNA, 495 bp, Neisseria meningitidis
atgatttttaaacagaatcaaaattattgggcagtttttgatgctaataaagaaactctgattgttcaaacatgttcaggtttggggttaacggcaatagaccacctatatcccccccatatcctgccattggataccgacaatgaaactttaggcacgacagtcttgcaagcgttggcaaacagcaggactttcgtttatgacagtccagaagaccaagatttttttgataccgaaaaaattcggcaacgctatgaggattgggttgccaagctatgcgggaacttgggctataaaaccagacgcgccctatttaaaaacatgatgagcgtggatatttggctgcacaacggctgcctgaaaatcagcccgagccgccatgtcaagctggaagcgtggaatgccattgatgcagacgatgtcattttatcattggataacagccctgaagaaatcggagcaggtttaaagttggcattgagccactgccgataa

SEQ ID NO: 42917 - DNA, 738 bp, Neisseria meningitidis
atgaagcaggttgatttaaacgccgatctcgccgaaggctgcggcagcgacgaagccttgttgcagctgattacttcggccaacatcgcctgcgcccaacacgccggcagcattgccgatattcgggcggcattggcgtatgcccaacaaaacggcgtgcgcatcggagcacaccccggctatcccgatcgggaaaacttcggccgtaccgaaatgaatctgtccgaagccgatttgcgggcgtgtctgaattaccagttgggcgcattgcaggccttgtgccgtgatcagggtttggaaatggcttatgtcaaaccgcacggcgcaatgtacaatcaagcggcgaaaaaccgtgcgctggcggataccgttgcccgaattgtggcggatttcgacccgaaattgaaattgatggcactttccggcagcctgctcttggaagccggaaaagccgcaggcttgggtgtgatttccgaagtattcgccgaccgccgctatatgcccgacggtacgctggttccccgcagccgccccgatgcgcaggtggacagcgacgaagaagccatcgcccaagtattgcagatggtgcgggacgggcaggtcaaagcagtggacggcagcctggttgccgtgcaagccgacagcatctgtctgcacggagacgggccgcacgccgtggtgtttgccgaaaaaatccggcaggaactactggcggcaggcatcaaagtttctgcttga

SEQ ID NO: 42918 - DNA, 246 bp, Neisseria meningitidis
gtggcaggtgcgaccatacggattatcgaccgccaaactgacgaagtgattgccaagaaaaccatctatgtctttgaaaaaggcttggacggcacgggtggggcgagaatgccgtggaagtttgctatcttgtgcaataaagaaagacttacttcttcagagccgttatcggattttgttcttagcgttttaaaaccttatatattgcgtcccttatatattgcgtccctaagaagggacgattaa

SEQ ID NO: 42919 - DNA, 726 bp, Neisseria meningitidis
atgccccgattccacctgcccgaaaacctttccgtcggacaaaccgtcgccctgcccgacaacatcgtccgccacctcaacgtcctgcgcgtccgccccaacgaaaacatcaccctcttcgacggcaaaggcaaggcacacgccgcacggctgaccgttttggaaaaacgccgcgccgaagccgaaatcctgcacgaagacacaaccgacaacgagtccccgctcaacatcacactgatacaatccatctcctccggcgatcgcatggatttcaccctgcaaaaaagcgtcgaactcggcgtaaccgccatacagcccgtcatcagcgaacgctgcatcgtccgcctcgatggggaacgcgccgccaaacgcctcgcacgctggcaggaaatcgtcatctccgcgtgcgaacaaagcggcaggaacaccgttccccccgtactgcccatcatcggctaccgtgaagcactcgacaaaatgccgtctgaaagcaccaagctgattatgagcatcaaccgcgcccgcaaactcggcgacatacgccaaccgtccggcgcaatcgtctttatggtcgggcccgaaggcggctggacagaacaggaagaacaacaggcatttgaagctggctttcaggcggttacactcggcaaacggattttacgcacagaaaccgccccactcgccgccctcgccgccatgcagacgctttggggcgatttcgcataa

SEQ ID NO: 42920 - DNA, 747 bp, Neisseria meningitidis
atggaaaccccgaccaacaccccgcaacgctccctgcgtcaaaacagtatctacctgctgcccaattcctttactatcgccgcgctgttttccgcgttttacgcaatcacccaatccatgcacggacgttatgaaaccgccgccatcgcggtattcatctctatgttgctggacggtatggacgggcgcgtggcgcggctgaccaacagccaaagcgcgttcggggagcagctcgacagccttgccgatatggtcagcttcggcgttgctcccgctctgattgcctacaaatggcagctttggcagttcggcaaaatcggttattccgtcgccttcatctactgcgcctgcgccgccctgcgcctcgccctgttcaacacactcatcggcaaggtggacaaacgctggtttatcggcgtgcccagtccgactgccgccgcgctgattgtcgggctgatttgggtcaaccacagcgtcgaaaaattccccgccgtccactggtgggcattgggcatcacactgtttgccggcctgtcgatgattgtccaaatccctttttggagttttaaagaaatcaacatccgcagacaagtcccctttgtcggaatgctgcttgccgtcttactgctgcttctggtcacttgggaaccgtcgctcgtcctcttcctgttctttctcggatacagcctgtccggctacattatggcggcacgccgattttggaaaaagtacagaaaggcggattaa

SEQ ID NO: 42921 - DNA, 1431 bp, Neisseria meningitidis
atgacctgggaaaccgtaatcggcttggaaatccacgtccaattgaacaccaaatccaaaatcttcagcggcgcatcgaccgcattcggcgcagaacccaacgcgcacgccagcgtagtggaatgcgcgctgccgggcgttttgcctgtgatgaaccgtgaagtcgttgaaaaagccatcaaattgggtttggctttagatgcgaaaatcaatcagaaaaacgtgttcgaccgcaaaaactacttctatcccgacttaccaaaaggttatcaaatcagccagttggacttaccgattgtcgaacacggcaaattggaaatcgtagtcggcgacgatgtgaaaaccatcaacgtaacccgtgcgcacatggaagaagacgcaggcaagtccgtgcatgaaggcttgaacggcgcaaccggtatcgacctgaaccgcgccggcacgccgctgttggaagtggtatccgaacctgaaatgcgttccgccgccgaagccgttgcctacgccaaggccttgcacagcttggtaacctggctggacatttgcgacggcaatatggcggaaggctcgttccgcgtcgatgccaacgtatccgtgcgcccgaaaggtcaagaagagttcggcacgcgccgcgagattaaaaacctcaattccttccgtttcttggagcaggcgattaattacgaagcggaagcgcaaatcgagattttggaagacggcggcaaagtacagcaggcaaccatgctgtttgatcccgaaaaaggcgaaacccgcgtaatgcgcctgaaagaagatgcgcacgactaccgctacttccccgaccctgatttgctgcccgttatcatttcagacgcccaaatgcaaaaagccaaagcagaaatgcccgagctgccgaaagaaatggcagcgcgtttcgtggcggattacggcgtgtccgaatacgacgcgcgcctgctgaccgcaagccgtgcgcaggctgcctattttgaagaagccgccaaagaaagcggacaaggcaagctgactgccaactggatgaacggcgaacttgccgccgcgctgaacaaagaaggcatggaacttgccgacagcccgattaccgccccgcgcctcgccgcgctggttggcaaaatcgccgacggcacattaagcagcaagttagcgaaaaaagcctttgaagccatgtgggcagaacccgaagccaccattgccgaaatcattgaaaaacacggtttgcaacagatgaccgacaccggcgagattgaagccatggtggacgaagtgctggcaaacaacgccaaagccgtggaacagtttaaatccggcaacgaaaaagccctgaatgcgattgtgggacaagtgatgaaggccagcaaaggcaaagccaaccccgcgcaggttcaagagctgattaaagccaaactggcttaa

SEQ ID NO: 42922 - DNA, 4116 bp, Neisseria meningitidis
  misc_feature 4101, 4102, 4103, 4104, 4105: 'n' is a, c, g or t
atgaataaaggtttacatcgcattatctttagtaaaaagcacagcaccatggttgcagtagccgaaactgccaacagccagggcaaaggtaaacaggcaggcagttcggtttctgtttcactgaaaacttcaggcgacctttgcggcaaactcaaaaccacccttaaaactttggtctgctctttggtttccctgagtatggtattgcctgcccatgcccaaattaccaccgacaaatcagcacctaaaaaccagcaggtcgttatccttaaaaccaacactggtgcccccttggtgaatatccaaactccgaatggacgcggattgagccacaaccgctatacgcagtttgatgttgacaacaaaggggcagtgttaaacaacgaccgtaacaataatccgtttgtggtcaaaggcagtgcgcaattgattttgaacgaggtacgcggtacggctagcaaactcaacggcatcgttaccgtaggcggtcaaaaggccgacgtgattattgccaaccccaacggcattaccgttaatggcggcggctttaaaaatgtcggtcggggcatcttaactaccggtgcgccccaaatcggcaaagacggtgcactgacaggatttgatgtgcgtcaaggcacattgaccgtaggagcagcaggttggaatgataaaggcggagccgactacaccggggtacttgctcgtgcagttgctttgcaggggaaattacagggtaaaaacctggcggtttctaccggtcctcagaaagtagattacgccagcggcgaaatcagtgcaggtacggcagcgggtacgaaaccgactattgcccttgatactgccgcactgggcggtatgtacgccgacagcatcacactgattgccaatgaaaaaggcgtaggcgtcaaaaatgccggcacactcgaagcggccaagcaattgattgtgacttcgtcaggccgcattgaaaacagcggccgcatcgccaccactgccgacggcaccgaagcttcaccgacttatctctccatcgaaaccaccgaaaaaggagcggcaggcacatttatctccaatggtggtcggatcgagagcaaaggcttattggttattgagacgggagaagatatcagcttgcgtaacggagccgtggtgcagaataacggcagtcgcccagctaccacggtattaaatgctggtcataatttggtgattgagagcaaaactaatgtgaacaatgccaaaggcccggctactctgtcggccgacggccgtaccgtcatcaaggaggccagtattcagactggcactaccgtatacagttccagcaaaggcaacgccgaattaggcaataacacacgcattaccggggcagatgttaccgtattatccaacggcaccatcagcagttccgccgtaatagatgccaaagacaccgcacacatcgaagcaggcaaaccgctttctttggaagcttcaacagttacctccgatatccgcttaaacggaggcagtatcaagggcggcaagcagcttgctttactggcagacgataacattactgccaaaactaccaatctgaatactcccggcaatctgtatgttcatacaggtaaagatctgaatttgaatgttgataaagatttgtctgccgccagcatccatttgaaatcggataacgctgcccatattaccggcaccagtaaaaccctcactgcctcaaaagacatgggtgtggaggcaggctcgctgaatgttaccaataccaatctgcgtaccaactcgggtaatctgcacattcaggcagccaaaggcaatattcagcttcgcaataccaagctgaacgcagccaaggctctcgaaaccaccgcattgcagggcaatatcgtttcagacggccttcatgctgtttctgcagacggtcatgtatccttattggccaacggtaatgccgactttaccggtcacaataccctgacagccaaggccgatgtcaatgcaggatcggttggtaaaggccgtctgaaagcagacaataccaatatcacttcatcttcaggagatattacgttggttgccggcaacggtattcagcttggtgacggaaaacaacgcaattcaatcaacggaaaacacatcagcatcaaaaacaacggtggtaatgccgacttaaaaaaccttaacgtccatgccaaaagcggggcattgaacattcattccgaccgggcattgagcatagaaaataccaagctggagtctacccataatacgcatcttaatgcacaacacgagcgggtaacgctcaaccaagtagatgcctacgcacaccgtcatctaagcattaccggcagccagatttggcaaaacgacaaactgccttctgccaacaagctggtggctaacggtgtattggcactcaatgcgcgctattcccaaattgccgacaacaccacgctgagagcgggtgcaatcaaccttactgccggtaccgccctagtcaagcgcggcaacatcaattggagtaccgtttcgaccaaaactttggaagataatgccgaattaaaaccattggccggacggctgaatattgaagcaggtagcggcacattaaccatcgaacctgccaaccgcatcagtgcgcataccgacctgagcatcaaaacaggcggaaaattgctgttgtctgcaaaaggaggaaatgcaggtgcgcctagtgctcaagtttcctcattggaagcaaaaggcaatatccgtctggttacaggagaaacagatttaagaggttctaaaattacagccggtaaaaacttggttgtcgccaccaccaaaggcaagttgaatatcgaagccgtaaacaactcattcagcaattattttcctacacaaaaagcggctgaactcaaccaaaaatccaaagaattggaacagcagattgcgcagttgaaaaaaagctcgcctaaaagcaagctgattccaaccctgcaagaagaacgcgaccgtctcgctttctatattcaagccatcaacaaggaagttaaaggtaaaaaacccaaaggcaaagaatacctgcaagccaagctttctgcacaaaatattgacttgatttccgcacaaggcatcgaaatcagcggttccgatattaccgcttccaaaaaactgaaccttcacgccgcaggcgtattgccaaaggcagcagattcagaggcggctgctattctgattgacggcataaccgaccaatatgaaattggcaagcccacctacaagagtcactacgacaaagctgctctgaacaagccttcacgtttgaccggacgtacaggggtaagtattcatgcagctgcggcactcgatgatgcacgtattattatcggtgcatccgaaatcaaagctccctcaggcagcatagacatcaaagcccatagtgatattgtactggaggctggacaaaacgatgcctataccttcttaaaaaccaaaggtaaaagcggcaaaatcatcagaaaaaccaagtttaccagcacccgcgaccacctgattatgccagcccccgtcgagctgaccgccaacggcataacgcttcaggcaggcggcaacatcgaagctaataccacccgcttcaatgcccctgcaggtaaagttaccctggttgcgggtgaagagctgcaactgctggcagaagaaggcatccacaagcacgagttggatgtccaaaaaagccgccgctttatcggcatcaaggtaggcaagagcaattacagtaaaaacgaactgaacgaaaccaaattgcctgtccgcgtcgtcgcccaaactgcagccacccgttcaggctgggataccgtgctcgaaggtaccgaattcaaaaccacgctggccggtgcggacattcaggcaggtgtaggcgaaaaagcccgtgccgatgcgaaaattatcctcaaaggcattgtgaaccgtatccagtcggaagaaaaattagaaaccaactcaaccgtatggcagaaacaggccggacgcggcagcactatcgaaacgctgaaactgcccagcttcgaaagccctactccgcccaaactgaccgcccccggtggctatatcgtcgacatnnnnncacacacttaa

SEQ ID NO: 42923 - DNA, 384 bp, Neisseria meningitidis
atgaccgatacggatacccaagccgaccgcttcgaacagatgatgtggcaggcggtggacaaactttttgaacagcatgacggcaaactcgaaagcatggacgggcgggaacaggagctggttttgatttggcggacagaagccgatatcggtaacggcagcatactgcaatttgtctgcaactggggtttccccgccgccgaaaagacttgttccgttctgaaaaaaatcggcgcggtacacagcgcaatgctgatccatcgggcggcagacgcattggacaaagaaatccgccgcctccaatcggaaggtaaaaacctgaaagaaatgtgggatataacatctcgacaacaaaaccgcctcactgctgaacagtctggatga

SEQ ID NO: 42924 - DNA, 291 bp, Neisseria meningitidis
atggcgcgcattggtacgaataagggtttttttgaactcttggagggcgagactctgttggaaggcttggaacggacggggcatatggtggaatatcagtgccgaagcggatattgcggatcgtgccgagtgaagattttggagggaagcgttacttatcgggagccgcctttggcttttttggggcgggacgagatactgccgtgctgctgttgcgtcgagggggatgtcaggctggattgcggtttgtcgggggaggatgaggggctgtctgacagtttgttgaaataa

SEQ ID NO: 42925 - DNA, 1158 bp, Neisseria meningitidis
atgaaattcgccacgaaagccattcattccagctacgattgcgacgaacacaaccgcgcgctgatgccgccgatttatcaaaacagtatgtttgcgttgcacgagattggcgaaaatgtgccttaccgttattcgcgcctgagcaacccgacccgtcagattttagaagacaccgttgccgatttggaacacggtgcggcaggttttgcgttttccagcggtatggcgggaattgatgccgtatggcgcactttcctgcgcccgggcgataccattgtcgccgtcgccgatatttacggcggcgcttatgatttattggtcgatgtttatcaaaaatggggggtgaacgttgtttttgccgatttaggcaatccggataatttggacgaactgcttaaagcgcacaaggtcaaactggtttggctggaaacgccgtccaatccacttttacgcttggtagacatcaaagtccttgccgcaaaagccaaagcagccggtgcgctggtcggtatcgacaacacttttgccacgccgtatctgcaacagccgttggatatgggttgcgattttgtattccattccgctaccaaatatttgtgcggccattccgacgtgttgatgggcatcgtcgttgccaaaaccaaagaactggcgcagcctttgcacgatatgatggtgcataccggcgcggttgccggcccgctggactgctggctggtgttgcgcggcatcaaaacactggctctgcgcatgaacgcccattgccaaaacgcactcgaaatcgcgcgccgtttggaagcccatcctgccattgaaaaagtgttccatcccggcctgccgtctcacgaacattacgaactggcgaaaacacaaatgcccaaaggcatcggcggcgtggttacggtttatctcaaaaacgacacgcgtgaagcggcaaacagcgtgattaaaaacatgaaactggtcaaaatggcttccagcctcggcggtgtggaaagtttggtcaaccattgctattcccagtcccacagcggcgtaccgcatgatgtgaaaatggaaatgggcatcaaagtcggtctgctgcgtttctccatcggcatcgaagacgcggacgatatttggaacgatatttccgccgcactcgatacaactttgtaa

SEQ ID NO: 42926 - DNA, 579 bp, Neisseria meningitidis
atgtcaaacacaatcaaaatggttgtcggcttgggcaacccgggcaaagaatacgaacagacacgccacaatgcgggtttttggttcctcgacgaactggcgtggaaatggaaggcttcatttaaagaagaaaaaaaattcttcggcgaagtcgcccgtgccgccctgcccgacggcgacgtttggctgctcaaacctgccacgttcatgaaccgttccggacaggcagttgccgcgcttgcacagttctacaaaatcaaacccgaagaaatcctcgtcgtccacgacgaactcgacattccctgcggacggatcaaattcaaactcggcggcggcaacggcggacacaacggcttgaaagacattcaggcaaaactcggcacggcagactattaccgcctgcgcctcggcatcggccacccgggcgaccgcaacctcgtcgtcggctatgtcctgaacaaacccagtacggaacaccgccgacagattgacgatgccgtcgccaaatccctgcaagccatacccgacatccttgccggcaaatgggaagaagcaacccgcttcctgcacagcaaatga

SEQ ID NO: 42927 - DNA, 669 bp, Neisseria meningitidis; identical to SEQ ID NO: 41179

SEQ ID NO: 42928 - DNA, 366 bp, Neisseria meningitidis
atgattgccaaacacatcgaccggttcccactattgaagttggaccgggtaattgattggcagccgatcgaacagtacctgaatcgtcaaagaacccgttaccttagagaccaccgcggccgtcccgcctatcccctgttgtccatgttcaaagccgtcctgctcggacaatggcacagcctctccgatcccgaactcgagcacagcctcatcacccgcatcgatttcaacctgttttgccgctttgacgaactgagcatccccgattacagtcatcaaccatattccggtttgtcggagaaagatgcatacgctgtgatgaccggataccgacccgttaaaagagtccgaccctatgccgtctga

SEQ ID NO: 42929 - DNA, 378 bp, Neisseria meningitidis; identical to SEQ ID NO: 36526

SEQ ID NO: 42930 - DNA, 1221 bp, Neisseria meningitidis
ttggttaatagcttccaaggagaagccgccagcaaaatcaaaacaaccttcagcgacgattatgttgccaaacagttcgcccacgctttggctgggtgtgttagcggattggtacaaggaaaatgtaaagacggggcaattggcgcagcagttggggaaatcgtagccgactccatgcttggcggcagaaaccctgctacactcagcgatgcggaaaagcataaggttatcagttactcgaagattattgccggcagcgtggcggcactcaacggcggcgatgtgaatactgcggcgaatgcggctgaggtggcggtagtgaataatgctttgaattttgacagtacccctaccaatgcgaaaaagcatcaaccgcagaagcccgacaaaaccgcactggaaaaaattatccaaggtattatgcctgcacatgcagcaggtgcgatgactaatccgcaggataaggatgctgccatttggataagcaatatccgtaatggcatcacaggcccgattgtgattaccagctatggggtttatgctgcaggttggacagctccgctgatcggtacagcgggtaaattagctatcagcacctgcatggctaatccttctggttgtactgtcatggtcactcaggctgccgaagcgggcgcgggaatcgccacgggtgcggtaacggtaggcaacgcttgggaagcgcctgtgggggcgttgtcgaaagcgaaggcggctaagcaagctgctcctaaagaaacaataaacaatttggcaaatttagccaaagcagaacagcagattttattccgtattgcccaacgcgatacgcaactggatgcatggaagacgggatttaacaatagagtaaggaaaggagcaggcttgcttgatgcaagtaatattccgataaccattaacggaaaaaccatcaaacctgtacaagccataagcttaaagggagcacccgtttacagcggcgtaagcgaacaggagatttttgcgctttatcggcagatgactggccagaatccgaattttagagttttgcctgacggaagattagcaaatggcattatcagtactggagaatgggcaggaacaaaaattgcattaagaaatttttcaaaaacagagaattcaactcaagcacgatggacattagatttgcagaatcctccatcatttattaaaggtactaaattggagcttaaattccaataa

SEQ ID NO: 42931 - DNA, 297 bp, Neisseria meningitidis; identical to SEQ ID NO: 39905

SEQ ID NO: 42932 - DNA, 738 bp, Neisseria meningitidis; identical to SEQ ID NO: 41173

SEQ ID NO: 42933 - DNA, 186 bp, Neisseria meningitidis
atgtatcactaccaatccgatgccacacaattcctcaaccgcctgattgaagaaaaacctgagttggaacagcagcgtttggaaaacagggggcttttgtgggatgtcgaactcaatcccgaagaacaggaaaacttcgaggcggcaaaagtggcgaaaaaaccttatacctattaccaagactga

SEQ ID NO: 42934 - DNA, 339 bp, Neisseria meningitidis
atgacctaccgtgaattagttgaacgtcagttggctgtgcgccatgccgatttggaattgggcttaagccgcgcacgcgagcaagagccgtttgtcattcatgtttccgatctgttggataaggcaggcattgagtacgcggtacgcatggataaggattttcagacgacgtttcaccttgaatatccaattacgaactatgacacctttaaacgtgcggtttggcaaactttgggggcgtattactgtgtttgtaatgatggtgatggactggagattgccagcaatcgccctgacggttacgccgtccgtatcgtattcggcgatgtgccggtttaa

SEQ ID NO: 42935 - DNA, 834 bp, Neisseria meningitidis
atgccgcacgccctcgtcctccaatttccctccgccgcagccctgccttccgacttccccttacgcctgcccgaacctgattgcgccgatgaaaagcgtatgcgttttatcgttgaagaagggttttctttaagcgaaaaagacgcggcgttgcttggcagccgtcaaatcgaccacgccgtgttgccggatatggatttcgacgaactcggtttgattgtcagcgatatggattcgacgctgattaccatcgaatgcgtcgatgaaattgcggcaggcgtgggtttaaaaaacaaagtagcggaaattaccgagcgttcgatgcgcggcgaactcgatttcgaacagtctttacgcagccgcgtcgcgctgttggcgggattggacgaacgggttttggcggacgtttatgaaaacgttttgaagctctcgcccggtgcggaatttttgttggacgaatgcaaaaggcacgatgtgaaattcctgctggtgtcgggcggcttcacgttttttaccgaaaggctgcaacaacgcctcggcttcgaataccaacacgccaatgttttggaaattgaaaacggcaggctgaccggccgtctgaaaggcagaatcatcgacgcgcaggcaaaggcagatttgttgcgcgaataccgcagccgcctcggattgcagccgcatcaggtgttggcggtgggcgacggtgcgaacgatattccgatgctcaaagaagcgggcataggcgtggcttaccgtgccaaaccgaaagcgcgggccgccgccgatgcctgtatcaacttcggcggtttggagcgtgtacgcggcctgttcggatag

SEQ ID NO: 42936 - DNA, 867 bp, Neisseria meningitidis
atggtagcctatcggcggaatatgccgcaaggtcggcaggaaaaaggagaagaaatggacaaaatcagagttgccgccgtgcagatggtgtcgggcgtgtcgccggaaaccaacgtcgccgccatgaaacgcctggtcgcacgggcggcggagcagggtgcggattgggtgctgctgcccgaatattgggtgctgatgggcgcaaacgataccgacaaactcgcgcttgccgagcctttgggcggcggacgctttcagacggcattgagcgaaacggcgaaagaatgcggcgtggtgctgttcggcgggactgtgccgctgcaaagctgcgaggcgggtaaagtgatgaatacgctgttggtgtacggacgggacggcgtaaggacggggctgtaccacaaaatgcacctcttcggtttttccggtttgggcgaacgctatgccgaagccgataccatccgcgcgggcggggatgtgccgcacttgtcggcagaaggcgtgccggtggcggcgggcatttgttacgatgtccgctttcccgaatttttccgacgccagttgccgtttgacgtattgatgctgcccgctgcgtttacgcacacgacgggcaaggcgcattgggagctgctgctgcgcgcgcgtgccgtcgaaaaccaatgttacgtcgtggcggcggcacagggcggtttgcacgaaaacggacggcgcacgttcggacacagcatgattgtcgatccgtggggcgacgtgttggacgtattgcccgagggcgaaggcgttgttacggcagacatcgatgccaaccgcctgaacagcgtccgcaaccgcctgcccgccttgaaataccgggttttggatgccgtctga

SEQ ID NO: 42937 - DNA, 1053 bp, Neisseria meningitidis
atgccgtctgaagccttcagacggcatcgtgcctatcgggagaataaattgcagcctttagtcagcgtattgatttgcgcctacaacgtagaaaaatatttcgcccaatcattagccgccgtcgtgaatcaaacttggcgcaacttggatattttgattgtcgatgacggctcgacggacggtacgcttgccattgcccagcgtttccaagaacaggacggccgcatccgcatcctcgcgcagccgcgcaattccggtctgattccctctttaaacatcgggctggatgaattggcaaagtcgggggggggggggggggaatatattgcgcgcaccgatgcagacgatattgccgcccccgactggattgagaaaatcgtgggtgagatggaaaaagaccgcagcatcatcgcgatgggtgcgtggctggaagttttgtcggaagaaaaggacggcaaccggctggcgcggcaccacgaacacggcaaaatttggaaaaaaccgacccgacacgaagacattgccgactttttccctttcggcaaccccatacacaacaacacgatgattatgaggcgcagcgtcattgacggcggtttgcgttacaacaccgagcgggattgggcggaagattaccaattttggtacgatgtcagcaaattgggcaggctggcttattatcccgaagccttggtcaaataccgccttcacgccaatcaggtttcatccaaatacagcatccgccaacacgaaatcgcgcaaggcatccaaaaaaccgccagaaacgattttttgcagtctatgggttttaaaacccggttcgacagccttgaataccgccaaataaaagcagtagcgtatgaattgctggagaaacatttgccggaagaagattttgaacgcgcccgccggtttttgtaccaatgcttcaaacggacggacacgctgcccgccggcgcgtggctggattttgcggcagacggcaggatgcggcggctgtttaccttgaggcaatacttcggcattttgcaccgattgctgaaaaaccgttga

SEQ ID NO: 42938 - DNA, 1848 bp, Neisseria meningitidis
atgcacgacacccgtaccatgatgatcaaaccgaccgccctgctcctgccggctttatttttctttccgcacgcatacgcgcctgccgccgacctttccgaaaacaaggcggcgggtttcgcattgttcaaaaacaaaagccccgacaccgaatcagtcaaattaaaacccaaattccccgtcctcatcgacacgcaggacagtgaaatcaaagatatggtcgaagaacacctgccgctcatcacgcagcagcaggaagaagtattggacaaggaacagacgggcttcctcgccgaagaagcgccggacaacgttaaaacgatgctccgcagcaaaggctatttcagcagcaaagtcagcctgacggaaaaagacggagcttatacggtacacatcacaccgggcccgcgcaccaaaatcgccaacgtcggcgtcgccatcctcggcgacatcctttcagacggcaacctcgccgaatactaccgcaacgcgctggaaaactggcagcagccggtaggcagcgatttcgatcaggacagttgggaaaacagcaaaacttccgtcctcggcgcggtaacgcgcaaagcctacccgcttgccaagctcggcaatacgcaggcggccgtcaaccccgataccgccaccgccgatttgaacgtcgtcgtggacagcggccgccccatcgccttcggcgactttgaaatcaccggcacacagcgttaccccgaacaaatcgtctccggccttgcgcgtttccagcccggtatgccgtacgacctcgacctgctgctcgacttccaacaggcgctcgaacaaaacgggcattattccggcgcgtccgtacaagccgacttcgaccgcctccaaggcgaccgcgtccccgtcaaagtcagcgtaaccgaggtcaaacgccacaaactcgaaaccggcatccgcctcgattcggaatacggtttgggcggcaaaatcgcctacgactattacaacctcttcaacaaaggctatatcggttcggtcgtctgggatatggacaaatacgaaaccacgcttgccgccggcatcagccagccgcgcaactatcggggcaactactggacaagcaacgtttcctacaaccgttcgaccacccaaaacctcgaaaaacgcgccttctccggcggcgtctggtatgtgcgcgaccgcgcgggcatcgatgccaggctgggggcggaatttctcgcagaaggccggaaaatccccggctcggctgtcgatttgggcaacagccacgccacgatgctgaccgcctcttggaaacgccagctgctcaacaacgtgctgcatcccgaaaacggccattacctcgacggcaaaatcggtacgactttgggcacattcctgtcctccaccgcgctgatccgcacctctgcccgtgcaggttatttcttcacgcccgaaaacaaaaaactcggcacgttcatcatacgcggacaagcgggttacaccgttgcccgcgacaatgccgacgttccttcagggctgatgttccgcagcggcggcgcgtcttccgtgcgcggttacgaactcgacagcatcggacttgccggcccgaacggatcggtcctgcccgaacgcgccctcctggtgggcagcctggaataccaactgccgtttacgcgcaccctttccggcgcggtgttccacgatatgggcgatgccgccgccaatttcaaacgtatgaagctgaaacacggttcgggactgggcgtgcgctggttcagcccgcttgcgccgttttccttcgacatcgcctacgggcacagcgataagaaaatccgctggcacatcagcttgggaacgcgcttctaa

SEQ ID NO: 42939 - DNA, 810 bp, Neisseria meningitidis
atgcccgatttttcgatgtccaatttggccgttgccttttccatcacattggctgccggtttgtttaccgtattaggcagtggcttggtgatgttttccaaaacgcccaatccgcgtgtgttgtcgtttggtttggcgtttgccggcggtgcgatggtatatgtttccctgacggagattttcagtaagtccagcgaggcgttcgctgaaatttatgataaagaccacgcgtttgcggcggcgaccatggcatttttggccgggatgggcggcattgcgctgattgaccgtctggtgccgaacccgcatgaaactttagacgcgcaagacccgtcgtttcaagaaagcaaacgccgccatatcgcgcgagtcggcatgatggcggcgtttgcgattactgcgcacaatttccccgaaggcttggcgacgttttttgccacattggaaaatccagcagtcgggatgcctttggccttggcgattgccatccataatattccggagggcatttccatcgccgcgccggtttattttgccacccgcagccgtaagaaaacggtgtgggcgtgtctgctatccggcttggccgagccgttgggggcggctttgggctatttggttttgcagccgtttttgtcgcctgccgtgtttggttcggtattcggcgtgatagccggtgtgatggtgtttttggcgttggacgagctgctgccggctgccaaacgctattcagacggccatgaaaccgtttacggcctgacaacgggtatggcggtgattgccgtcagcctggtattgttccatttttaa

SEQ ID NO: 42940 - DNA, 330 bp, Neisseria meningitidis
atgactgataaaagtaaaacagaaaagttgatttcttctgatgataaacaaagtgttatagatggcattcttgatatggtatttaattccaaagcatatgaagtaccgtggatttctgagaaattgatggaattatcgaaaaataaagacttggatattgccggattatcgctaacctgtttcggacatctcgccaggctacattcaaatatcggtgattacgataaagttattcctttactacattcaaagcaagatgatccagagcttcaaggtagggctgaagatgcgttagaagatatttctttatttttatctgaaaatcattag

SEQ ID NO: 42941 - DNA, 312 bp, Neisseria meningitidis
atggcttccatccacgaccaaattaaagaagtagtaacgacacaccgcgtcgtattgtttatgaaaggtacgaagcagtttccgcaatgcggtttctcttcccgcgccgtgcaaatcctgaacgcggcaggctgcaccgattacgttaccgtcaacgtattggaaaatcccgaagtgcgccaaggcattaaggaatacagcgactggccgaccatcccccaactttatgtgaacggcgagtttgtcggcggttcggacatcctgatggaaatgtatgaggcaggcgagctgcaagagctgctgaaagcctga

SEQ ID NO: 42942 - DNA, 1791 bp, Neisseria meningitidis
atgcgctacaaaccccttctgcttgccctgatgctcgttttttccacgcccgccgttgccgcccacgacgcggcacacaaccgttccgccgaagtgaaaaaacagacgaagaacaaaaaagaacagcccgaagcggcggaaggcaaaaaagaaaaaggcaaaaatggcgcagtgaaagataaaaaaacaggcggcaaagaggcggcaaaagagggcaaagagtccaaaaaaaccgccaaaaaccgcaaagaagcagagaaggaggcgacatccaggcagtctgcgcgcaaaggacgcgaaggggataagaaatcgaaggcggaacacaaaaaggcacatggcaagcccgtgtccggatccaaagaaaaaaacgcaaaaacacagcctgaaaacaaacaaggcaaaaaagaggcaaaaggacagggcaatccgcgcaagggcggcaaggcggaaaaagacactgtttctgcaaataaaaaagtccgttccgacaagaacggcaaagcagtgaaacaggacaaaaaatacagggaagagaaaaatgccaaaaccgattccgacgaattgaaagccgccgttgccgctgccaccaatgatgtcgaaaacaaaaaagccctgctcaaacaaagcgaaggaatgctgcttcatgtcagcaattccctcaaacagcttcaggaagagcgtatccgccaagagcgtatccgtcaggcgcgcggcaaccttgcttccgtcaaccgcaaacagcgcgaggcttgggacaagttccaaaaactcaataccgagctgaaccgtttgaaaacggaagtcgccgctacgaaagcgcagatttcccgtttcgtatcggggaactataaaaacagccagccgaatgcggttgccctgttcctgaaaaacgccgaaccgggtcagaaaaaccgctttttgcgttatacgcgttatgtaaacgcctccaatcgggaagttgtcaaggatttggaaaaacagcagaaggctttggcggtacaagagcagaaaatcaacaatgagcttgcccgtttgaagaaaattcaggcaaacgtgcaatctctgctgaaaaaacagggtgtaaccgatgcggcggaacagacggaaagccgcagacagaatgccaaaatcgccaaagatgcccgaaaactgctggaacagaaagggaacgagcagcagctgaacaagctcttgagcaatttggagaagaaaaaggccgaacaccgcattcaggatgcggaagcaaaaagaaaattggctgaagccagactggcggcagccgaaaaagccagaaaagaagcggcgcagcagaaggctgaagcacgacgtgcggaaatgtccaacctgaccgccgaagacaggaacatccaagcgccttcggttatgggtatcggcagtgccgacggtttcagccgcatgcaaggacgtttgaaaaaaccggttgacggtgtgccgaccggacttttcgggcagaaccggagcggcggcgatatttggaaaggcgtgttctattccactgcaccggcaacggttgaaagcattgcgccgggaacggtaagctatgcggacgagttggacggctacggcaaagtggtcgtggtcgatcacggcgagaactacatcagcatctatgccggtttgagcgaaatttccgtcggcaagggttatatggtcgcggcaggaagcaaaatcggctcgagcgggtcgctgccggacggggaagaggggctttacctgcaaatacgttatcaaggtcaggtattgaacccttcgagctggatacgttga

SEQ ID NO: 42943 - DNA, 693 bp, Neisseria meningitidis
gtgcaggcggatttagcttatgccgccgaacgtattacccacgattatccgaaagcaaccggtacagacaaagacaaaataagcacagtaagcgattatttcagaaacatccgtgcgcattccatccacccccgagtgtcagtcggctacgatttcggcggctggaggatagcggcagattatgccagttacagaaaatggagcaacaataaatattccgtcaacacaaaagtgttgaaagaaaaccagggcaacaggataaaactgaagacggaaaatcagggaaacggtacgttccacgcctcttcttctctcggcttatccgccatttacgatttcaaactcaacgataaattcgataaattcaaaccctatatcggtgcgcgcgtcgcctacggacacgttaaacatcaggttcattcggtggaaaccaaaaccacgatttataccactgcaccaacgggagacgctacagtgggaggcactatcccagagagaccgagtagcaaacctgcctatcacgaaagcaacagcatcagcagcttggggcttggtgtcatcgctggtgtcggtttcgacatcacgcccaagctgaccttggacaccggataccgctaccacaactggggacgcttggaaaacacccgcttcaaaacccacgaagtctcattgggcatgcgctaccacttctga

SEQ ID NO: 42944 - DNA, 1053 bp, Neisseria meningitidis
atgtggaaagaaattttactgaattacggtattttcctgctcgaactgcttaccgtgttcggcgcaattgcgctgattgtgttggctatcgtacagagtaagaaacagtcggaaagcggcagtgtcgtactgacggatttttcggaaaattataaaaaacagcggcaatcgtttgaagcattctttttaagcggggaagaggcaaaacatcaggaaaaagaggaaaagaaaaaggaaaaggcggaagccaaagcagagaaaaagcgtttgaaggagggtggggagaaatctgccgaaacgcaaaaatcccgcctttttgtgttggattttgacggcgatttgtatgcacacgccgtagaatccttgcgtcatgagattacggcggtgcttttgattgccaagcctgaagatgaggttctgctcagattggaaagtccgggcggcgtggttcacggttacggtttggcggcttcgcagcttaggcgtttgcgcgaacgcaatattccgctgaccgtcgccgtcgataaggtggcggcgagcggcggttatatgatggcgtgtgtggcggataaaattgcttccgctccgtttgcgattgtcggttcggtgggtgtggtggcggaagtaccgaatatccaccgcctgttgaaaaaacatgatattgatgtggatgtgatgacggcgggcgaatttaagcgcacggttacttttatgggtgaaaatacggaaaagggcaaacagaaattccgacaggaactggaggaaacgcatcagttgttcaagcagtttgtcagcgagaaccgccctcaattggatattgaggaagtggcaacgggcgagcattggttcggtcggcaggcgttggcgttgaacttgattgacgagatttcgaccagtgatgatttgttgttgaaagcgtttgaaaacaaacaggttatcgaagtgaaatatcaggagaagcaaagcctgatccagcgcattggtttgcaggcggaagcttctgttgaaaagttgtttgccaaacttgtcaaccggcgggcggatgtgatgtag

SEQ ID NO: 42945 - DNA, 546 bp, Neisseria meningitidis
atgctgaaaacatcttttgccgtattgggcggctgcctgctgcttgccgcctgcggcaaatccgaaaatacggcggaacagccgcaaaacgcggtacaaagcgcgccgaaaccggttttcaaagtcaaatatatcgacaatacggcgattgccggtttggatttgggacaaagcagcgaaggcaaaaccaacgacggcaaaaaacaaatcagttatccgattaaaggcttgccggaacaaaatgttatccgactgatcggcaagcatcccggcgacttggaagccgtcagcggcaaatgtatggaaaccgatgataaggacagtccggcaggttgggcagaaaacggcgtgtgccataccttgtttgccaaactggtgggcaatatcgccgaagacggcggcaaactgacggattacctagtttcgcatgccgccctgcaaccctatcaggcaggcaaaagcggctatgccgccgtgcagaacggacgctatgtgctggaaatcgacagcgaaggggcgttttatttccgccgccgccattattga

SEQ ID NO: 42946 - DNA, 1389 bp, Neisseria meningitidis
atgaatgcagtcgtagttgccgtaatcgttatgctggtgctgtcgctgtcgcgcgtgcacgtggtattgagcctgacggtcggcgcgtttgtcggcggcgcggtggcgggtatgccgctgcaaaacattgccgatgcggcgggacaggtcagtcaggcggggattatccccgtgttcaacaaaggtttggaaggcggtgcgaagattgcgctttcttatgcgatgctcggcgcgtttgcaatggcgattacccattccggcctgccgcagcagcttgccggcgcggtcgtccgcaagctgaaccggggcggtatgcccgacagcgtgcgttcgggcgagggcgcggtcaaatggctgctgctttccatcatccttgtgatgggcatgatgagtcagaacatcatccccatccacattgcctttatcccgatgattgttccgccgctgcttttggtgttcaaccgcctgaaaatcgaccgccgcctgattgcgtgcgtcatcactttcgggctggttacgacttatatgttcctgccttacggcttcggcgcgatttttttgaacgaaatcctgttgggcaacatccattccgccgcgccgcagcttgatgtgaaaaacattaacgtgatggcggcaatggcgattcccgcgttgggaatgctggccggactcctgctggcgtttgtccattaccgcaaaccgcgcctgtaccaaagcaacaatgccgatacggcgggcaacgccgatgcggcaaaccgtccgcagccgtccgcctaccgcagcctggccgccgccgtcgccattgccgtatgctttgccatccagttgatgtatgaagactcgctggtgttgggcgcgatgctcggtttcgccgtatttatgatgttgggggtcattaaccgcgacaaggcaaacgacgtattcggcgaaggtatcaagatgatggcgatggtcggcttcattatgattgccgcgcagggttttgccgccgtgatgaatgcgaccgggcatattcagccgctggtggaaagcagtatggcgatattcggcaacagcaaaggtatggcggcattggcgatgctggtggtggggcttttggtaacgatgggcatcggttcgtccttttccactttgccgattattgccgcgatttatgtgcctttgtgtgtcggtttgggtttttcgccgcttgccaccgtcgccattgtcggcacggcgggggcgttgggcgatgccggttcgcctgcgtccgattccacgctgggcccgacgatggggctgaacgccgacgggcagcacgaccacatccgcgattccgttatcccgaccttcatccactacaacatcccgctgctgattgccggctggattgccgcgatggtgctgtaa

SEQ ID NO: 42947 - DNA, 1341 bp, Neisseria meningitidis
atgaacaaacaacccctttccctcgccgtcgtcggacacaccaacaccggcaaaacctcgctcctgcgtacccttttgcgcgacagcggtttcggcgaagtcaaaaacgccccatcgaccacgcgtcatgtcgaagaagccgccatcagcgacggcgcagacacgctggttttcctgtacgacacgcccggactcgaagacgcgggcggcgtgctggaatggctggaaaaccatacggacaatcgttcagacggcatcgaacggctgcaacagtttctcggcagccacggtgcgcaccatgatttcaatcaggaagccaaagtcttacggcaagtcttgcaaagcgatatggcaatgtacgtcatcgacgcgcgcgaacccgtcctcgacaaatacagggacgagttgaccatcctttcatggtgtgccaaaccggttatgcccgtgttcaactttaccggcggacagcttcccgaatcgtggacaaccatgctggcgaggagaaacctgcacgttttcgcagggttcgacaccgtcgcctttgattttgaaggcgaactgcgcctgtgggaaaacctcgccaccatgttgcccgaacgcagcacacttgaccgcctgacagccatgcgccggcgcgaatggcagcggctggacggcgaagcgcgccgcgaaatcgccgactttttaattgatgccgccgccttcaggcaggaagtggacgaaaacgaggataccgccaccgtgctgcaaaccatgcaggcggaaatacgccaactcgaacggcagatgcagcagcggctgtttgccctctaccgtttctaccacagcgaaatcgacggcggcgactggatgccgcaagccttccgccaagacccgttcgacagcgaattgctcaaacaatacggcatccgcaccggcacgggcgcggcaaccggcgcgctcatcggcttggggctggacatcgccacactcggcggctcgctcggattgggtacggcaatcggcggctttttgggcggcatcctgcccaatacccgcaccatttccgacaaactcgctggccgccaaaccctgcacaccgaccctgaaaccctgaccctgctcgccgcccgcgccctcgatttgctccacgtcctgcaaacgcgcggacacgcggcacagtcggatatcgagctgcacagccgcaaagtcccgtgggatgccgccagactcccgcccgaactcaacaaagcccgcagtcattggaaatggtcgtcgctcaatacgcaccgcccggaaaccagccgcgccgaacgcagggaatatgcggagaagcttgggatacgtttagcgggcaaataa

SEQ ID NO: 42948 - DNA, 240 bp, Neisseria meningitidis; identical to SEQ ID NO: 41460

SEQ ID NO: 42949 - DNA, 114 bp, Neisseria meningitidis
ttgcaaaattccccaaaattcccaccaagacatttaggggattttggggaattttgcaaaggtctcggacagtattttgaacgcagtgcgcgtaaattcgtatggaaaccatga

SEQ ID NO: 42950 - DNA, 129 bp, Neisseria meningitidis
gtgcgcgatatgtgccacgccgagctgtcggcatggtttgaagacatcctgtcgagcctgggcataaaaacgccgaaggaagagggagtgattgtgtcgaaacggctgagaaagccggagggaaaataa

SEQ ID NO: 42951 - DNA, 1410 bp, Neisseria meningitidis
atgccccatattgattttgacacgattccgggcagcatccgcgtgcccgggcagtatattgaatttaacacccgcaatgccgtacaaggtttgccgcaaaatccgcaaaaggtattgatggttgcacccatgctgaccgcgggcatacagcccgccttagagccggtgcaactatttagcgatgccgaggcggccgatttgttcggacaaggctcgctggcgcatttgatggtgcgccaagcatttgccaacaacccttatttggatttgaccgttatcggtattgccgaccacagcgcaggcgtgcaggcaaccgcaaccgttaccctttccggcacggccaccgcgccgggcgtggtggaaatcacgattggcggcaagcaggtaagcacggccgttaacaccggcgagaccgccgccacagtggcagaccgtctgaaaaccgccatcactgccgccgatgtaaccgttaccgcatccggcagcggcgcagccgttacgctgacggccaaacacaaaggcgagatcggcaacgagagcggcttaaccgtgagcaccggcaataccggcctaacttatcaagccaatgcctttaccggcggtgccaaaaatgcggacattgccacggccttgtccaaagtggcgggcaagcattatcacattatttgcagcccgtttagcgatgacgccaacgccaaagccttgagcaaccatattaccaacgtatccaacgccatcgagcagcgcggctgtatcggcgtattgggtatgagtgcggccttgagcacggccaccaccgctaccggcgaaatcaacgacggccgcatgacctgtgcttggtacaaaggtgcggtagagccaaacggcatcatcgccgcaggttatgcggcggtgttggcctttgaagaagaccctgccaagccgctgaacacgctggaaatcaaagggctggccgttacacctgatgcgcaatggccgctgtttgcagaatgcaacaatgcgctgtacaacggcttgaccccgctcacagtggtcaacaaccgcgtgcagattatgcgtgccgtatccacctataccaagtcggccaacaacaccgacgacccggcactactcgacattaccaccatccgcacgctggattatgtgcgccgcagcgttaaagagcgcattgccctgcgttttccgcgcgacaaattgagcgaccgcctgctgcccaaggttaagagcgagattttggacgtgctgattaagctcgaccaagccgaaatcatcgaaaacgccgaggccaacaaaggcaagctggtggtggcgcgtgcgcaaaacgaccccaaccgtgttaatgccattatccccgccgatgtggtcaacggcctgcacgtctttgccgggcgcattgatttgattttgtaa

SEQ ID NO: 42952 - DNA, 534 bp, Neisseria meningitidis
atgtcacgtgtcgcaaaaaacccagtgactgttcccgctggtgtagaagtaaaatttggagcagaggcattagttattaagggtaagaacggtgaattgtcttttcctttgcattctgatgtagccattgaatttaatgatggcaaattgacttttgttgcgaataacagcagtaaacaagcaaatgcaatgtctggtactgctcgcgcattagtcagcaatatggttaaaggtgtttcagaaggttttgagaaaagattgcaattgataggtgtgggttatcgtgctcaagcacaaggtaaaatcttgaatctgtctttgggtttttctcatccgatcgtatatgaaatgcctgaaggtgtctccgttcaaactcctagccaaacagagattgttttaaccggctcggataaacaagttgttggtcaagttgctgctgagattcgtgcgttccgtgctcctgagccttataaaggtaaaggtgttcgctatgtaggagaagtagtggtaatgaaagaagccaagaaaaaataa

SEQ ID NO: 42953 - DNA, 462 bp, Neisseria meningitidis
atgaccgaagtcatcgcctacctcatcgaacatttccaagatttcgatacctgcccgccgcccgaagacttgggtatgctgcttgaagaagcgggtttcgatacgatggaaatcggcaacaccctgatgatgatggaagtattgctcaacagctccgaattttccgccgaacccgccgacagcggcgcattgcgcgtgtacagcaaagaagaaaccgacaacctgccgcaggaagtgatggggctgatgcagtatctgattgaagaaaaagccgtcagctgcgaacagcgggaaatcatcatccacgcgctcatgcacattccgggcgacgaaattaccgtagataccgccaaagtgctgaccctgctgcttttatgggcaaacaagagcgagctgcccgtgttggtcggcgacgagctgatgagcgcgcttttactcgacaacaaacccacgatgaactga

SEQ ID NO: 42954 - DNA, 1197 bp, Neisseria meningitidis
atgccgtccgaaccgttcggacggcataacgcaacaaacactttaatatccatcacacaggatgacacgatgacccatatcaaacccgtcattgccgcgctcgcactcatcgggcttgccgcctgctccggcagcaaaaccgaacagcccaagctcgactaccaaagccggtcgcaccgcctgatcaaacttgaagtcccacctgatttgaacaaccccgaccaaggcaacctctaccgcctgcctgccggttcgggcgccgtccgcgccagcgatttggaaaaacgccgcacacccgccgtccaacagcctgccgatgccgaagtattgaaaagcgtcaaaggtgtccgcctcgagcgcgacggcagccaacgctggctcgttgtcgacggcaagtctcctgccgaaatctggccgctcctgaaagccttttggcaggaaaacggcttcgacatcaaatccgaagaacccgccatcggacaaatggaaaccgagtgggcggaaaaccgcgccaaaatcccccaagacagcttgcgccgcctcttcgacaaagtcggcttgggcggcatctactccaccggcgagcgcgacaaattcatcgtccgtatcgaacagggcaaaaacggcgtttccgacatcttcttcgcccacaaagccatgaaagaagtgtacggcggcaaagacaaagacacgaccgtatggcagccctccccgtccgatcccaacctcgaagccgctttcctgacgcgctttatgcaatatttgggcgttgacggacagcaggcggaaaacgcatcggcaaaaaaacctacccttcccgccgccaacgaaatggcgcgtatcgaaggcaaaagcctgattgtctttggcgactacggcagaaactggcggcgcaccgtgctcgccctcgaccgcatcgggctgaccgtcgtcggtcaaaacaccgaacgccacgccttcctggttcaaaaagccccgaacgaaagcaatgcagttaccgaacaaaaacccggcctgttcaaacgcctgctgggcaaaggcaaagcggagaaacctgccgaacagccggaactgattgtctatgcagaacctgtcgccaacggctcgcgcatcgtcctgctcaacaaagacggcagcgcatatgccggcaaagacgcatccgcattattgggcaaactccattccgaactgcgttaa

SEQ ID NO: 42955 - DNA, 492 bp, Neisseria meningitidis
atgagtaccgaaaccaaaaactacattacgcccgccggatggcaggcattgaaagacgagctttatcaactggtcaacaaagaacgccccgaaatcgtccaaatcgtcaactgggcggcaggcaacggcgaccgcagcgaaaacggcgactatctttacggcaaacgccgtatgcgcgaaatcgaccgccgcatccgtttcctgaccaaacgtttggaggctgccgtcgtcgtcgatcccgaattgcgcgaagcgaccgaccaagtgtttttcggcgcgacggtcggactgttgcgcgacgacgggcgcgagcaaaccgtcaaaatcgtcggcatcgatgaaatcgataccgcgcaaaacaaaatttcttggatttcgccgctggctcgttgtctgattaaagcgcgcgaaggcgacgaagtggttttgaacacgccggaagggcgtgaggaaattgaaatcctttctgtcgaatacatcaaaatcgactga

SEQ ID NO: 42956 - DNA, 2472 bp, Neisseria meningitidis
atgaaaaaaacctgtttccactgcgggctggatgttcccgaaaacctgcatctgaccgtccgctacgaaggcgaagaccgagaaacctgctgcgccggctgtcaggcggtcgcacaaagcattattgacgcgggcttgggcagttattacaaacaacgcaccgccgacgcgcaaaaaaccgagctgccgccccaagaaatcctcgaccaaatccgcctgtacgacctgcccgaagtccagtccgactttgtggaaacccacggcggcacgcgcgaggcggttttaatgctcggcggcatcacctgcgccgcctgcgtctggctgatcgaacagcagcttttgcgtacagacggcatcgtccgcatcgacctcaattacagcacgcaccgctgccgcgtcgtctgggacgacggcaaaatccgcctttccgacattctgttgaaaatcaggcagataggctacaccgccgcaccctatgacgcgcaaaaaatcgaagccgccaaccaaaaagaacgcaaacaatacatcgtccgcctcgccgttgccgggctggggatgatgcagacgatgatgttcgcgctgccgacctacctttacggcagcgacatcgaacccgatttcctgcaaatcctccattggggcggctttttaatggtgctgcccgtcgtattctattgcgccgtcccgttttatcaaggcgcgctgcgcgacttgaaaaaccgccgcgtcggcatggatacgccgattaccgtcgccatcatcatgacctttatcgccggcgtttacagccttgcgacaaatgcggggcaggggatgtatttcgaatccatcgcgatgctgctgtttttcctgctgggcggacgctttatggaacacattgcccgccgtaaggcaggcgatgccgccgagaggctggtgaagctgattcctgcgttttgccatcatatgcccgattaccccgatacgcaggaaacctgcgaggcagctgtcgtcaaattgaaggcgggcgatatcgtgctggtcaaaccgggcgaaaccatccccgttgacggcacggtgctggaaggaagcagtgccgtcaacgaatctatgctgaccggcgagagcctgcccgtcgccaaaatgccgtctgaaaaagtaaccgccggcacactcaacacgcaaagccccctgattatacgcaccgaccgcaccggcggcggcacgcgactgtcgcacatcgtccgcctgctcgaccgcgccttagcgcaaaaaccgcgcactgccgagttggcggaacaatacgcctcgtctttcatattcggcgaactcctgcttgccgtccccgtcttcatcggctggacgctgtacgccgacgcgcacaccgcattgtggattaccgtcgccctgctggtcattacctgcccctgcgccttatcgcttgccacgccgaccgcgctggcagcttctaccggtacgctggcgcgcgaaggcattttaatcggcggaaagcaggcaatcgaaaccctcgcccaaaccaccgacatcatcttcgacaaaaccggcacgctgacccaaggcaaacccgccgtccgccgtatctcattgttgagaggcacagacgaagcctttgttctcgcggtggcgcaggctttagaacaacagtccgaacatccccttgcccgcgccatcctcaactgccgtgtttcaagcggcagcgtccccgacatcgctattaaacaacgcctcaaccgcatcggcgaaggcgtgggcgcgcaactgaccgtcaacggcgaaacacaggtttgggcattgggcagggcatcctatgtcgccgaaatttcaggtaaagaaccgcaaacagaaggcggcggcagcgcggtttacctcggcagtcaaagcggtttccaagccgtgttctacctgaccgaccccttgaaagacagcgcggcggaggcggtgcggcagttggcaggcaaaaacctgaccctgcacatcctcagcggcgaccgcgaaaccgccgttgccgaaaccgcacgcgccctgggtgtcgcgcactaccgcgcccaagccatgcccgaggacaaactggaatacgtcaaagccttgcaaaaagaagggaaaaaagtgctgatgataggcgacggcatcaacgacgcgcccgttttggcgcaggcagacgtatccgccgccgcagcgggcgggacggatattgcgagggacggcgcggacattgtgttattgaacgaagatttgcgtaccgtcgcccacctgctcgatcaggcgcggcgcacccgccatattatccggcaaaacctgatatgggcgggcgcgtacaatatcattgccgtaccgcttgccgttttgggctatgtccaaccgtggattgccgcactgggtatgagcttcagttcgctggtcgtattgggcaatgctatgcggcttcacaagcaggtggacatgccgtctgaaaaaatgccgtccgaacaatga

SEQ ID NO: 42957 - DNA, 1260 bp, Neisseria meningitidis
atgcacgtctccgaattacaaaccctgcacatttccaaactcttagaattggcggaagaacacggcatcgaaaacgccaaccgattccgcaaacaagacctcgtatttgccatcgtccgccagatgatgaaaaaaggcgagggtttcacctgctccggcacgcttgaaatcctgcccgacggcttcggcttcctccgcagcgcggacacgtcctatcttgccggccccgacgacatctatgtctcgcccacccaaatccgccgcttcaacctgcatacgggcgacaccatcgaaggaagcgtgcgcgtcccaaaagacaacgaacgctattttgccctggtcaggcttgataccatcaacggcgaccacccggaagtatgccgccataaaatcctgtttgaaaacctgaccccgctgtttccgaccgaacagttgaagctggaacgcgacttaaagtccgaagaaaacctgaccggacgtgccatcgacctgatttcccctatcggcaaaggtcagcgcgccctcttggttgccccgcccaaaagcggtaaaaccgtgatgctgcaaaacattgcccacgccgttaccgcaaactatcccgaagtcgaactcatcgtcctcttgattgacgaacgtcccgaagaagtaaccgaaatgagccgctccgtccgtggcgaagtagtctcctccacctttgacgagccggctcaacgccacgtccaagttgccgaaatggtgcttgaaaaagccaagcgtatggtggaacacaaaaaagacgtggtcatcctgctggattcgattacccgccttgcccgcgcctacaataccgtcgtgcctacctcgggcaaaatcctgaccggcggtgtcgatgccaacgcgctgcatcgtcccaaacgtttcttcggcgcggcgcgcaacgtggaagaaggcggttcgctgaccatcatcgccaccgcattggttgaaaccggcagccgtatggacgatgtgatttacgaagaattcaaaggcaccggcaatatggaattgcaccttgaccgccgtatggcggaaaaacgcctcttccccgccatcaacatcaacaaatccggcacgcgccgcgaagagctgcttgtcccaaacgaccagttacaacgtatgtggctcttacgcaagttcctgcacccgatggacgaaatcgaggcagccgaatttttaatcgggaaaatcaaagcctctaaaaacaacgacgatttctttgaactgatgcgcggcaaataa

SEQ ID NO: 42958 - DNA, 411 bp, Neisseria meningitidis
atggcacttacatttactcaagcagtttctaagctaacctctaaatttccacatttgaatcttgtggagttcaatggcgttcgttacccgacggtaatcgtctgtcctatacacgggagggttacttgctctacattcaaaagtatgttggactctaaaagtgggtgtccaaaatgtgcatcttatggtgtcaattcccacaaaattccagaagatacaatagataaattatctaaaaatacagtattggaggatactgtaactggcgaaacacttacattcccctcaagagcatctgctgcaaggtcattgggtataaacccagcagctatcactgaccgtataaaaggtcgggttcacacagagactttacttgcagggaggtataaggttcacatctgcactaaatga

SEQ ID NO: 42959 - DNA, 360 bp, Neisseria meningitidis; identical to SEQ ID NO: 38354

SEQ ID NO: 42960 - DNA, 117 bp, Neisseria meningitidis; identical to SEQ ID NO: 42842

SEQ ID NO: 42961 - DNA, 777 bp, Neisseria meningitidis
atgtccgacaacgctttgacctcttcgcgacgcttcggcggcatcgccagactctacggagactctgccttggcgcacttttcacaggcacacgtctgcgtagtcggcgtgggcggtgtcggctcgtgggcggtcgaggctttggcgcggacgggcatcggacgtttgactttgattgatttggacaacgttgccgaatcgaatgtcaaccgccagctgcacgccctgaccggcgacttcggcaaagcaaaagttaccgccttgcgcgaacgcattacacaaattaatccgcaatgcgaagtgtttgaaattgaagatttcgttaccgaagacaatttgccggaatacttcggaaaaggttttgatttcgtcatcgacgcgatcgaccaagtgcgcgtcaaagcagcaatggcggcttattttgtggaacgcaaacaaccgtttgtcctcagcggcggcgcgggcggacaaaaaaatccggcgttaatccaaaccgccgatttgagccgcgtaacccacgacccgctgcttgccaacctgcgctacaccttgcggaaacgctacggattcagccgcgatacgaaagcaaatatgcgcgtgccttgcgtgtattcgaccgaaaatatcgtgccgccgcagtctagggaggcttgttcggcagatgccgctccgcaaggcttgtcgtgcgccggctacggtgcaagcatgctcgttaccgcttcgttcgggctatattgcgcacaggcggcggtggaacacatcgcagacaaaaaataa

SEQ ID NO: 42962 - DNA, 1170 bp, Neisseria meningitidis
atgacagcacataaaatcctgcccgtcctgctttccatcatcttaggcgtttctcacgcaacggctgcatcgcccgcgcccaacagaccgacggtacacgccgcccccacgttccaaacacccgaaaccctcacagcggcacacatcgttatcgaccttcaaagcaaacagattttatccgccaaaaacatcaatacccctgttgaaccggcggcactaacccaactgatgaccgcatatctggttttcaaaaacatgaaatcgggcaatatccaatctgaagaaaacttaaaaatacccgaatccgcatgggcttcagaaggaagcagaatgtttgtacgtcccggcgatacggtcagcaccgacaaactcttaaaaggcatgattgcactatccgcaaacgatgccgccctaacccttgccggccggctgggcaacggctcgattgaaaattttgtgcaacaaatgaacaaagaagcccgacgcttgggcatgaagaacactgtattcaaaaacccgacaggcttgagtagagaaggacaggtttccaccgccaaagacctcgccctgctgtctgaagcattgatgcgcgactttccggaatattacccgctgttttccatcaaatctttcaaattcaaaaatatagaacaaaacaaccgcaatatccttttatatagggacaacaatgtaaacggtctgaaagccggacacacagaaagcggcggctacaaccttgccgtgtcatactccggcaacggcaggcacatccttgtcatcacattgggttcggaatcggcggaaacacgcgcatcagacaacagcaagctgctgaactgggcattgcaggccttcgatacgcccaaaatatatccgaaaggcaaaaccgttgcccaaatccaaatttccggaggcagcaaaaaaaccgtccgcgcaggcttcctcaaagaagcctacatcactctgccacataaggaagcgaaaatggcagaacaaattctagaaaccatacagccgattcccgccccagtaaaaaaagggcaaattttaggaaaaatcaaaatcagacaaaacggatacaccattgccgaaaaagaaatcgtcgcactggaaaatgtaaaaaaaagaagccggtggcaaaggctttgggcgtgtctgacagggcagtaa

SEQ ID NO: 42963 - DNA, 471 bp, Neisseria meningitidis
atgccaagacgtagagaagtccccaagcgcgacgtactgccagatcctaaattcggcagcgtcgagttgaccaaattcatgaacgtattgatgattgacggtaaaaaatccgttgccgagcgtatcgtttacggtgcgttggaacagattgagaaaaaaaccggcaaagtagcaatcgaagtatttaacgaagccattgcaaacgccaaacctatcgtggaagtgaaaagccgccgtgtaggtggtgcaaactaccaagttcctgttgaagttcgtccttcacgccgtttggctttggcaatgcgctgggttcgcgatgcggcccgcaaacgtggtgagaaatccatggacctgcgtttggcaggcgaattgattgatgcgtccgaaggccgtggcggtgcgttgaaaaaacgtgaagaagtacaccgtatggctgaagccaacaaagcattctctcacttccgtttctaa

SEQ ID NO: 42964 - DNA, 1548 bp, Neisseria meningitidis
atgcagcttaatcctgctgaaattagcgatttgattaaagccaagatcgaaaatctgtctgtaaatgccgaagtgcgtacctgtggtacggtaatttcggtaactgacggtatcgttcgcatccatggtttgtcagatgcaatgcaaggtgagatgctcgaattcccgggtaacactttcggcttggcgatgaacctggagcgcgactccgtcggcgccgtagtgttgggcgagtacgaacacattaaagaaggcgacacggttacctgtaccggtcgtatcttggaagtgccggtcggacgcgaactggtcggacgcgttgttgatgcattgggtcggcctatcgacggcaaaggcccgattaatacaactttgaccgcccctatcgaaaaaatcgcaccgggcgtgattgcgcgcaaatcggttgaccagccgatgcaaaccggtctgaaggcgattgactctatggttcctgtcggtcgcggtcagcgtgagttgattattggcgaccgtcagacaggtaaaacggccgtagcattggatgccatcgtcaaccaaaaaggtacgggtgttatctgtatctatgtcgctatcggtcaaaaagcatcttctattgccaacgtggtccgcaaattggaagagcatggcgcgatggagcataccatcgtggttgctgcaactgcatctgaagcggcggcattgcaatatatcgcaccttactccggttgtacgatgggtgaattcttccgcgatcgtggcgaagatgccttgattgtttatgacgatttgtccaaacaggctgtggcttaccgtcaaatttccctgcttttgcgccgtccgcccggccgcgaagcctatcccggcgatgtgttctacctgcactcccgtctgttggaacgtgcggcacgtgtcaatgaacacgaagtggagaaattgaccaacggcgaagtaaaaggcaaaaccggttctctgaccgcgttgccgattatcgaaacccaagcgggcgacgtatctgctttcgttccgactaacgtcatttcgattaccgacggtcagattttcttggaaaccgacctcttcaacgccggtatccgtcctgcaatcaatgccggtatttccgtatcccgcgtaggcggtgctgcacaaaccaaagtgattaaaaagctgggtggcggtatccgtttggcgttggcacaatatcgtgaattggcggcgttctcgcaatttgcatccgatttggatgaagctacgcgcaaacaattggagcatggcgaagtcgtaaccgaactgatgaaacagaaacagttcagtacgttgaatacggctgaaatggctttgaccctttgggcaatcaacaacggttcgtattctgatgttccggttgccaaagctctggcttttgaatctgaatttttgagctttgtccgtacccaacatccggaagttttggaagccgtcaatgcttcaggtgcaatgtccgacgagagcgagaaaacgcttgaagcagccatgaaatccttcaaatcttcttacgcctatcaggcataa

SEQ ID NO: 42965 - DNA, 780 bp, Neisseria meningitidis
atgttttttgtcctttcccctgcgaagaaccttaatgaaaaagaccctgcccctgtcagcgagtttacccaacccgacctgctggcagagtccgacattctaatgcagcagttgcgcgagcttgcgccgcaacagattgccgaactgatgcacgtttccgacaaaattgccctcttaaacgcgcagcgcaatgcagaatggaacacgccgtttacgccggaaaacgccaaacaggcggtctttatgttcaacggcgatgtttacgaaggtatggatgcaaacacattggatattggacagatacgctatctgcaaaaccatgtccgcctgctgtccggtctgtacggtcttcttcgcccgttagacctgatacagccctatcgtttggaaatggggacggcatttgccaatttgcgcggcaagaatttgtatgagttttggggcgacatcattaccaaccttttaaatgatacgcttgcccaagcaggcagcaatacgcttgtcaaccttgcctcacaggaatatttcaagtccgtcaacacgaaaaaacttcgggcgcggctgattaccccaatatttaaagacgaaaaaaacggtaaatataaaatcatcagtttctatgccaagcgcgcgcgtggattaatggtgcgctatgcggcagaacatcatattaccgaccctgaaatgctgaaaaattttaattacgaaggctacgcattcaatgacgcggcttcaaatgaaagcgaatgggtttttatgcgttcggaacaaataaagtga

SEQ ID NO: 42966 - DNA, 1278 bp, Neisseria meningitidis
atgcgtagcagcgatattttaattgtagacgacgaaatcggcatccgcgacctgctgtcggaaatcctgcaggacgaaggttattcggtcgcattggcggaaaacgccgaagaggcgcgcaagctgcgccatcaggcgcgccccgcgatggtgctgctggatatttggatgcctgattgcgacggcatcacccttttgaaggagtgggcgaaaaacgggcagctcaatatgccggtggtgatgatgagcgggcatgccagcatcgataccgccgtggaagccaccaaaatcggcgcgatcgattttttggaaaaaccgatttccctgcaaaagctgctgtctgccgtcgaaaacgcgttgaagtacggtgcggcgcaaaccgaaacggggcctgtattcgacaagctgggcaacagtgcggcgattcaggaaatgaaccgtgaggtaggggctgcggtgaaatgtgcctctcccgtacttttgacgggcgaggcgggttcgccgtttgaaacggtggcacgctatttccataaaaacggtacgccgtgggtcagcccggcaagggtcgaatatctgatcgatatgccgatggaactgttgcagaaggcggagggcggcgttttgtatgtcggcgacatcgcccagtacagccgcaacatccaagccggtattgcctttattgtcggaaaggcggaacaccgccgcgtcagggtggtcgcatcgggcagcagggcggcaggttcagacggcattgcctgcgaggaaaagctggcggaactgctgtcggaatcggtcgtccgtattccgccgctgcgtatgcagcatgaagacattcccttcctgatacaggggattgcctgcaatgtggcggaaagccaaaagattgcgcctgcctcattcagtgaagaggcacttgccgcattgacccgttacgactggccgggaaatttcgaccaactgcaaagcgtcgttgcaacgctgttgttggaggcggacggacaggaaatcggcgcaggggcggtttcttcccttttggggcagaatgtgcctgccgagggggcggaagatatggtgggcgggtttaatttcaacctgcccctgcgcgaattgagggaggaggtggagcggcgttatttcgagtaccacatcgcccaagaaggtcagaatatgagccaagtggcgcagaaagttggtttggaacgcacgcacctttaccgcaaactcaaacagctcggcatcggcgtttcgcgccgggcgggggaaaaaaccgaagaatag

SEQ ID NO: 42967 - DNA, 519 bp, Neisseria meningitidis
atgcccaagctccatatgttttacctcggcggcaatgccggcaggtcgaatatcgaagtgcacgacatccaatttgccgtgtgcgacaactaccgcgaggccgtccccgcgctcaaagccgcgtggttcggcgatgcggacaaaatccacatcgacggctggcagattgtcgaatgggcggacggttacgacatcgccgtatccgaaacgcccaaaacgaaaatgccgtctgaacacgccccgcgcctgtatttcgccaatgtcggcggttatcgcgcgggtcagcttgccgaggcacacgctttcgggctgttcgccgccgccacgcctgccgaagccaaacaaaaagccctgcaaaccctgttgaccgacagctatgttcagcagcataaagacaacttaaaagacgtggacaacctgcttgcgctcgaccgcatcggcaatttccatatccgcctgaccccgaatccgcacggcaaacccgccgaaatcggctttcaaggctatttgcccatttga

SEQ ID NO: 42968 - DNA, 1923 bp, Neisseria meningitidis
atgattgaaatcaaaaacctcaccctgcaacgcggtttgaaagtcctgctcgacaaagccaacgctaccgtcaatcccggtcagcgcgtcggtttgatcggcaaaaacggaacgggcaaatcgagcctgtttgccttaatcaagggtgaaatcactcaggacggcggcgatgtctcgattccgaaaaactggcggctcgcttccgtttcccaagaaacgcccgatttggatatttccgctttggattacgttttgcagggcgatgccgagttgcaggcttttcagacggcattgaggcaggcagaagcgcaaaatgacggcatgaagcaggcggaatatcatgctaaattggaagaaatcgacgcttataccgcgccggcgcgtgcggcaaaattgttgaacgggctgggtttttcgcaagaagaacacagccgccccgtcaaatccttttccggcggctggcgtatgcgcctgaatcttgcgcaagccctgatttgccgcgccgatttgctcttgcttgacgaaccgaccaaccacttggatttggaaaccgtcttgtggctggaaaaccaccttgcttctttaccctgcacgcaaatcatcatttcccatgaccgcgattttctcaacgcggaaactacccaaaccattgaattatcgcagcaaaaactcacgcaatacggcggcaattacgatttttaccaaaacgaacgtgcgcagcgtctcgcgcaacaacaagctgcctatgtcaaacagcaggcgcaaatcaaacatttgcaatcctttatcgaccgcttcaaagccaaagccaccaaagccgttcaagcgcaaagccgcatgaaggctttggcgaagctcgaacgcatcgctcccgcgcatctggacagcgagttttcctttgagttttaccatcccgaccatctgcccaatcctttgttaaagctagaacacgcagatttgggttacgaaggcaaaactgttttgcacgacattaccctgtcgctggaaagcggcgcgcgctatggtttattgggtgtcaacggcagcggtaaatctacctttatcaaagctttggcaggcacaatcgatttactctccggcagcatcgtccgttccgaaaaactcaatatcggctattttgcccaacaccaactcgataccatccgctccgaccaaaaccctgtttggcatattcagcagctttctcccgaagtacgcgaacaagaaatccgaaatttcctcggaggcttcaattttgtcggcgatatggcgttgcagaaaaccgaaccattttccggcggagaaaaagcccgactcgctcttgccatgattatctggcaaaagccgaacctgctgctgcttgacgagccgaccaaccatttggatttggatatgcgccacgccttgacgctcgctctgcaaagtttccaaggcgccttaatcgtcgtatcgcacgatcgcagcctgcttgaagccacgaccgacagcttcctcctgatcgataaaggccgtctgaagaacttcgacggcgatttgaacgactaccgccaatggcgtttggcacaggaaaacgccgccgtcgcgcccgcagcatccgcacaaagccaaagccgcaaagacaccaagcgcatcgaagcgcaaatccgtcaggaaaaagcccgacgcggcaagccgatacagcagaaaatagaccgtgccgaaaaagaaatggcgcagctttccgaaattcagacggcatgtgaagcatttttagcacaagaagaagcttacttcgaggaaaacaaagaaaaattgcaggacaccttatccgagctggcaaaagtcaaaacacaacttgcccaaatcgaagaggtttggctggcttgccaagaagaattggaacagattgaaactgaaatcgagaaacagtttgccgagcgataa

SEQ ID NO: 42969 - DNA, 3216 bp, Neisseria meningitidis
atgcccaaacgtaccgacctaaaatccatccttatcatcggcgccggccctatcgttatcggtcaggcctgcgaatttgactattcgggcgcacaggcctgcaaagccttgcgtgaagaaggctataaagtcattttggtgaattccaaccccgccacgattatgaccgaccccgaaatggcggatgttacctacatcgagccgattatgtggcagacggtggaaaaaattattgccaaagagcgtcctgacgcgattctgcctaccatgggtggtcagactgcgctgaactgtgcgctggatttggcgcgcaacggcgtgctggcgaaatacaatgtcgagctgatcggcgcgaccgaagacgccatcgacaaagcagaagaccgtggccgctttaaggaggcgatggagaaaatcggcctctcctgcccgaaatcttttgtctgccacacgatgaacgaagctttggcggcgcaagaacaggtcggcttccctaccctgattcgtccttctttcaccatgggcggttcgggcggcggcattgcctacaataaagacgagtttttggcgatttgcgaacgcggtttcgatgcgtcgcccacgcacgagctgttgattgagcagtccgttctcggctggaaagagtacgagatggaagtggtgcgcgataagaacgacaactgcatcatcatctgctcgattgaaaacttcgacccgatgggcgtgcatacaggcgactcgattacggttgcgccggcgcaaacgctgacggacaaggaatatcaaattatgcgtaatgcttcgctggcggtattgcgcgaaatcggcgtggacacgggcggctcgaacgtgcagtttgcggtgaaccctgcaaacggcgagatgattgtgattgagatgaacccgcgcgtgagccgttcttccgcgttggcttccaaagcaacgggtttcccgattgcgaaggtggcggcgaagctggcggtcggctttacgctggacgagttgcgcaacgacatcaccggcggcaaaacccccgcgtcgttcgagccttccatcgactatgtggttaccaaaatcccgcgtttcgcgtttgaaaaattccctgccgcagacgaccgcctgaccacgcagatgaaatcggtgggcgaagtgatggcgatgggccgcacgattcaagaaagtttccaaaaagccctgcgcggcttggaaacaggcttgtgcggcttcaatccgcgcagtgaagacaaagcggaaatccgccgcgaactggcgaaccccggccccgaacgtatgctgtttgtggcagacgcgttccgcgcgggcttcacgctggaagaaatccacgaaatctgcgccatcgacccttggttcttggcgcaaatcgaagacttgatgaaggaagaaaaagcggtttcagacggcattttgagtgatttggatttcgccgccctacgtcgtctgaaacgcaaaggcttctccgacaaacgtttggcacaattgttgaacgtaagcgaaaaagaagttcgcgaacaccgctacgcgctgaagctgcatccggtttacaaacgcgtcgatacctgcgccgccgagttcgccaccgaaaccgcctatctttactccacttacgaagaagaatgcgaatctcgtccttccgaccgcaaaaaagtgatgattctcggtggcggcccgaaccgcatcggtcagggcatcgagtttgactactgctgcgttcacgccgcgctcgccctgcgcgaatcgggctttgaaaccatcatggtcaactgcaaccccgaaactgtgtccaccgacttcgacaccagcgaccgcctgtatttcgagccgctgacgctggaagacgtgttggaaatcgtccgcaccgaaaacccgtggggcgtgattgtgcattacggcggccaaaccccgctcaaactcgccaacgcgctggttgaaaacggcgtgaacatcatcggcacgtccgccgacagcatcgacgccgccgaagaccgcgaacgcttccaaaaagtgttgaacgacttaggcctgcgccaaccgcccaaccgcatcgcccacaacgaagaagaagcgctcgtcaaagccgaagaaatcggctatccgctggtcgtgcgcccgtcttacgtcctcggcggccgcgccatgcaggtcgtccattccgccgaagagctgcaaaaatacatgcgcgaagccgtgcaggtttccgaagacagccccgtgttgctcgacttcttcctgaacaacgcgattgaagtggatgtggactgcgtttcagacggcaaagacgtggttatcggcggcatcatgcagcacgtcgaacaggcgggcatccactccggcgactccggctgctcgctgccgccctactccttaagcgaagaaatccaagacgaaatccgccgccaaaccaaagcgatggcgtacgcgctgggcgtggtcggactgatgaacgtgcagtttgccgtacaagacggcgtagtgttcgtattggaagtgaacccgcgcgccagccgcaccgtgcccttcgtctccaaagccaccggcgtgccgctcgccaaagtcggcgcgcgctgcatggcaggcatttccctgaaagaacaaggcgtggaaaaagaagttgtccccgatttctatgccgttaaagaagccgtgttcccattcatcaaattcccgggcgtggatacgattttgggaccggaaatgcgctccaccggcgaagtcatgggcgtgggcgcaagctttggcgaagcctactacaaagcccaactcggcgcgggcgaacgcctcaacccgaccggcaaaatcttcctctccgtgcgcgaagaagacaaagaacgcgtcattaaaaccgctaaaaacttccaagttttaggctacggcatctgcgccacgcgcggcacggcgcaatacctgaccgaacacgggctgattgtgcagaccatcaacaaagtacccgaaggccgcccgcacatcggcgacgcgctgaaaaacggcgaaatcgcactggtcgtgaacaccgtttccagcgatccgcaatccgtgtccgacagccacatcatccgccaaagcgcattgcagcaacgtgtgccgcaatacaccaccaccgccggcggcgaagcgatgagcgaaggcgcgaaaagccgagaccatctgggcgtgtacagcgttcaagaactgcacgggcgtttgaaaaaccgcaactga

SEQ ID NO: 42970 - DNA, 681 bp, Neisseria meningitidis
atggaacggtataaaaatgccgttggggaagacaaagcagctgaattgtatttattgaatttatctttatcaagagaactttttcatgttgtttcaatatttgagattgttttaagaaacaaaattgacatttgccttcagcaggcgtttaaagacagaaactggttatataacagcatacagccacagacgaatcccgcattaaaatatcaaggttgctttttaagaaatggcacgaaagaatctgctgaattaatcaaggttgcattatctaaaatacaaaataatagcgggggaaagtttgaccacaaccaattggttgcaggactaggattcggtttttggcggtatctgtttgcaggagggaaagatgcccaatttgatgctacagggaaagtattgatgaaagtttttccaaaaaagcccaaatctacaccaagtgtgcaatataaccaaaaatggatttttcgagaactttccaatattaacaaattccgtaatcgtttggcacatcacgagccgatttgttttaaaggtgcaataaaagataccaactacgctagaaatattcaccaatctatttttgaactgcttaattacatggatgtagatactgcttcagtatttagccattttagcgatcaagtgattgcggtctgcgatgaaatcgacaaactgtaa

SEQ ID NO: 42971 - DNA, 291 bp, Neisseria meningitidis; identical to SEQ ID NO: 39715

SEQ ID NO: 42972 - DNA, 987 bp, Neisseria meningitidis; identical to SEQ ID NO: 38696

SEQ ID NO: 42973 - DNA, 618 bp, Neisseria meningitidis
atgaccttcccgcccctaaaatccccgctcaaattctacgccgtcgtccccaccgccgattgggtggggcgcatggtcaaagcaggtgccgacacggtgcaactgcgctgcaaggccctgcacggcgatgaattgaaacgcgaaatcgcccgctgcgccgcagcctgtcagggcagccgtacgcagcttttcatcaacgaccactggcgcgaagcaatcgaagcgggcgcgtacggcgtgcatctcggacaagaagacatggacaccgccgaccttgccgccatcgccgccgccggtttgcgcttgggtttgagtacgcactccgttgccgaactcgaccgcgccctgtccgtacaccctagctacatcgccagcggcgcgattttcccgaccacgaccaaacaaatgcccaccgccccgcaaggcttggacaaactgcgcgaatacgtcaaacaagcaggcggcacgcccgtcgtcgccatcggcggtatcgacttgaacaacgcccgagccgtactcgccaccggcgtttcctcactcgccgccgtccgcgccgtaaccgaagcggcaaatcccgaagcggtggttaaagcgtttcaggctttgtgggatggataa

SEQ ID NO: 42974 - DNA, 402 bp, Neisseria meningitidis
atgaacacaacccgactgccgaccgccctcgtcttgggctgcttctgcgccgccgcttctgcccccgacaacagcatcatgacaaaagggcaaaaagtgtacgaatccaactgcgtcgcctgccacggcaaaaagggcgaaggccgcggaaccatgtttccgccgctctaccgctccgacttcatcatgaaaaaaccgcaggtgctgctgcacagcatggtcaaaggcatcaacggtacaatcaaagtcaacggcaaaacctacaacggattcatgcccgcaaccgccatcagcgatgcggacattgccgccgtcgccacttatatcatgaacgcctttgacaacggcggcggaagcgttaccgaaaaagacgtaaaacaggcaaaaagcaaaaaaaactaa

SEQ ID NO: 42975 - DNA, 492 bp, Neisseria meningitidis; identical to SEQ ID NO: 39850

SEQ ID NO: 42976 - DNA, 786 bp, Neisseria meningitidis
gtgaaacacatcagttcgaccaataatgaacacatcagacacctgcaccgcctgttgtcgcaaggaaagttcagacggcaatacgcccaaaccgttttggagggcgtgcacctgcttcaggttttcctgcaatccggcgggatgccggtcggggtatatattcccgaagcgaaaatgccgtctgaagaagtccgtaaattgacggcggttttgccggaagacgggtttttttccgtttcagacggcatattgaagaaaatcagcagcctgacttgtgcggatgatgtgcttgcgctgattgatattccagatgcgggtgctttgccggccggcggcgattgcgtggttttggacggcgtgcaagacccgggcaatgtcggcacggtgttgcgaagcgcggcggcggcgggaatcggcgcggtcattttgggcaaaggttgtgcggacgcgtggtcgcccaaagtgctgcgagccggaatgggcgcgcatttcttgtcggagatttatccgcaggcggatttggaaatatggttggtgcgctataaaggccgtgtgtttgccaccgccttgcgcgaggaaaagcaggcggttttgtacggcgaagatttgtgcgaaccgacagcctgggtgtttggcaacgaaggcgcgggggtcggtaaagcagttttagatagggcggacaagtgtgtcaggataccgatgcacgatgcaaccgagtctttaaatgtcgcgatggcggcgacaatctgcctgtttgaacaaatgcgccaacgggcggcgtattga

SEQ ID NO: 42977 - DNA, 1731 bp, Neisseria meningitidis
atgtgcaatgcacctgccgacaattttaaggaaactgccatgagcgcatcacaattactgtcaagactgacccaaaccgtaggcgaaaaatacatcatcaccgaccccgcgaaaaccgaacaataccgccaaggttaccgcttcggcgagggtaaggcgttggcggtggttcgccccggaagcattctggaaatgtggaaaattctgcaggcgtgcgtcgaagcagacgtgattgtgattacgcaggcggcgaataccggtttgacgggcggctcgacccccgacggcaacgattacgaccgcgacatcgtgattgtgaacaccatgcggatgaacatcatccaaaccatcaacaacaacgaacaagtcgtctgcctgcccggctcgaccctgaaccagctcgaattgctgctgaaacctttggggcgcgaaccgcattcggttatcggctcatcctgtatcggcgcgtccgtcttgggcggcgtgtgcaacaactctggcggcgcgttggtacagcgcggcccggcctacaccgaaatggcgttgttcgcccaaatcaacgaagaaggcaggttggaactggtcaaccacttgggcatagacttgggcaacacgcccgaagaaatcctgaccaatcttcaaggtcatcattatcaaaacaaagacatcacgcaagacgcgggcaaaggacacgaccacgcctattgcgaacatgtccgccaagtggacgaaccgaccgccgcgcgtttcaatgccgacccagcgcgccattacgaagcctcgggctgcgcgggcaagctgatggtattcgccgtccgcttggatacctttccgcaagaaaaacaaacggccgtgttctacatcggcacgaacgacatcaacgagctgaccgacatccgccgcgccgccttgggcgaatttgaaagcctgcccgtttccggcgaatacatccaccgccacgctttcgacattgccgacgtgtacggcaaagatacgttttacgtcatcaaaaaattcggtacgcaccaactgccgaaattatttgatttgaaggcacgcgtggacaggttcggcaaaaaagtcagcttcctgcccaaacatttttccgacaaggcaatgcagttcgtcagcaaattcctgcctgaccatctgcccaaatccatgcgcgattaccgcgacaaatacgaacaccacctgattctgaaaatgggcggaaaaggcgtggatgaggcgcgcgcgttcctgaaagagtattttgcacatcacggcggcgcgtttttcgagtgcaacgccgaagaaacccaagccgcgatgctgcaccgtttcgccgtcgcctcagccgccatccgctaccgtgccgtacacgacgacgaagtggaggacttggtcgcgcttgacatcgccctgcgccgcgacgaccgcgactggtttgaaaaactgccgccggaaatcgacaataaaatcatccacaagctctactacggacatttcatgtgccacgttttccatcaggattacatcatcaaaaaaggcaacgactgcatggcattggaacacgaaatgctgcatctcttggatcaacgcggcgcgcaatatccagccgaacacaacgtcggccatttgtacgaagccaagcccgcgctcaaacagttttaccgcaaacttgacccgaccaacagcttcaacccgggcgtaggcaaaaccagcaaaaagaaaaactgggcggaataa

SEQ ID NO: 42978 - DNA, 366 bp, Neisseria meningitidis; identical to SEQ ID NO: 37248

SEQ ID NO: 42979 - DNA, 252 bp, Neisseria meningitidis; identical to SEQ ID NO: 41525

SEQ ID NO: 42980 - DNA, 441 bp, Neisseria meningitidis
atgatgcagactttccgaaaaatcagccggtatgtcgcaaccttgtggctcggtatgcagattatggcgggttatatcgccgcaccggtgctgttcaaaatgctgcccaaaatgcaggcgggcgaaattgccggcgtattgttcgacatcctctcttggagcgggcttgccgtttggggcgcggtactggctgccgcctttgccgccctaacccggcggcaaaccgccctgctgctttttttattgtccgcccttgccgccaaccgattcttgattacacccgttatcgaggcactgaaatacggacatgaaaattggctgttgtcgtttgtaggcggatccttcggaatgtggcacggcatttccagtattgtttttatggcaaccgccctactttcagcagttttaagttggcggctttccggcaaagatgccgtctga

SEQ ID NO: 42981 - DNA, 1446 bp, Neisseria meningitidis
atgagtacacaaacaaattttgatttggtgttgttcggtgcgaccggcgatttggcgatgcgcaagctgttgccctgtctgtaccaggcgcatgttgccggtctgcttcatcccgaagggcgtattttgggggtcagccgcagcgagttggataccgaaggttttctggcgaaggtggaaaccagttccaaaatccatgtgaaagaaaatttttccgatgaggcttgggcatcgtttgtcgaacgtttcgcatatctcaaagtcgatgttacgcagccggacgattttgccgctttgggcgatttggtcaaagcgcgcaaagaaaccgacaatgtcgtcatctatctttccaccgcgccgaaattcttcgcgcaagcctgtgaaaaccttgctgcgatcggtttgaatgccgacaatgtgcgcgtagttttggaaaaaccgttgggtacggatttggcatcttcccaacaaatcaataccgatgttgcgcgttatttcaaagaagggcaaatctaccgtatcgaccattatttaggtaaagaaagcctgcaaaacctgctggccttgcgttttgccaatgtgatgttcgagccgctttggaacaataaatacatcgaaagcgtgcagctgaccatcgccgagcagttgggcgtggaagaacgcggcgagttttacgacattaccggcgcgttgcgcgatatggtgcaaaaccacttgatgcaaatgctgtgcatgactgcgatggaagcccccgccagcttggatgccgacgcggtgcgcgatgaaaaagtcaaagtcatcaagtcattgaagccgctgaccgtcgaatctgtcaatgaaaatgtcgtgcgcggacaatataccgccgccaaaggcatgaacggctatcttgaagaaatcaacgttccgcaagacagctttaccgaaacctacgtcgccattaaagccgaaatcgaaaacgaacgctggaagggcgttcccttctacctgcgtaccggcaagcgcatggcgggcaaagtggcggaaatcgttttgaacttcaaagatttgaacagccatatttttgaaggcagtcgcaccgcgcccaaccggctcgttatcgagttgcaaccatatgaatccgtgcgcctctatacgcagatgaaaaccccgggggcaggaaataaggtcgaaaccgtgccgctggcaaccgatttgggcaaagcattggaaagccgccgcgcggaagcttacgagcgcctgctgctggatgtgattaacggcaaactcgctttgtttaaccgccgcgacgaacttgaagccgcgtgggaatatgtgatgccgattttggaaaactggacaaataacaccacgccgccgcacggctatggcgcacactcgtgggggcctgaagccgcgcgcgaactattggcgcgcgacggacacaagtggcacgaagagcagtaa

SEQ ID NO: 42982 - DNA, 501 bp, Neisseria meningitidis
ttgccacaatgccgtctgaagcctttcagacggcattatcctgccaaatgttcaaacaatatgccgaaagccaccttttacacgcacgttgcccaagttccgattttcacctgccgcctgattgcccgtgcgattcgggacggcggcaggatactggtgtggtccgattcgttcgggcagcttcaggaattggacaaaatgctttggcaatacgaggccgagagtttcattccgcacgaaatttgggaaacggaagaagccatgccgtctgaaccatccgtcctgcttgcctgcggcggcaatctgccccgaattcccgaaggcatgaccgttttgaacctgtccgacggtttttggaacaccgctccggtcttgcccgcgcgcgttttggaaatcgtcggcaacagcttggaagagctcgccgacgcgcgcgaacgctttaccgcctaccgccgaagcggttttgccatcgaacatcacggcatggagggcaaggcataa

SEQ ID NO: 42983 - DNA, 918 bp, Neisseria meningitidis
atgaaaaaaaccaaagtccacctgatttcaggttttctgggaacaggcaaaaccaccgcgctcaaaagcctgatggcgcaaaaagacccgaacgaaaaatgggtcatcatcgtcaacgagttcggcgaaatcggcattgacggcgcggtattgagcgacaacggcatccctgtggcagaaatcgccggcggctgtttgtgttgcaccgccggcccgcaaatgggcgtaaccgtgcagaaaatgctgcgcgacgccaagcccgaccgcctgatgattgaagcaagcggactggcgcacgccgccagtgtcattgatgaactgaaaaccaaaccgctggacagccttttggaaatcggcgcagtctttaccgtcgtcgatccgcgccagttcatcaaccccgattacgcgcagcaggcattgtataaagaccaaatcggcatctgcgacgtattggttgccagcaaaaccgatttatgcacccccgaacagcttgccgaatttcacgacaaagccgcaaaactgttcccgcccaaggctaaagtggtcgaagttcaaaacgcacaactcgatatccaatggcttgacatccccgtcatcgaaaaatcacgctaccgcctcaaagccctgccggacaacacgatgggcttccagtcgcaaggtttcacattccccgccggacgcgatttcgacggtgaaaaattgaccaacttcttcaatgatttgcccaatatgaccgaaggactcgtccgtgccaaaggcgtgttccaagtattgggaacgtgggtgtggctcaactgggtggacgggcaatggggtgcgaaccaagtgtcttggcggcgcgactcgcgttttgaattgattgccaaatcgtttgatgcggatttaatcgaacaaaaactcaaagacgcattggaatag

SEQ ID NO: 42984 - DNA, 714 bp, Neisseria meningitidis
atgaagatcaaattaccgctttttatcatttggctgtctgtgtccgcctcctgtgcttccgtttcacccgttccggcaggcagccaaaccgaaatgtcgacacgggaaaatgcttcagacggcattccctatcccgttccgaccttgcaagaccgtttggactatctggaaggcaaaatcgtccggctgtcgaacgaagtggaaaccttaaacggcaaagtcaaagcactggaacacgcaaaaacacattcttccggcagggcatacgtccaaaaactcgacgaccgcaagttgaaagagcattacctcaataccgaaggcggcagcgcatccgcacatactgtcgaaaccgcacaaaacctctacaatcaggcactcaaacactataaaagcggcaagttttctgccgctgcctccctgttgaaaggcgcggacggaggcgacggcggcagcatcgcgcaacgcagtatgtacctgttgctgcaaagcagggcgcgtatgggcaactgcgaatccgtcatcgaaatcggagggcgttacgccaaccgtttcaaagacagcccaaccgcgcctgaagccatgttcaaaatcggcgaatgccaatacaggcttcagcaaaaagacattgcaagggcgacttggcgcagcctgatacagacctatcccggcagcccggcggcaaaacgcgccgccgcagccgtgcgcaaacgatag

SEQ ID NO: 42985 - DNA, 801 bp, Neisseria meningitidis
atgaacgcgttcaacctcatcatcatcggcgacgaaatcttacacggcagcagccaagacaagcatttcgcctttttcaaatccctgctcgaatccaaagggctgaagctcaatcaggtgcaatacctgcccgacgaacccgatttgctggtcaggcaactgcgccgcagcttttcagacggcatgccaactttcgttaccggcggtatcggcgccacgcccgacgaccacacccgccaagccgcagccgctgctttggatttgcccgtcgtccgccattctgaagccgccaagtttatcgaaggcataacccagaaacgcggcgagccgcttgattcgccggaacacgcccaacgcctgaaaatggcagattttcccgaaggcgcggaattggtgcccaatccgtttaacaacatcgccggattttctatccgcgagcattatttcttccccggctttcctgtgatggcgcacccgatggcggaatgggtattggaaacttattacgccgaccgcttcaaccaaaccgaacgcggcagccgcagcgtgtatgtgtttgagcagcccgaatcgcgcattacgccgcttatggagcatatcgagcaaacttatcccggcgtgcgttcgtacagcctgcccagcgtcggttggacgcattcagacggcacgcaggtcaaaccgcacattgagttcggcatcaaagccgaaggagaagccgtcaaccttttggacgcggcgtgggcggaagtgttgcacagcttggacggattgggagcagagctgaaaaatcgggtaaactga

SEQ ID NO: 42986 - DNA, 1047 bp, Neisseria meningitidis
atgaaaatgcaggcagttgttgtgaataaaaatgtagcaggcgatgtggaagtagtcgaacgcgaggttcgcccgttggaatacggcgaggcattggtcgaagtcgaatattgcggcgtgtgccacaccgacctgcacgttgcggcgggcgactacggcgacaaaccgggccgcgtgttgggacacgaaggcatcggtttggttaaagaagttgccgacggtgtgaaaaatctgaaagtcggcgaccgcgtcagcatcgcctggctgttccaaagctgcggctcttgcgaatactgcaataccggccgcgaaaccctgtgccgttccgtattgaacgcgggctacaccgccgacggcggtatggcgacccactgtatcgtgagtgccgattacgcggtcaaagtccctgaaggtttggatcctgcgcaagcttccagcattacttgtgccggtgtaaccacttataaagccattaaagtttccggcgttcgtccgggacagtggattgccatctacggcgcgggcggtttgggcaacttgggggtccaatacgcgaaaaaagtattcggcgcgcacgttgtcgccatcgacatcaacgacgacaaactggcgtttgccaaagaaaccggcgcggatttggttgtcaacgccgccaaagaagacgctgccaaagtgattcaggaaaaaaccggcggcgcacacgctgcggtcgtaaccgccgtatctgctgccgcattcaactctgccgtgaattgcgtccgcgcgggcggacgtgtggttgccatcgggctgccgccggaatcgatggatttgtccatcccgcgtttggttttggacggcatcgaagtggtcggctctttggtcggcacgcgcaaagatttggaagaagccttccaattcggcgcggaaggtttggttgtgccgaaagtccaactgcgtgctttggatgaagcacccgccattttccaagaaatgcgcgaaggcaaaatcaccggccgtatggtgatcgatatgaaaaaagaatgcggctgcggccatcaccactga

SEQ ID NO: 42987 - DNA, 273 bp, Neisseria meningitidis; identical to SEQ ID NO: 41774

SEQ ID NO: 42988 - DNA, 333 bp, Neisseria meningitidis; identical to SEQ ID NO: 40334

SEQ ID NO: 42989 - DNA, 1215 bp, Neisseria meningitidis
atgaccgtcaaaacccccgtttacctcgactacgccgccaccacccccgttgacaaacgcgttgccgaaaaaatgattccctatctgaccgaaaccttcggcaacccagcctccaacagccacagcttcggctgggaagcagaagaagctgtagaaaaagcacgtgcagacattgccgccctgattaacgccgactctaaagaaatcgttttcaccagcggcgcaaccgagtccaacaacctcgctatcaaaggcgcggcgcacttctacaaatctaaaggtaatcacctcatcactgtaaaaaccgaacacaaagccgtactcgacaccatgcgcgaactcgaacgccaaggttacgaagtaacttatctggacgtacaagaaaacggtttggttgatttagacgtactgaaagccgccatccgcgaagacaccatcctcgtttccgtaatgtgggtaaacaacgaaatcggcgtggttcaagatattcctgccatcggcgaaatctgccgcgaacgcaaaatcattttccacgttgacgcagcacaagcatgcggcaaagtgcctgttgatgttgaagccgcaaaagttgatttgctgtctatgtccggccacaaagtatacggccctaaaggcatcggcgccctgtatgtacgccgtaaaccacgcgtccgcctcgaagcccaaatgcacggcggcggtcacgaacgcggtttccgttccggcacattgccgacccatcaaatcgtcggcatgggtgaagccttccgcattgccaaagaagaattggcacaagacactgcacactacctgaaactgcgcgatattttcctcaaaggtatcgaaggcatcgaagaagtctatatcaacggcgacctcgaacatcgcgtcccgaacaacctaaacgtcagcttcaacttcgtcgaaggcgaaagcctgattatggcagtgaaagaactcgccgtatccagcggctccgcctgcacctccgcctcgctcgaacccagctacgtcctgcgcgcgctcggccgcaacgatgaactggcgcactcatccctgcgcatcaccttcggtcgcatgaccaccgaagaagaagtgcaattcgccgccgaactgattaaatccaaaatcggcaaactgcgcgaactgtcgccgctgtgggaaatgttcaaagacgggattgatttgaactcgattgaatgggcagcgcattaa

SEQ ID NO: 42990 - DNA, 2631 bp, Neisseria meningitidis
atgcaagaacaataccggcccgccgccattgagcctgcggcgcagaaaaaatgggacgacgcccgtattttcaacgtctccgaagacgcttccaaacccaaatattattgcctctccatgttcccctatcccagcggcaagctgcacatggggcatgtgcgcaactacaccatcggcgatgtattgagccgcttcaaacttttaaacggcttcaacgtcatgcagcctatgggttgggacgcgttcggcatgccggcggaaaacgcggcgatgaaaaacaacgtcgcccctgccgcttggacgtacgataacatcgaatacatgaaaacccagctcaaaagcctaggttttgcgattgactgggcgcgcgaaaccgcaacctgcaaacccgaatactaccgctgggaacaatggctgtttaccaagctgtttgaaaaaggcatcgtttatcgcaaaaacggcacggtaaactgggaccctgtcgaccaaaccgtccttgccaacgagcaagtcatcgacggacgcggctggcgttccggcgcattgatcgaaaaacgcgaaatcccgatgtattacttcaaaatcacggattacgccgaagagctgctcaacgacttggacaagctggaacactggccggaacaagtcaaaaccatgcagcgcaactggatcggcaaatcgcgcggtatgaccgtgcgcttcgccgtttcagacgacagcaaacaaggcttggaaggcgattacgcgaaattcctgcaagtttataccacccgccccgacacgctgatgggtgcgacttatgttgccgttgccgccgagcatccgctggcagccgccgcagccgccgacaaacccgaattgcaggcatttattgccgaatgcaaagccggttcggttgccgaagccgatatggcgacgatggagaaaaaaggcgtgccgaccggccgctacgtcgtcaacccgctcaacggcgacaagctggaagtgtggattgccaactatgtattgtggggctacggcgacggcgcggtgatggcggttccggcgcacgacgaacgcgattttgagttcgccaccaaatacaatctgccgaaaaaacaagtcattgccgtcggcgacaacgcatttgacgaaaaccaatggcaagaatggtacggcgacaaagaaaacggcgtattggtcaacagcggcgacttggacggcttggattttcagacggcattcgacgccgtcgccgccaagctgcaaagccaaggcgcgggcgaaccgaaaacccaataccgcctgcgcgactggggcatttcgcgccaacgctactggggctgcccgattcccatcgtccattgcgaacaatgcggcgacgtacccgtccctgccgaccaattgccggtcgttttgcctgaaaacgtcgtacccgacggcatgggttcgccgctggcaaaaatgcccgagttttacgaaactgcctgcccatgctgcggcggcgcggcgaaacgcgaaaccgacaccatggacaccttcatggaatcgagctggtatttcttccgctacatgtcgccaaaattttcagacggcatggtcgatcctgccgccgcgaaatactggggcgcggtcgaccaatacatcggcggcatcgaacacgcgattttgcacctcttgtacgcgcgtttcttcaccaaactgatgcgcgacgaaggtctagtcaatgttgacgaaccgtttgaacgcctgctgacgcaaggcatggtcgtttgcgaaacctactaccgcgaaaacgacaaaggcggcaaagattggatcaaccccgccgatgtcgagctgacgttcgacgacaaaggccgccccatttccgccgtcctcaaagccgacgggctgcccgtcgtcatcagcggcacggaaaaaatgtccaagtccaaaaacaacggcgtcgatccgcaagaactgattaacgcctacggcgcggacaccgcccgcctgtttatgatgttcgccgcaccgcccgaacagtccctcgaatggagcgacagcggcgtcgaaggcgcacaccgcttcctgcgccgcctgtggcgtaccgtttacgaatacttgaagcaaggcgaagcggtcaaagcgttcgcaggcagccaagacggtttgtctaaagaactcaaagacctgcgccacaaactgcacgcgaccactgccaaagtcagcgacgactacggccgccgccagcagttcaacaccgccatcgccgccgtgatggaattgctcaaccaatacgacaaaaccgacaccggcggcgaacaaggacgcgccgtcgcccaagaagtattggaaaccgccgtacgcctgttgtggcccatcgtgccgcacatctgcgaaaccctgtggagcgaattgaacggcgcgaaactgtgggaagcaggctggccgacagtcgacgaagccgccttggtcaaatccgaaatcgaagtgatggttcaagtcaacggcaaactgcgcggcaaaatcactgttgccgccgacgcatccaaagccgacctcgaagccgccgcactcgccaccgaaggcgcggtgaaattcatggaaggcaaaccggcgaagaaaatcatcgtcgtaccgggcagactggtgaacatcgtcgtctaa

SEQ ID NO: 42991 - DNA, 435 bp, Neisseria meningitidis; identical to SEQ ID NO: 36184

SEQ ID NO: 42992 - DNA, 1251 bp, Neisseria meningitidis
atgtttgttccgctggcaatgcttgcaggtatgttttcctactacgaaaccttccacgaaacggaagcgttgcaggacgacctgctccgtcaggcggcattgtacgtcgcccccgattccaaacccgaaactttgcccgagggcgacggcgatacgcgtattttggtacagatgccgcagcaggaagaccctgttgtcagcctgcctgcgcatctggcggacggtctgcacacgcttcaggcggacgatgacgacgattattaccgcgtctatatccgcacgaccgagcagggacggattgccgttatgcaggaaaacgaataccgtgaagatttggcggcggatgcggcacggcaaagcgtgttgcccctgttggcggcactgccgctgatgattttgctgaccgtgtggattacgcacaaagccatgcgccccgtccgcaaattgtcgcaaagtctcgaacaacgccgaatcaatgacctgtctgctttgagtgtggacaatattcccagtgaaatcagaggtttcgtaaccgccatcaacctgcttttgaaacgtgcggatgaagacatccgccaccgtcagcggtttgtcgccgacgcggcacacgaattgcgtacgccgatgaccgcccttccccttcaggcggaacggctcaacaatatgccgctcccacccgatgcggcgcggcagcctgccgttttgcagcaaagcatacggcgtaacaaacacctgctcgaacagcttttggcattggcgcgttcgcagtcggatgaaatccctctgacgaaaacgacattcggtctgcaaagccgtttccgccaagtgttgcaggaactgatgccgctggctttggaaaaatgtcaggacatcggcgtggcggtcggaggcgatgtcgaagtgtctgccgacgaaacggaaatctatacgctgattaaaacctttgccgacaacgcggtacgttatacgccgcccgaaggcaggatagatttgggtttcacggacgaagggaaatatcttgccgtgtgggtggaagataacgggaaaggcattcccgaatccgaacgcgcccgtgtcctcgatccgttttaccgtattttgggaacggagcagcaggggacggggctgggtctgtccatcgccgacacgcttgccaaaaaatacggcggatatttggaattgtccgacagccgacgtttcggacgcggtctgctgatacgcgcgttgttggacaaggaaaccctgaaatag

SEQ ID NO: 42993 - DNA, 561 bp, Neisseria meningitidis
atgaaaaacctcatcgccttcaacaaaccctatggcgttatctgccaattttcaccgcacgaaaaacacaaaagcctcaaagactttatcaatcttcccggcttctaccccgccggacggctcgacaccgacagcgaggggctgctgctgctgaccgacgacggcaggcttcaggcacaaattaccgaccccaaattcaaacaccctaaaacctactgggcgcaactggagggcgtacccgacgaaagccgattggaaagcctaagaaaagggatagacttaggcggtttcgttacccgtccggcaagcatccgcatcttgaaacacggagaagcagattcgttatgggagcgcatcccgccgatacgcgtccgcaaaaccgttcccgatttttggattgaaattaccatttctgagggcaaaaaccgccaagtcaggcgaatgaccgccaaggcgggctatccctgcctgcgtctgatcagagtggcaagcggcaggctgaaactgtttgatttggatttaaaacccggggaatgggcatacgccccgtttaaaccataa

SEQ ID NO: 42994 - DNA, 1116 bp, Neisseria meningitidis
atgcgcttgtttaaaagcttgaaaaaccctaaaaaaacagatgccaagctccctaaaaaatcttcgggactcaataaccgcgcggcaatcggcatcgatatcgaccagcattccatcaaaatggtccaattgtcaggacgtagtttaaaccaaattcaattggaaaaatacgtcattgccaaattaccaaagaatatcattcaaggcaataaagtccaaaattacgatcaacttgttacatatttgcaacaagcctatgccaaactgggtacttcgtgcaaaaacatcatcgcgtccgtcccgcaaaatttggcaaccatcgaacaattgacctacacagacaaagatgcagaattagacctgcaggggttcgtggagtcctccatctccgaagtcagctcgatatcgctcgaagaagccaattacgactatcaggtcttgtcccaatcggccgccggcgaagctgtgttggccgtcgcatcgagaaaggatgaaatcgaacccctgattgacgcattcaacgccgccggtatgaaattatccgcgcttgatgtggacattttcggacaatacaacgcctacgcgctatggataaaccatttcgcccccgagcttgcagccgaaaaagtcgccattttcggcgtatatgccgcacagacctacgccttggtcatccaagacggaaaaatcctatacaaacaggaaacctccgtcagcgaagaacagctcaaccaactcatccagcgcacctatcaggtaacagaagaaaaagcggaagaaatcatcaactccccgcaaaaaccttccgattaccaagaaagcgtggcaaactatttcaaccagcagattacccaagaaatacaaagggtcttgcagttttattacaccacgcagaccgcagacgatatgaccgacatcaagcatatcctgctgaccggggaagcggcgcgccaggaaggcatcgcccaaaccgtcgcctcacaaaccaatgcagatgtacaatgcgtccatcccgcgcgttattttgcggacaacctcaaaacagacaaacaacaattcgaacttgatgcgccgacactgaccagggcgttcggtttggcggtacggggattataa

SEQ ID NO: 42995 - DNA, 606 bp, Neisseria meningitidis
atgaccatctatttcaaaaacggcttttacgacgacacattgggcggcatccccgaaggcgcggttgccgtccgcgccgaagaatacgccgcccttttggcaggacaggcgcagggcgggcagattgccgcagattccgacggccgccccgttttaaccccgccgcgcccgtccgattaccacgaatgggacggcaaaaaatggaaaatcagcaaagccgccgccgccgcccgtttcgccaaacaaaaaaccgccttggcattccgcctcgcggaaaaggcggacgaactcaaaaacagcctcttggcgggctatccccaagtggaaatcgacagcttttacaggcaggaaaaagaagccctcgcgcggcaggcggacaacaacgccccgaccccgatgctggcgcaaatcgccgccgcaaggggcgtggaattggacgttttgattgaaaaagttatcgaaaaatccgcccgcctggctgttgccgccggcgcgattatcggaaagcgtcagcagctcgaagacaaattgaacaccatcgaaaccgcgcccggattggacgcgctggaaaaggaaatcgaagaatggacgctaaacatcggctga

SEQ ID NO: 42996 - DNA, 1527 bp, Neisseria meningitidis
atgaatcccatgtacattacttttgcaatctatctggttgcagtccttctcatcgggcttgccgcctatttttctacgcgcaatttcgacgattatattttgggcgggcgcagcctaggcccgtttgttaccgcgatgtcggcaggcgcgtccgatatgtccggctggcttttgatgggtctgccgggcgcgatttatttgagcggtttgaatgaggcttggattgccatcggcctcttggtcggcgcgtatttcaactggcttttggtggcgggccgtctgcgcgtacataccgaatacgccaacaacgcgctgacgctgccggattatttcttccaccgctttggcgcgggcggacacttgatgaaagtggtttccgcactgattatcctgtttttcttcacgatttattgcgcctcgggcattgtggcgggcgcaaccctgttccaaagcctgtttgaaggtatgacttacaatcaggcaatgtggctgggcgcgggcgcgaccatcgcctataccttcttgggcggctttttggcggtaagctggacggatacgctgcaggcttctttgatgattttcgcgctgattttaacgcctgtgatggtctatctgggcttgggcggcgcggaacagatgtctgccgcgattcaaagtgtcgccgcaggcacgggcaaagaatacggcagcctgtttgccggtacgaccgtcatcggcatcatttccaccgccgcatggggcttgggctatttcggacagccgcacattttggcgcgctttatggcggccgaaagcgcgaaatcgctggtatccgcacgccgcatcggtatgacttggatggcgttgtgccttgcgggcgcggtagcggtcggttatttcggcattgcgtatttcggtgcaaatcccgacaaagtttcttctatgagcggcaaccacgaacgcatcttcatcgcgctttccaccctgctgttcaacccttggattgccggcattattttgagcgcgattttggcggcggtgatgtccaccctgtcctgccagcttttggtttgctccagcgcgattaccgaagacttctacaaaggctttttgcgtaaaaacgcgcaacagtcggaattggtatgggtcggccgcctgatggtcttggcgattgccgtgatttccatcctgattgcttccgatccgaacagcaaagtattgggactggtgtcttacgcgtgggcaggtttcggcgcggcattcggcccgattgtgattctgtccgtattgtggaaacgcatcactgcctacggcgcgttgtcgggtatggttgcaggtgcgttaaccgtagtcgtatgggcggaatgggtgaaaaaaccggctcaagcggcaggagaaagcggcttgttgacgatgtacgaaatcgtgccgggctttattgtttgcttgatcgttgccgtgttggtttccctgttcaacaaagaaccttcgcgcgaaacccaagaacgctttgaaaaagccgacgcagattaccgcgccacccgataa

SEQ ID NO: 42997 - DNA, 435 bp, Neisseria meningitidis
gtgccactgcctgctccctgccgttttgccaaacctgccgcctcttttttaagtatggctttgctttcctgtcagctttcccacgccgccacggcttatatccccccgaacgattttcaaccgaactgcgacatacgccgactcgggctgacccaaagtcagcacaatgagctgcgtaaaatccgcaccgccttcaaaatggcgggcgacagggcgcgtttgaaggttatgcattccgaacacagccgccgccggtctgtcgtcgaaatcatttcctcggatgtttttaatcggaacgaggcgcgcgattatgtcgaaagccgctatttgtccggtatggattttgcggtggacgaattggaaatccaacaccggttcttccatatcctcacaccgcaacagcagcaaatgtggctttcttcctgcctcaaataa

SEQ ID NO: 42998 - DNA, 579 bp, Neisseria meningitidis
atgaatattttattattagacggcggcaaggcgttcggacattctcacggcgggttaaaccgtacgcttcacaaaaaagcgaaagaagttttgaccgcgctcggacacaatgttcaagaaaccgtgattgatgccggctatgatgttgaggcagaaatcgaaaagttcgtttggatggatgctgtgatttggcagatgccgggctggtggatgcacgagccttggacagtgaaaaaatacatagacgaagtattaaccgctggacacggcaaactctaccaaagcgacggcagacacagcgtcaatccgactgagggctacggcacaggcggcttgttgcaaggcaaaaaacatatgatttcactgacttggaatgcgccgattgaagcctttacccgcgaaggcgatttctttgaaggcaaaggcgttgatgttttgtatatgcacttccacaaagccaacgagtttttgggtatgacccgcctgccgacattcttatgtaacgatgtggttaaaaatccgcaagtggaaaaatacttggcagattatcaggcacacttggaaaaagtgttcggctaa

SEQ ID NO: 42999 - DNA, 246 bp, Neisseria meningitidis
atgattaatcatgagtgtattaaccaaccgtacggacggatactgaaattttcccgcgtacaggccaaagaaatgcttacggcagacgaattgaaagaaaattttgccaaaaacggccagacgctggcgcagtgggcaagagagaacggctttaagccgcgcgatgtgtatctggtgatcggcggacagcgcaaaggcaattacggcaaggggcacgaaattgccaagaagctgggactgaaataa

SEQ ID NO: 43000 - DNA, 348 bp, Neisseria meningitidis
atggacaaagagctaaaccccagcatcggcgactataccggccgcaccgtcgatacgctgcaaaatgccgtgtatatccgcttgatgacaccgttgggcagctggtgggcggataaaacgctcggctcgctgctgcatttgttgcagcgcgaaaaagacctgcaacgggtcagcctgttggccgagcaatatgccgatgaggcactgcaaccgattgttaagagcgggcgtgccgacaagattaccgtgcgcgcagagcagccgcacgacggccgcctgatcctgcatatccggatggatacggcggcgggcgggtttgattaccgccacgaagtgcccgtgatttaa

SEQ ID NO: 43001 - DNA, 603 bp, Neisseria meningitidis
ttggtttataattttccttttaccgaccgattccgacatatgaccgatttagaaaccaaacgccttgaaacacaggcgatgcttgaaaacgccgatcttttgttcgaccaaggccaatgccgtgccgcactgcaaaaagtggcggacgagattacgcgtgatttgggcggcaaatatccgctgctgctgcccgtgatgggcggcgcggtggtgtttacggggcagttgctgccgctgttgcgttttcccttagattttgattatgttcacgtttcccgttacggcgacaagctggagggcggcgcgttcaactggaagcgtatgcccgatgcggaacaaatccggggcaggcacgtcgtcgtgctggacgatattttggacgaagggcatacgatgtccgccattcaagccaaacttttggaaatgggtgcggcaagctgccgtgcggcggtgttcgccaacaagctgattgacaaacccaagcctatccgagccgattatgtcggactggatgtgccgaaccgttatgttttcggttacggcatggatgcggcgggctgctggcgcaatctgggcgagatttacgcattgggcggaaaataa

SEQ ID NO: 43002 - DNA, 846 bp, Neisseria meningitidis
atgaatattgcggacggacggcaggcgttttccgcacctgcaaaactgaatctcgatttgaggattaccggcaggcgggaagacggttatcacaatatcgaaagcatattctgcctgatagatttgcaggataccgtatatttgaaaccgagggacgacggcaaaatcatcctgcacaatccggttgatggcatgccgcaggaagtagatttgagctaccgtgccgcatcgttgctgcaaaaatatgcgcgcaaccccgccggcgtggaaatatggctggacaaaaaaatcccgacaggggcgggtttgggcggcggaagctcggatgcggcaaccgttttgctggtgttgaaccgttggtggcagtgcggtctgacgcagcggcagctcattgattcgggcgcggctctgggggcggacgtaccgttttttattttcggcaaaaatgcgtttgcgcggggtataggcgacaggctggacgaaatggatattccgaaacagtggtatgtcatcgtcaaaccgcccgtccacgtttccactgcaaaaattttcacacacgaaagcttgacacgaaattccgcctcaagcataatgccgactttccaaaatctgcaaccgtttagaaatgatatgcaggcagttgtatttaaagaataccctgaagtttggaaagcctattccgagttgtcccgatatggatttgccttaatgacaggttccggtgcgtgtgtattcacggcgtgtcaagataggaatagcgcatacaatatataccgacaagtttcagatttgtacgaggcatatttggcagagggtctttcaaaacatcctttgttgtccgtataa

SEQ ID NO: 43003 - DNA, 1050 bp, Neisseria meningitidis; identical to SEQ ID NO: 38313

SEQ ID NO: 43004 - DNA, 807 bp, Neisseria meningitidis
atgaatatgaaaaaatggattgccgccgcccttgcctgttccgcgctcgcgctgtctgcctgcggcggtcagggcaaagataccgccgcgcctgccgccaaccccgacaaagtgtaccgcgtggcttccaacgccgagtttgccccctttgaatctttagactcgaaaggcaatgtcgaaggtttcgatgtggatttgatgaacgcgatggcgaaggcgggcaattttaaaatcgaattcaaacaccagccgtgggacagccttttccccgccttaaacaacggcgatgcggacgttgtgatgtcgggcgtaaccattaccgacgaccgcaaacagtctatggacttcagcgacccgtattttgaaatcacccaagtcgtcctcgttccgaaaggcaaaaaagtatcttcttccgaagatttgaaaaacatgaacaaagtcggcgtggtaaccggctacacgggcgatttctccgtatccaaactcttgggcaacgacaatccgaaaatcgcgcgctttgaaaacgttcccctgattatcaaagaactggaaaacggcggcttggattccgtggtcagcgacagcgcggtcatcgccaattatgtgaaaaacaatccggccaaagggatggacttcgttaccctgcccgacttcaccaccgaacactacggcatcgcggtacgcaaaggcgacgaagcaaccgtcaaaatgctgaacgatgcgttggaaaaagtacgcgaaagcggcgaatacgacaagatttacgccaaatattttgcaaaagaagacggacaggccgcaaaataa

SEQ ID NO: 43005 - DNA, 342 bp, Neisseria meningitidis
atgaagaataatgttaaaaattggacaactaaagaagtcaagcaatcattagataaatttaataatattttaattaaaaatacttttcttcttcagtatctgaaaaaagagttttcagcttcaagtgcttattgtttgtctatgctccctgaagaagaagatatatatgaaatattggttaatgggaatattattattgatttagaatttaataaacatacaaatgaaacagttgttattaatgttactgatgttgatgaatacttgaaaactttaaccaatgagagtggtagagtattttttacattagcaaaagaaatcggcaaacagaaaaacatttaa

SEQ ID NO: 43006 - DNA, 738 bp, Neisseria meningitidis
atgattattttggacaaggtttccaagcattaccaaacgcgcgacaagacccgttttgccgccgtcgagccgaccagcctcgaaatccgcgacggcgaaatcttcgggctgatgggttattcgggtgcaggcaaatccaccctgttgcgcctgattaacctgttggaacgccccgacagcggcaaggtcaacgtctgcggacaagagctgaccgcgctcgatgccgccgcattgcgtcaggctcggcagaatatcggcatggtgtttcagcagtttaatcttttgagcaaccgcaccgttgccgacaatgttgcctttcctttggaaatcgccggatggccgtctgaaaaaatcaaagcgcgcgttaaagaatgccttgaaatcgtcggcttgaccgaacgcgccggccactatcccgcccagctttccggcgggcagaaacaacgtgtcggcatcgcccgcgcactcgcgcccaaaccccaagtcatcctcgcagacgaacccacttccgccctcgaccccgccaccacgcgcagcgtcttggaatgtttggaagacatcaacaaacgcttcaacgtaaccatcgtcatcgtaacccacgaaatgagcgtcatccgccgcctgtgcgaccgcgccgccctcttggataaaggcaaagtcgtcgaaatcgtcgaagtacgcggcaaccaaatccacgcccaatccgacatcgggcgcgaactgattcgggaggactga

SEQ ID NO: 43007 - DNA, 1677 bp, Neisseria meningitidis
atgagcttcaaaaccgatgccgaaatcgcccaatcctccaccatgcgcccgattggcgaaattgccgccaagcttggtctgaatgccgacaacattgagccttacggtcattacaaggcgaaaatcaatcctgccgaagcgttcaaactgccgcaaaaacagggcaggctgattttggttaccgccatcaacccgactccggcgggcgaaggcaaaaccaccgtaaccatcggtttggcggacgcgttgcgccacatcggcaaagatgccgtgattgccctgcgcgaaccttctctggggccggtgttcggcgtgaaaggcggcgcggcaggcggcggctatgcccaagttttgccgatggaagacatcaacctgcacttcaccggagattttcacgccatcggtgcggcaaataatctgcttgccgcgatgctcgacaaccatatctaccaaggcaacgagttgaacatcgaccccaaacgcgtgctgtggcggcgcgtggtcgatatgaacgaccgccagttgcgcaacatcatcgacggcatgggtaaacccgttgacggcgtgatgcgtcctgacggtttcgatattaccgttgcttccgaagtgatggcggtattctgtcttgccaaagacatcagcgatttgaaagagcgtttgggcaacatccttgtcgcctacgccaaagacggcagccccgtttacgccaaagatttgaaagcgaatggcgcgatggcggcattgcttaaagatgcgattaagcccaacttggtgcaaaccatcgaaggcacgcccgccttcgtacacggcggcccgttcgccaacatcgcccacggctgcaactccgtaaccgcaacccgtctggcgaaacaccttgccgattacgccgtaaccgaagcaggcttcggcgcggacttgggcgcggaaaaattctgcgacatcaaatgccgccttgccggtttgaaacctgatgcggctgttgtcgtggcgactgtccgcgcgttgaaatataacggcggcgtggaacgcgccaacctcggcgaagaaaatttagacgctttggaaaaaggtttgcccaacctgctgaaacacatttccaacctgaaaaacgtattcggactgcccgtcgtcgttgcgctcaaccgcttcgtgtccgacgccgatgccgagttggcgatgattgaaaaagcctgtgccgaacacggcgttgaagtttccctgaccgaagtgtggggcaaaggtggtgcgggcggcgcggatttggcgcgcaaagtcgtcaacgccattgaaagtcaaaccaataacttcggtttcgcctacgatgtcgagttgggcatcaaagacaaaatccgtgcgattgcccaaaaagtgtacggcgcggaagatgttgatttcagcgcggaagcgtctgccgaaatcgcttcactggaaaaactgggcttggacaaaatgccgatctgcatggcgaaaacccaatactctttgagcgacaacgccaaactgttgggctgccccgaagacttccgcatcgccgtgcgcggcatcaccgtttccgcaggcgcaggtttcatcgtcgccctgtgcggcaacatgatgaaaatgcccggcctgcccaaagttccggctgccgagaaaatcgatgtggacgcagaaggcgtgattcacggcttgttctga

SEQ ID NO: 43008 - DNA, 540 bp, Neisseria meningitidis
atgtcccaagtttttaaagattttgacttgtcctccgtatggaaaactaatagttgggcagatgaaaactacaaagaagccccgtttacccctgaaattttggctgccgtagaaagtgaactgggctataaattgccgcaaagttttattgaattgatggcagtacaaaacggcggaatatttgtcaaaaactgttttccgaccacgcagagaaattcgtgggcggaaaatcatgtgcaaatttgcgaggtatcgggaatcggttttgaaaaagaagggagtttgtgcggcgcgatggggcaaaaactttggctggaagaatgggaatacccgcctatcggcgtgtattttgccaacgacccgtcaggcggtcatgccatgtttgccttagactatcgggcgtgcggcaaagacggcgagccgaaagtggtgtttgtcgaacaagaatcggattttgaaatcgtcgaacttgcccccgattttgaaacctttatccgcagcttgcggcatgaagatgagtttattgacgaagaaatataa

SEQ ID NO: 43009 - DNA, 249 bp, Neisseria meningitidis; identical to SEQ ID NO: 39195

SEQ ID NO: 43010 - DNA, 192 bp, Neisseria meningitidis; identical to SEQ ID NO: 37615

SEQ ID NO: 43011 - DNA, 309 bp, Neisseria meningitidis
atggatgtttttcccgaattgaatatccattgtttttatgatgataaaaatcagcttgaagcgatagagatatttgaaccaaataagttttttttagaagatatttcttttaattggcttggaaaaattaatgatgaaataataagctatctttataagagtggaattaatgattttgaaattgatgatttgggtattaggcttcttaatattcctgtttcaactataatcaattcaataggtaaagtagaatgttgttatttagatttttcaaatagagacacgaaattttatgtaaaacaagtgtag

SEQ ID NO: 43012 - DNA, 906 bp, Neisseria meningitidis
gtgcgggggatttcggattcggaagcaacagacgatacgggatttcggaacaatatgaacactttgaaatttaccaaaatgcacggtttgggcaacgattttatggtgattgacgcggtcagtcaggattttacccccgaggacgcgccgattgcggaatgggcggaccgcttccggggcgtgggcttcgaccagcttttggtggtcgggcgttcggaaaccgaaggcgtggatttccgttaccgtattttcaatgccgacggcagcgaggtcgggcaatgcggcaacggagcgcgttgttttgcccgttttgttgcagacaagggtttgaccgataagaaagaaatttgtgttgaaacggcaaatggcgttatttttccgaaattgtccgataacggtatggttacggtcaatatgggcaaaccgaagtttatgccgtctgaaataccgtttgtccccgaatcgggcgagggggatgatgcctgtatttacggggtgcatctcgaatccggcattcagcctgtcagctgcgtcaatatgggcaacccccatgcggtgattgtggtcgatgacgtggaatgcgcgccggtgcgcgaaaccggttcgcttatcgaaccgcacaggcagtttcccgaacgcgtcaatgtcggctttatgcaggttgtcggccgaaccgcgattcgtttgcgcgtgttcgagcgcggcgtgggcgaaacccaagcttgcggtacgggcgcgtgtgcggctgtggtggcgggtatccgtctggggctgttggatgaagggaaaacggtagaggtggttttgccgggcgggactttatatatcgaatgggcctgcggcggcgatgtgatgatgaccggccctgcggaagcggtgtttgaaggtgagttggcgtattcatga

SEQ ID NO: 43013 - DNA, 2394 bp, Neisseria meningitidis
atgaaactgaaacagattgcttccgcactgatggtcttgggcatatcgcctttggcacttgccgacttcaccatccaagacatccgcgtcgaaggcttgcagcgtaccgagccgagtaccgtattcaactacctgcccgtcaaagtcggcgacacctacaacgacacacacggcagtgccatcatcaaaagcctgtacgccaccggtttctttgacgacgtacgcgtcgaaactgcggacgggcagctcctgctgaccgttatcgaacgccccaccatcggctcgctcaacatcaccggcgcaaaaatgctgcaaaacgacgccattaagaaaaacctcgaatcgttcgggctggcgcagtcgcaatactttaatcaggcgacactcaatcaggcagtcgccggcctgaaagaagaatacctcgggcgcggcaaactcaatatccaaatcacgcccaaagtaaccaaactcgcccgcaaccgcgtcgacatcgacatcacgattgacgagggcaaatccgccaaaatcaccgacatcgaatttgaaggcaaccaagtctattccgaccgcaaactgatgcggcagatgtcgctgaccgaaggcggcatttggacatggctgacacgaagcaaccaattcaacgagcagaaatttgcccaagacatggaaaaagtaaccgacttctaccagaacaacggctacttcgatttccgcatcctcgataccgacatccaaaccaacgaagacaaaaccaagcagaccatcaaaatcaccgtccacgaaggcgaacgtttccgttggggcaaagtctccatcgaaggcgacaccaacgaagtccccaaagccgaactggaaaagctgctgaccatgaagcccggcaaatggtacgaacgccagcagatgaccgccgttttgggtgagattcagaaccgcatgggctcggcaggctacgcatacagcgaaatcagcgtacagccgctgccaaacgccgaaaccaaaaccgtcgatttcgtcctgcacatcgaaccgggccggaaaatctacgtcaacgaaatccacatcaccggcaacaacaaaacccgcgacgaagtcgtgcgccgcgaattgcgccaaatggaatccgcgccttacgacacctccaagctgcaacgctccaaagagcgcgtcgagcttttgggctacttcgacaacgtacagtttgatgccgtcccgcttgccggcacacccgacaaagtcgatttgaacatgagcctgaccgaacgttccaccggctcgctcgacttgagcgcgggctgggtacaggataccggcctggtcatgtccgcaggcgtttcccaagacaacctgttcggtacgggcaagtcggccgccctgcgcgcctcacgaagcaaaaccacgctcaacggctcgctgtcgtttaccgacccgtacttcacggcagacggggtcagcctgggctacgatgtttacggaaaagccttcgacccgcgcaaagcatcgaccagcatcaaacaatataaaaccaccacggcaggcgcaggcatccgcatgagcgtgcctgttaccgaatacgaccgcgtgaatttcggtttggtggcagaacacctgaccgtcaacacctacaacaaagcgcccaaacactatgccgactttatcaagaaatacggcaaaaccgacggcacagacggcagcttcaaaggctggctgtacaaaggtaccgtcggctgggggcgcaacaaaaccgacagcgcgttatggccgacgcgcggctacctgacgggcgtgaacgccgaaatcgccctgcccggcagcaaactgcaatactactccgccacccacaaccaaacctggttcttccccttaagcaaaaccttcacactgatgctgggcggcgaagtcggcattgcgggcggctacggcaaaaccaaagaaatccccttctttgaaaacttctacggcggcggcctgggttcggtgcgcggatacgaaagcggcacgctcggtccgaaagtgtatgacgaatacggcgaaaaaatcagctacggcggcaacaaaaaagccaacgtctccgccgagctgctcttcccgatgcccggcgcgaaagacgcgcgcaccgtccgcctgagcctgtttgccgacgcaggcagcgtgtgggacggcaaaacctacgacgacaacagcagttccgcgaccggcggcagggttcaaaacatttacggcgccggcaatacccataaatccacctttaccaacgaattgcgctattccgccggcggcgcggttacctggctctcgcctttaggcccgatgaaattcagctacgcctacccgctgaagaaaaaaccggaagacgaaatccaacgcttccaattccaactcggcacgacgttctaa

SEQ ID NO: 43014 - DNA, 996 bp, Neisseria meningitidis
atgaaaaaatccctgattgccctgactttggcagcccttcctgttgcagcaatggctgacgttaccctgtacggcaccatcaaagccggcgtagaaacttcccgctctgtagagcacaatggaggtcaggtggttagcgttgaaaccggtaccggcatcgttgatttgggttcaaaaatcggcttcaaaggccaagaagacctcggtaacggtctgaaagccatttggcaggttgagcaaaaggcatctatcgccggtactgactccggttggggcaaccgccaatccttcatcggtttgaaaggcggcttcggtaaattgcgcgtcggccgtttgaacagcgtcctgaaagacaccggcgacatcaatccttgggatagcaaaagcgactatttgggtgtaaacaaaattgccgaacccgaagcacgcctcatttccgtacgctacgattctcccgaatttgccggcctcagcggcagcgtacaatacgcgcttaacgacaatgcaggcaaatataacagcgaatcttaccacgccggcttcaactacaaaaacggcggcttcttcgtgcaatatggcggtgcctataaaagacatgtgcgggtggatgagaacgtgaatattgagaaataccagattcaccgtttggtcagcggttacgacaatgatgccctgcacgcttccgtagccgtacagcaacaagatgccaaattggttgaagacaattattcgcacaactctcaaaccgaagttgccgctaccttggcataccgcttcggcaacgtaacgccccgcgtttcttacgcccacggcttcaaaggctcgtttgatgatgcagacttaagcaacgattacgaccaagtggttgtcggtgcggaatacgacttctccaaacgcacttctgccttggtttctgccggttggttgcaagaaggcaaaggcgaaaacaaattcgtatcgactgccggcggtgtcggtctgcgccacaaattctaa

SEQ ID NO: 43015 - DNA, 660 bp, Neisseria meningitidis
  misc_feature 4, 5, 6, 7, 8: 'n' is a, c, g or t
gtgnnnnnggtcggcgtgattttggtcggctgctgcccgggcggtacggcttccaatgtgatgacctatctggcgcgcggcaatgtggctttgtcggttgccgttacgtctgtttccaccctgatttccccattgctgactcccgccatcttcctgatgcttgccggcgaaatgctggaaatccaagcggccggtatgttgatgtccatcgtcaaaatggttttgctccccattgttttgggtttgattgtccataaggttttgggcagtaaaaccgaaaagctgaccgatgcgctgccgctggtttccgttgccgccatcgtgctgattatcggcgcggttgttggggcaagcaaaggcaagattatggaaagcggcctgctgatttttgcggttgtcgtactccacaacggcatcggctacctgctcggcttctttgccgccaaatggaccggcctgccttatgatgcacaaaaaacgctggccatcgaagtcggtatgcaaaactcgggcctggccgccgcgcttgccgccgcacactttgccgctgcgccggtcgttgccgttccgggcgcattgttcagcgtgtggcacaatatctccggctcgctgctggcaacttattgggcggccaaagccggtaaacataaaaaaccctaa

SEQ ID NO: 43016 - DNA, 306 bp, Neisseria meningitidis; identical to SEQ ID NO: 38577

SEQ ID NO: 43017 - DNA, 369 bp, Neisseria meningitidis; identical to SEQ ID NO: 38525

SEQ ID NO: 43018 - DNA, 1110 bp, Neisseria meningitidis
ttgttgttttttcaaataggcaaaatgaccgtattgagagaggtacacatgtccaaaaatgcacaaaaaaccctacttgccgtgtgcagtttcgaggtgcagccaaaagacgggcgaatccaactgctgccatatggcgaatttcgcgcagtagacggtcgtccgactgatgtccctgcgtggtatctgaccgaagaaaacggtcatgatgtcgcgttgttggccaacagctcgcgcaatcagttggttgtcgattatgaacaccagacgctctacaaagagaaaaacggacaacctgcacctgccgccggttggatgcgttggctggagttcacgcctaaaggcatgtttgccgaagtggagtggacggacaaggcggctgcggcaattgccgcaaaagagtatcgctacatctctgctgtgttttcctatgacacaaagggatatgtaagcaaaatttttcacgccgcgctgacaaatttccccgcgttggacggtatggacgaggtgctggcggcagcgtcggcgcaaattttaaaaccggaaacggagcaaaaccctatgaaagagttgttacagcaactgttcgacctgcctgatgcgggcgaagaagaactgaaggcggcattgtccgcgctcgtggaagccaagccgaaagacgtggcattgtctgccgacgtgttcgcgcagctggcggaaaaagacagccgcatcgcggcattgacggcgcaaaccgccaagcctgatttgactaaatacgcgcctatctcagtggttcaagagctgcaaagcaaagtcgccgcgctgactgccaagcaggaagcagacaaaggcaacgaattgattaccgccgcgctgacttcaggcaaattgctgcctgctcagaaggagtgggcaaaaggcgtattgaaacagccgggcggcttggcatttttgaccggctttattgaaaacgcccagccggtcgctgcactggcaggctcgcaaacgggcggcaaagcacccgacgaacgcgtcgccgcactgactgcggaagaggcagccgcagcaaaaatgctgggcatgtccggcgaagaatttgtaaaaatcaaagaaagcgaaggtaagtaa

SEQ ID NO: 43019 - DNA, 1311 bp, Neisseria meningitidis
atggacacttcaaaacaaacactgttggacgggatttttaagctgaaggcaaacggtacgacggtgcgtaccgagttgatggcgggtttgacaacttttttgacgatgtgctacatcgttatcgtcaaccctctgattttgggcgagaccggcatggatatgggggcggtattcgtcgctacctgtatcgcgtctgccatcggctgttttgttatgggttttgtcggcaactatccgattgcactcgcaccggggatggggctgaatgcctatttcacctttgccgtcgttaagggtatgggcgtgccttggcaggttgcgttgggtgcggtgttcatctccggtctgatttttatcctgttcagcttttttaaagtcagggaaatgctggtcaacgcactgcctatgggtttgaaaatgtcgattgctgccggtatcggtttgtttttggcactgatttccctgaaaggcgcaggcattatcgttgccaatccggcaaccttggtcggtttgggcgatattcatcagccgtccgcgttgttggcattgttcggttttgctatggtggtcgtattgggacatttccgcgttcaaggcgcaatcatcatcaccatcttgaccattaccgtcattgccagcctgatgggtttgaatgaatttcacggcatcatcggcgaagtaccgagcattgcgccgacttttatgcagatggattttgaaggcctgtttaccgtcagcatggtcagtgtgattttcgtcttcttcttggtcgatctatttgacagtaccggaacgctggtcggcatatcccaccgtgccgggctgctggtggacggtaagctgccccgcctgaaacgcgcactgcttgcagactctaccgccattgtggcaggtgcggctttgggtacttcttccaccacgccttatgtggaaagcgcggcgggcgtatcggcaggcggacggaccggcctgacggcggttaccgtcggcgtattgatgctcgcctgcctgatgttttcacctttggcgaaaagtgttcccgcttttgccaccgcgcccgccctgctttatgtcggcacgcagatgctccgcagtgcgagggatattgattgggacgatatgacggaagccgcacctgcgttcctgaccattgttttcatgccgtttacttattcgattgcagacggcatcgctttcggcttcatcagttatgccgtggttaaacttttatgccgccgcaccaaagacgttccgcctatggtatggattgttgccgtattgtgggcactgaaattctggtatttgggctga

SEQ ID NO: 43020 - DNA, 876 bp, Neisseria meningitidis
atggcagtaggaaaagagattctcaccaaaatccgcagtgttcagaatacccaaaagatcactaaagcgatgcagatggtgtcaacctctaaaatgcggaagactcaggaacggatgcgtttggcgcgtccgtatgccgaaaaagtgcgtatggtgatgagccatcttgcgcaaaccaataccgatcatggtattccgttactggaatctcatcgggaaatcagacgtgtcggttttattttgattacgtctgataagggtttgtgtggcggtttgaacgccaacgtgctgaaaaagtttttggcacaagttcaagagtatcggaatcaaggtattgaagaggaaatcgtatgctttggcagtaaaggtctgatggcgtgtcagagcattggtctgaatgtggttgccagtgccgtaaatttgggcgataccccaaaaatggaaatgctgctcggacctttgacagaactcttccaacggtatgagaaacatgaaattgacagaatccatctggtgtattcgggttttgtcaataccatgcgtcaagaaccgagaatggaagtattgctgcctatcggtgagaacgtgattggcgattcagctcccaaatcaccgttcagctgggaataccgctacgaaccgactgcacttgcagtgttggaatatctggttcgccgctatttagagtctgtggtttatcaggcgttgagcgacaatatggcatccgaacaggcagcccgcatggttgccatgaaagctgcaacagacaatgcaggcaatgccatcaaagagttgcgtttggtatataacaaatcgcgtcaagctgcgattaccacggaattgtcagaaattgtagcaggtgcggcggctgtctga

SEQ ID NO: 43021 - DNA, 321 bp, Neisseria meningitidis
atggcaaatatccgccacagccgttatgccgcgttggagggactgtttgtcggtagtgatgatgaggcaggattcggcgaaaacggcgaaactgtccgtcacgcctttcctttggctgcagaagcatacgccgtcggcaaaacagtcggcacgcttccgatggcggcttacggcatcaaactcttgttcgtccgccgccgcaccggccggattgaaaacccggatgcctcgtttacattggaaggcggtgacgtgttggtggtcgcaggcaaaaaagaagaaattatctcttttgaaaactggagtttgcagggaatataa

SEQ ID NO: 43022 - DNA, 1893 bp, Neisseria meningitidis
atgcctatccttaccatccgtgaagtgtgcaacattaatcattggggcataggttattatgatgttgacgattccggcgaaatcatcgtccgccccaatccctcgcaacacaatcaaactgtttcactgcaaaaactgactgaagccgtgcaacaaaaacatcaggcgcgcctgcctgttttgttttgttttccgcaaatcctcgaacaccgcctccgcgacattaaccgcgcctttcagacggcacgggaagagtgcggctataagggcggttattgtttggtttaccctatcaaggtcaaccaacaccgccgcgtcatcgaatcgcttatgtcaagcggacaaccgcatggtttggaagctggttctaaagccgaactgatggcggttttggcacacgccggcaaccggcaaacattaatcgtctgcaacggctataaagaccgtgaatatatccgtttcgccttgatgggcgaaaaactggggcatcaggtttatttggtgattgagaagctgtccgaaatacaaatggtattggaagaggcggaaaaactcggcatcaagccccgtttgggtgtgcgcgccagactggcttcccaaggttcgggaaaatggcagtcttcgggtggggaaaaatcaaaattcggcttgtcggcttcccaagttttgcaactggtcgatattttgaaacaaaaaaacaggctggattgcctgcagcttttgcatttccatttgggctcgcagcttgggaacatccgtgatgttgccacaggtgtacacgaatcggctcggttttatgttgagttgcacaaactgggggtaaatatccgctgttttgatgtaggcggcgggcttggcgtggattacgaaggaaaccgcacacaatcggattgttccgttaattacagcctcaacgaatatgccgccacagtcgtatggggcatcagtcaggcttgtctcgaacacgggctgccgcatccgacaatcatcaccgagagcgggcgcggcattaccgcacatcacgccgttttggttgctaatgttataggcgttgaacgttacaaaccgcgccggctggatgcgccatcgcccgaagcaccgcgtgtgttgcacagtatgtgggaaacttggacggatatttccgcctcgcgggaaaaacgttccttacgcagctggatacacgaagggcagtttgatcttgctgatgtgcataatcagtataatgtcgggctgttgagtttggcgcaacgtgcgtgggcggagcaactgtatttaaatatctgtcatgaagtcggcgaattgtttaatgaaaaacaccggtctcaccgaaccattattgacgaattgcaagaacgttttgccgataagctgtatgtcaatttctcactcttccaatctttgcccgatgcttggggcatagatcaacttttccctgtttgtcccattaccggtttgaatgaaccgattgcgcgccgcgccgtgttgttggacattacctgcgattcagacggtacgattgaccactacatcgacggagacggcatcgccggtacgatgcctatgcctgattatcccgaagaagagccgccgcttttaggcttttttatggtgggagcatatcaggaaatactcggcaatatgcacaatcttttcggcgacactgccactgccgatgttgttgtaggggaagacggacaatttaccgtcatcgattacgatgaaggaaacaccgttgccgatatgctcgaatacgtttatcaagatccgaaagagctgatgaaacgctatcgcgaacaaatcgaacattcagaccttcctgcctcgcaggctatgtctttcttaaaagaactcgaagcggggcttaatggttatacctatttggaagacgaatag

SEQ ID NO: 43023 - DNA, 363 bp, Neisseria meningitidis
atgtctcaattagattttaatttagaattatttattaaaaattcaaattttgatgattataagatttttgatatcgtgaaagaagctattgaaacacaggatgaaataggttcaatcttacgaacacatttattttttgaaagaattttagaggcatggatatatgcaaaatgtaataaagaagattttttcaatgatacacaaattggatttcgcacaaaactaaaaattgcgcgtaatcttggcttatttagcgaagtatatgatataggggagagattaaataaaattagaaatacaattgctcaccatgtactaagggaagtaaatcaagaaaatttaactctttacatgaaagtttaa

SEQ ID NO: 43024 - DNA, 1065 bp, Neisseria meningitidis
atgttggtattaggaatcgagtcttcttgcgacgaaacaggtgttgcgctttacgatacggaacgtggattgcgggcgcactgcctgcacactcaaatggcaatgcacgccgaatacggcggggttgtgccggaattggcaagccgcgaccatatccgccgccttgttccgttgacggaaggctgtctggcgcaggcaggcgcatcgtatggcgacattgacgcggttgcctttacgcaggggcccggtttgggcggcgcgctgctggcgggttcgagctacgccaacgcgctggctttagcgttggacaagcctgttattcccgtccatcatttggaaggacatctgctgtcgccgctgttggcggaggaaaaacccgactttccttttgtcgcgctgttggtttcgggcgggcatacgcagattatggcggtcaggggcataggcgactacgcgcttttgggcgagagcgtcgatgatgcggcgggcgaggcattcgacaaaacggcgaaactgctgggcttgctgtatccgggcggtgcgaaactgtcggaacttgcggaatcgggcaggttcgaagcgtttgtttttccgcgcccgatgattcattccgacgatttgcagatgagtttttcaggtttgaaaaccgccgtattgaccgccgtcgagaaagtgcgcgcggaaaacggggcggatgacattcctgagcagacacgcaacgacatctgccgtgcgtttcaagatgcggtagtcgatgtgttggcggcgaaagtgaaaaaagccctgttgcagacagggttcagaaccgtagtggtcgccggcggggtcggtgcaaaccgcaagctccgtgaaactttcggcaacatgacggtgcaaatcccgacccccaaaggcaagccgaaacatccgtccgaaaaagtcagcgtgtttttcccgccgacggcatactgcacggacaacggtgccatgattgcctttgccggtgcgatgcacctgggcaagggcagggaggtcggtgcgttcaatgtccgtccgcgctggccgctgtcggaaatcgtcagatga

SEQ ID NO: 43025 - DNA, 306 bp, Neisseria meningitidis
atgaacatcgaacaagtccacatcgaagtcatgcacgcccggctgaccgtcaacacgccggcagaagaaaaagacacactgttgcaggcagtcggaatgctcaacggcaaagccgaagccatccgcgaaggcggacgcgtcgcggacagcgaaaaaatcgtcattatggccgcgctcaacgtcgtccacgacctgttgaaaacctccctgaacggcggcgatttggcaatcggcgattttgcgcgtaaaatagccgatatggacaacgcctgccaaaaagcactatcccgcttggcgcaggaataa

SEQ ID NO: 43026 - DNA, 336 bp, Neisseria meningitidis
ttggggggtgcgatggatattgtgcaacttgggcccgcggaattgaaagcgtggatggacgaagggcggatgttttgtttgttggacgtgcgtacggatgaagaaacggcggtttgttcgctgccaaatgcgctgcatatcccgatgaatctgattccgctgcggcagaacgagctgccggatgatgtgccgcttgtggtgtattgccaccacggtatccgcagcctgcatacggcgatgtatttggcggacgcgggttttgaaaacctgtacaaccttcagggcggcatcgatgcatgggcggccgagattgacggcaacatgatgcgttattga

SEQ ID NO: 43027 - DNA, 855 bp, Neisseria meningitidis
atgaagatcgtcctgattagcggcctgtccggttcgggcaagtccgtcgcactgcgccaaatggaagattcgggttatttctgcgtggacaatttgcctttggaaatgttgcccgcgctggtgtcgtatcatatcgaacgtgcggacgaaaccgaattggcggtcagcgtcgatgtgcgttccggcattgacatcggacaggcgcgggaacagattgcctctctgcgcggactggggcacagggttgaagttttgtttgtcgaggcggaagaaagcgtgttggtccgccggttttccgaaaccaggcgaggacatcctctgagcaatcaggatatgaccttgttggaaagcttaaagaaagaacgggaatggctgttcccgcttaaagaaatcgcctattgtatcgacacttccaagatgaatgcccaacagctccgccatgcagtccggcagtggctgaaggtcgaacgtaccgggctgctggtgattttggagtccttcgggttcaaatacggtgtgccgaacaacgcggattttatgttcgatatgcgcagcctgcccaacccgtattacgatcccgagttgaggccttacaccggtatggacaagcccgtttgggattatttggacggacagccgcttgtgcaggaaatggttgacgacatcgaaaggtttgttacgcattggttaccgcgtttggaggatgaaagcaggagctacgttaccgtcgccatcggttgcacgggaggacagcaccgttcggtctatattgtcgaaaaactcgcccgaaggttgaaagggcgttatgaattgctgatacggcacagacaggcgcaaaacctgtcagaccgctaa

SEQ ID NO: 43028 - DNA, 939 bp, Neisseria meningitidis
atgtccatccatactctgaaacgcctgccctcatcgctgctgctcggtctctgcctttccctgccgtcagcccacctttttgccgacaacgacattttagggcaatttttagaacagaacatgcttacctcctccgatccgatagaaatattcgccgaaagcacgatacaccccaccaacacccaagccattacaggcggtctgattctctcctcacagtctgccctggtcgtcaacaacaaaaccggacagatactgtatcagaaaaacgccgacaggattatgcccatcgcctccatttccaaactgatgagcgcgatggtcgttttggatgcaaacttggacatgaacgaaaccgttaccattacgcccgacgaaatcgaccgcatcaaagggaccggcagccgtcttgccataggtacggcacttacacgcaaaaaactgctgcacctgagcctgatgagcagcgaaaaccgcgccacccatgcattgggcagaacctaccccggcggcatgggcgcatttgtcgccgccatgaaccgcaaagcccaaagcctcggtatgtacggcagccgcttttacgaaccgaccggactcaacttccaaaacgtttctaccgccaaagacctgagccttatggtcaacgccgccgcccaatatccgcaaatccgcaccaactcgacttccaactacgcctcggtacagaccaaaaacgggcagcagaactacaaaaactccaatgccctggtcagagaaggcatgtggaacatcgaattgcagaaaaccggctacatacgcgaagcaggcaggtctatggttgtcaaagccaacattcaaaaccaacccgttaccatcgtattgctgaactcgcccacatccgccacacgcgtcaacgacgcccgcaaaatcgaatcgtggatgctgcagcaacgctcctga

SEQ ID NO: 43029 - DNA, 522 bp, Neisseria meningitidis
atggaatgccatgcagatgtatggcattttattttggagaaaaatatgaaaaagttttattttgtgctgctggcgttgggtttggcagcgtgtgggcaagaacaatcgcagaaagctgatgcggagcagtatttttttgccaataaatatcaatttgcagatgagaaacaggctttttattttgaacgcgccgcccgtttccgtgtattgcaacaaggccttggcggggattttgagaggtttttaaaaggagaaatacctaatcaagaaaatcttgcaaagtatcgtgaaaatattactcaagcagtcgcttattatgcggacacgaatggagatgatgacccataccgcgtctgcaaacaggctgcgcaagatgcagaaatcctgatgaagagtatggtaacaagcggtggaggcggtacaactgatttagataaggaaagttatcaaaattaccgaaaatcaatgcaagaatgccgtaaaacaataacggaagctgaagccaatttgccgaaaaaataa

SEQ ID NO: 43030 - DNA, 951 bp, Neisseria meningitidis
atgaaattacaacaattgaaatacgccttagaagtttaccagcacaacctgaacgtttccgaagcggccgaagccttgtttacttcgcaacccggcatctccaaacaaatcaaattgctggaagaagaaatcggcattcagatttttatccgcagcggcaagcgcgtggtttcggtctcgcagccgggcaaggtggttttggatattgcggaacgtattttgcgcgatgttcagaacattaaaaatatcggcagcgagtttaccggacaggacagcggttcgctgacggttgccacgacgcatactcaggcacgctatgccctacccttgattgttgccgattttgtgaaacgctatccgaaagtcaacctgaccatcaaacaggggagccctgccgccatcgcacgtatggttacctcaggcgaggcggacttggcgattgttacggaacggatagacgaccatcccgaactgggaaaacttccctgctatgactggactcatgcggttatcgtaccgaacgaccaccccttgctcgaatgcagaaaccccctccgtattgaagatttggcgaggtttccgctgattacttatgaatttgcattcaatgcgggcagcagcatcgcgcgggcattttccaaagcccgtttggaacaacccgatgtcgcattggctgcggcagatacggacgtattgaagacttatgtgcgcttgggtttgggcgtgggactgatggcgaaaatggcgtacaacccggatacggacggcgatttgcagcttgtggatgcggcacacctgttcgagccgtcgccgacgtggattgctttgcgcagcgatacttatttgcgcggatatgcctacgactttatccaagcgttcgcgccgcacctgacacgcgagaaggtggataggattctgtacacgcccatcagcgaggatttttcgatttag

SEQ ID NO: 43031 - DNA, 825 bp, Neisseria meningitidis
atgattaagaagacaatcggcggcatcataccgatttttacggcggttttcatccctgcatcagcaggcgcggcggatttgatgctggcgcaggaatacaaagggcaggatattgccggctgggcgatgagcgagaaactcgacggcgtgcgcgcctattgggacggaaagcacctgatgagccgtcagggctacgcgtttgctccgcccaaaggttttaccgctcagtttccgccttatcctttggacggcgaattgtatagcggacgtggtcagttcgagcagatttccgctaccgtgcgttctgtttcttcagactggcgcggcatccgcctgcacgttttcgatgtacccaaggcgcagggcaacctctaccaacgtttggcagtcgcaacgcagtggctgaaaacgcatccgaacgcgccgattaccatcatcccgcaaatcaaagtgcgcgaccggcagcacgcgatggactttttaaaacaaatcgaagcgcagggcggcgaaggcgtgatgctgcgtcagcccgaatcccgttacagcggcggcaggagcagccaattattgaagctgaaaagccaatacgacgacgaatgcacggtaacgcggcactatgagggcaaagggcgaaacgccggacggctgggcgcggtcggctgcaaaaaccggcacggcgaattccgcatcggcagcggtttcaaagataaagaccgcgacaacccgcccaaaatcggcacactgattacctaccgttaccgtggctttacgcggaaaggcacgccgaaatttgccacatttgtgcgcgtgcgtaccgaccgctga

SEQ ID NO: 43032 - DNA, 630 bp, Neisseria meningitidis
atgaacagacacatccgccaagaaatcttcgaacgcttccgcgccgccaacccccatccgaccaccgagctgaatttcaactcccctttcgagcttttaattgccgttctgctttcagcgcaggcgaccgatgtcggcgtaaacaaggcgacggcgaagctgtttcccgttgccgatacgccgcaggcgatgctggatttgggtttggacggcgtgatggaatacacgaaaaccatcgggctgtataaaaccaaatccaaacacattatgcaaacctgccgcatcctgctggaaaaatacaacggcgaagtgccggaagaccgcgaggctttggaatcattgccgggtgtggggcgcaaaacggcaaacgtcgtattgaacacggcgttcggccatcccgtcatggcggtcgatacgcatattttccgcgtatccaaccgaaccaaaatcgcccccgggaaagatgtgcgcgaagtcgaagacaaactgatgcgcttcattcctaaagaatttctgatggacgcgcaccactggctgattttgcacggacgctacacctgcaaggcactcaaaccgcaatgccaaacctgcatcatcaacgatttgtgcgaatatcccgccaaagcctga

SEQ ID NO: 43033 - DNA, 165 bp, Neisseria meningitidis
  misc_feature 6, 7, 8, 9, 10: 'n' is a, c, g or t
gtgtgnnnnngcgcctttgtcgtcgcgctgctgtcgctgtgggtcaatgccggcgcgttcggtatgcaggaagacgatactccgcaatcggattatgaaaggcgtttgggcttgggtgcgaagctgaaaaacaaaaatccggatacggacgaaaaacggcaataa

SEQ ID NO: 43034 - DNA, 207 bp, Neisseria meningitidis; identical to SEQ ID NO: 40222

SEQ ID NO: 43035 - DNA, 2280 bp, Neisseria meningitidis
atgaatacaccgactgatttgaaagtaaccaaacgagacggaagattagaagccattgatttggataagattcaccgtgtcgtcacttgggcggcggacggattggaaaatgtttccgtgtcgcaggtcgagttgaaatcgcacatccagttctacaacggcatccgcaccgacgacatccacgaaaccatcatcaaagccgctgccgatttaatttcggaagataccccggactaccaataccttgccgcgcgtttggcgattttccatcttcgtaaaatagcctacggcgagtacgagccgccgcacctttacgaccacgttaaaaaacttaccgatgccggaaaatacgacaggcatatccttgaggattacagccgcgaagaatttgacgaactgaacgcctatatcgaccacgaacgcgatatgtccttttcctatgccgctgtcaaacagctcgaaggcaaatatctggtacagaaccgcgttacccgccaaatttacgaaacgccgcagtttttatatgttttggtggcgatgtgccttttcagcaaatacccgaaagaggcgcgcttgggttacgtcaaacggttttacgatgccgtttctacatttaaagtatcgctgccgactccgattatgagcggcgtgcgtacgcctacgcgccagttctcaagctgtgtgctgattgaatgcgacgatagtttggattccatcaatgccactaccagcgcgattgtgaaatacgtttcccagcgtgcgggcatcggcatcaatgccggacgtatccgcggtttggacagcgaaatccggggcggcgaagcgcggcataccggctgcattcccttctttaaaatgtttcaggcggcggtcaaatcctgttcgcaaggcggcgtgcgcggcggcgcggcaaccttgttctaccccttgtggcatatcgaagccgaaagcctgctggtgttgaaaaacaaccgcggtgtggaagacaaccgtatccgtcagcttgattacggcgtgcaaatcaaccgcctgctgtacacccgcctgattaagggcggcaacattacgctgttttcgcccaacgaggttccgggattgtacgaagcgttttttgccgaccaagacgaatttgagcggctctatacgaaatacgagcaagaccctgatatccgcaagcgcatcattccggctgccgacctgttttccacgctgatgcaggagcgtgccggaaccgggcgcatctacattcaaaacgtcgatcactgcaatacgcacagcccgttcgatccgcgcgtcgcgcctgttcatcagtccaacttgtgtatggaaatcgccctgccgaccaaaccgctggacaatatcaacgatccgaacggcgaaatcgccctgtgtacactgtctgcctttaacttgggcgcattaaacagcttggacgaattggaagggcttgccgacttgaccgttcgtgcgctcgatgcacttttagattatcagggatatccggtagaagccgcgcgtacctctactatgggccgccgttcgctcggcatcggcgtgattaactatgcttattatctggcgaaaaacggtgtccgctacagcgacggttccgcgctcggtctgacccaccgtacctttgaagccatacagtattacctgctcaaagcatcggcaaaccttgccaaagaatacggtgcgtgcacgctctttaaccaaaccgtttattcgcaaggcaaactgcccatcgacacttacaaaaaagatttggatgccgtctgcggcgagcctttgcattacgactgggaaagcctgcgtgccgaaatcgtcaaatacggcctgcgcaactctactctgaccgcgctcatgccgtctgaaaccagctctcaaatcgccaacgccaccaacggcatcgagccgccgcgcggattggtaacggtcaaagcatcgaaagacggcattttgaaacaagtcgtgccggagtttgaaaccctgaaaaatgcctatgaaaccctgtggcagcttcccggcaacgaaggctacctgaaacttgtcggcgtgatgcaaaaattcgtcgatcaatcgatttccgccaataccgcctacgacccgggcaaattcgaaggcggcaaagtttctatgaaacaaatgctcaaagacctgctgaccgcctacaaatacggcgtcaaaaccctgtactaccataacacccgcgacggtgcggacgatacgcagaccgatattcaggatgacggctgcgcgggcggggcttgtaagatttga

SEQ ID NO: 43036 - DNA, 870 bp, Neisseria meningitidis
atgtccgcaaacgaatacgcacaaatcggctggataggcttagggcaaatgggtctgcctatggtaacgcggctcttggacggcggcatcgaagtcggcgtatacaaccgctcgcccgacaaaactgcccccatctccgccaaaggcgcaaaagtttacggcaacaccgccgaactcgtccgcgactatcccgtcattttcctgatggtttccgactatgccgccgtgtgcgacatcctgaacggagtccgcgacggattggccggcaaaatcatcgtcaacatgagcaccatctccccgaccgaaaacctcgccgtcaaagcacttgtcgaagccgcaggcggacagtttgccgaagcacccgtttccggatcggtcgggcccgccaccaacggcacgctgctgattctgttcggcggcagcgaagccgttttaaacccgctgcaaaaaatattttccctcgtcggcaaaaaaaccttccatttcggcgatgtcggcaaaggttcgggcgcgaaactcgtcttgaactcgctcttgggcattttcggcgaagcgtacagcgaagcgatgctgatggcgcggcagttcggcatcgataccgacaccatcgtcgaagccatcggcggctcggcaatggactcgcccatgttccaaaccaaaaaatccctgtgggcaaaccgcgaattcccgcccgccttcgccctcaaacacgcctccaaagacctcaacctcgccgtcaaagagcttgaacaggcaggcaacaccctgcccgccgtcgaaaccgttgctgccagctaccgcaaagcagtcgaagccggctacggcgaacaggacgtttccggcgtttacctgaaactggcagaacactga

SEQ ID NO: 43037 - DNA, 813 bp, Neisseria meningitidis
gtgccgtctgaaaccgtttcagacggcacggacaaaccacctccactcaatcctgccgtgttagcgtgtataatcaggcattctatccgaaattcacaacaggtcagcaatatgtctttgaaaacagtagccgttatcggcgcaatggaacaagaaatcgagcttttgcgcgagatgatggaaaatgtcaaagccgtctctttcggcagattttccgcctatgaaggcgaattggcgggaaaacgcatggtgcttgcattgagcggcatcggcaaggtcaacgcggcggttgcaacggcttggattatccgtgaattcgcagcggactgcgtcatcaacaccggcagcgcgggcggtttgggcaagggtttgaaagtcggcgacgtagtcatcggcacggaaaccgcacaccacgatgtcgacgtaaccgcattcggctatgcctggggacaagtgccgcaactgccggcaaggtttgcttcagacggcattttgattgaggcggcaaaacgggcggcgcggacgtttgaaggcgcggcggtagaacaagggctgattgtcagcggcgaccgctttgtccacagcagcgaaggcgtggcggaaatccgcaagcacttccccgaagtcaaagcagtggaaatggaagcggcggcaatcgcccaaacctgtcatcagttggaaacgcctttcgtcatcatccgcgcggtttccgattcggcagatgaaaaagcagacatcagctttgacgagttcttgaaaacggcggcggcaaattccgcaaaaatggtggcagaaatcgtcaaatctttataa

SEQ ID NO: 43038 - DNA, 591 bp, Neisseria meningitidis
atgaactggttaaatagaggtattcaggaaaaaatcttacgagttttaagtgataattacccgaactgcctaaaagcaaccaaggtgtataactctcttttccctagtagttctttacctattacttctaacatccctgttgataaacaaggattgggcttggctttgactcttggttgtgaaattcaaagtcaacacctagcaactttacaatcagatgaattccaatattttttaaaaaatatttattacttagaagaatctggtttaattgaaattacttcgatagattcacttcataaaaattttgactgcaaaattaatcataagggcatagacttccttaccgatgatggcggcctatccgccattcttggtgttgtcacagtcaaactacacagcgacactattcaggctttaattgcggcaaaaatagaccaagcagagatttctgattcagaaaaaagctggttgaaaaaagaattagggaaaatcaaggacactgcattaagtacgcttacggaaaatgcaattaatgctatccctgccgccaccctcattactcttttaaaaaaatttgttggcctctaa

SEQ ID NO: 43039 - DNA, 465 bp, Neisseria meningitidis; identical to SEQ ID NO: 36919

SEQ ID NO: 43040 - DNA, 1908 bp, Neisseria meningitidis
atgccgctttccttcctttacacaccgcaccgacaggcagaatttatggctcttttgcagatttcagaaccgggtatgtccgccgccccgcaccggcaccgtttggcggcaggcatcgatttgggtacgaccaacagcttggtcgccaccgtccgcagcggcagtgccgcctgcctgcccgatgccgaagggcgcgttaccctgccttccgtcgtccgctatctggaaaacggcggcattgaagtcggcaaaaccgccctgtccgcccaaaaaaccgacccgctgaacaccgtcagctccgccaaacgccttatcgggcggacgcttgccgatctgcatcaaaatacgcactacctgccttaccgtttcggcgacaatcaacgcgttatcgaactgcatacgcggcagggggtgaaaacgcctgtcgaagtgtcggcggaaatcctcaaaacccttaaatcgcgcgccgaagaaaccttgggcggcgatttggtcggcgtggtgattaccgtccccgcctatttcgacgatgcccaacgccaggccaccaaagatgccgcgcgtctggcgggtttgaacgtattgcgcctgctcaacgaacccaccgccgccgcaatcgcctacgggctggacaacgcctcggaaggcacgtttgtcgtgtacgacttagggggcggcacattcgacgtatccgtattgcaactgaccaaaggactgtttgaagtcaaagccaccggcggcaacagcgcgttgggcggcgacgatttcgaccaccgcctgttctgccgcctgctcgaacaaaacggactctcccaactcaacgaacaagacagccaactcctgctctcgctcgtccgcgccgccaaagaacaattaaccacgcaaaccgaagcgcgcattcaggcgacgctttcagacggcatggcaatcgacacaagcatcagtcgcgccgagttccacaacctgacgcagcatttggtgatgaaaacgctcgaaccggtcacacaggcgttgaaagatgccggtgtcggtaaaaacgaagtcaaaggcgtgattatggtcggcggttcgacccgtatgctgcacgtccaacaggcagtcgccaccttcttcggacaaaccccgctgaacaacctcaaccccgacgaagtcgtcgcgctcggcgccgccatacaggcaaacgtcctcgcaggcaacaaaaccgacggcgaatggctgctgctggacgttacgcccttgtcgctcggtttggaaacctacggcggcttggcggaaaaaatcatcccgcgcaattccaccatccccaccgcgcgcgcgcaggactttaccaccttcaaagacggtcagaccgcgatgacgatacacgtcgtacaaggcgaacgcgaactggttgccgactgccgcagccttgccaaattcaccctgcgcggcattccgcctatggcggcgggtgcggcgcgtatccgcgtaaccttccaaatcgatgcggatgggctgctgtccgtttccgcccaagaacaaagcaccggcgtacaggcgcaaatcgaagtcaaaccctcctacggcttggacgacgacaccatcacccaaatgctcaaagacagcatgagcaatgccgccgaagatatggcggcacgcgcccgtgccgaagccgtagtcgaagccgaaagcctgaccgatgccgtcaacgccgccctcgagttggacagcgatttgctggatgccgaagaattgcaacagattcggcaaggcatcgccgatttgcaaggccgtctgaaagacggaaaagccgaagacatccgtgccgccgccgccaaactcggcagcatcaccgacaatttcgccgccaaacgcatgaaccgcaacatccaacgcgcgctgacaggccagagtgtcgataatatttga

SEQ ID NO: 43041 - DNA, 156 bp, Neisseria meningitidis
  misc_feature 137, 138, 139, 140, 141: 'n' is a, c, g or t
atgtctgtcgggcaggtaagggagatttttgagcgtttcggcaaatataatttggttcaaacggaataccggcgttttaaggcagataagacagaaaaccgtaatcataaggcaaattcgatattcgaatatctgcnnnnncacacacttaattaa

SEQ ID NO: 43042 - DNA, 2082 bp, Neisseria meningitidis
atgaaatcactcaaaaccttcctcatttggggcatagtggtactggtcggcttagcatcctttaccactctggccctcagccgaggcgaacaggtcagcgcggtatggatggtcaccgccgccatatccgtttactgcatcgcctaccgtttttacagcctctacatcgccaaccgcgtaatgcggctcgatcctgaccgcctgactccggcagaacgccacaacgacggcttggactacgttccgacgcacaaaggcgtattgttcggacaccactttgccgcaattgccggcgcgggccctttggttggtccggttttggcggcgcaaatgggttatctgcccggtactttgtggattatcttcggcgtggtatttgccggcgcggtacaggatatgatggtcttgttcgtctctatgcgccgcgacggtaagtctttgggcgatattgtgaaacaggaactcggcactgtccccggcgtgattgcctccatcggtattttgatgattatggtcatcattatggcggtgttggcgttgattgtcgtaaaagcattggttcacagcccttggggtacgttcaccattgcagcaactatgccgattgcgctgtttatgggtatttacacgcgttatatccgtccgggcaaaatcggcgagatttccatcgtcggctttattttgctgatgctggcggtaatttacggcgaagatgtggctaaaagttccatcgggcattggttcgaccttgacggcatccagctcacttgggcgattatgatttacggctttgtcgcctccgtattgcccgtatggttgctgctcactccgcgcgactatctctccaccttcctgaaaatcggtacgattgcggccttggctttgggtatcgtcatcgtcaatcccgctttgcaaatgcctgccgtaacccactttatcgacggttcgggtccggtattctcaggcgcattgttcccattcttgttcattaccatcgcctgcggtgcggtttcgggcttccacgcgctgatttcttccggcactacgccgaaaatgctggaaaacgaaacccacgtccgcatgatcggttacggcggtatgttgatggaaagtttcgtagccattatggcacttgccgctgccgcatcgcttgatcccggcgtgtacttcgccatgaacagcccagccgccctgatcggtacggatgccaataccgccgccgaagtgattaccaccaagctgcaattccctgtcgatgccgcaaccctgttgcacactgctaaagaagtcggcgaaaacaccatcctttcccgtgccggcggtgcgcccaccctcgcagtcggtatggcgcacattatgagccgcctgattccgggcgaggcgatgatggcgttctggtatcacttcgccctgttgtttgaagccttgttcatcctgaccgccgtcgatgccggtacgcgcgtcgcacgttttatgattcaagacttgggcagcatcttctacaaacctttcggcaacaccgactccatccccgccaacctgattgcgaccttcttcgccgtggcattgtggggctacttcctctacacgggcgtgaccgacccgttgggcggcatcaactcgctctggcctttgttcggcatcgccaaccaaatgctggcaggcgtagccttgattatgtgcgccgtggtgctgattaagatgaaacgcgaccgttatgtctgggtggtactcgttcccgccgtcggcgtactgttcgtaacctgctacgccggcctgcaaaaactgttccacagcgacccgcgcatcagcttccttgcccacgccggcaaatacagcgacgcattggctaaaaacgaaatccttgcgcctgccaaagacatcggcgaaatggcgcaaatcatcttcaacgacaagattaatgccggtctgaccatcctcttcttgtcggttgtcgtgattgtcgccgcgtacggtttgcgtaccgccctcaaagcacgcaaagtcggctggccgaccgccaaagaaatcccggcggtgtaccgcgacggcaaacagccggaggcacaaagtgaagcataa

SEQ ID NO: 43043 - DNA, 765 bp, Neisseria meningitidis
atgccgaccgaagatattgaagagatatttatgagtgcaaacgtcagccgccttgttgttcaaaacctgcaaaaaagtttcaaaaaacgccaagtcgttaaaagcttctccctcgaaatcgaaagcggcgaagtcatcggactgctcgggcccaacggtgcgggtaaaaccaccagcttctacatgattgtcggactcatcgccgccgacgcaggcagcgtaaccctagacggacaagaattgcgccacctgcccatacacgaacgcgcccgcctcggtgtcggctacctgccgcaggaagcctcgatattccgcaaaatgaccgtcgaacaaaacatccgcgccatcttggaaatcagaaccaaagataaaaatcaaatcgacagggaaatcgaaaaactgctcgccgacctcaatatcggacacttacgccgcagccccgcgccgtcgctgtccggcggcgaacggcggcgcgtcgaaatcgcccgcgtactcgccatgaaaccgcattttattttgttggacgaaccttttgccggcgtcgatccgattgccgtcatcgacatccagaaaatcatcggtttcctcaaatcgcgcggtatcggcgtactgattaccgaccacaacgtacgcgaaaccctcagcatctgcgatcgggcctacattatttcagacggcacggtgttggcatcgggaaaacctgatgatttggtcggaaacgaacaggttcgttctgtttatctgggtaagaacttcaaatattga

SEQ ID NO: 43044 - DNA, 240 bp, Neisseria meningitidis
ttggcaaacggtaaaaatggaacactctatatcggtgttaccatgaatttgccggaaagggtttggcagcacaaaaaccatgtcaatattgatggctttactgcccgatatgatgtgcatgatttagtttggtatcagttttttgagaatatgcctgaagcagttgccaaagaaaaaacgatgaaaaaatggcgacgtgaatggaagattaaactgattgaagaacaaaatactgaatga

SEQ ID NO: 43045 - DNA, 1305 bp, Neisseria meningitidis
atggctatggctaaaaatgttgtagtaatcggcgcacagtggggcgacgagggtaaaggtaaaatcgttgactggctggcggaagaagccggcggcgtggtgcgcttccaaggcggccacaatgcgggccataccttggttgtcggcggcaaaaaaaccattttgcgcctgattccgagcggcatcctgcatgaaagtttggactgcttcatcggttcgggcgttgtcgtctcccccgaagccctgttgggcgaaatcgacgagttgaacgcggcaggcgtgaaaaacgtcgaaggccgtctgaaaatcgcgccgacctgcccgctgatcctgccttaccacatcgcgctcgaccaagcccgcgaagcatcgcgcggcaaaggcaaaatcggcacgaccggccgcggcatcggccctgcctacgaagacaaagtggcacgccgcgccattcgcgccgccgatttgctgcatcctgaaaaactgcgtgaaaaactggatgccgtccttgcctattacaatgtccaactgcaacatctgcacaatgccgagccggttaaagcggaagacgtgatggcggttatcgaaaaagtcgcgccgcgcattgcgccgatgattaccgacgtgtcccgcgtgttgaacgagaaaaacaaaaacggcgaaaaactgctgtttgaaggcgcgcaaggtgcgttgttggacatcgactacggcacttatcccttcgttacctcgtccaactgtctggcgggcgcagcttcggcaggcgcgggcgtaggtcctcaaatgctggattatgttttgggcatcgtcaaagcctataccacgcgcgtcggttcgggcccgttcccgaccgaattgttcgacgaagtaggcgtaggtttggcagaacgcggacacgaattcggttcggtaaccggacgcgcacgccgctgcggctggtttgatgccgccgccctgaaacgctccatccaaatcaacggcatttccggtatgtgtattactaaactcgatgtaatggacggcgttgaaaccatcaatatctgcgtcggctatgaattgcccgacggcggcaaaaccgacatcctgccttgcggttccgatgcggtggaaacctgcaagccgatttacgaaaccatgcccggctggcgcgaatccactttcggcgtgaaggactacggcgcattgcccgaaaacgccaaagcatatttgaaacggattgaagaagtctgcggcgcgccggtcgccatcgtctccaccggccccgaccgagaagaaacgattgtgctgcatcatccgttcgcataa

SEQ ID NO: 43046 - DNA, 303 bp, Neisseria meningitidis
ttgtccgccgtttttattgcaccttacctgacggcatttcacgaacaagaaaaaacattcgaatatgcggaattgaccgttaccgccctcaaccgcagcggacgggcaatcaaactggatgcagacgggcagcattaccggctttcctgctatgggttcgacagtttgtgcacaggcggcaatatcggcagaaccatcagggcggagcaggttagagccgttttaagcgaaaccgtcggcaaaggttttttaaacggcgttctgttggaataccgcaacagtggcagtgtctataagcaataa

SEQ ID NO: 43047 - DNA, 267 bp, Neisseria meningitidis
atggactttgaatttggtttcagaaccctgtggccgattgcgacggcggcattttggttttgggtcaacggcatttcaggccgcctgaaagaggcggacaagcgtatcgacgaccttaaagaggagttgcacgcggtcaagctctcttatcacaccaaggcggacgccaaggcagacagcactaatattgcggcggccttggagcgaattgaaaacaagttagaaaaagtaaacgaaaaactggacaggaaagcagacaaatcatga

SEQ ID NO: 43048 - DNA, 2121 bp, Neisseria meningitidis
atgttcgacaaacacgttaagaccttccaatacggtaatcagaccgttactttggaaaccggcgaaattgcccgccaagccgccgctgccgttaaagtctctatgggcgacaccgttgttttggttgccgttaccaccaacaaagaagtgaaagaaggtcaagacttcttccccctgaccgtcgattatttggaacgcacttacgccgcaggcaaaattcccggcggtttcttcaaacgcgaaggcaaacaaagcgaaaaagaaatcctgaccagccgtctgatcgaccgtccgattcgtccgctgttccctgaaggtttctaccacgacatccaaatcgtagcgatggtcgtgtccgtcgatcctgaaatcgattctgatattcctgcaatgttgggtgcatctgccgcgctggtgttgagcggcgtaccgtttgccggcccgatcggcgcggcacgcgtcggttatgtaaacggcgtgtacgttttgaatccgactaaagccgaattggcgaaatcgcaattggacttggtggtcgccggtacttcaaaagccgtgttgatggtggaatccgaagccaaaatcctgcccgaagacgtgatgctgggcgcggtggtttacggccacgatcaaatgcaggttgccatcaatgcaatcaatgaatttgccgacgaagtcaatccggaactttgggattggaaagcacctgaaaccaatgaggaactggttgccaaagtccgcgggattgccggcgaaaccattaaagaagcgttcaaaatccgtcaaaaacaagcgcgttctgccaaattggacgaagcttggagtgcggtaaaagaagccttgattaccgaagaaaccgacactttggcagccaacgaaatcaaaggcattttcaaacacttggaagccgatgtcgtccgcagccaaattttggatggccaaccgcgcatcgacggccgcgacacccgcaccgtccgtccgctgaacatccaaaccagcgtattgccgcgcacgcacggttctgcattgtttacccgtggcgaaacccaagctttggccgttgcaactttgggtacttcgcgcgacgagcaaatcatcgacgcgctgtccggcgaatacaccgaccgctttatgctgcactacaactttccgccgtactctaccggcgaagtgggccgcatgggcgcaccgaaacgccgtgaaatcggtcacggccgtttggctaaacgtgcattgttggccgtattgccgaaacctgaagatttcagctacaccatgcgcgtggtctccgaaattaccgaatccaacggctcttcctctatggcttccgtctgcggcggctgcctgagcctgctgtctgccggcgtgcctttgaaagcacacgttgccggtatcgcgatgggtctgattctggaaggcaacaaatttgccgtcctgaccgacattttgggcgacgaagaccacttgggcgatatggactttaaagtggccggtacgaccgaaggcgttaccgcgctgcaaatggacatcaaaatccaaggcattaccaaagaaattatgcaaatcgctttggcacaggccaaagaagcgcgtctgcacatcttggatcagatgaaagccgccgttgcgggcccgcaagagctgtccgcacacgcgccacgcttgttcacgatgaaaatcaaccaagacaaaatccgcgaagttatcggtaagggcggtgaaaccatccgttcgattaccgctgaaaccggtacggaaatcaatattgccgaagacggtacgattaccattgccgcaaccactcaagaagccggcgatgcggcgaaaaaacgcatcgagcagattactgccgaagtggaagtgggcaaagtgtacgaaggcactgtggtgaaaatcctcgataacaatgtcggcgcgattgtcagcgtgatgccgggcaaagacggtttggtacacatcagccaaatcgcccacgagcgcgtacgcaatgtcggcgactacctgcaagtcggtcaggtggtgaacgtgaaagcattggaagtggacgacagaggccgtgtccgtctgtccatcaaagccctgctggacgcgcctgcccgtgaggaaaatgccgccgagtaa

SEQ ID NO: 43049 - DNA, 288 bp, Neisseria meningitidis
atggatgatttgattgcagcttttttaggctatttatcaggtaaatatagagaaggaaaaataagcaggttaggaatatccctaacggcaggaagcattttctttgcagtattctttattcatgaactgataatttttattgttgatggaaataaggaaaatctttggaattttattactgagatgatgaaagatttatttttattttcatgttctgtttgtttattattctacttcttattatttattgcggaaactattgggaaaacaatcaataaaattaaataa

SEQ ID NO: 43050 - DNA, 615 bp, Neisseria meningitidis
atgtcttttgataactatcttgtccctaccgttatcgagcagagcggtcgcggtgagcgtgcattcgatatctattcccggcttttgaaagagcgcatcgtattcttggtcggaccggtaaccgacgagtccgccaatctggtggttgcccaactgttgtttttggaaagtgagaatccggataaggatattttcttctatattaactcgccgggcggttcggtaacggccggtatgtcgatttacgacaccatgaatttcatcaagcccgatgtatcgactttgtgcttggggcaggcggcaagtatgggcgcgttcttattgtcggcaggcgagaaaggcaaacgttttgccctacccaacagccggattatgattcaccagcctttaatcagcggcggtctgggcggtcaggcatccgacattgaaattcacgcacgcgaacttttaaaaatcaaagaaaaactcaaccgcctgatggcgaaacattgcgaccgcgatttggcagatttggaacgcgacaccgaccgtgataatttcatgtctgccgaagaagccaaagaatatggtttgattgaccagattttggaaaaccgcgcttctttgcggctttaa

SEQ ID NO: 43051 - DNA, 573 bp, Neisseria meningitidis
atgacttatgaaattcaagcctctgttcgtgaagcacaaggcactggtgcgagccgccgcctgcgtcgcgaaggccaaatccccggcattctgtacggtgaaggtcaagagcctgttgcaatcgctgtggatcacaaaaccgtattctacgcattggaaaaagaatctttccatactgcgttgattaagttgtctctgaacggtgaaaccaaagacgttatcgtccgtgatttccaaatgcacccgttccgccgcgaagttcaacacatcgacttccaagctgtgaaagccgatcaacttgtacgcatccgtgttcccctgcacatcgttaacgctgaaaattcccaagcggtcaaactgcaaggcggccgcgtatctctgttaaacacttctgttgaagtagttgctttgcctgccaacatccctgctttcttggatttggattgtgctgaagtggttgccggcgacattctgcacttgtcagacatcaaactgcctgaaggtgtagaaagcgtttccctgaaacgtaacgaaaatctggctgttgctaccgttaccggtaagaaacgctaa

SEQ ID NO: 43052 - DNA, 255 bp, Neisseria meningitidis; identical to SEQ ID NO: 39349

SEQ ID NO: 43053 - DNA, 954 bp, Neisseria meningitidis
atgaatcataaaaagatcgttgttttggatgcggatactttgcccggccgggtttttcattttgattttccgcacgagcttgcggtttacggtacgacaggtgcggatgaaacggcagaacgggtgcgcgatgcacatattgtcattactaacaaagtgatgatttctgccgatattattgcggctaatccgcagttggagctgattgccgtcagtgcgaccggcgtgaacaatgtcgatattggggcggcgaaggcggccggtgttgcggtatgcaatgtccgcgcatacggaaacgaatcggttgcggaacacgcctttatgctgatgattgcgttaatgcggaatttgcctgcctatcagcgtgatgttgcggcaggattgtgggaaaagtcgccgtttttctgccattacggcgcgccgattcgggatttgaacggcaaaacgctggcggttttcggacgcggcaatatcggacggacgcttgccggatacgcgcaggcattcggtatgggggtggtgtttgccgaacacaaacacgcgtccgctgtgcgtgaaggctatgtttcctttgaagatgcggtacgggctgctgatgtgttgtcgctgcactgtccgctaaacgcccaaactgaaaatatgataggcgaaaacgaattgcggcagatgaagcctggcgcggttttaatcaattgtgggcgcggcgggctggtggatgaaaacgcgctgcttgccgcactcaaatacgggcagatcggtggggcaggtgtcgatgttttgacgaatgagccgcccaaaaacggcaatcccttgctgaatgcacgattacccaatctgattgttacgccgcataccgcgtgggcaagtcgtgaggctttggacaggctgtttgatatattgttggcgaacattcacgcctttgtgaaaggagaggcgcaaaaccgcgtggtttga

SEQ ID NO: 43054 - DNA, 717 bp, Neisseria meningitidis
ttggtcaaatgctgtctgaaaataatttcagacggcatttttatttggggagaaagtgaagtggcttcagtatttttagaaggagaagcagtcgaggtcggtaatattttctgtatcggcaggaactatgccgcccatatcgaagagttaaaaaacgaaataccttccgaacctgtggtgtttatgaagccgtcaggcagcattttgaatagcggcggtacaatcttactgcccgagttcagtagggatgtgcagtttgagtgcgaactcgtgctgctggtcggtaaggatgcggacggtatgggggagggtgcggatattttggaatgtgtcgcaggatatggtgtagggctggatcttacggcaagggatatccaatgccgtctgaaggcgcaggggctgccctggctgaaggcgaaagggtttaggcattccgcgtgcgtgtcggattttgcggcggcagacagaatcggcaatcccgagaaggtgttgttttcattaaaacaaaacggcgtattgaaacagcgcggggataccggtttgatgatttacccgattcgggaaattttacacaaactggcggcggattacggtttggggaaaggggatttggtgtttaccggaacgccctccggcgtgggcgcaatcggtgcgggggacaatttggcattggagctggacggcttggtgcgcgcctctttcacggtagggtgttaa

SEQ ID NO: 43055 - DNA, 459 bp, Neisseria meningitidis
atgaaaacccaaatcagccttgctgctgccgccatcacactgctcctttccgcctgcggaggcagcggaataccttcccaacccaaaggcgaaatttccgaaaaccgcaccgccgcgttcaaatctatgatgcccgacttctcgcgtatgggcaaaatggtcaaaggcgaagagccttacgatgtcgaaaaattcaaacaggcggcggcggcgtttgccgaaagcagcaagaaaccgttcacactttttgagtccgatccgcaaggcaacggccgcgcactgcccgccgtttggtcggatggtgcaaaatttgaagccgaaaaaacaaaattcgccgccgccgtcgaaaaactcaacgccgccgcccaaaccggcaaactggacgaaatcaaagccgcctacggcgaaaccggcgcaagctgcaaatcctgccacgacagtttccgcgcgcccgaataa

SEQ ID NO: 43056 - DNA, 345 bp, Neisseria meningitidis; identical to SEQ ID NO: 36743

SEQ ID NO: 43057 - DNA, 312 bp, Neisseria meningitidis
ttggaacataatttcaaaggcatacaaatcgtctgcttaggacatcggggcgacggcagcctgcactacaatactttcctgcccgaaatcctcagcaatgaagtctatcgttacaaagacaacatcaacagcacagtctatcgcaacgtccttgcctgcaacggcacgattgccgccaaacacggcataggtatcatcaaaaaacagtggctggacaaagtacgcacgcctgccgaaatcaccctgatgaaaagcatcaaacaacaccttgatccatataacattatgaatccgggcgaactgcttccgtaa

SEQ ID NO: 43058 - DNA, 963 bp, Neisseria meningitidis
atgcagtatgcaaaaatttccggcacaggcagctatcttcccgccaaccgcgtcagcaatgacgaccttgcccaaaaggtagatacctctgacgagtggattaccgcgcgcacgggcatcaaattccgccatattgcagccgaaaacgaaaaaaccagcgatcttgccgccgaagcggcgcaccgcgcgctggatgcagccggattagacagcggcgaaatcgatttgattatcgtggcaacggcaacgccggatatgcagtttccgtctactgcgaccatcgtgcaacaaaaattgggcatcaccaacggctgccccgcgtttgacgtacaggcggtgtgcgccggctttatgtacgcgctgaccacggcaaacgcctacattaaaagcggtatggcgaaaaacgcgctggtcatcggcgcggaaaccttcagccgcattgtagactggaacgaccgcacaacctgcgtattgttcggcgacggcgcgggcgcggtggttttaagcgcgtcggacacgccgggcatcatccacagcaaactcaaggccgacggcaattatctgaaactcttaaacgtccccgggcaaatcgcctgcggcaaagtttccggttcgccgtacatttcgatggacggtcccggcgtgttcaagtttgccgtcaaaatgctgtccaaaatcgccgatgacgttatcgaagaagcaggttacaccgccgctcaaatcgactggattgttccccatcaggcaaaccgccgcattatcgaatcgaccgcgaaacatttaggtttgagtatggacaaagtcgtcctgaccgtccaagaccacggcaacacatccgccgcatcgattccgctggctttggatacgggcatccgcagcggacaaatcaaacgcggtcaaaacctgctgctcgaaggcatcggcggcggtttcgcgtggggcgcggtgctgttgcaatattga

SEQ ID NO: 43059 - DNA, 678 bp, Neisseria meningitidis
atgagcatcaagcaatggccggaaggcgaaagacctagggaaaagctgttggaacgcggggcggcggctttgagtgatgccgaacttttggcaatcctgctgcgcgtcggcacgcgcggaatgagtgcggtcgatttggcgcgttatttgctgcaggagttcggcagtttggggaggctgatgagcgcggaggtcggcaaactgtcggcatacaaagggatggggacggcaagtttcacacagtttgccgtagtcagggaaatcgggcggcggatattggcggaagaattgcaggagagcatcgtcctgtccgatccggataccgttgccgattatttacgctttcatttggggcaggaaaaagtcgaagtcagcgtcgcgctgctgctgaaccgccaaaaccaactgattgcggtcagagagctgtcgcgcggtacggttgcggaaaacacgatttacatccgcgaaatcgtcaaactggcattggacgaatatgccgacagcctgattattgcgcacaaccatccgggcggctcgcccgaaccttcgcaggaagacatcatgttcacaaggcggctggcacaggccatgtcgctggtcgatgtgtcgctgctcgaccattttatcgtaacggcgcaaaccgtccgttcgttcaggcagctcgggctgatgccctga

SEQ ID NO: 43060 - DNA, 1014 bp, Neisseria meningitidis
atggcttggagtatgtttgccacaacccaagccgatagagcggtaaggtctgcaactgcacctaaagaaatgtggttccataagaagataatagatgaaaaaacaggtaaagtatcctttgataccagacaaatttggtcattgaatgatttaagcaaggaagaactggcaagcattcaagacacaaatggcaaagttattactgtgtctaatcctggtattttcaataatcgagaagattcattaagcaacgcagcaaaacaaaatcgtaatagtacaaacggtagtggtgttattgcagtcatgaatcctccaacagggaaatataaatctgattctaataacaaaataaaagattttttatggctcggttcaagtcttgtttctgaactgatgtatgtcggttacgaccaattaaataataaagtgttccaaggctatttacccaaaaccaattcagaaaaactgaatcaagatatttatcgagaggttcaaaaaatgggtaacggctggtcggttgataccagtaatcacagtcgtgggggaattacagcaagcgtttccttaaaagattgggtaaacaatcaaaaacaaaatggcattgccccaatcagaaaagcacgtttctatggtacagccacaaatgtgcagaatgattacgccgatgttttacagaaaaacggctatacctatacgggtgcagacggcaaaacttataacagcggatcctactcaatcgtgcatgataaagattttgtggggaacaaatggatacctttcttgctaggaaccaatgacaccacacaaggtacatgtaaggggttgtgctattcgcatagcagttattttgcggaggtgccaaaagcaggtacaaaagaatttgatgactatgtaaaaatatggggtgaagttgaatatgacgctcaaggtaagccaattaacaaatctaaacccatactggtagaaccaaacaaaacaaaagataatgaaaaatatgaaaaagaagctttctaa

SEQ ID NO: 43061 - DNA, 387 bp, Neisseria meningitidis
atgaacgaacaagaactgcaagacctgcaaaaaatggtcggggtcgccgtcaacgccctcggagacatcaaagccaaagacatttccgttctcgaaacccaagacaaaacttcgctgtttgccagaatgattatcgccagcggcgacagtacgcgccaagtcaaagcactggccaacaacgttgccgtcgatttgaaagaagccggttttgaaatcctcagtaccgaaggcgacagcggcgaatggacgctggttgatgcaggagacctcgtcgtccacgtcatgctccctgccgtgcgcgacttctacgacatcgacaccctctggggcggcgagaaaccgagtttccacgccggaatgcagaagccgtggcacgcggcagactga

SEQ ID NO: 43062 - DNA, 873 bp, Neisseria meningitidis
atgcccattttgaaccatattgccctcatcggtgtagggctgatcggcggttcgttcgttctcgacctcaaaaggcagggactcgtccgcaccgttaccggtatcgacaccgaccgcgacaacctcgaacgtgcattggaacgcggcgtgattgaccaggcttccgttgccatcgacgcggacagcatcggcggtgcggacttggtactgattgccacgcccgtcgccaccgttcccgccattttgaccgcgctgcgccccgttttgccggaacacacttggatttccgatgtcggcagcaccaaatcttcggtcatcgaagccttccgccgctgtctgcccgaccgcctgcaccactgcatcgccgcccacccaattgccggttcggacagaagcggtgcgcaagccgcgcagttcgggctgttccgccacagaaaactcatcatcacgccacacggcggcgaacattcagacggcattgccttggtagaaaacctgtggcacgcggtcggtgcggaaatttatacgatggacgcgcaacgccacgacgcggttttcgccgccgtctcccatatgccccacctgaccgccttcgcctatgtccaccagattctcgaccaccccgacggacaggaatatctgaaattcgccgccacgggctttcgggacttcacccgcatcgcctccggtcatcccgccgtgtgggcggacatctgccttgccaacaaagacagcctgctgcaactggttcaaggcttgggcaaacagttggacgttttggcaaacatcctgaccaccgacgaccgcgaagccctgtaccgctattttgaagaagccaaaaccacacgcgaccgctggctggacggcaactga

SEQ ID NO: 43063 - DNA, 369 bp, Neisseria meningitidis; identical to SEQ ID NO: 36261

SEQ ID NO: 43064 - DNA, 645 bp, Neisseria meningitidis
gtgaacaaacggctgttttgcagccgcaacggcttgcgctattacctgttgggcggtttctgtttgagtgtttttccgcttttgctggtgtttgcctcatccgtttgggcggtttatcggacgggtgggcaggttttgccgccgtatgtccgggcggatgccgcgctggtgttgggcgccgccgcgtgggacaaacgcccttctcctgttttccgcgaacgcatcaaccatgccatcgcactttatcagagccgcagggtaggcaaaatcgtgtttacgggaggccggaccaaaaaaggctatatgaccgaagccgaggtcgggcggcggtacgcactcaaacagggggttccggcgcgcaacatcctgtttgaaaacacttcgcgcaacacttatgaaaacctgaacaacatccgtccggttttgcgtgccaacggtattgccagcgtggtgattgtcagcgatccctaccatttggcgcgggcggcggaaatggcggaggatttgggtgtccgcgtttatatgtctgccacgccgaccacgcggtttgatgcgggaaataagaaaaaaatctttatgctgcaagagggatatgcgttatccctctaccgtttggaaaaatgggggcgggattttttcaattag

SEQ ID NO: 43065 - DNA, 486 bp, Neisseria meningitidis
atgtttgtgaacgagaaagatccttatgcggctctgtttgcgggactggtgtttttgacgctgccgtttgcgttggcggtgcatgatgcctttgcgcttgcgttcggacgggcggggctgctggtgtcggtgtcggacggcggattcggctggcgtggcggttgggacggcactgtttggtttgtgtatggcgtgtttgcgtttttgaacctggtcgtgtcggcgggtctgatgaagctggcgtataagaagatgatgcggcggcattcccgttacgcgctgtttctgtcgggcgtggcggcttgcgcggcggcggtggtggcttggattttcgaactgttgttgggcagtgccgccttgggcgggctgcgcggggaggcggtgttggaatatgcgtttgccgtgtggctggtgtcgatgctgacactgcccaaacgcttgacgcgcgcaccggtgcagccggtggtgttccacaggaaaaaatag

SEQ ID NO: 43066 - DNA, 195 bp, Neisseria meningitidis
ttggaatctcatgacttagcagaaggatatacttatttcttcaatgaaaatacggatgattgctatgttttgaaagaggattttattaataatgagcgatatgaaaaaacagaattatattcccaaaaagataaggtaattctatttccaaagtttggcgaatatgatttggtgttaaatccggacattatttaa

SEQ ID NO: 43067 - DNA, 840 bp, Neisseria meningitidis; identical to SEQ ID NO: 36521

SEQ ID NO: 43068 - DNA, 1773 bp, Neisseria meningitidis
atgatactgccagcccgtttttcagacggcatcagcctttccctgcgcctgaaactcctgaccggactgtgggtcgggttggcggcattgtctgtcgttttgacactgctgctctctttgcgtctggaaaacgcggcctccgtcatcgaagaggcgggcaacttgagaatgcaggcataccgtctggcatacatggcgggtgaaggctcgccccgtgcgcaaattgacaatcaggttgccgaatttgaaaaaagtttaaaacgcattgcccaaagcgatgccatccatccgctgattccttcggacacccctcttgcttatgatttgatacaatccatgctgattatagattggcaggcacacatcctccccccgctccagtcctaccggcgaccgactcaggtcgatctctaccgctttgccggaaacatcgaactgtttttgcaggcattggaaaatgccaacgaaaaaaacacatggtggctcaggcgttttcaatgggcaattatgttgatgacgctggtgtcgtctgtactgatgctgttttggcaccagatttgggttatccggccgctgcaggcgttaagggaaggtgcggaacgcatcggacggaggtgtttcgatattccggttcccgaaggcggtacgccggaattcaaacaggtcgggcgttgtttcaatcaaatgggcggcaggttgaaaattttatatgatgatttggaaggacaagtcgccgagcagacacgcagtctcgaaaaacaaaatcaaaacctgaccctgctgtaccaaactacacgggacctgcaccaatcctacataccgcaacaggctgcagaacattttctaaaccgtatcctgcccgccgtaggagcagattccggcagagtttgtttggacggcggatccgatgtttatgtttccattcatcatgcggattgcggcacagcagcttcggatttggggaagtaccatgaggaaatcttccccattgagtaccagaacgaaacattgggcaggctgttgctcagctttccaaacggcatttctcttgatgaagacgaccgcatcctgcttcaaacactaggcaggcaattgggcgtatcgcttgccggcgcaaaacaggaggaagaaaaacgcctgcttgcagtattgcaggaacgcaacctgattgcgcaaggattacatgacagcatcgcacaagcattaacgttcctaaacctacaggtacagatgctggaaaccgcctttgccgaaaacaaacgggaggaagccgcagaaaacatcagctttatcaaaacaggcgtgcaggaatgttatgaagatgtccgcgaactgctgctcaacttccgtaccaaaatcagcaataaagaatttcccgaagccgttgccgacctattcgcccgctttacgcaacaaaccgggataacggtcgaaaccgcctgggaaaacggttcgttcctgccgcctcaggaagcgcagctccaaatgatttttatcctgcaggaaagcctgtccaacatccgcaaacacgcccgcgccacccatgtaaaattcaccctttccgaacacggcggacgctttaccatgaccatccaagacaacggacaaggtttcgacacggagaaaataggagaacccacgggcagccatgtcggactgcacatcatgcaggagcgtgccaaacgcatccatgccgttttagaaatccgttcccaagctcaacagggaaccaccgtctcattgacggttgcatctgaagaaagcttgaaatga

SEQ ID NO: 43069 - DNA, 1263 bp, Neisseria meningitidis
atgtcaaacacacaaaaacagcttgcccttgccaaagcggcaaaaaaatccgtcaacacggcggatacggaagaaaaaaaccgcgcgctgtttgctatggcgaacagcttggaagcggcggcggcagatattttggcggcaaaccgtcaagacttggaagccgcggcaggcaacattcccgaaagcatgaccgaccgccttttgttggacggcaaacgcattggcgcgatggcggacggcatcagggcggttgccgcgctgcccgaccccgtgggcgaaatactggaaacctcgactttgcccaacggcttggaaatcgtcaaaaagcgcgtggcgatgggcgttatcggcattatttacgaaagccgcccgaacgttacgtccgatgcggcggctttggcactgaaaagcggcagcgcggtcgtactccgcagcggcaaagatgcattccaatccgcacgcgccatcgttgccgccctgaaaacggggttggcacaaacccgcatcgaccccgacgcgctccagttgattgaagacaccgggcgtgagggcagttacgaaatgatgagggcgaaagattatctagacctgctgattccgcgcggcggggcggggctgatacgggcggtggttgagaatgccgtcgtgccggtcattgaaacggggacgggcattgtccacatttatatcgacaaggacgctgattgggataaggcactccgtatcgtgtacaacgccaaaaccagccgtccgtccgtgtgcaactcgatggaagtgctgctggtgcatgaagacattgctgccgacttcctgcccaagctcgaacgactgttggttcgcgaccgcatagaagccggactgccgcccgtccgcttccgtttggatccgcaggcggcgcggcatatcggcggcgaagcggcgggtgcagacgatttcgataccgagtttttagactacatcctcgccgtgaaaaccgtcgcttcggtcgaagaggcggtctggcacatcgaaacccacagcacacaccattcagacggcatcgttaccgaaaaccgccacgctgcggactatttcacgactcatatcgattctgccgccgtgtatgtcaacgcgtccacgcgctttaccgacggcggcgaattcggcttgggttgcgaaatgggcatctccacgcaaaaactccacgcccggggcccgatgggtttgaaagagctgacgagttacaaatacatcgtacaaggcacgggacaggtcagggaataa

SEQ ID NO: 43070 - DNA, 1140 bp, Neisseria meningitidis
atgagtcaaaatgcctcggtgggcattgtaatgccccaaaaaattccgtttgagatgccgctggttttggaaaacggtaaaactttgccgcgtttcgatctgatgattgaaacctacggcgagctgaatgctgaaaaaaacaatgcggttttaatctgccacgcgctgtcgggcaaccatcatgttgcgggcaggcattcggcggaagataaatatacgggctggtgggacaatatggtcggacctggcaaaccgattgatacggaacgttttttcgtggtcggtttgaataatctgggcggctgcgacggcagcagcgggcctttgtcgattaatcctgaaacgggcagggaatacggcgcggattttccggtggttacggtgaaggactgggtaaaatcccaagccgcgcttgccgactatctcggtatcgaacaatgggcggcgattgtcggtggcagcttgggcggtatgcaggccttgcagtggacgatttcctatcccgagcgcgtgcgccatgctttagtgattgcgtctgcgccgaaactgtccacgcaaaatatcgcgtttaacgatgtggcgcgtcaggcaattttgaccgaccctgatttcaatgaaggacattaccgcagccacaataccgttcctgcacggggcttgcggattgcccgcatgatgggacacatcacttatcttgccgaagacggtttaggcaaaaaattcggacgcgatttgcgttccaacggttatcaatacggctttggtgttgaatttgaagtggaatcctatcttcgctatcagggcgacaaattcgtcggacggttcgacgccaacacttacctgctcatgaccaaggctttggactatttcgatccggcggcagatttcggcgacagcctgacccgcgccctgcaaaatgtgaaagcgaaattctttgtcgccagcttcagcaccgactggcgtttcgcacccgaacgttcgcacgaactggtcaaggcactgattgccgcccaaaaatccgtgcagtatatcgaagtcaaatccgcacacgggcacgatgcctttttaatggaagacgaagcctatatgcgtgcggtcgccgcctatatgaacaacgtttataaggaatgtcagcaatga

SEQ ID NO: 43071 - DNA, 1113 bp, Neisseria meningitidis
atgagcaccttcttccagcaaaccgcccaagccatgattgccagacacatcgaccgtttcccgctattgaagttggaccaggtgattgattggcagccgatcgagcagtacctgaaccgtcaaaaaacccgttaccttagagaccaccgcggccgtcccgcctatcccctgctgtccatgttcaaagccgtcctgctcggacaatggcacagcctctccgatcccgaactcgaacacagcctcattacccgcatcgatttcaacctgttttgccgttttgacgaactgagcatccccgattacagcaccttatgccgctaccgcaaccggctggcgcaagacgacaccctgtccgaactgttggaactgattaaccgccaactgaccgaaaaaggcttaaaagtagagaaagcatccgccgccgtcgttgacgccaccattattcagaccgtcggcagcaaacagcgccaggctatagaagtcgatgaggaaggacaaatcaacggccaaaccacaccgagtaaggacagcgatgcccgttggataaagaaaaacggcctctacaaactcggttacaaacaacatacccgtaccgatgcggaaggctatatcgagaaactgcacattacccccgccaatgcccatgagtgcaaacacctgccgcctttgttggaaggactgcccaaaggtacgaccgtctatgccgacaaaggctacgacagtgcggaaaaccggcaacatctggaagaacatcagttgcaggacggcattatgcgcaaagcctgccgcaaccgtccgctgacggaaacgcaaaccaaacgcaaccggtatttgtcgaagacccgttatagtggattaaatttaaatcaggacaaggcgacgaagccgcagacagtacaaatagtacggcaaggcgaggcaacgccgtactggtttaaatttaatccactatatgtggtcgaacagagcttcggtacgctgcaccgtaaattccgctacgctcgggcagcctatttcggactgattaaagtgagtgcgcaaagccatctgaaggcgatgtgtttgaaccttttgaaagcggccaacaggctaagtgcgcccgctgccgcctaa

SEQ ID NO: 43072 - DNA, 729 bp, Neisseria meningitidis
atgaccgaaactgtcctgattaccggctccaacaggggcataggcaaagccgtcgcattcggtttggcggaagacggctttgatatcgctgtccactgccgcagtcgccgcgacgaagccgaagccgtggcggaagaaatccgcgctttgggcagaaatgcgcgcgtgttgcagtttgacgtgtccgaccgcgaagcctgccgcgagattctgaccgccgacatcgaagcaaacggcgcgtattacggcgtggtgttgaacgccggactgacgcgcgacaataccttccccgcgttttcagatgacgattgggatgtggtgctgcggactaatttggacggtttttacaatgtattgcatccgctggttatgccgatgatacgccgccgcaaagccggacggattgtgtgtatggcatcagtgtccggcctgacgggcaaccgcgggcaggtcaattacagcgcgtcaaaagcaggcattatcggcgcggcaaaagccttggcggtcgaactggcgaaacgcaaaatcaccgtcaactgtgtcgcgccgggtctcatcgataccgatattatcgatgagaacgtacctgtcgaagaaatcttaaaggctgtccccgcagcgcttatggggctgccggaagaagtggcgcacgcggtgcgtttcctgatggatgaaaaagcggcgtacatcacgcgccaggtgattgcggtgaacggaggtttgtgttga

SEQ ID NO: 43073 - DNA, 618 bp, Neisseria meningitidis
atgtccgcttatcgaaaaggcaacatctttatcatttcggccgcttccggcacgggcaaaaccacgctggtgtcgcggctgttggcaaaccataacggtttgcgcgtttccgtgtcgcacacgacgcgcccgccgcgtgaaggcgaagcaaacggcgtacattatcactttgtttccaaagaagagtttgagtcgcttatcgcgcaggaagcttttttggaatacgccgacgtatttggcaactattacggcacaggcgcggagggtgtgaatgcgttggcggcggcaggctatgacgtgattttggaaatcgacgttcagggcgcggcgcaggttcgcgacgcgctgcccgaagccgtcggcatctttatcctgccgccttctttcgacgtacttgccgcgcgcctcaacggacgcgggacggacagtcgggaagttatccaaaggaggctgtcgaaggcaaggcatgaaatcgagcagtccgtattgtttgactttgtcgtggtcaatgacgacttggcgcgagcggaggaggatttgcgccatattgtgaatgcctgccgtctgaaaaggtcgcggcaactggggtttattgcagatttgttggaaaattcctag

SEQ ID NO: 43074 - DNA, 480 bp, Neisseria meningitidis
atggctaacttagtaaaaacctttctgcttggcgaattggtaaaaggtatgggcgtaacgctcaaaaactttttcgcccgcaaagacacaatttatttccccgaagagaaaacgccgcaatccgtgcgtttccgcggtctgcacgcgcagcggcggtatccgaacggcgaagagcggtgtatcgcgtgtaagttgtgtgaggcagtgtgtccggcaatggcgattaacatcgaatcggaagaacgtgaagacggtacgcgccgcaccaagcgttacgacatcgacctgaccaagtgcatcttctgcggtttctgcgaagaggcatgcccgactgatgcgattgtggaaacccatatttttgaataccacggcgagaaaaaaggcgacttgcacatgaccaagccgattcttttggccattggcgacaaatacgaagctgaaatcgccaaacgcaaagccgctgacgcgccgtatcgttaa

SEQ ID NO: 43075 - DNA, 729 bp, Neisseria meningitidis
atgcctgattacatccgcatctcgcgcgccgccgacagcctgcgcgatatcaaaatcacccctcatttcctgccgcatacggacggttcgtgccttattgaatgcggcaataccaaagtgatttgtaccgcttccatagatgaaaacgtcccgccgtttctgcgcggtaaaaaccaaggctgggtaacggcggaatacgggatgctgcctgcctcaactgcttcccggatgctccgcgaagcttcggcgggcaaacagtccgggcgcacacaagaaatccaacgtttgatcgggcgttccctgcgcgcggtcgtggatatggaaaaactcggtgaacgacaaatcttgattgactgcgatgtgattcaggcagacggcggtacgcgcacggcttcgattaccggtgcgtttgtcgcgctgcaaatcgccgtcggcaaactggtttcagacggcattttgagtgaaaaccccatccgcgaagccgttgccgctgtgtcagtaggcgtagtgaacggcgtgccgcttttggatttggattatcccgaagactccggttgcgacagtgatgtgaatatcgtcatgaccgcatcgggaaaaatcatcgaaatacaggggacggcggaagacgcgccgttcagtttggacgaattgggcaaactggttgcactggcgcaaaaaggcataggcgaactgctgcaacaccagcaaaatgcgttgtccgccgcctga

SEQ ID NO: 43076 - DNA, 2037 bp, Neisseria meningitidis
atgactgacaacgcactgctccatttgggcgaagaaccccgttttgatcaaatcaaaaccgaagacatcaaacccgccctgcaaaccgccatcgccgaagcgcgcgaacaaatcgccgccatcaaagcccaaacgcacaccggctgggcaaacactgtcgaacccctgaccggcatcaccgaacgcgtcggcaggatttggggcgtggtgtcgcacctcaactccgtcgccgacacgcccgaactgcgcgccgtctataacgaactgatgcccgaaatcaccgtcttcttcaccgaaatcggacaagacatcgagctgtacaaccgcttcaaaaccatcaaaaattcccccgaattcgacaccctctcccccgcacaaaaaaccaaactcaaccacgatctgcgcgatttcgtcctcagcggcgcggaactgccgcccgaacagcaggcagaactggcaaaactgcaaaccgaaggcgcgcaactttccgccaaattctcccaaaacgtcctagacgcgaccgacgcgttcggcatttactttgacgatgccgcaccgcttgccggcattcccgaagacgcgctcgccatgtttgccgccgccgcgcaaagcgaaagcaaaacaggctacaaaatcggcttgcagattccacactacctcgccgtcatccaatacgccgacaaccgcgaactgcgcgaacaaatctaccgcgcctacgttacccgcgccagcgaactttcagacgacggcaaattcgacaacaccgccaacatcgaccgcacgctcgcaaacgccctgcaaaccgccaaactgctcggcttcaaaaactacgccgaattgtcgctggcaaccaaaatggcggacacgcccgaacaagttttaaacttcctgcacgacctcgcccgccgcgccaaaccctacgccgaaaaagacctcgccgaagtcaaagccttcgcccgcgaaagcctgaacctcgccgatttgcaaccgtgggacttgggctacgccagcgaaaaactgcgcgaagccaaatacgcgttcagcgaaaccgaagtcaaaaaatacttccccgtcggcaaagtattaaacggactgttcgcccaaatcaaaaaactctacggcatcggatttaccgaaaaaaccgtccccgtctggcacaaagacgtgcgctattttgaattgcaacaaaacggcgaaaccataggcggcgtttatatggatttgtacgcacgcgaaggcaaacgcggcggcgcgtggatgaacgactacaaaggccgccgccgcttcgccgacggcacgctgcaactgcccaccgcctacctcgtctgcaacttcgccccgcccgtcggcgacaaagaagcccgcttgagccacgacgaaatcctcatcctcttccacgaaaccggacacgggctgcaccacctgcttacccaagtggacgaactgggcgtatccggcatcaacggcgtagaatgggacgcggtcgaactgcccagccagtttatggaaaatttcgtctgggaatacgacgtcttggcacaaatgtcagcccacgaagaaaccggcgttcccctgccgaaagaactcttcgacaaaatgctcgccgccaaaaacttccaacgcggtatgttcctcgtccgccaaatggagtttgccctcttcgatatgatgatttacagcgaagacgacgaaggccgtctgaaaaactggcaacaggttttagacagcgtgcgcaaaaaagtcgccgtcatccaaccgcccgaatacaaccgcttcgccttgagcttcggccacatcttcgcaggcggctattccgcaggctattacagctacgcgtgggcggaagtattgagtgcggacgcatacgccgcctttgaagaaagcgacgatgtcgccgccacaggcaaacgcttttggcaggaaatcctcgccgtcggcggatcgcgcggcgcagcggaatccttcaaagccttccgcggccgcgaaccgagcatagacgcactcttgcgccacagcggtttcgacaacgcggtctga

SEQ ID NO: 43077 - DNA, 591 bp, Neisseria meningitidis
atgaaaaaatcctccctcatcagcgcattgggcatcggtattttgagcatcggcatggcatttgccgcccctgccgacgcggtaagccaaatccgtcaaaacgccactcaagtattgagcatcttaaaaaacggcgatgccaacaccgctcgccaaaaagccgaagcctatgcgattccctatttcgatttccaacgtatgaccgcattggcggtcggcaacccttggcgcaccgcgtccgacgcgcaaaaacaagcgttggccaaagaatttcaaaccctgctgatccgcacctattccggcacgatgctgaaattaaaaaacgccaacgtcaacgtcaaagacaatcccatcgtcaataaaggcggcaaagaaatcatcgtccgcgccgaagtcggcgtacccgggcaaaaacccgtcaacatggacttcaccacctaccaaagcggcggtaaataccgtacctacaacgtcgccatcgaaggcgcgagcctggttaccgtgtaccgcaaccaattcggcgaaattatcaaagcgaaaggcgtggacggactgattgccgagttgaaagccaaaaacggcggcaaataa

SEQ ID NO: 43078 - DNA, 204 bp, Neisseria meningitidis
atggacaatctgaatccgcaggaaatttccgtgttgccggaaaatctgccgctgtattgctcgggacccggcaacgagcagtggaacgggcatccgagagtgtttttgcctttgtgcgaaggagaatcgggcagcgttgcctgcccgtattgcggcacgcgctaccgccttgacggcaagatgccgcatcatcattacgcctga

SEQ ID NO: 43079 - DNA, 198 bp, Neisseria meningitidis
atgaataccgtcccaaaaagcaggattcccgtcaaaccgctgcccgaaaaaaccacagacgaagccaaagtcgaaaaatggcggcagctcggtgcggaacacggtttgtcgggcgaatgggcagttgccgtcagattgggcgaaaacggttttaccgaagaacagatggaaaatatcgccaacctgttcggcagataa

SEQ ID NO: 43080 - DNA, 255 bp, Neisseria meningitidis
atgaaacatatgaccgaacaagaaatctaccggttgttgcgcgataccctgaccgagttgtttgaaatcgaaccggaacggattacgcctgataccaatctttacgaagatttggaaatcgacagcatcgatgccatcgacctgattgaccgcatcaagcgcgaaaccggccgcaagctgcaggccgaagatttccgcaatgtccgcaccgtcaacgacgtggtacaggcggtattgaagattcaggcgggctaa

SEQ ID NO: 43081 - DNA, 1092 bp, Neisseria meningitidis
atgagtttgaaatgcggcatcgtcggtttgcccaacgtcggcaaatccaccctttttaacgcgctgacccaatcgggtatcgaagcggcaaactatcctttctgtaccatcgaacccaacgtcggcatcgtcgaagtccccgatccgcgtatggccgaattggcaaaaatcgtcaatccgcaaaaaatgcagcctgccatcgtcgaatttgtcgatattgccggtttggttgcaggcgcgagcaaaggcgagggcttgggcaaccagttccttgccaacatccgcgaaaccgatgcgattgtgaatgtcgtgcgctgctttgacgacgacaacatcgtccacgttgcaggccgcgtcgatccgattgccgacattgaaaccatcggcacagagttggcacttgccgacctggcaagtgtcgaaaaagccatcgtccgcgaagaaaaacgcgcccgctcaggcgacaaagacgcgcaaaagctggtcgatttgtgcaaaaaactgctgccgcatctggacgaaggcaaacccgtgcgttccttcggtttggacgcggaagaacgcgcgatgctcaaaccgctgttcctgctgaccgccaaaccggcgatgtatgtgggcaacgtcgccgaagacggttttgaaaacaatccgcacctcgaccgcctgaaagaattggcggcaaaagaaaacgcccccgtcgtcgccgtttgcgccgcgatggagagcgaaattgccgaattggaagacgacgaaaaagccgagttcctcgccgaaatgggcttggaagaaccgggcctgaaccgcctgattcgtgccggttacgacctcttggggctgcaaacctatttcaccgccggtgtgaaagaagtccgcgcgtggacgatacacaaaggcgacaccgcgccgcaagccgccggcgtgattcatacggattttgaacgcggcttcatccgcgcccaagtcatttcttacgacgactttgtctcgctcggcggcgaagccaaagccaaagaagccggcaaaatgcgtgtggaaggcaaggaatatgtcgtgcaagacggcgatgtgatgcactttttgtttaacgtgtaa

SEQ ID NO: 43082 - DNA, 2262 bp, Neisseria meningitidis
gtgagcattagcgcgccgtatgccaatgaaaacagccgcatcctgctgagcaccacggatatcagttcggaaaacggcaaaatcaaactgcaatcctacggcgaccagttctactacgccggacagggtgagctctacaccttcgataaacgcagctataaaaccggtaagtggtacaaactaaaacatgttactgaaatcaaagagcataaaaacgccaaagccgacccggtgagcctcagtgcgtcacaaggtattgaaatcaaatccggcggcaatatcggtgcccacgccaccttgtttgatgcaccccgcggctccgttaaaatcgaagccggacgtgggctggttctctatgccgtggaagatctcaactacgacaaacttgacacccgtaccaagcgcaaatttatcggcattacctacgacaaggtgcacgacaccaccacccacaccatgaaaaccgccctgccctcaagggtagttgcagaatcggccaacctgcaatcaggctgggacgccaaactgcaaggcacccagtttgaaaccacgctgggcggcgcagccatccgtgcaggtgtaggcgatcaggcacgagcagatgccaagattattcttgaaggcatcaaaagtagtgtgcgcactgaaacagtaagcagtagcaaatctgccctctggcagaaacaggccggacgcggcagcaatatcgaaaccttgcaactgccaagtttcacaggctccgttgcgcccgtactctctgcccccggcggctatatcgttgatattccgaaaggcaatctgaaaaccgaaatcgaaaagctggccaaacagcccgagtatgcctatctgaaacagctccaagtagcgaaaaacgtcaactggaaccaggtgcaactggcttacgataaatgggactataagcaggaaggcttaaccagagccggtgcagcgattatcgcgctggctgttaccgtggttactgcgggcgcgggagtcggagccgcactaggcttaaacggcgcagccgcagcagcggccgatgccgcctttgcctcactcgcttctcaggcttccgtatcgctcatcaacaataaaggcgatgtcggcaaaaccctgaaggaactgggcagaagccgcacggtaaaaaatctggttgtagcggcggcaacggcaggcgtatccaacaaactcggtgcctcttcccttgccacttggagcgaaaccccttgggtaaacaacctcaacgttaacctggccaatgcgggcagtgccgcgctgatcaacaccgctgttaacggcggcagcctgaaagacaatctggaggcaaatatcctggcggcattggtgaataccgcgcatggggaggcggcgagtaagatcaaaggactggatcagcactatgtcgcccacaaaatcgctcatgccgtagcgggctgtgcggctgcagcggcgaataagggcaaatgtcaggacggcgcgatcggtgcggctgtgggtgagattgtcggggaggctttggttaaaaataccgattttagcgatatgaccccggaacaattagatctggaagttaagaaaattaccgcctatgccaaacttgcggcaggtacagttgcaggcgtaacgggaggagatgtcaatactgctgcacaaaccgcacaaaacgcggtagaaaataatgcggttaaagctgttgtaactgctgcaaaagtggtttataaggtagccagaaaaggattaaaaaacgggaaaatcaacgttagagatttaaaacagacgttgaaagacgaaggttataatttagccgacaacctgaccaccttattcgacgaaacattggattggaacgatgccaaagccgttattgatattgtcgtcggaacagagctgaatcgcgctaataaaggggaagcggcacaaaaggtcaaggaagttttagaaaaaaatcgtccttatatccctaataaaggtgctgtaccgaatatgagtacatacatgaaaaataatccttttggaaaacagctggctcaaatttcagaaaagacaacgcttccgacgcagcaagggcagtctgtcttcttggtaaaaagaaaccaagggttattaaaaaccggtgataggttttatttagatggccaacataaaaatcatttagaggtttttgataaaaatgggaactttaagtttgttctaaatatggatggttcgcttaaccaaatgaaaactggggcagcaaaaggtcgtaaattaaacttaaaatag

SEQ ID NO: 43083 - DNA, 633 bp, Neisseria meningitidis; identical to SEQ ID NO: 41857

SEQ ID NO: 43084 - DNA, 435 bp, Neisseria meningitidis
atgactgagccgaaacacgaaatgctgacgaaagagcaggttgccgcgcgcaaaaaagcaaaagccaaaatccgcaccatccgcatttgggcgtgggtcattttggcgttgctcgctttaaccgccctgctctcccaatgcgcgatgtccaaaccgcaggcaaaacagaaaattgtcgagtcttgcgtgaagaatattccgtttgccgaaaaatggcaaaacgatttgcgggcccgcggtttagattcaaacaatacccgcctcgccgtcgactactgcaaatgtatgtgggagcagcctttggacagattgagcgagaaacagattagatccttcggcaaactcggcgcacaagaacagcttgacctgctcggcggcgcaaatgcctttgaagcacgtgacaagcagtgtgttgccgatttgaaatcagaataa

SEQ ID NO: 43085 - DNA, 129 bp, Neisseria meningitidis
ttgtttcccttgtttatacccgaaatagagctatataaataccaattttatagtgaaattattattgatgtagggattattataaaaatatctgctgaaacaattaattttgagccactgggaaaatag

SEQ ID NO: 43086 - DNA, 645 bp, Neisseria meningitidis
gtgcttgcctccgccatcgacttcatcctccatatcgaccaacacctgctcgcgctgtcggcgcaatacggtgtgtggatttatgcgattctgtttttgattgttttttgcgaaaccggcctgattgttacgcccttactgcccggcgattcgctgctgtttgccgccggcgggattgccgcgctgggcggtatggatattcatttgatggttgcattattaagccttgccgccatactcggcgacgcgctcaattttaccgtcggcaaatatttcggcggcaggctgttcgccaaccccgattctaaaatcttccgacgtgaatatctcgataaaacccaccgtttttacgaaaaacacggcggcaaaaccatcatcattgcccgttttatgcccatcgtccgcaccttcgcccccttcgtcgccggtatggggaaaatgcactatgccaaatttatccgctacaacatcatcggtggcttgttgtgggttatcctgttttcttacgcgggctatttctttgccaacttccccgtcgtaaaaaacaatctgggcttggtgatgggcggcatcattattgtttccgtcctgccgggtgcggttgaaattgcccgcgccaaacttgcggtaaaatccaaacggtaa

SEQ ID NO: 43087 - DNA, 1422 bp, Neisseria meningitidis
atgcgccacctacccctgttttcactaatgcttttcccagcatcggtttacgccgcagatttggacggcgcaaacctaaacctgctgtggggcctgccctttgccctgattttgctgtctatcgcattgggtcccttgtttttttcgcatacctggcatcaccattacggcaaaattaccgccttttggacattgctcttcctcatcccgttcagtttggtttttggcgcgtccgccggtatccataccgtcgcacacgcactcgttgaagaatacatccctttcatcctgctgctgcttgccctgtacaccatttcaggcggcattttggtttggggcgacttgaacggcacacccaagctcaacaccgccctgcttgccgtcggtacggcacttgcctctatcatgggaacgaccggcgcagcaatgctgatgattcgtccgctgctgaaagccaaccaaaaccgtacccgccgcgtgcacatcgtcatcttcttcattttcctggttgcaaacatcggcggcggtctgacccctttgggcgaccccccactcttcctcggcttcctcaaaggcgtagatttcatgtggacggtcaaacatatgttcgcccccgtcctgatcagcaccgctgtcctgttgaccgccttctatttcatcgacaaccgtttcttcaaacaggaaagcattgcacaagatacgccggcacaacaggaaaaacccgaaaaaatcgccatcttcggcaaatggaacttcctcctgctttcgggcgtggtcggcgcggttctaatgtccggcctttggaaacccgaacacccgggatttgaaatcctcggcagccgttacgccctgcaaaacctcgtccgcgatgtcatcctgattgcattgaccgccgtatctatggcaatcacgcccaaacaagtccgcgcaggcaacgaattcaactttgaacccatcgccgaagtgggcaaactcttcctcggcatcttcatcaccatctttcccgtcctgagcattctgaaagcaggcgaggcaggcgcgctgggcggggtggtatcgctggttcacgatacggcaggtcatccgattaatgtgatgtatttttggatgagcggcatattgtcggcattcttggataacgcgcccacttatctcgtttttttcaatatggcgggcggcgatgcccaagccttgatgacgggtaccctgtttcattcgctgctggcggtttctatgggttcggtattcatgggcgcactgacctacatcggcaacgcaccgaacttcatggtcaaggccattgccgaacagcgcggcgtaccgatgccgactttcttcggctatatgatgtggtcggtcgccttcctgacacccgtcttcatcgtacatacccttatctttttcgttttcaaactgctgtaa

SEQ ID NO: 43088 - DNA, 324 bp, Neisseria meningitidis
atggacaactgtattttctgcaaaatcgccgccaaagacattccggcgcaaaccgtctacgaagacggcgaaatggtttgtttcaaagacatcaaccccgccgctccggttcatctgctgctgattcccaaagtccatttcgattcgttggcacacgccgcgcccgaacatcagccccttttgggaaaaatgatgctgaaagttcccgaaatcgccaaagcggcaggactggcagacggcttcaaaaccctaatcaataccggaaaaggcggcggacaagaggtcttccacctgcatatacacatcatgggcacacccgtataa

SEQ ID NO: 43089 - DNA, 369 bp, Neisseria meningitidis
atgaaaccgttgaaacgacatcccgcccttatcgggctttcgcgtgaccaccaccattcgctttccctgtgcgtgcgtctgttgcggacgccggaagaaaggcatcgggacgaactcgaaccgcatttttccgaattggaaacccattttcgcgaagaagaaaccaagtttgccccaatttggcagaatgtcgcccccgaattgaaacaacgtttcgagaaagaccacgcccgactgcggcagatgatggcaagccccgaatacggtaacgcggcgtggaataccgcttttgccacaaccctgcgcgaccacgcgcgctttgaagaacgcgagctgtttcccgccgccgaaccgtttttgccggcatga

SEQ ID NO: 43090 - DNA, 2790 bp, Neisseria meningitidis
atgaccgattacagtaaaaccgtaaacctgctcgagagcccgtttccgatgcgcggcaatcttgccaagcgcgagcctgcatggctgaaaagctggtacgagcaaaaacgctaccaaaaactgcgcgaaatcgccaaaggccgtccgaaatttattctgcacgacggcccgccgtatgccaacggcgacatccacatcggtcatgccgtcaataaaattctcaaagacatcattatccgcagcaaaacccaagccggttttgacgcgccttatgtgccgggttgggactgccacggcctgcccatcgaagtgatggtagaaaaactgcacggcaaagatatgcccaaagcacgtttccgcgaattgtgccgcgaatacgccgccgaacagattgcccgtcagaaaaaagactttatccgcttgggcgtgttgggcgactgggaccatccttacctgactatggatttcaaaaccgaagccgataccgtgcgtatgctcggcgaaatctacaaatccggctatctctaccggggtgcgaaaccggttcaattctgcttggactgcggttcttcgctggccgaagcggaagtggaatacaaagacaaaatctcgcccgcgattgacgttgcctatctgtttaaagacactgccgcgcttgccgccgcattcggtttggctggtttcgaaggcaaagcgtttgccgtcatttggacgactacgccttggacgctaccggcgagccaagccgtgtctgcgggtgcagacgtggtgtatcaactgattgatacgccgaaaggcaaattggtattggcgaaagatttggcagaagacgcgctcaaacgttacggtttttcagacggcattgctattctcgccgaaaccaccggcgacaagctggaaaatctgcacatgaaccatccgttcctcgaacgcgatattcccatgctcaacggcgaacacgttaccaccgatgccggtaccggcttggtacacaccgcccccgcgcacggtttggaagactacgccgtctgcaataaatacggcatcgagctttacaaccccgtcaacgccgaaggccgatacatcggcgaaacgccgcgtgtcgccggtatgcgcgtttgggaggcgaaccccgtcatcctgcaatggttggaagaaaccggcaaccttttggcaagcagtaaaatcgaacacagctacgcccactgctggcggcacaaaacgccgctgatttaccgcgcgacaggtcaatggtttgtcggtatggacaaagccggtgccgacggcaaaaccctgcgcgacaaagccatcaaggccgtggacgacaccgaattcttcccgtcttggggtcgcgcgcgtttggaagccatgattgaaggtcgtcctgactgggtggtttcacgccaacgctattggggcacgccgatgactttctttgttcacaaagaaacgggcgagctgcatccgaactctgccgaacttttggaaaaagttgccctgaaaatcgaagaaaaaggcatcgaagcgtggttctccctcgataagagcgaactcttgagcgcggaagattgcgaaaattacgataaactttctgacacaatggacgtatggttcgactccggctcgacccattattccgttgtgaaacaacgcgaagaattggaatggccggctgatttgtatctcgaaggcagcgaccaacaccgcggctggtttcaatcgtccatgctgaccggctgcgcctcatcaatgggtcgcgcgccgtataaacagctgctgacccatggtttcgttgtcgacggcgaaggcaaaaaaatgtcgaaatccatcggcaacgtcgttgcaccgcaagaggtttataacgaattcggcgcagacatcctgcgcctgtgggcggcatctaccgattacagcggcgaattggcgatttccaaagaaatcctcaaacgcgtaaccgaaagctaccgccgtatccgcaataccttgagctttttgtttgccaacttgagcgactttaatccgattgaagatgccgtgcaacaggcggatatggtggaaatcgaccgctacgccgtggtattggcacgtcagctgcaagagtgtctggcaggcgattactatccgcgttatgccttccactttgccgtaaaagacattgtttctttctgctcggaagacttgggtgcgttctacctcgacatcctgaaagaccgcctctacaccaccaaagcagacagccatgcacgccgcagcgcacaaactgccctgtatcacatcacacgcagtttggttctcttgattgcaccgattttgtgcttcaccggcgaagaagcgtgggacatcatcggcggcggcgaagaagacagcgtcctcttccatacttggcacgagttcccgaccatcaacgaaaaaaccgaagccgaactggtgaaaaaatggacggcaatccgcgaagcccgcgaagcggtaaccgccgccatcgagcctttgcgcgccgacaaaaccgtcggttcgtccttgcaagccgaagccgaaattaccgcgccggaagaaatggccggctatctgaatgctttgggcgaagaattgcgctttgctttgctggtgtctaaagcagaagtgaaagtaggcagcgaacttgccgttgccgctaaagccagtgatggtgaaaaatgcgaacgctgctggcactacacccgcgatgtgggcgcggttgcaggctatgaaaccgtctgcaaacgctgtgcagagaatgtcggcggagaaggcgaaacgcgccattacgcctga

SEQ ID NO: 43091 - DNA, 330 bp, Neisseria meningitidis
atgaaacaaaatatcgaaaaactcgaaagcagcgtttatacgttggtacaaaaattcgaaaccctcgtcagcgaaaaccgccgcctcaaagaaaccgtcgccgaactcaaacgggcgcacgagcggcaaaaactcgaacacgaaaccgccgtcgacgaactcagcgaagccctgctcgtccaagtcggcaaactcaaagaagacctgcaaaacaaaattgacagcctgacagaagaaaatacacgataccgcagcctgctcgaacagagcagggaaaaaatcagcgcactggcagcgcgcctcccccaatggcaggaaacgcagcaataa

SEQ ID NO: 43092 - DNA, 216 bp, Neisseria meningitidis
atgaaagaatacaaagtcgtcatttatcaggaaagcccgttgtccagcctgtttttcggcgcggcaaaggtcaaccccgtcaatttcagcgcgttcctcaacaaacaaacccccgaaggctggcgggtcgtaacgatggaaaaagatttgcgccgtatgctgctgtttttcaaacgcgaggcctacgtcgtcattttggagcgggaccgtgtttaa

SEQ ID NO: 43093 - DNA, 1404 bp, Neisseria meningitidis; identical to SEQ ID NO: 39890

SEQ ID NO: 43094 - DNA, 855 bp, Neisseria meningitidis
atgtcggcacaactgatcaatggtaaagaagtttcgcaaaaacgcctgcaggcggttgccgaagcggtggcgcaacgccaacagaacaatctgcacacgccttgcctggccgtggttttggtcggaggcgaccctgccagcgcggtttatgtccgcaacaagaaaactgcctgccaaaaatgcggcatcaaatcactgtcttacgagctgcccgaatcaacatcgcaggaagaactgctggcactggtcgaccgcctgaatgccgattccgaagtggacggtattctggttcagctaccgctgccgaagcacctcgacagccaggcggttttggaacgtatttcgccggataaggacgtggacggcttccatccttacaatgtcggcaggctggcggtcaaaatgccgctgatgcgcccgtgtacgcccaagggcgtgatgacgcttttggaagcttacggcattgatccgaaggggaaaaaagcggtcgtggtcggcgcgtcgaatatcgtcggccgcccgcaggctttggaactgctgctggcgcgcgcaacggtaacggtctgccacagcgcaaccgaaaatctgacagacgaggttgccggagccgatattttggtggtcggcgtaggcattccgaactttgtcaaaggcgaatggatcaaacctggcgcggtcgttattgatgtgggcatcaaccgtttggacgatggcagcctgtgcggcgacgtggaatttgaaacggcaaaagaacgggcggcgatgattacgcccgttcccggcggcgtgggtccgatgacgattgccacattgatggaaaacaccctgcacgcggcttcactgcacgatgcttga

SEQ ID NO: 43095 - DNA, 858 bp, Neisseria meningitidis
atggcacgacacgtttggcaggcaggacggtttgaaatcggtttggacaaaccgaaaatcatgggcatcgtgaatctcacacccgattctttttccgacggcggcgtgtattcgcaaaacgcccaaacagccttggcacatgccgaacagcttctaaaagaaggcgcagacattctcgacatcggcggcgaatcgacgcggtcgggtgcggattatgtttcgcctgaagaagaatgggcgcgggttgagcctgttttggcggaagtggcggggtggggcgttcccatcagtttggacacgcgccgcacggtgattatggaaaaagcgttggcactcggcggcatcgatattattaatgatgtggcggcgttgaatgacgagggcgcggtcgaattgctggcgcgtcaggcggacacgggcatttgcctgatgcacatgcagggtttgcccaaaaccatgcagattaatccgaaatatcaagatgttgtcggtgaagtagcgcggtatttgaaagcgcgctcagcggaatgtatcgcggcaggcatcgcaccgcaacgcatcatactcgaccccggcttcggctccggcttcggcaaacccttgcaacacaatatcgcgctgatgcggcatttgcccgaattgatggcggaaacaggttttccgctgctcatcggcgtatcgcgcaaaagcacgataggcgagctgaccggcgaggcaaatgcggcggaacgcgtacacggcagcgtggcggcagcgttggcttccgtagcgcgcggcgcgcaaatcgtgcgggtgcatgatgtgaaggcgacagcggatgcgttgaaggtgtgggaagcgttgggcatcaatctgtaa

SEQ ID NO: 43096 - DNA, 978 bp, Neisseria meningitidis
ttgtgggtctacccgacgggcgggcggagttggaagctgtcgtttgtgcaggatggaaggcagcagacaatttcgctggggcggtatcctgatttttcgctggccgatgcgcgggaatggcgggaggaggtgcgccgaaaacgggcgcacggggaaaatgtcgtcaataagaaggtgcgggcggattttgcttttgagaaggtggcgcgtgattggtttgtgcgttggtcgaaggggcggtctgaaaagtatgccggacaggttatgcggaattttgagcggtgggtttttccggctatcggcaatcttgatattcgtcaaatcaggacggcggatgtggtcggctgtctgcgtgtgatggaggcgcgcggtatcgttgatacgttgcgcaaaacgaaaaacagtctgaagatggtgtttgcgtttgcggtcggttcgggaatgatggaaatcaaccctgtcgcgcaaatcggttcgggtgtgtttgaacgggcgaaaacggggaatatggcagcgttgagtccgtctgaattgccgcgcctgattgattttttggagcagcgcaatgaatttgcggtttatgcgggcagggtgcgtatccatcctgtaacgcggctttgtatctattggctgctgttgacaatgacgcggattcaggaggcggcgttgatggagtggtcggagttggacggggaggtttggcgtatccccgccgaacggaaaaaggagcggcgggggcatgatgtgccgctgtcgcgggcgatgcagtgggtgttggatcaggcgcgggcgttgaatgtgaacgggcggtttgtgtttgaaagtgtgaattttcaagggcatatcaataaggaaagtccgcgcgtggcgatgcagcgggcggggctggatacgacggcgcacggtttgcgctcgcttgcgcgtacttatttgcgcgaggttctgaaggtggatagtattatgcggaaacgcaaataa

SEQ ID NO: 43097 - DNA, 1749 bp, Neisseria meningitidis
atgattcattataaaataaccccgtcccctctcgaccacgagtggcacatcctgctgacattcacacaagatgatgatcttcctatagaaataagcctgccaaactgggttccgggcagctatctgattcgggatttttcccgccacatcacttctatccatgcatcctgtaacggcacgtccatgccgctcgaacaaattgccaaaaaccgctggcatgccgccgccgtacgcggcgagtggcaaatccgctacaccgtatatgcattcgatttgtcggttcgaggttctttcctgacgacagaacgcggtttttttgacggatcgtgcctgtttttgaaagtcgaaggaacggaaacgctgccgcaccgcttggaattgacgggtattccgtccgaatggcgtattgccacaacgctgccggaaacagggaggtttgtctttcaggcggcatcttatgccgaattgattgaccgacctgtcgagatgggcttgattgaatttttagattttgaggcggcaggcattccgcacacaattgccttaagcggcatatatcccgatttcgaccgcaacaggctggtttcggatatcaaaaaaatctgcgaaacagaactggcggtgttttcctcccctgccccgtttcaaaaatatttgttcctgctccacgtcggcgaccatatttacggcggtttggaacacaccgacagcaccgccctgctcgccgaccgccacagccttccgccgtacggtatgaccgatgccgacgatacctacaccacattgctcggacttttctcccacgaatattttcacgcgtggaacgtcaaatccatcaaacctgccgcgttcgtcccttatgacctcgacaaagaaaactataccgaacaactatgggcattcgaaggtattacatcctattacgacgatttgtttttggcacgcagccgcaccatctcgcccgaatcttatttaaacctgctggcacaaggcattacgcgcgtacaacaaacccgcggccgtttgaggcagaccttggcggaatcgagttttaccgcgtggaacaaattttacaaaccggatgaaaacagccccaacgccatcgtcagctactaccagaaaggcgcgcttgccgcattgtgccttgatctgataatacgcaaccgaagcaacggcagacattctctcgatacgttaatggacaaactctatcgggagtggagggacacacactcgggtattccggaaaaacactggcaaatccgctgtcaggaaattaccggcttggatttggaagattttttccaaaaagcgttatacagtaccgaagatttgccgcttgccgaatgcctggcaaccgcaggcgtgggactgaccttcctgccgcttccccgacaacacggcggcggatacgcagaacacatctgccccgtcccgtcggcaggcgattttggcgcacgtttcaaacaaaacaccgaccacatcgtcctgacccatgtcttcaacggcggcagcgcggaatctgcggcactgtgcccgcaagacaaaatcattgctttagacggttatgcctgcaccgactttaccgcacaatgggcccgataccacgtcaatgcaaaaatcaatatccacttcttccgtgccggcatattgcgtcaaaccgtcttgacggttcaggcagcggcagcggatactgccatcctacatatcacagaccggaacctgttggacaactggttgttcggttaa

SEQ ID NO: 43098 - DNA, 2301 bp, Neisseria meningitidis
atgcaccgaccgaccgccaaacagattctgcacgaagtatttggttatcccgaatttcgcggcaggcaggaggctgtcatcaatactttggcaggcggcgggagtttgacggtgctgatgccgacgggcggtggcaagtctttgtgttaccagattcccgcgctgatgcgcgaaggcgtggcggttgtcgtatcgccgctgattgcgctgatgaacgaccaagtggcaaacctgcacgccgccggcatcgaagcggcggcagtcaacagcggcacatcggcagacgaggcgcgcgagattgccgaccggcttgcccaaggccgtctgaagctgctttatgtcgcgccggaacgcttggttaccgaccgctttttgcgttttctcgaccaacaaaccgtcagtctgtttgccattgatgaggcgcattgcgtcagccaatggggacacgatttccgccctgaatatcaacagctcggcatgcttgccgaacgctatccgaacgtcccgcgcatcgctctgaccgctaccgccgatgccgccacgcgcgccgacatcaagcattatctgcacttggacgatgcgcccgaatttgtctccagctttgaccgtccgaatatttattatcaggttatcgaaaaaaacaacggcaaaaaacaattgctggatttcatccgcaaagaaatgacggggcaaagcggcattgtgtattgcctaagccgcaaaaaggtggaagatgtggcgcagtttttgcgtgaaaacggattaaacgcgattccgtatcatgctggtttgagcatggacgtacgcgaggaaaaccaacgccgctttacgcatgaagacaatattatcgtggtggcgaccgtggcgttcggcatgggcatagacaaacccgacgtgcgctttgtcgcccatctcgatatgccccagagtgtcgaacatttctatcaagaatcggggcgcgccggacgggacgggctgccggccgcaagctggctgtgttacggtttgaacgattgggtgttgctgcgcgaacggattgccgaaggcaacagcgacgaggtgcaaaagcaaatcgaaatgcaaaaactcgatgccatgcttgccgtctgcgaaaccgccgcctgccgccgcgtactgctgctcaaacatttcggcgaagcatccgaaccctgcggccattgcgacaactgcctgcatccgcccgtacggtttgacggcacggtgttggtgcaaaaattactcagctgcgtgtaccgcgccggacaacgttttgccgccggttacatcaccaacattttacgaggtaaaagcgacgattggatacgcggcaaccggcacgaacaactgtccacattcggcatcggtacggagttgtccgacaaagaatggcgcagcgtcatccgccagtgtatcagcctcggctacctcaccgtcaacattacccgatatcaggcattgcaactgaccgaagccgccaaaaaagtcctcaaaggcgaaaccgaagtgatgctgcgtccgctcaagcgcgacaagcccgccgcccgcaccctcaaagacaactggctgcgtaccgaacgcgaagaacgcctgtggcaggcattgcgcgtttggcgtatgaaacaggcagaagccgaaggcatccccgcctatatgattttcggcgacaaaaccctgcgcgaccttgtcgaaaaaatgccgcaagacctcaacggtctgcacgacatctacggtttgggcgaagccaaaatcgaccgtttcggacacggcatcctcgaagtctgccgcaacgccgccggcttcagccgcgacgcggtcatccgtccgcaaaccgaacgcgaacaacaactgcgtcaaaaactcgaagcctggcggtatgaacaggcaagggcggaaaactgcgccctgcatgccgtcctctccgacgaaagccttgccgatatgcttgccgatacgcccgaaaccgaaaccgacctcgaaggcgtgtacggcttgggcagcgtacgcgccgccaaatacggacgggacatcctcgccgtctgccgtccgttttcagacggcatcgatgaaaccgccaaacgcaaacgccgcctgatgcgcgccctgatccaatggtgcggcgaaacggcaaaacacgaacagtccgaaccctaccgcattctcagcaaagccgcactgcgcgccattgccgccaaacagccggaaggcttggcggagcttgccgccgtatacggcgtaggcgaagaaaaagccgcacgttacggtgcggcggtgttggcggtattggaacgaaatgccgtctga

SEQ ID NO: 43099 - DNA, 312 bp, Neisseria meningitidis
atgaaatacaaaaacgaggcattagccgccattcatgaaatgatggaaggggcttacaacatcggcgcaatcgacaaaaagaccatgcgcgactttgacaagtcctgcctgaccgaaatcaaaccgttgagcggcggagacatcaaggcaatcagggagaaggaggcactatcgcaagccgctttcgccatctatctcaacgtgggaaaaaatcacgtttcggcttgggagcggggcgttaaaaagccgagcggcgcggcgttgaagctgctgaccatcgtcaaaaacaagggcatcgaagccattgcgtag

SEQ ID NO: 43100 - DNA, 249 bp, Neisseria meningitidis
atgtttcaagcaaatattcatcaggcaaaaaccaatttgagtcaattgattcaaagagcagaagcaggggaaatcgttattattgcgaaggcaggtaagccttgcgtccaactaatcggtattgaaaaaccggcacgaaatgcaggaaggttgaaaaaattcagtcatatggaaaatacggatatttcacgtattcttgaggatgacaatgaaacggcagctttattttttgaggagtcggctctgtga

SEQ ID NO: 43101 - DNA, 837 bp, Neisseria meningitidis
atgatagacctgcactgccattccaccgtttccgacggtatgctctcccccgccgaagtcgtgcgcctcgcgcatcaaaacggctgcacgctgctggcgttgaccgaccacgaccacaccggcggcatcgccgaagcgcgcgccgaagccgacaagctcggtttgcgcctgattaacggtgtggaaatctccgtaacgtggcgcgggcgcaccatacacgttgtcggtttggatttcgacgagcaggacgaaaacctgcaaaacctgttggcgcaagtgcggaaaggccgtctgaaacgtcttgaagccatcgccgccaagctcgaaaagaaaggcatcggcggcgcatacgacggcgcgctggcactggcggcaaacaaagaaatggtcagccgcacccacgtcgccgagttcctcatccaagcgggacacgtcaaaaacaagcagcaggcgttcaccaaatacttgggcgacggcaaatcctgcgccgtccgccacgaatgggcgacgctggaagactgcgtctccgccgtcaacggagcgggcggcatggcagtcatcgcccaccccatgcgctacgatttgtccgccaccgccaagcgcaatttgtttgaagaatttaaaaacctcggcggcgcaggcatcgaagtccacagcggaaactgctgcaaaaacgaccgcctcaactacgcgcttttggcagaacgcttcggtatgctcgccagcgcgggcagcgacttccaccgcttaaacgacttcagcggcggcatcctcggcgcgtgtcccgagctgccggaaaactgcaaaccggtttgggaacatttttcccgatattga

SEQ ID NO: 43102 - DNA, 2439 bp, Neisseria meningitidis
atgacagaaaaatcccataaaaaaacagcaaaaggcagggcgggaagcccgtccccaacgtccgcacgcaacaagaaagccgacaacggcgcacggggcaataaagtttccgagcggctcaaggcggtcaaagagttgcagaaaaccgaaaccaaaaaggcgcgtcccgaacatgtcgtcaaccttatcggcgacgcactgtggctgatgggtttggcggcaaccctgtatttggcgatttccctgatcagtttcgatatgggcgatccgtcttggtcgcacagttcgccggttgtggaagatgtcgccaattggggcggactgttcggcgcgtatgttgccgatgtcggctattatcttttcggctggtcgttctggtggtggatagcggctgcctgcgtcgtgctgtataaaaatttccgcctgcacgcaaaacagacggaaaacgaggcatacaaccacaaaatcgctgccgccgcgctgtttgtcctgacggtcttcagccccgtcttggagtattttgtgctgggcggaaaatatgccgactccctgcctgtcggagcaggcggtatggtcggcatacgcgtcggcgcagtgtttgcgtggctgctggggaaatcgggcagcctgctgattatcttggttgttctgctgttgtcgttgtccctgctggtgcagatttcatggctggaatttttgaacggtgcgggcagggcggttcaaaaccgcctgagtgccttatccggcaaggtcatggctttaggaaaacgccggccgaataccaaaacagacggtgtcgatacccaaaatacacggcgcatggtaaaagaagccaagaatattacggccaaacccgttgccttgcccgaaggcagcagcagcaaccgcaaatccgtcgcggtttccgtcgcgccgccgcccaaaattcaggtttctctgtttgaagatgacgaacctcggcaggcgggcgaataccacaagcctacattgaacctattgcggattcctgacagcgaacccgtcagcatcaatcccgccgaattggagcgcactgccgaactgatcgaatccaaactggcagaattcggcatcggcgtacaagtcgtatccgccacatccggccccgtcatcacgcgctacgaaatcgaacccgcgcaaggtgttaaaggcagccaaattgttgccttgtcgaaagatttggcacgctctatgtcgctgcagtccgtgcgtatcgtcgaaaccatcgcaggtaaaaacacgatgggcatcgagttgcccaacgacaaacgccaagacgtgatgttgagtgaaatcttgtcctcgcccgtgtttgccgaagccaaatccaagctgaccgtcgcgctgggcaaagacattgccggtacccccgttgtcggcgacttggcgaaaatgccgcaccttttggtcgccggtatgactggttcgggcaagtccgtcggcgtgaacggcatgattatgtctatgcttttcaaagctacgcccgacgaagtccgcttcattatgatagacccgaaaatgctcgagttgagcatttacgacggtattccgcacctgctctgtcccgtcgtgaccgatatgcgcgaagcagggcaggcgttgaactggtgcgtcgccgaaatggaaaaacgctaccgcctgctttcccatgccggtgtgcgtaatttggagggcttcaaccaaaaagtcgaagccgcaaaagcggcaggcaagccgctgctcaatccgttcagcctgaaccccgacgagcccgagccgctggaaaaactgccgttgattgtggtcgttatcgacgaacttgccgacctgatgatgaccgaacgcaaagccgtcgagcagcaaatcgcccgtctcgcccaaaaagcgcgcgccgccggtatccatatgattgtcgccacccaacgtcccagtgtcgatgtcgttaccggcctgattaaagccaacatcccgacgcgtatggcgtttaccgtgcaaagcaaaatcgacagccgtaccatcctcgaccaaatgggcgcggacgaactgctcaaatatggcgattcgctgttcctccagcccggcagtgccgaaccgactcgcctgcaaggcgcgtttgtttcagacgacgaagtacatcaagtcgtcaactatgtcaaatcgcaagccccagccgactatattgaaggtctgctcagcggcgaggccgcgctggaaactgccaatatcgttaatccgaatgcagacagcgacgaattgttcgatcaggcagtcgcctatgttttggaaagcaaaaaaacctccatttcgtctttgcagcggcagctgcgcatcggctataaccgcgcggcaaacctgatggaggcactggaaaatgcgggtgtcgtttcttccaccgacctcaacggcagccgtaaaattttggcgcacaaggaccatttgtag

SEQ ID NO: 43103 - DNA, 1743 bp, Neisseria meningitidis
atgaaattttttcctgctccatgtctgttggttatcctggctgtcataccccttaaaaccttagctgccgatgaaaacgatgcagaacttatccgttccatgcagcgtcagcagcacatagatgctgaattgttaactgatgcaaatgtccgtttcgagcaaccattggagaagaacaattatgtcctgagtgaagatgaaacaccgtgtactcgggtaaattacattagtttagatgataagacggtgcgcaaattttcttttcttccttctgtgctcatgaaagaaacagcttttaaaactgggatgtgtttaggttccaataatttgagcaggctacaaaaagccgcgcaacagatactgatcgtgcgtggctacctcacttcccaagctattatccaaccacagaatatggattcgggaattctgaaattacgggtatcagcaggcgaaataggggatatccgctatgaagaaaaacgggatgggaagtctgccgagggcagtattagtgcattcaataacaaatttcccttatataggaacaaaattctcaatcttcgcgatgtagagcagggcttggaaaacctgcgtcgtttgccgagtgttaaaacagatattcagattataccgtccgaagaagaaggcaaaagcgatttacagatcaaatggcagcagaataaacccatacggttcagtatcggtatagatgatgcgggcggcaaaacgaccggcaaatatcaaggaaatgtcgctttatcgttcgataaccctttgggcttaagcgatttgttttatgtttcatatggacgcggtttggcgcacaaaacggacttgactgatgccaccggtacggaaactgaaagcggatccagaagttacagcgtgcattattcggtgcccgtaaaaaaatggctgttttcttttaatcacaatggacatcgttaccacgaagcaaccgaaggctattccgtcaattacgattacaacggcaaacaatatcagagcagcctggccgccgagcgcatgctttggcgtaacagacttcataaaacttcagtcggaatgaaattatggacacgccaaacctataaatacatcgacgatgccgaaatcgaagtacaacgccgccgctctgcaggctgggaagccgaattgcgccaccgtgcttacctcaaccgttggcagcttgacggcaagttgtcttacaaacgcgggaccggcatgcgccaaagtatgcctgcaccggaagaaaacggcggcgatattcttccaggtacatctcgtatgaaaatcattactgccagtttggacgcagccgccccatttattttaggcaaacagcagtttttctacgcaaccgccattcaagctcaatggaacaaaacgccgttggttgcccaagataaattgtcaatcggcagccgctacaccgttcgcggatttgatggggagcagagtcttttcggagagcgaggtttctactggcagaatactttaacttggtattttcatccgaaccatcagttctatctcggtgcggactatggccgcgtatctggcgaaagtgcacaatatgtatcgggcaagcagctgatgggtgcagtggtcggcttcagaggagggcataaagtaggcggtatgtttgcttatgatctgtttgccggcaagccgcttcataaacccaaaggctttcagacgaccaacaccgtttacggcttcaacttgaattacagtttctaa

SEQ ID NO: 43104 - DNA, 1254 bp, Neisseria meningitidis
atgcagacttatctcgtcggcggtgccgtccgcgattatcttttgggcttgcccgtcaaagaccgcgattgggtggtcgtcggcgcagacgcacaaaccatgctggcgcaaggcttccagccggtcggcaaagattttcccgtgtttctccatcccgaaacacacgaagaatacgccctcgcccgcaccgagcgcaaaaccgccaaaggttacgtcggtttcagtttccacgccgacaaagacgttacgctggagcaggatttgatgcgccgcgacctgaccatcaacgcgatggcgcaagatgcggacggcaagattatcgaccctttcggcggacaacgggatttggcggcaggcattttgcgccacgtttccccagcctttgccgaagaccccgtccgcatcctgcgtactgcccgctttgccgcgcgttacaagtttgaaatcgccgaagaaaccataaagctgatgcggcagatggtggaaaacggcgaagcggacgcattggttgccgaacgcgtctggcaggagtttgcgaaaggtttgatggaaaaaaatccgcgcaaaatgattgaagtgttgcgcgaatgcggcgcgctcaaagtcttgctgcccgaagtcaatgccctcttcggcgtgccgcaacgcgccgactaccatcccgaaatcgacagcggcatccataccctgatgacgctgcaacgcgccgccgatatgggcttgagcctgcccgaacgctatgccgccctgctgcacgacttgggcaaagccaaaacaccgtccgacatcctgccgcgccaccacggacacgacctcgccggtgtcgaacccgtgcgcgaagtcaatcagcggctgcgtgcgccgaaacattgcgccgagcttgccgaattggtttgccgttggcacattattttccaccaagtcggacagcttaaaagccaaaccattctgaacgttttgaaaaaaaccgacgctttcagacgacccgaacgctttcagacggcattgaacgtctgcattgccgacacgcaaggccgtctgaaccgcgaacacacgccctacccgcaacgcgcgcactggctcgccttactcgaagccgccaatcaggcggattcgggcaaaatcgccgccgaatgccgcgcacagggaaaagcgcaccttatcgccgaacaaatcgaccgggcgcggctggcacaaatcgccccattgcaaaaagcgtttcgagcggcgcaagacaaaacagaaaaacattaa

SEQ ID NO: 43105 - DNA, 312 bp, Neisseria meningitidis
atgtttaatcaaactcaaactgtaacttatcctgcaacttttttgggagccaaaaaattcaaaggcgaaattgatggctctaatatcgacacttgttccgtattggttgcaacacctttgccggcacagtcgggaaatgctgttggattcacggcagcacaaatgaagttcggggacagtaagaatttctcaaaattagagaatctcaaatacccgtgcgaagttatggtaacggttgaaatgacttcgacaggtaagggcatggttccttcattaattgattttcaggtggcagaaaagccgaaaggttga

SEQ ID NO: 43106 - DNA, 279 bp, Neisseria meningitidis
atgtcccgaaacctgcttgtccgctggctcgtcgtctgcctcatccccttggcgacgcttgccgttttcgtcgccaatccgcccgaagacaaaccccagcatttgattaacggcatcatccttgcctgcgaagcgacgtttttgttcaaattcgtccttttcgacaccatcaagcatcatttgaaacaagagtttgatttgaaacgtcaaactatgttgctgtttattccgattattttgctgattgtgtatttgttccactattttggcgcgttttag

SEQ ID NO: 43107 - DNA, 642 bp, Neisseria meningitidis
atgccatctgaaaaaccaatgaacagaagaaccttcctcctcggcgcaggcgcgttgctgcttaccgcctgcggcagaaaatccgcccgaacccacgccaaaattcccgaaggaagcaccgtacttgccttgggcgattcgcttaccttcggctacggcgcaaaccctggcgaatcctaccccgcgcaactgcaaaaactgacgggttggaatattgtcaacggcggcgtatcgggcgatacatctgcccaagccctgtcgcgcctgcccgcgctgttggcacgcaaacccaagcttgtgattgtcggcataggcggcaacgactttctgcgcaaagttcccaaggagcagacccgcgccaatatcgcgaaaatcatcgaaaccgtgcagaaggaaaacatccccgccgtcctcgtcggcgtgccgcacatcacactgggtgcgttgttcgggcatttgagcgatcatccgctgtatgaggatttgtccgaggaatacggcattccgctgttcggcggcgcgtgggcggaaattttgggcgataataatctgaaatccgaccaaatccacgccaacggcaaaggctatcggaaatttgccgaagatttgaatcaatttttgagaaaacaggggtttagataa

SEQ ID NO: 43108 - DNA, 435 bp, Neisseria meningitidis
atgtgcgggttgtggctgctgcgcgccctgactgccaaactgccccaacagcgttatgcggctttgtttattacactgttttttgccgcagtattggtgttcgggcggcatgattcgatgtattggtatcccgtcctcgtcaatctgatgatgttggcggtgttcggcggcagcctgtttgccgggcagacggtgattgaaaaacttgcgcggctgcaacagcccgacctgcctgaaaaagccgtgcgctatacccgccgggtaacgcaggtttggtgcgtattttttataatcaacgggacgcttgccgctttgttggcacggttggggcgatatgattggtgggcggtttataccggcgtgattgcctatgtattgatggggatgctgtttgccggcgaatggctttaccgcaaactcgttttgaaagtctga

SEQ ID NO: 43109 - DNA, 696 bp, Neisseria meningitidis
atgagtgagttgattttgaaatgcgaaggcgtgggcaaacgctatcgggacggcggtttggacgttcgggtgctgcacggcttggatttggaaatccacgcaggggaaagcaccggcatcatcggttcttcgggcagcggcaaatcgacgctgctgcatattttgggcgggctggatatgccgtctgaaggcagggtgctgctgatgggcgaggatttgcgtaccttaaaccagcggcgtttgggcgatttacgtaaccgccatctcggtttcgtgtaccagttccaccatcttctgcctgaattttcggcactggaaaatgtgatgatgccgcttctgatcggcaaaaaaagccgtgaagaggctgcggaggcggcaatggcgatgctggaaaaggtcggactgaaacaccgttcgacgcaccgcgcgggcgaactttcaggcggtgagcggcagcgtgccgccattgcacgcgccttggttacccaacccaaatgcctgcttgccgacgaaccgaccggcaatctcgatcgtgcgaacgccaggaatgttttggatatgatgctggaactgaaaacagaattgggaacggggctggtggtcgtaacgcacgacgacgaactcgccggccgcttcgagcgcgtgatggtcatgaaagacggcagcctgcaccccaaacagggcgcaaacgcctaa

SEQ ID NO: 43110 - DNA, 312 bp, Neisseria meningitidis; identical to SEQ ID NO: 38411

SEQ ID NO: 43111 - DNA, 1578 bp, Neisseria meningitidis
atgatgaaaaaatctttccttacgcttgttctgtattcgtctttacttaccgccagcgaaattgcctatcgctttgtatttgggattgaaaccttaccggcggcaaaaattgcggaaacgtttgcgctgacatttgtgattgctgcgctgtatctgtttgcgcgttataaggtgacgcgtttgttgattgcggtgttttttgcgttcagcattattgccaacaatgtgcattacgcggtttatcaaagctggatgacgggcatcaattattggctgatgctgaaagaggttaccgaagtcggcagcgcgggtgcgtcgatgttggataagttgtggctgcctgtgttgtggggcgtgttggaagtcatgttgttttgcagccttgccaagttccgccgtaagacgcatttttctgccgatatactgtttgccttcctaatgctgatgattttcgtgcgttcgttcgacacgaaacaagagcacggtatttcgcccaaaccgacatacagccgcatcaaagccaattatttcagcttcggttattttgtcggacgcgtgttgccgtatcagttgtttgatttaagcaggattcccgcctttaagcagcctgctccaagcaaaatcgggcagggcagtgttcaaaatatcgtcctgattatgggcgaaagcgaaagcgcggcgcatttgaagctgtttggctacggacgcgaaacttcgccgtttttaacccggctgtcgcaagccgattttaagccgattgtgaaacaaagttattccgcaggctttatgactgcagtgtccctgcccagttttttcaatgcgataccgcacgccaacggcttggaacaaatcagcggcggcgataccaatatgttccgcctcgccaaagagcagggctatgaaacgtatttttacagcgcgcaggcggaaaacgagatggcgattttgaacttaatcggtaagaaatggatagaccatctgattcagccgacgcaacttggctacggcaacggcgacaatatgcccgatgagaagctgctgccgttgttcgacaaaatcaatttgcagcagggcaagcattttatcgtgttgcaccaacgcggttcgcacgccccatacggcgcattgttgcagcctcaagataaagtattcggcgaagccgatattgtggataagtacgacaacaccatccacaaaaccgaccaaatgattcaaaccgtattcgagcagctgcaaaagcagcctgacggcaactggctgtttgcctatacctccgatcatggccagtatgttcgccaagatatctacaatcaaggcacggtgcagcccgacagctatctcgtgccgctggtgttgtacagcccggataaggccgtgcaacaggctgccaaccaggcttttgcgccttgcgagattgccttccatcagcagctttcaacgttcctgattcacacgttgggctacgatatgccggtttcaggttgtcgcgaaggctcggtaacgggcaacctgattacgggtgatgcaggcagcttgaacattcgcgacggcaaggcggaatatgtttatccgcaatga

SEQ ID NO: 43112 - DNA, 2748 bp, Neisseria meningitidis
ttgaagccgatttgtttttaccttatgggtgttacgctatatcattatagttatgccgaagatgcagggcgcgcgggcagcgaggcgcagatacaggttttggaagatgtgcacgtcaaggcgaagcgcgtaccgaaagacaaaaaagtgtttaccgatgcgcgtgccgtatcgacccgtcaggatatattcaaatccagcgaaaacctcgacaacatcgtacgcagcatccccggtgcgtttacacagcaagataaaagctcgggcattgtgtctttgaatattcgcggcgacagcgggttcgggcgggtcaatacgatggtggacggcatcacgcagaccttttattcgacttctaccgatgcgggcagggcaggcggttcatctcaattcggtgcatctgtcgacagcaattttattgccggactggatgtcgtcaaaggcagcttcagcggctcggcaggcatcaacagccttgccggttcggcgaatctgcggactttaggcgtggatgacgtcgttcagggcaataatacctacggcctgctgctaaaaggtctgaccggcaccaattcaaccaaaggtaatgcgatggcggcgataggtgcgcgcaaatggctggaaagcggagcatctgtcggtgtgctttacgggcacagcaggcgcagcgtggcgcaaaattaccgcgtgggcggcggcgggcagcacatcggaaattttggcgcggaatatttggaacggcgcaagcagcgatattttgtacaagagggtgctttgaaattcaattccgacagcggaaaatgggagcgggatttacaaaggcaacagtggaaatacaagccgtataaaaattacaacaaccaagaactacaaaaatacatcgaagagcatgacaaaagctggcgggaaaacctggcaccgcaatacgacattacccccatcgatccgtccagcctgaagcagcagtcggcaggcaatctgtttaaattggaatacgacggcgtattcaataaatacacggcgcaatttcgcgatttaaacaccaaaatcggcagccgcaaaatcatcaaccgcaattatcagttcaattacggtttgtctttgaacccgtataccaacctcaatctgaccgcagcctacaattcgggcaggcagaaatatccgaaagggtcgaagtttacaggctgggggcttttaaaggattttgaaacctacaacaacgcgaaaatcctcgacctcaacaacaccgccaccttccggctgccccgcgaaaccgagttgcaaaccactttgggcttcaattatttccacaacgaatacggcaaaaaccgctttcctgaagaattggggctgtttttcgacggtcctgatcaggacaacgggctttattcctatttggggcggtttaagggcgataaagggctgctgccccaaaaatcaaccattgtccaaccggccggcagccaatatttcaacacgttctacttcgatgccgcgctcaaaaaagacatttaccgcttaaactacagcaccaataccgtcggctaccgtttcggcggcgaatatacgggctattacggctcggatgacgaatttaagcgggcattcggagaaaactcgccgacatacaagaaacattgcaaccggagctgcgggatttatgaacccgtattgaaaaaatacggcaaaaagcgcgccaacaaccattcggtcagcattagtgcggacttcggcgattatttcatgccgttcgccagctattcgcgcacacaccgtatgcccaacatccaagaaatgtatttttcccaaatcggcgactccggcgttcacaccgccttaaaaccagagcgcgcaaacacttggcaatttggcttcaatacctataaaaaaggattgttaaaacaagatgatacattaggattaaaactggtcggctaccgcagccgcatcgacaactacatccacaacgtttacgggaaatggtgggatttgaacggggatattccgagctgggtcagcagcaccgggcttgcctacaccatccaacatcgcaatttcaaagacaaagtgcacaaacacggttttgagttggagctgaattacgattatgggcgttttttcaccaacctttcttacgcctatcaaaaaagcacgcaaccgaccaacttcagcgatgcgagcgaatcgcccaacaatgcgtccaaagaagaccaactcaaacaaggttatgggttgagcagggtttccgccctgccgcgagattacggacgtttggaagtcggtacgcgctggttgggcaacaaactgactttgggcggcgcgatgcgctatttcggcaagagcatccgcgcgacggctgaagaacgctatatcgacggcaccaacgggggaaataccagcaatttccggcaactgggcaagcgttccatcaaacaaaccgaaactcttgcccgccagcctttgatttttgatttttacgccgcttacgagccgaagaaaaaccttattttccgcgccgaagtcaaaaatctgttcgacaggcgttatatcgatccgctcgatgcgggcaatgatgcggcaacgcagcgttattacagctcgttcgacccgaaagacaaggacgaagacgtaacgtgtaatgctgataaaacgttgtgcaacggcaaatacggcggcacaagcaaaagcgtattgaccaattttgcacgcggacgcacctttttgatgacgatgagctacaagttttaa

SEQ ID NO: 43113 - DNA, 468 bp, Neisseria meningitidis; identical to SEQ ID NO: 40006

SEQ ID NO: 43114 - DNA, 693 bp, Neisseria meningitidis
atgaccgcctttgtccacaccctttcagacggcatggaactgaccgtcgaaatcaagcgccgtgccaagaaaaacctgattatccgccccgccggcacacataccgtccgcatcagcgtcccaccctgcttctccgtctccgctctaaaccgctggctgtatgaaaacgaagccgtcctgcggcaaacactggcgaaaacaccgccgccgcaaactgccgaaaaccggctgcccgaatccatcctcttccacggcagacagcttgccctcaccgcccatcaagacacgcaaatcctgctgatgccgtctgaaatccgtgttcccgaaggcgcacccgaaaaacagcttgcgctgctgcgggactttttggaacggcaggcgcacagttacctgattccccgcctcgaacgccacgcccgcaccacacaactgttccccgcctcctcctcgctgacctctgccaaaaccttctggggcgtgtgccgcaaaaccacaggcatacgcttcaactggcggctggtcggcgcaccggaatacgttgccgactatgtctgcatacacgaactctgccacctcgcccatcccgaccacagccccgccttttgggaactgacccgccgcttcgccccctacacgcccaaagcgaaacagtggctcaaaatccacggcagggaacttttcgccttaggctga

SEQ ID NO: 43115 - DNA, 441 bp, Neisseria meningitidis
gtgaacatccgccgtgccgtttgtgccgattgtgaggagctggccgcactcgatgccgtctgcaacccgtccgcatggacgcaacgccaatttgagtccgcactggtttcgccgtccgaacaggttttccttgcggaaaaagacggcgggattgccgcctttatcgtttggcagaacctgcccgacgaatccgaactgcacctgattgccaccgcgcccgaatgccgccgccaaggaattgcgtccgccctgctcgaatattggttcacacatctgcccgaagacacgcaacgcctgctgctcgaagtccgtgcaggcaacaccgccgcacaggcactgtacacggcgcacggcttcagcattacgggcaggcggaaaaactattaccgtacagccgacggtaaaaccgaagatgccgtcttaatggagaaaatatgttaa

SEQ ID NO: 43116 - DNA, 1098 bp, Neisseria meningitidis
ttgccccatgccgtttttttacactacaatcccctagactatcctgcaaaacgcaccaaaggaatacgccacaataacctgccgcctttcagacggcacaaacctttccgaaacgagcaaactatggacacactgacccgattcctccccgaacacctgcaacaaaaccagctgcccgaagcactcggcggcgttttactgtccgttgtttccgcctgcaccgaaatcaacgccaaagtccgcctcggcgcactggccggcgtattgggtatggcgggcacgggcaatattcagggcgaagaccaaaaaaaactggatgttatcgccaacaacatcatgattgacacactcaaagccaattctgccgttgccgggctggcgagcgaggaagaagacactttcgtaaatgccggtgaaaacggacgctatctcgtcctattcgaccctttagacggatcgtccaatattgatgtcaacatttccgtcggtacgattttctccatccttgaaaaacccgaaggcgcattggcaaccgaatcattccttcaaacgggcagacagcagcttgccgctggttacgttctttacgggcctcaaacccagctcgtattcacattcggacatggcgtatatatgttcacgctcaatgccgaaaacgaatttgtgctgaccaaagaaaacccgaaagtacccgaaagtaccaaagaatttgccatcaatatgtccaaccgccgccactggctgccccccgtccaacaatacatcgacgagctcttggcgggcgaaaccggtacgcgcggcaaaaactacaatatgcgctgggtagccagtatggttgccgaaatccaccgcatcctgatgcgcggcggcgtgttcatgtatccgcaagacaaacgcgaccccgctaaacccggcaaactgcgcctgatgtacgaagccaaccctatgagcctgatactcgaacaggcgggcgcatcggcaagcaacgcatatcaagccatgctcgacatacagcccgaaaacctgcaccaacgcgtcgccgtcttcatgggcagcagcgaagaagtcgcctatctcgaccgcctgcacgcaaaatag

SEQ ID NO: 43117 - DNA, 240 bp, Neisseria meningitidis
atgccccatacccttcccgatatttcccaatgcatcagacaaaatttagaacaatatttcaaagacctgaacggtaccgaaccttgcggcgtgtacgatatggtattgcatcaggtggaaaaaccgctgctggtgtgcgtgatggagcaatgcggcggcaaccagtccaaagcatccgtgatgctggggctgaaccgcaataccctgcgtaagaagctgattcaacacggtttgttgtga

SEQ ID NO: 43118 - DNA, 597 bp, Neisseria meningitidis
ttgcggcaaggcttgtggaatgtgtttttgcctgcttctgatgccgaaattttatttttcttgccgaacaatttgttttctcaaggcaaacttgattataatgggggcatgaaaaaataccttatccctctttccattgcggcagttctttccggctgccagtctatttatgtgcccacattgacggaaatccccgtgaatcctatcaataccgtcaaaacggaagcacctgcaaaaggtttccgccttgcctcttcgcattggacggatgttgccaaaatcagcgatgaagcgacgcgcttgggctatcaggtgggtatcggtaaaatgaccaaggttcaggcggcgcaatatctgaacaacttcagaaaacgcctggtcggacgcaatgccgtcgatgacagtatgtatgaaatctacctgcgttcggcgatagacagccagcggggcgcaatcaatacggaacagtccaagctgtatatccagaatgccttgcgcggctggcagcagcgttggaaaaatatggatgtcaaacccaacaaccccgcatttaccaactttttgatggaagtgatgaagatgcagcccttgaaatga

SEQ ID NO: 43119 - DNA, 363 bp, Neisseria meningitidis
atggatatccgatatttcggcacaacgccccgctattccgaagccgtcggcgcaaacggcttgattttcctctccggcatggttcccgaaaacggtgaaacggctgccgaacagactgccgacgtgcttgcccaaatcgaccgctggctggcggaatgcggctcggacaaagcgcacgttttggatgcggtcatctatctgcgcgatatgggcgactatgcggaaatgaacggcgtgtgggacgcttgggttgccgccggcagaacgcccgcccgcgcctgcgtggaagcacggctcgcccgtccggagtggcgcgtcgaaatcaaaataaccgccgtgaagagagacgcggcaactgcataa

SEQ ID NO: 43120 - DNA, 1446 bp, Neisseria meningitidis
atgacccaatacacattgaaacaggcaagcgtcctgttgcagtccaaacagatttccgccgtcgaactggcaagcgcataccttgccgccatcgccgaaaaaaatcccgccctcaacggctatatcaccatcgaccaagataaaacccttgcagaagcccgtgccgccgacgaacgtatcgcgcagggcaacgcctccgcgcttaccggcgtacccgtcgcctacaaggatattttctgccaaaccggctggcgcagcgcgtgcgcttccaaaatgctcgacaacttcatctccccctacaccgccaccgtcgtccaaaacctgctcgacgaaggtatggtaacgctcggccgcaccaatatggatgagttcgctatgggttcgaccaatgaaaactcattctacggtgcagccaaaaacccatggaatcttgagcacgtccccggcggttcgtcaggcggttccgccgccgtcgttgccgcgcgcctcgcccctgccgcgctcggttcggacaccggcggctctatccgccaacccgcatcgcactgcggcattaccggcatcaaacccacatacggcacggtttcccgcttcggtatggtcgcctacgcctccagcttcgatcaaaccggcccgatggcgcaaactgccgaagactgcgcgattctgttaaacgcgatggcaggtttcgaccccaaagactccaccagcctcgagcgcgaaaaagaagactacacccgcgatttgaaccaaccgctcaaaggtttgaaaatcggcctgcccaaagaatatttcggcgaaggcaacagcgccgatgttctgacggcattgcaaaacaccattgatttgctgaaagcccaaggcgcggaattgattgaagtttccctgccgcaaaccaagctgtccatccccgcctactacgtcctcgcctccgcagaagccagcaccaacctttcacgttacgacggcgtacgttacggacaccgtgccgcccaattcgccgatttggaagaaatgtacggcaaaacccgcgccgaaggtttcggcagcgaagtcaaacgccgcatcatgatcggcacttatgtactgtcgcacggctactacgatgcctactatctcaaagcccaaaaactgcgccgcctcgttgccgatgattttcagacggcatttgcacggtgcgacctcatcctcgcgccgaccgcacccactgcagccccaaaaatcggagcggatgcttcgccggttgaaacctacttgagcgatatctacaccatcgccgtcaacctcgccggactgcccgcattgaccctgcccgcaggcttcagcggcggcggactgcccgtcggcgttcagcttgtcggcaactacttcgccgaagccaaaatcctcggtgcggcgcatcaaatccaactcaacagcgattggcacggcaaacgacccgaatga

SEQ ID NO: 43121 - DNA, 681 bp, Neisseria meningitidis
atgattttccaaacagtctggttttcagatatggtactgtcggtttcgtggattgtccttatcctgatactggcagcttccgcgccgtcggcattccgctcgcttgcccgctaccgttccgcccttcccctgtgtaccgtaattttttccgcagcatggtgtctgaacgcctctgccggcggcggacagcttgcccagatgaactaccacctgctcgccgtcaatttggttgcactgatgatgggcacttccgccgccctttggcttgccgcgctgctgatgctgccctactgcctgctgtttgccggttctgtcggcgcatatccgccgaacgctttggtgctgatactgcccgcgctgaccgtcaaccgcctgtcgcgtatgctggtcaaccgcctgccgcccaatattttcatctttattttcgtcaacggctttctcgcttccgccgccggcattctgctgaccgggctggtgctgaccggtattttggatgccgcaaacgcttttccgtccgaaatattgtggacgaccgccctgcccgtctttattctgctggcgtgggcggaagccttcctcagcggcatttcaactgccatatttgttgcactgaagccccattggattaacactttcgacgacaaccgctatcttaagtccgaccgcggcatatggcggtag

SEQ ID NO: 43122 - DNA, 1101 bp, Neisseria meningitidis
atggaaacacagctttacatcggcatcatgtcgggaaccagcatggacggggcggatgccgtactgatacggatggacggcggcaaatggctgggcgcggaagggcacgcctttaccccctaccccggcaggttacgccgccaattgctggatttgcaggacacaggcgcagacgaactgcaccgcagcaggattttgtcgcaagaactcagccgcctatatgcgcaaaccgccgccgaactgctgtgcagtcaaaacctcgcaccgtccgacattaccgccctcggctgccacgggcaaaccgtccgacacgcgccggaacacggttacagcatacagcttgccgatttgccgctgctggcggaacggacgcggatttttaccgtcggcgacttccgcagccgcgaccttgcggccggcggacaaggcgcgccactcgtccccgcctttcacgaagccctgttccgcgacaacagggaaacacgcgcggtactgaacatcggcgggattgccaacatcagcgtactcccccccgacgcacccgccttcggcttcgacacagggccgggcaatatgctgatggacgcgtggacgcaggcacactggcagcttccttacgacaaaaacggtgcaaaggcggcacaaggcaacatattgccgcaactgctcgacaggctgctcgcccacccgtatttcgcacaaccccaccctaaaagcacggggcgcgaactgtttgccctaaattggctcgaaacctaccttgacggcggcgaaaaccgatacgacgtattgcggacgctttcccgttttaccgcgcaaaccgtttgcgacgccgtctcacacgcagcggcagatgcccgtcaaatgtacatttgcggcggcggcatccgcaatcctgttttaatggcggatttggcagaatgtttcggcacacgcgtttccctgcacagcaccgccgacctgaacctcgatccgcaatgggtggaagccgccgcatttgcgtggttggcggcgtgttggattaatcgcattcccggtagtccgcacaaagcaaccggcgcatccaaaccgtgtattctgggcgcgggatattattattga

SEQ ID NO: 43123 - DNA, 606 bp, Neisseria meningitidis; identical to SEQ ID NO: 38451

SEQ ID NO: 43124 - DNA, 768 bp, Neisseria meningitidis
ttgaaagaaactatgccgtcgattatttgccggttccacttcgacatcgccgcctggcgggtttcgggcagcaaaatgcgcgatatggcccagtgggcaaaatgggcggaatgtccggattttgccgacggtttgcccgatgtcaggccggaattgccgttcctgcccgctatgcagcgccgccgtttgagtaaggcggcgcgtttggtatgcgacgcggcttgggacattgcctccgcccatcccggcagtccggtagtttatgcctcgcacgacggggaaatggcacgcagtttcgatttgtggttggaactgttgaaatcgcataccgtgtcgccgacttcgttcggtttgtcggtgcacaatgcaacggcggggcaatggtcgatattgcgtcaggatatgagcgagcagacggcattggccgtgtgtgccgacggtgtggaaacggcattggcggaagcggcatcactgttggaagagggatgcgggtcggttttggttttggcggcggacgatccgctgccggaaggatatgccgtatcggcgactcgcgcgccgtttgcttatgctttggcgatggttctgaccaaagggacgcgttacagcctgactttgtctgcttcggacgatatgccgtctgaagccggtatgctgcccgaggcatattggagcggtttggaatgggtgcgctttctgctgaacggcagtcgagaatgccgccgggtatatcgcaatcgtgaatggctgtggcagcggaatggataa

SEQ ID NO: 43125 - DNA, 288 bp, Neisseria meningitidis
atgaagataacgcactgcaaattaaagaaaaaagtacagaaagaactgctccgtttttttgtactcgaagttaccgcccgttctgccgccgatattttgggtatccatcccaattcggcagcactgttctaccgtaaaatccgcacggttatcaaccatcatttggccttggctgccgatgaggtttttgagggccctgtcgagccggacgaaagcgatttcggcggacggcgtaaaggcagacgtggtcgcgggcggcaggaaaagtggttgtcttcggcattctga

SEQ ID NO: 43126 - DNA, 696 bp, Neisseria meningitidis
atgaaagcgatgatactggcggcaggacgcggcgagcgtatgcgccctttgaccgataccactccgaagccgctgcttgatgtggcgggtaagcctctaatcggttggcacctatgccgtctgaagcaggcggggtttaccgaaatcgtcatcaaccacgcttggctgggtcggcagatagaagatgctttgggcgacggctcggcttatggcgtgaacatcgcctattcgcccgaacccgcaggcggtttggaaacggcaggcggcatcgcgcaggcattgccgctgttgggtgggcagccgtttttggtggtcaacggcgacgtgctgaccgacatcgattttaccgccgcgtttcagacggcatcgtccctgccggaacatatttccgcccatctgtggctggtggaaaatccgccgcacaaccccgacggcgatttttccctgctgcccgacagcagcgtgcggccggaagtaaatggcggcaacggattgacattcagcggcgtgggtatttaccgtcctgaaatgtttgacggaatcgaagcgggcagtgtggcgaaactcgcgcccgtattgcgtggcgaaatgcggcaaaaccgcgtgagcggtcagaagcatacgggcttgtggctggatgtcggcacggtatgccgtctgaaagaggctcaagcccttgcaggggcttggaagtaa

SEQ ID NO: 43127 - DNA, 1449 bp, Neisseria meningitidis
atgaacggcgatattggtgtaatcggtttggcggttatggggcaaaacctgattttgaatatgaacgattgcggatttaaggtggttgcctacaaccgcacgactgccaaggtggacgaatttttaaacggcgcggcaaaaggaactaatattatcggcgcgtattctttgcaagatttggtcgataagctggaaaaaccgcgaaaaattatgatgatggttcgtgccggttcggtggttgacgaatttatcgaacaactgcttccgctgttggaagaaggcgacatccttatcgacggcggcaatgccaattaccccgacacgacacggcggacacattaccttgctgaaaaagggattttgtttgtcggcgcgggcgtgtccggcggggaagaaggggcgcggcgcgggccgtccattatgccgggcggggataagcgcgcttgggatgcggtcaagccgatttttcaggcgattgccgccaaaacgtcgcagggcgaaccgtgttgcgactgggtcggcaaagacggtgcggggcattttgtcaaaatggtgcataacggcatcgaatatggcgatatgcagttgatttgcgaagcgtaccagtttatgaaagacggcttggggctgtcttacgacgaaatgtaccgcgtgtttgccgagtggaacaaaaccgagctggattcttatctgattgaaatcacagcggcaattttgggctataaggacgaaggcggcgaaccgctggtcgagaaaatcctcgatacggcagggcaaaaaggtacaggcaaatggacgggcatcaatgctttggatttgggtattccgctgacgctgatttccgaagccgtattcgcccgctgcgtttcgtcgttcaaagaacagcgcgtgcagaccggcaaactgttcgcccgaaccgttacgcccgtcgaaggcggcaaacaagaatgggtcgaggcgttgagacaggccctgcttgcatctaaaatcatttcctacgcacaaggctttatgctgatccgcgaagcgggcgaaagctacggctgggatttggactacggcaacactgcgctgctgtggcgcgaggggtgcatcattcgcagcgcattcttaagcaatatccgcgacgcgtatgaaaacaatcccgatttggtgttcttgggtgcggatccgtatttcaaaaatattttggaaaactgcctgccggcgtggcgcaaggtggttgccaaggcggtcgaatgcggcatccctatgccctgcatggcttcggcgattacgttcttggacggctacacgaccgaacgtctgcctgccaacctcttgcaggcacagcgcgactacttcggcgcgcacacttacgagcgcaccgacaaaccgcgcggtgagtttttccataccaactggacgggcaagggcggagataccgcttcgacaacctacgatatttga

SEQ ID NO: 43128 - DNA, 987 bp, Neisseria meningitidis
gtgagtggagcagaaagttaccggcatatcacggtcttgctgaatgaggcggtggatgcgcttgccgtgcgcgaagacggtgtctatgtggacggtacgttcggcaggggagggcattcccggctgattttgtcgcgtttgggcgatgcggggcggttgattgttttcgacaaagacccgcaggcgattgctgtggcagaagagctggcgcgttcggacaaacgggtcggtgtcgtgcatggcggttttgcttcgtttcagacggcattggacggtttgggtatcggcaaggtggacggtgcgctgtttgatttggggatttcgtccccgcaaatcgatgacggcagccgcggtttcagcttccgtttcgatgcccctttggatatgcgtatggatacgacgcgcggtatgtctgccgcagagtggatagcggttgcgtcggaacaggatttgcacgaggtaatcaagaattatggtgaagagcggtttagccgccggattgcgcgcgccattgttgcgcaacgggcggaaagtccaatcgatacaacccgcaagctggcgcagatcgtggcacaaaacgtccgtactcgcgagcgggggcaggatcctgcgacgcgcaccttccaggcggtccgcatctttattaaccgcgagcttgaagaagtaggggcagtattgccgcaggtcatgtgtcgtctgaaagagggcggacgtttggcggtcattgctttccattcgttggaagatcgcattgtgaagcagtttgtcaaaaaatattcgcaacacgcgcccctgccgcgctgggcggcggtcagggaagcggatttgcccgagctgcccctgaaaatcgtgggcagggcattaaagccgggtgaggcggaaattgccgccaatccgagggcgagaagtgcggttttgcgtgtggcggagcggactgccggtccgataccggaacaatcacagagaaaaacgtctgaatggcaatga

SEQ ID NO: 43129 - DNA, 897 bp, Neisseria meningitidis
ttgaatccgacgaatgatttgaaaacgtggcaacagagggcgcaggcgcaaacagagctgctgcttgaacggtttttaccgtctgagggggaaataccgcacacactgcacgaagcgatgcgttatgcggctttggacggcggtaagcgtctgcggccgatgctggttctggcagcttcggaattaggcgaagccgtgcatgaagcagtagaacaggcaatggcggcaatcgaaatgatccacgtctattctttggttcacgacgatatgccggcgatggacaacgacagcctgcggcgcggcaaaccgacttgccacatcaaatatggcgaagcgaccgcccttctgaccggcgacgctttgcagacacaggcatttgacgtgttgagccgtccgacagaactgcccgccgcacgccagttggcaatgttgtcggtgttggcgaaagcgggcggcagcaggggtatggcgggcggtcaggcaatcgatttggcgaatgtcggcaaacaaatggttcaagccgatttggaacagatgcacagcctgaaaacgggtgcgctaatccgtgcggcggttttattgggggcgacggcgtgtcctgatctgtcagatgcggaactttccgtattggacgcttacgcggcaaaactggggctggcgttccaagtcattgacgatgtgttggattgtgaagcggacacggcgactttgggcaaaacggcgggcaaagacgcagacaacgacaagccgacttatgtgaaactgatgggcttggaagcggcgcgctcatacgcacacaaactggttgccgaagcggtcgcgctgctcgaacccttcggcgacaaagccctgcgcctgcggcagttggcagaatttgcagtcgcccgcaaatattaa

SEQ ID NO: 43130 - DNA, 270 bp, Neisseria meningitidis
atggcaatgaacaaattgaatttccttctgctgcttgcggtgtgcgtttccgctttttccgttgtgatgcagcaaaaccagtacaggctcaatttcacagctttggataaggcgaaaaaacaggaaatcgccttggagcaggattatgcgcaaatgaggctgcaacaggcgcgtttggcgaaccacgaagcgatcagggcggcggcagaaaaacaaaacctccatccgccggtttcgggcaatacctttatggtggagcatcaaagatag

SEQ ID NO: 43131 - DNA, 4116 bp, Neisseria meningitidis
  misc_feature 4101, 4102, 4103, 4104, 4105: 'n' is a, c, g or t
atgaataaaggtttacatcgcattatctttagtaaaaagcacagcaccatggttgcagtagccgaaactgccaacagccagggcaaaggtaaacaggcaggcagttcggtttctgtttcactgaaaacttcaggcgacctttgcggcaaactcaaaaccacccttaaaactttggtctgctctttggtttccctgagtatggtattgcctgcccatgcccaaattaccaccgacaaatcagcacctaaaaaccagcaggtcgttatccttaaaaccaacactggtgcccccttggtgaatatccaaactccgaatggacgcggattgagccacaaccgctatacgcagtttgatgttgacaacaaaggggcagtgttaaacaacgaccgtaacaataatccgtttgtggtcaaaggcagtgcgcaattgattttgaacgaggtacgcggtacggctagcaaactcaacggcatcgttaccgtaggcggtcaaaaggccgacgtgattattgccaaccccaacggcattaccgttaatggcggcggctttaaaaatgtcggtcggggcatcttaactaccggtgcgccccaaatcggcaaagacggtgcactgacaggatttgatgtgcgtcaaggcacattgaccgtaggagcagcaggttggaatgataaaggcggagccgactacaccggggtacttgctcgtgcagttgctttgcaggggaaattacagggtaaaaacctggcggtttctaccggtcctcagaaagtagattacgccagcggcgaaatcagtgcaggtacggcagcgggtacgaaaccgactattgcccttgatactgccgcactgggcggtatgtacgccgacagcatcacactgattgccaatgaaaaaggcgtaggcgtcaaaaatgccggcacactcgaagcggccaagcaattgattgtgacttcgtcaggccgcattgaaaacagcggccgcatcgccaccactgccgacggcaccgaagcttcaccgacttatctctccatcgaaaccaccgaaaaaggagcggcaggcacatttatctccaatggtggtcggatcgagagcaaaggcttattggttattgagacgggagaagatatcagcttgcgtaacggagccgtggtgcagaataacggcagtcgcccagctaccacggtattaaatgctggtcataatttggtgattgagagcaaaactaatgtgaacaatgccaaaggcccggctactctgtcggccgacggccgtaccgtcatcaaggaggccagtattcagactggcactaccgtatacagttccagcaaaggcaacgccgaattaggcaataacacacgcattaccggggcagatgttaccgtattatccaacggcaccatcagcagttccgccgtaatagatgccaaagacaccgcacacatcgaagcaggcaaaccgctttctttggaagcttcaacagttacctccgatatccgcttaaacggaggcagtatcaagggcggcaagcagcttgctttactggcagacgataacattactgccaaaactaccaatctgaatactcccggcaatctgtatgttcatacaggtaaagatctgaatttgaatgttgataaagatttgtctgccgccagcatccatttgaaatcggataacgctgcccatattaccggcaccagtaaaaccctcactgcctcaaaagacatgggtgtggaggcaggctcgctgaatgttaccaataccaatctgcgtaccaactcgggtaatctgcacattcaggcagccaaaggcaatattcagcttcgcaataccaagctgaacgcagccaaggctctcgaaaccaccgcattgcagggcaatatcgtttcagacggccttcatgctgtttctgcagacggtcatgtatccttattggccaacggtaatgccgattttaccggtcacaataccctgacagccaaggccgatgtcaatgcaggatcggttggtaaaggccgtctgaaagcagacaataccaatatcacttcatcttcaggagatattacgttggttgccggcaacggtattcagcttggtgacggaaaacaacgcaattcaatcaacggaaaacacatcagcatcaaaaacaacggtggtaatgccgacttaaaaaaccttaacgtccatgccaaaagcggggcattgaacattcattccgaccgggcattgagcatagaaaataccaagctggagtctacccataatacgcatcttaatgcacaacacgagcgggtaacgctcaaccaagtagatgcctacgcacaccgtcatctaagcattaccggcagccagatttggcaaaacgacaaactgccttctgccaacaagctggtggctaacggtgtattggcactcaatgcgcgctattcccaaattgccgacaacaccacgctgagagcgggtgcaatcaaccttactgccggtaccgccctagtcaagcgcggcaacatcaattggagtaccgtttcgaccaaaactttggaagataatgccgaattaaaaccattggccggacggctgaatattgaagcaggtagcggcacattaaccatcgaacctgccaaccgcatcagtgcgcataccgacctgagcatcaaaacaggcggaaaattgctgttgtctgcaaaaggaggaaatgcaggtgcgcctagtgctcaagtttcctcattggaagcaaaaggcaatatccgtctggttacaggagaaacagatttaagaggttctaaaattacagccggtaaaaacttggttgtcgccaccaccaaaggcaagttgaatatcgaagccgtaaacaactcattcagcaattattttcctacacaaaaagcggctgaactcaaccaaaaatccaaagaattggaacagcagattgcgcagttgaaaaaaagctcgcctaaaagcaagctgattccaaccctgcaagaagaacgcgaccgtctcgctttctatattcaagccatcaacaaggaagttaaaggtaaaaaacccaaaggcaaagaatacctgcaagccaagctttctgcacaaaatattgacttgatttccgcacaaggcatcgaaatcagcggttccgatattaccgcttccaaaaaactgaaccttcacgccgcaggcgtattgccaaaggcagcagattcagaggcggctgctattctgattgacggcataaccgaccaatatgaaattggcaagcccacctacaagagtcactacgacaaagctgctctgaacaagccttcacgtttgaccggacgtacaggggtaagtattcatgcagctgcggcactcgatgatgcacgtattattatcggtgcatccgaaatcaaagctccctcaggcagcatagacatcaaagcccatagtgatattgtactggaggctggacaaaacgatgcctataccttcttaaaaaccaaaggtaaaagcggcaaaatcatcagaaaaaccaagtttaccagcacccgcgaccacctgattatgccagcccccgtcgagctgaccgccaacggcataacgcttcaggcaggcggcaacatcgaagctaataccacccgcttcaatgcccctgcaggtaaagttaccctggttgcgggtgaagagctgcaactgctggcagaagaaggcatccacaagcacgagttggatgtccaaaaaagccgccgctttatcggcatcaaggtaggcaagagcaattacagtaaaaacgaactgaacgaaaccaaattgcctgtccgcgtcgtcgcccaaactgcagccacccgttcaggctgggataccgtgctcgaaggtaccgaattcaaaaccacgctggccggtgcggacattcaggcaggtgtaggcgaaaaagcccgtgccgatgcgaaaattatcctcaaaggcattgtgaaccgtatccagtcggaagaaaaattagaaaccaactcaaccgtatggcagaaacaggccggacgcggcagcactatcgaaacgctgaaactgcccagcttcgaaagccctactccgcccaaactgaccgcccccggtggctatatcgtcgacatnnnnncacacacttaa

SEQ ID NO: 43132 - DNA, 774 bp, Neisseria meningitidis
atgccggacaacgggcggcataaggcgggaaaaatggaaacgacactgttcaaacccgccctgtggcagataccgcatatcggatccggcggcgaaaccgcccttgcggaaaaaacggaaaccctcaaacaacgcctgcaccggattgtcggcagccaccgggatgcacggtttgccagcagccttgcggcagaagatatggtgattaccgaccttatcgccggcgaaaacctcaatatcggcatttttaccttggatacggggctgctccacacggaaaccctgaacctgctggacaggctcggacgcgcatatccccatttgcggataaagcgtttccggccggttcgagaagatgccgaccgttatgtggaaagcaaaggcaggtttgccttttacgacagcgttgaagcgcgccgcgaatgctgccgcatccgaaaaaccgaaccgctcaaccgcgccattgcaggcgcggacgcctggcttaccgggcaacgccgcgaacaatccgccacacgcacggaactgccgtttgccgaatacgatgccggacggggcatcggcaaatacaacccgattttcgactggtcggaacacgacgtgtgggcatacatcctcgccaacaatgtgccttacaacgatttgtaccggcaaggatttcccagcataggctgcgacccctgcacccgccccgtcaaggcgggcgaagacatccgcgccgggcggtggtggtgggaaggcagaaacagcaaagaatgcgggctgcacaaataa

SEQ ID NO: 43133 - DNA, 483 bp, Neisseria meningitidis; identical to SEQ ID NO: 36693

SEQ ID NO: 43134 - DNA, 1200 bp, Neisseria meningitidis
atgccccctgccgaagtcccttcagacggcattgtcaagaattttattaaaaacaggattcccatcatgagcacccccgccctcctcgtcctcgctgacggcagcgtatttcacggcacatcaatcggttacgaaggttcgacttccggcgaagtcgtgttcaatacttcgatgaccggctatcaggaaatcctgaccgacccgtcctactgcaaacaaatcgttaccctcacctacccacacatcggcaacaccggcaccaacgccgaagatgaagaaagccgcagcgtttatgccgccggcctgattatccgcgacctgccgctcttgcacagcaacttccgcgcctccgaaagcctgcacgactatctggtacgcaacaaaaccgtcgccatcgccgacatcgacacccgccgcctgaccacgctgttgcgcgaaaaaggcgcgcaaggcggtgcgattctgaccggtgcggatgccacaatcgaaaaagcgcaagaactcatcgccgcgttcggcagcatggtcggaaaagatttggcaaaagaagtttcctgcacggaaacttacgaatggacggaaggcgaatgggcattgggcaagggtttcgttacccctgacgaacagccttaccacgtcgtcgcctacgatttcggcgtgaaaaccaacatcctgcgtatgctcgcctcgcgcggctgccgcctgaccgtcgtccccgcccaaacgagcgcggaagacgtgttggcactcaaccctgacggcgtattcctatccaacggccccggcgaccccgagccttgcacctacgccatcaaagccgtacaaaaactgatagaaagcggcaaaccgatttttggcatttgcttgggacaccagctcatcagcctcgccatcggcgcgaaaaccctgaaaatgcgcttcagccaccacggtgcgaaccaccctgtgcaagatttggacagcggcaaagtcgtcatcaccagccaaaaccacggttttgccgttgatgccgacaccctgcccgctaacgcacgcattacccacaaatccttgtttgacaacactttgcaaggcatcgagctgaccgacaaacctgtgttctgcttccaaggccaccccgaagccagccccggtccgcaagatgtcggctatttgtttgacaaattcattggcaatatgaaagcggcaaaacgggcataa

SEQ ID NO: 43135 - DNA, 390 bp, Neisseria meningitidis; identical to SEQ ID NO: 39501

SEQ ID NO: 43136 - DNA, 582 bp, Neisseria meningitidis
atggaagaaaaaaacgactacaccgacgcggcatccgacaaccgcaacgggcaggaaattgaagtcggaattgccggtgcaggcgaccggatacttgccgcgctgctgaaccaattgtttacctttttggttttgttggtgccgtttgccggactgattgctttcgccatcaagaatgaaggcaggattggcagcggcgaagaaatattcgggctgcttttgggcatgacttccttttgggtaggactggcaggcattttggcgtacaccgtcatccaaatctactatatgagccgggacgggcagtcattgggtaagaaaatcatgagaatccgtgtgttgaaaaccgacggccgcaatcccggttttgtcggcacggttttggtacgcgaaatcgcatggtcggttttggttgccattattgccgccgttatcggtcttgcagtaggtgacaacggagaaaacgccatcaacctgctggcattccttgccaactttgtcctgctctttatggtcaaacgcgaccgccgcacgctttacgacatactggcggatacggttgtcgtcaagctgcccaaataa

SEQ ID NO: 43137 - DNA, 939 bp, Neisseria meningitidis
atgcttgaactgaacggactctgcaaacgcttcggcaataaaaccgtcgccgacaacatctgcctgactgtcgggcgcggcaaaatactcgccgttttggggcggtcgggctgcggaaaatccaccctgctgaatataattgcggggattgtccggccggacggcggggaaatatggctgaacggagaaaacattacccgtatgccgcccgaaaaacgccgtatctcgctgatgtttcaagattacgcgctgtttccccatatgagtgcgctggaaaatgcggcattcggtttgaaaatgcaaaaaatgccgaaagccgaagccgaacgcctcgccatggcggcacttgccgaagtcggactggaaaacgaggcgcaccgcaagcctgaaaaactttccggaggcgagaagcaacggctggcgttggcgcgcgctttggttgtccgcccttccctgctgctgttggacgaatcgttttccagtttggacacgcatttgcgcggcacgctgcgccgtatgactgccgaacgtatccgaaacggcggcatccctgccgttttggtaacgcattcgcccgaagaagcctgtacgacggcagacgaaatcgccgtgatgcataaagggaggattctacaatacggtacgcccgaaacattggtcaaaacaccatcctgcgtgcaggtcgcccgactgatgggtttgcccaataccgacgataaccgccatattccgcaacatgcggtgcgtttcgaccaagacggcatggagtgccgcgtattatcccgtacctgtttgcccgaatcgttcagcctgtccgtcctccatccggaacacggcatcctgtggctgaacctcgatatgcggcacgccggggcggtatcgggcaaggatacggtacgcatccatatcgaagaacgggaaatcgtccgcttccgctga

SEQ ID NO: 43138 - DNA, 708 bp, Neisseria meningitidis
atgaatgcagccatcgaacacgtccaagccgtcgccttcgatttggacggcacactgtgcgattccgtccccgaccttgccgccgccgcagaagcgatgttggaacaactcggtatgaaaccgctgcctgccaaagtggtcgaaagctatgtgggcgacggcatcggcaaactggttcaccgcgtcctcaccaacgaccgcgaccgcgaagccgattccgaactgtgggaaaaaggtttcgtatcctatatgaaatactaccgcgaccatttgagcgtcttcacccgcccctatcccgaaaccgaagccgggctggcattgcttaaatctttgggcatcccgctcgccgtcgttaccaacaaaaacgaaatccttgcctccgagcttctaaaacaactgggactcgccgactattttagcctgatactcggcggcgacagcctgcccgagaaaaaacccagccccctgccgctgcggcacgccgccgaagttttgggtatcgatgttgcaaacatggttatggtcggcgactcgcgcaacgacatcatcgccgccaaagccgccggctgcctgagcgtcggcgttaccttcggttacggcgatatgacgctgctctcgcaagacgatgcgacccgccccgactggattatcggctcgctgcccgaaatttacgaaaacctgcaacctcagaaaaacaaagaagagtag

SEQ ID NO: 43139 - DNA, 837 bp, Neisseria meningitidis
atgcaaatcatacataccattcgagaactgcgcgcgtggcgtaaaaatgcgggaaaggtggcatttgtgccgaccatgggcaatctgcatgaaggacatcttgcgcttgtgcgtgaggcgaaaaaacgcgcggacagtgtcgtggtcagcattttcgtcaatcgcctgcaattcggtcagggcgaggatttcgacaaatatccgcgcactttgcaacaggatgcggacaaacttgccgccgaaggcattgccgttgttttcgcgcccgatgagaaagaactctatccgaacgtggaacagcgttacaacgtcgaaccgcccaatctgcaaaatgagttgtgcggcaaattccgcccggggcattttcgcggtgtggcaacggttgtttctaaattgttccacatcgtttccccggacattgcctgttttggtaagaaggattaccagcagcttgccgtgattaaaggttttgtcgaagatttgaattttgatgttgaaatagtgcctgttgatacagggcgcgcggaagacgggttggcactgtcgagccgcaaccagtatttgagtgcggcggaacgcgacgaagcaccgcgcctgtaccgcgaattaaaggctgttgccgaatccttggtgcagggcagtttggattatgcaggtttggaaaaacgtgccgtccaatccctgacagaatacggctgggtggtcgattatgtcgaaatccgccgcgccgatacgctcgaagtggcgcgggcgggagataagaaactggtggtcttggccgccgcctgtctggggacgacgcgcctgattgacaatttggaaataaaactcccttaa

SEQ ID NO: 43140 - DNA, 1275 bp, Neisseria meningitidis
atgaaaacactacaagactggctctcgcatttggaaaccgcccacagcggcggtttgatcgacatgggtttggagcgcacgagcgaagtgaaaaaacgcatgaagctcgagccgcaatgccccgtcgtcgttgtcgcgggaaccaacggcaaaggttcggtctgtgcctacctgacacagatttacaaacaggcgggctacaaaatcggtacgctgaccagcccgcatttattgcgttacaacgaacgcatcgccatcaacgccgaacccgtttcggacgatacgattattgcctctttcgagcgcatcgaagccgcgcgcggcgaaatatcactgacttattttgaattcaatgccttggcggctgtcgacatcttcatgcgcgaacaggttgacgtgatgatattggaagtcggcttgggcggccgcttggacgcggtcaacgcgtttgacggcgattgcgcggtggttaccagcgtggatttggaccatcaggcatttttgggcgatacggtcgagcaggtcggctttgaaaaagcaggcgtgttccgtagcggcaaacccgccatctgcggtcaaaaccccgcgcccaaatcgttgctttcacacgccgaagccataggcgcgaaactgctgatggtgcagcgcgatttcgagtttcacgcgatggaaaacatccaatggaactaccgcttccggccgcaacattcagacgaccccgcgcgcaaccgcaatgccctgcccttccccgcattgcgcggcacataccagctttccaatgccgcctgcgcgctgaccgtattggaatgcttgaacgacaaattgccggtggacatcggtgccatcaagcgcggtttgttgctggttgaaaatcccggacgcttccaagtcctgcccggccggccgctgaccgttttggatgtcggacacaatccccacgccgcccgcgccctgcgccgcagcctgattaatttggcgtttgcgcaaaaacgcaccgccgtgttcagcatgttgtccgacaaagacatagacggcgtgttggaaaccgttaaagaccagtttgacgagtggtatatcgcaccgttggatgtaccgcgcggcatgacgctcgagagcctgcaaaacaaactgcacgaacacagcatcgaaaacatacaaacattcgccgccgtccgcgaagcataccgggcggcagcctcaaaagcgggcgagaacgacagaatcgtcgttttcggctcatttcataccgttgccgatgtcatgtcggtactttaa

SEQ ID NO: 43141 - DNA, 462 bp, Neisseria meningitidis
atgaaaccgcaaaaatccctacgcgcccgcgcgatggacatcctctcgcgccaagaactcagccgcatcggtctgaaacgcaaacttgcaccgcacgccgaaagcgaagaggagttggaaaacgtgttaaacgaatttgccgaacgcaactggcagtcggatttgcgctatgccgaagcctatatccgcagcaaaagccgcaaacacggttcattgaggctgaaacaggctttggcgcaacagggcatagatgaagaaaccagccgcaacctgcttcccgaccgctcaagcgaaaaactggccgccatagccgtgttgcgtaaaaaattcaaacatccggccgccgaccttaaagaaaaacaaaaacaggcacgcttcctcgcctatcgcggttttgatgccgataccgttcagacggcattgaaacatgcctgggatgacggctgggaggaagactgctga

SEQ ID NO: 43142 - DNA, 441 bp, Neisseria meningitidis
atgcctacccaatcaaaacatgcgtctatcaatatcggtctgatacaggcaagggaagccctgatgacccaattcaggcctattctgaatcaggcgaatattaccgatcagcaatggcggattatccgtcttttggcggaaaacggcacgctggactttcaagatttggcgaatcaggcgtgcattttgcgccccagcctgaccggtatcctgacccgccttgaaaaagcgggtttggttgtccgcctgaaaccttccaacgaccaacgacgtgtttttctgaagctgactgccgagggcgagaagctgtatgaggaaatcggcgaagaagtggacgagcgttacgacgctatcgaggaagtgctgggccgcgagaaaatgctgctgcttaaagacctgttggcagaacttgccaaaatcgaggatgcgttgaactcgtaa

SEQ ID NO: 43143 - DNA, 2775 bp, Neisseria meningitidis
gtgaacggtttggcacggatgcggcatttggggtacatttacaatatttacggcagacgagagagaaaaatcatgcaactgcatattctgaacaatccaaaggacgcggctttggcggcggacgcggaatttctgaaacaatccctgttcaacctcctgcacgaagaagcctcgccgttggttgtcgaaacagtcaaactcttgtccacttccgacgacagcgcggcattgattgaaaaagtattgccgcaattggacgaacaacaaacccacgatttaaccttggcctgcggcctgttcgcccagattttgaacatcgccgaagacgtgcaccacgaacgccgccgccaaatccacgaagaagccggacgcggcggcgcggaaggcagcctgacggaaaccgtccgcaggctcaaagcggggaaagccgacggcaaatcggtgcagcggcagttggacaatacgtccgttaccgccgttttgaccgcgcacccgaccgaagtgcaacgccaaaccgtcttaagcttcaaccgccgcatccgcgcactgttgccgcaacgcgaacgctgcaccaatgccgacgcgctggcacggctgcgccgcgaaatcgacactatcctgctgggcttgtggcagaccagcgaaacgcgccgccacaaactcagcgtcaacgacgaaatcaacaacggcgtgtccatcttcccgatgagctttttcgaagccctgcccaagctctaccgcaagatggaacacgactttcagacggcctatcccggcgtccgcgttccggacatcctcaaaatcggcggctggatcggcggcgaccgcgacggcaatccgtttgtttctgccgaaaccctgcgctttgccttccgccgccacgccgatgccgtgttccgcttctatcgcggcgaactcgacaaactctaccgcgaactgccgctctccatccgccgcgtcaaagtcaacggcgatgtaacggcgttgtccgacaaatcgcccgacgaagaaatcgcccgcgccgaagaaccctaccgccgcgccatcgcctacattatggcgcgcgctatgggcaaagcgcgcgcgctcggtttgggtatgggctgcaaattcggctttctcgagccttatgcttcggcacaagagtttctggatgatttgaaaaaattgcaacgttcccttatcgacaacggcagccgtctgcttgccgaaggccgtttggcagacctcatccgttccgtatccgtgttcggctttcacatgatgccgctcgacttgcgccaacacgcaggcaaacacgccgatgtggttgccgagcttttccaacacgcaggcttggaagactacaaccgcctgaacgaagagcaaaaacaaaccgccctgttgcgcgaattgagccatcaacgtcctctgtacagcccgtttatcacatacagcgaccatacccgccacgaactggcaattttcaacgaagcgcgcaaaatcaaagacgaatttggcgaagatgccgtaacacaaagcattatttccaactgcgaacaacccagcgacctgctcgccttggcattgctgctgaaagaaaccggcctgttggcggtggaaaacggcaaaccgcacagccgcatcaatatcgtgccgctgtttgaaaccattgaagcgttggaaaacgcctgtccggtcatggaaaccatgttccgcctcgactggtacgatgcactgctcgaaagccgtggaaacatccaagaaatcatgctcggctattccgactccaacaaggacggcggctacgttaccagctcatggtgcctctatcaggcggaattgggcttggtcgaactcttcaaaaaatacgatgtccgtatgcgcctgttccacggacgcggcggcagcgtaggtcgcggcggcggcccttcttaccaagccattctcgcccaaccggcgggcagcgtggcgggacaaatccgcatcaccgaacaaggcgaagtcattaccgccaaatacgccgaccccggcaatgcccaacgcaacttggaaaccttggttgccgcgactttggaagccagcatcctgccggataaaaaagaccctgatgccaaactgatgcaggcattgtcggacgtatcgttcaaatactaccgcgaactgattacccatcccgacttcatcgactactttctgcaaaccagcccgattcaggaaatcgccaccctcaacctaggcagccgtcccgccagccgcaaaaccttggcgcggattcaggacttgcgcgcgattccgtgggtattttcctggatgcagaaccgcctcatgctgccggcttggtacggtttcggcagcgcggtggaaaccttgtgcgaagacaaacccgaaacgctcgccgccctgcgcgaacacgcccaaagcaacccgttcttccaagccatgctctccaatatggaacaagtgatggcgaaaaccgacatcaccctcgcggaaaactatgccggcttgagcgaatcgcccgataaggcaaaaatcatcttcgggatgattaaggaagaataccgccgcagccgcaaagcactgctcgacctactgcaaaccgaagagcttttgcgcgacaaccgcagcctcgcccgttcgctcgctttgaggattccctacctgaacgcgctcaacggtttgcaagtcgccatgctcaaacgcctgcgtaaagaacccgacaatccgcacgcccttctgatggtgcacctgaccatcaacggcgtggcgcaaggtttgcgcaatacaggctga

SEQ ID NO: 43144 - DNA, 624 bp, Neisseria meningitidis
atgagaaaaccgaccgataccctacccgttaatctgcaacgccgccgcctgttgtgtgccgccggtgcgttgttgctcagtcctctggcgcacgccggcgcgcaacgtgaggaaacgcttgccgacgatgtggcttccgtgatgaggagttctgtcggcagcgtcaatccgccgaggctggtgtttgacaatccgaaagagggcgagcgttggttgtctgccatgtcggcacgtttggcaaggttcgtccccgaggaggaggagcggcgcaggctgctggtcaatatccagtacgaaagcagccgggccggtttggatacgcagattgtgttggggctgattgaggtggaaagcgcgttccgccagtatgcaatcagcggtgtcggcgcgcgcggcctgatgcaggttatgccgttttggaaaaactacatcggcaaaccggcgcacaacctgttcgacatccgcaccaacctgcgttacggctgtaccatcctgcgccattaccggaatcttgaaaaaggcaacatcgtccgcgcgcttgcccgctttaacggcagcttgggcagcaataaatatccgaacgccgttttgggcgcgtggcgcaaccgctggcagtggcgttga

SEQ ID NO: 43145 - DNA, 831 bp, Neisseria meningitidis; identical to SEQ ID NO: 39589

SEQ ID NO: 43146 - DNA, 1545 bp, Neisseria meningitidis
atgatgaccgaaatgcaacaacgcgcccaactgcaccgccaaatttggaaaattgccgacgaagtacgcggcgcggtggatggctgggactttaaacaatacgttctcggcacacttttctaccgctttatcagcgaaaacttcaccgactatatgcaggcaggcgacagcagtattgattacgccgctatgccggacagcatcatcacgcccgaaatcaaagacgatgccgtcaaagttaaaggctatttcatctaccccggccagcttttttgcaatattgccgccgaagcccatcaaaacgaagagctcaacaccaagctgaaagaaatttttaccgcgattgaaagctccgcctccggctatccgtccgaacaggacatcaaaggcctgtttgacgacttcgacaccaccagcagccggctcggcagcactgttgccgacaagaacaaacgccttgccgccgtcctcaaaggcgtggcggaactcgatttcggcaattttgaaaaccaccacatcgaccttttcggcgatgcctacgaatacctgatttccaactacgctgccaacgcaggcaaatccggcggcgaatttttcaccccgcaaagcgtatccaagctgattgcgcggctggcggtgcacggacaggagaaagtcaacaaaatctacgacccagcttgcggctcgggcagtctgctcttgcaggcgaaaaaacagtttgacgagcacatcatcgaagaaggcttcttcgggcaggaaatcaaccacaccacctacaacctcgcccgcatgaacatgttcctgcacaacgtcaattacaaccaattccacatcgaattgggcgacacactgaccaacccaaagctcaaagacagcaaaccctttgatgccatcgtttccaatccgccttattccatcaactggataggcagcgacgaccccaccttaatcaacgacgaccgctttgcccccgcaggcgtacttgccccgaaatccaaagccgattttgccttcatcctgcacgcactgaactacctttccggcagaggccgcgccgccatcgtctcattccccggcattttctatcgcggcggcgcagaacagaaaatccgccaatatctggtggagggcaactacgtggaaaccgtgattgcccttgcgcccaatctcttttacggcaccggcatcgccgtcaatatcctggttttgtccaaacacaaagacaataccgacatccaattcatcgacgcaagcggcttctttaaaaaagaaaccaacaacaacgtcttaatcgaagaacacattgctgaaatcgtcaaactcttcgccgataaagccgatgtgccgcatatcgcccaaaacgctgcccagcaaaccgtcaaagacaacggctacaacctcgccgtcagcagctatgtcgaagccgaagacacacgcgaaattatcgacatcaaacagctcaacgccgaaatcggcgaaaccgtcgccaaaatcgaacggctgcggcgtgaaattgacgaagtgattgcagagattgaagcatga

SEQ ID NO: 43147 - DNA, 660 bp, Neisseria meningitidis
atgaccacgcccaaactcatcatcttcgactgggacggcacgcttgccgatacgacccaacccatcatcgacaccatgcgccgcagcttcgccgaatgcggttttccgccgcccgaagcggaacgcgtccgcagcctgattggctacagcctgcccgaaatcatccgcaccctgctcgaaatgccgtctgaaaccgccgttgccgacatcacacgcacttattccgcacattacctcaatcccaacaaccgcaatatgtccttatttcccgatgccctgccctgtctggacaagctcaaagcacaaggatactggcttgccgtcgccacgggcaaagggcgggcgggtttggacaacgccatcagtcaaaccgccaccggcggctattggctcgccaccgcctgcgcgggggaatatccctccaaaccctcgcccgaaatggtattcggaatctgcggcgaactgggactcgacccgaaagaggcattggtcgtcggcgatacggcgcacgacctgcatatggcggcaaacgcaggcgcggcggcagtcggcgtggccaccggcgcacattcgcgcgaacagctccttagcgcaccgcatctcgccgtattggacggtttgtccgaactgcccggttttcttgcacaacattacgcctga

SEQ ID NO: 43148 - DNA, 918 bp, Neisseria meningitidis
atgtctgtctataccagtgtttccgatgatgaaatgcgcggcttcctgagcggttacgatttgggggaatttgtttccctgcagggcatcgcgcaggggattaccaacagcaattattttctgacgacgacttcgggacgttatgtgctgaccgtgtttgaagtgttgaaacaggaagagctgccgttttttctggagcttaaccggcatttgagtatgaagggcgtggcggttgccgcgccggttgcgcgcaaagacggccggcttgattccgttttggcgggtaagcctgcctgcctggttgcctgcctgaaaggttcggataccgcgctgccgacggctgagcagtgttttcataccggtgcgatgttggcgaaaatgcaccttgccgccgccgatttccctttggaaatggaaaacccgcgttacaatgcgtggtggacggaggcgtgcgcccggctgctgcccgtcctgtcgcaagacgatgccgcactgctgtgttccgaaatcgatgcgttgaaggacaatctcggcaatcatctgccttcgggcatcatccatgccgatctgtttaaagacaatgtgttgcttgacggcggtcaggtatcgggcttcatcgatttctattacgcctgccggggcaattttatgtatgacttggcgattgcggtcaacgattgggcaaggacggcggacaataagttggatgaggcgttgaaaaaggcgtttatcggcggttatgagggcgtgcgccccttgagtgccgaagaaaaggcgtatttcccgaccgcccaacgtgccggctgcatccgtttttgggtgtcgcgcctgttggattttcattttccgcaggcgggcgagatgacgtttatcaaagacccgaacgcgttccgcaacctgctgttgagtttgggttga

SEQ ID NO: 43149 - DNA, 1293 bp, Neisseria meningitidis
atgcagttctcagcattcggcgaaaaattcacgcaacacagcggcatcctccaactgatggacgacctcggcgacgcgctcaaaagcgacaagcccgtcaacatgctcggcggcggcaacccggcgcgcattccggaaatcgatcaggcgttcgccgacatattctccaaactggcggcagaacacgccgtcgaaaacatcggcaactactccaatccccaaggcgatgccgtgctgattgacgcgctgaccgccttcctcaaccgcgaatacagctggaatctgaccgccgacaatatcgcgctgaccaacggttcgcaaaacgcgtttttctatcttttcaacctcttcggcggcaaattcaacctttcagacggcacatccgcagaaaaagccattttgttgccgctcgcgcccgaatacatcggctatgccgacgtgcatgtcgaagggcagcacttcgtttccgtcaagcccaaaatcgaaaacgtcgaacacgaaggcgaagccggcttcttcaaataccgcgtggactttgacgcactggaaaacctgcccgaactcaaagcgggcaaaatcggcgcgatttgctgttcgcgcccgaccaacccgaccggcaatgtgttgaccgacggcgaaatggcgcgtttggacgctttggcgcgtgaacacggcattccgctgattatcgacaacgcctacggaatgccgttccccaacatcatttacagcgacgtaacgctgaattggcacgaaaacatcatcctctgcttcagcctgtccaaagtcggcctgccgggcgtgcgcaccggcatcatcgtcgccgcgcccgaagtcgtcaaagccgtcagcagcctgaacgcgattgtgaaccttgcccccacgcgcttcggcgcggccatcgcaacgccgctgctggaaagcggcgagatgaaacggcttgccgaccaagtcatccggccgttttaccgcaatcaggcgcaaaccgccgtctcgctgctcaagcgggagctgggcgcgtacccgatgaaaatccacaaacccgaaggcgcgattttcctgtggctctggtttgaaaacctgcccgtttcttcgcaaaccctgtacgaaatgctcaaagccgaaggcacactgattattccgggcgaacatttcttcgtcggcatcgacacgcaggattacccgcatgcgggcgagtgcatccgcatgagcatcgcgcaggacgctcaaacgctggaaaaaggcattgccgccatcggtaaaaccgtccgaaaactgtacgacaacgtttaa

SEQ ID NO: 43150 - DNA, 3606 bp, Neisseria meningitidis
atgtttcattttgcatttccggcacaaactgccctgcgccaagcgataaccgatgcctaccgccgtaatgaaatcgaagccgtacaggatatgttgcaacgtgcacagatgagcgacgaagagcgcaacgccgcctccgagcttgcccgccgtttggttacccaagtccgcgccggccgcaccaaagccggcggcgtggatgcgctgatgcacgagttttcactctccagcgaagaaggcatcgcgctgatgtgtctggcagaagccctgctgcgtatccccgacaacgccacgcgcgaccgcctgattgccgacaagatttcagacggcaactggaaaagccatttgaacaacagcccttccctcttcgtcaatgctgccgcctggggcctgctgattaccggcaaactgaccgccacaaacgacaaacaaatgagttccgcactcagccgcctgatcagcaaaggcggcgcaccgctcatccgccaaggcgtaaattacgccatgcggcttctgggcaaacagttcgtaaccggacagaccattgaagaagccctgcaaaacggcaaagaacgcgaaaaaatgggctaccgcttctccttcgatatgttgggcgaagccgcctacacccaagccgatgccgaccgctactaccgcgactatgtcgaagccatccacgccatcggcaaagatgcggcaggacaaggcgtttacgaaggtaacggtatttccgtcaaactttccgccatccatccgcgctactcgcgcacccaacacggccgcgtgatgggcgaactgttgccgcgcctgaaagagctgttccttttgggtaaaaaatacgatatcggtatcaacatcgatgccgaagaagccaaccgtctggagctgtctttggatttgatggaggctttggtttcagaccctgacttggctggctacaaaggtatcggtttcgttgtccaagcctaccaaaaacgttgtccgttcgttatcgactacctgatcgaccttgcccgccgcaacaaccaaaaactaatgatccgcctcgtcaaaggcgcgtattgggacagcgaaatcaaatgggcgcaagtggacggcttgaacggctatccgacctacacccgcaaagtccacaccgacatctcctacctcgcctgcgcgcgcaaactgctttccgcgcaagacgcggtattcccgcaatttgccacccacaacgcctacactttgggcgcaatctaccaaatgggtaaaggcaaagattttgaacaccaatgcctgcacggtatgggcgaaaccctgtacgaccaagtcgtcggcccgcaaaacttaggccgccgcgtgcgcgtgtacgccccagtcggcacacacgaaaccctgctcgcctacttggtgcgccgcctgttggaaaacggcgcgaactcgtctttcgtcaaccaaatcgtcgatgaaaacatcagcatcgacacgctcatccgcagcccgttcgacaccatcgccgaacaaggcatccacctgcacaacgccctgccgctgccgcgcgatttgtacggcaaatgccgtctgaactcgcaaggcgtggacttgagcaacgaaaacgtattgcagcagcttcaagaacagatgaacaaagccgccgcgcaagacttccacgccgcatccatcgtcaacggcaaagcccgcgatgtcggcgaagcgcaaccgattaaaaaccctgccgaccacgacgacatcgtcggcacagtcagctttgccgatgccgcgcttgcccaagaagcggttggcgcagccgttgccgcgttccccgaatggagtgcgacacctgccgccgaacgcgccgcctgcctgcgccgttttgccgatttgctggagcagcacaccccagcactgatgatgcttgccgtgcgcgaagcaggcaaaacgctgaacaacgccattgccgaagtgcgcgaagccgtcgatttctgccgctactacgcaaacgaagccgaacataccctgcctcaagacgcaaaagccgtcggcgcgattgtcgccatcagcccgtggaacttcccgctcgccatctttaccggcgaagtcgtttccgcattggcggcaggcaacaccgtcatcgccaaacccgccgaacaaaccagcctgattgccggttatgccgtttccctcatgcacgaagccggcatcccgacttccgccctgcaactcgtcctcggcgcaggcgacgtgggtgcggcattgaccaacgatgcccgcatcggcggcgtgattttcaccggctcgaccgaagtggcgcgcctgatcaacaaagcccttgccaaacgcggcgacaatcccgtcctgattgccgaaaccggcggacaaaacgccatgattgtcgattccaccgcacttgccgagcaagtctgcgccgacgtattgaactccgccttcgacagcgcgggacaacgctgctccgccctgcgcattttgtgcgtccaagaagacgttgccgaccgtatgctcgacatgatcaaaggcgctatggacgaactcgtcgtcggcaaaccgattcagctcactaccgatgtcggccccgtcatcgatgccgaagcacagcaaaacctgttgaaccacatcaacaaaatgaaaggtgttgccaagtcctaccacgaagtcaaaaccgccgccgatgtcgattccaaaaaatccacgttcgttcgccccatcctgtttgaattgaacaacctcaacgaactgcaacgcgaagtcttcggtcccgtcctgcacgtcgtccgctaccgcgccgacgaactcgacaacgtcatcgaccaaatcaacagcaaaggctacgccctgacccacggcgtacacagccgcatcgaaggcacggtacgccacatccgcagccgcatcgaagccggcaacgtttacgtcaaccgcaacatcgtcggcgcagtcgtcggcgtacagcccttcggcggacacggtctgtccggcacaggccccaaagcaggcggttcgttctacctgcaaaaactgacccgcgccggcgaatgggttgccccgaccctgagccaaatcggacaggcggacgaagccgcactcaaacgcctcgaagcactggttcacaaactaccgttcaacgccgaagagaaaaaagccgcagcggccgctttgggacacgcccgcatccgcaccctgcgccgtgccgaaaccgtccttaccggaccgaccggcgagcgcaacagcatctcatggcacgcgcccaaacgcgtttggatacacggcggcagcacggttcaagcctttgccgcactgaccgaacttgccgcctccggcatacaggcagtggtcgaacccgacagccccttggcttcctacactgccgacttggaaggtctgctgctggtcaacggcaaacccgaaaccgccggcatcagccacgttgccgccctgtcgcctttggacagcgcgcgcaaacaggaacttgccgcccacgacggcgcactcatccgcatcctcccttcggaaaacggactcgacatcctgcaagtgtttgaagaaatctcttgcagcgtcaacaccacagccgccggcggcaacgccagcctgatggcggtcgccgactga

SEQ ID NO: 43151 - DNA, 558 bp, Neisseria meningitidis
atggatgctttaaaattattgacgaaccgccgatcttccaaaaagctgaagcaccccgcccccgatgcggcggagttggaacaaatatttcaggcggcaacccaagttcccgatcacggcaatatgcgccccttccgttttaccgtgattcaaggcgaggtaggattgcaacgttttcgcgatgtgttgaagcaaacggttgccgaattgaatttcggcgacgatgcgatgaaaaaggcggaaaaagtgggcaatatggcgccgatggttatcggggtaacgtttgcgccgaaccgcgatgtgcctaagccgaaaccggaatgggagcagatgctgacggcgggttgtgcggcgtatgcgctgcaactggcggcaacggctcagggattcgacaatgtctggattacggggatgtgggtcaatagccccctgttgcgggaggctttcggttgtgcggataaggataaaatcatcgggctgatgatggtcggcacgccgacagaggaagtgcataagcccaagaataccgatttggaagcgtttgtcagccattggtaa

SEQ ID NO: 43152 - DNA, 561 bp, Neisseria meningitidis; identical to SEQ ID NO: 37658

SEQ ID NO: 43153 - DNA, 1296 bp, Neisseria meningitidis
atgttagatatccaattgctccgcagcaacaccgccgccgttgccgaacggcttgcacggcgcggttatgactttgataccgcacgttttgacacactggaagaacgacgcaagtccgttcaggtgaaaaccgaagaattacaggcctcgcgcaacagcatttccaaacaaatcggcgcactgaaaggtcagggcaaacacgaagaagcgcaggcggccatgaatcaggttgcccaaatcaaaaccgatttggaacaggctgccgccgatttggatgccgttcaaaaagaattggacgcatggttgttgagcatacctaacctgccgcacgaaagcgtacctgccggtaaagacgaaaccgaaaacgtcgaagtccgcaaagtcggcaccccgcgcgaatttgactttgaaatcaaagaccatgtcgatttgggcgaacctttgggtttggattttgaaggcggtgcaaaactctccggcgcacgatttaccgtgatgcgcggacaaatcgcccgtctgcaccgcgccttggcacagttcatgctggatacgcacacgctgcaacacggctacaccgagcattacacgccttatatcgttgacgatacgacgctgcaaggtacgggccaactaccaaaatttgcggaagatctgttccacgttacccgtggcggcgacgaaaccaaaaccacccaatacctgattccgacagccgaagttaccctgaccaataccgttgccgacagcattatcccgtccgaacaactgccgctgaagctgaccgcgcattcgccctgtttccgcagcgaggcgggttcgtacggcaaagacacgcgcggtctgattcgccagcaccagttcgacaaagtggaaatggttcaaatcgttcatcccgaaaaatcatacgaaacgctggaagaaatggtcggccatgccgaaaacatcctgaaggctttggaactgccctaccgcgtgattaccctgtgtaccggcgacatgggcttcggcgcggcaaaaacgtatgacttggaagtttgggtgccggcgcaaaatacctaccgcgaaatctcaagctgctccaactgcgaagatttccaagcccgccgcctgaaggcgcgtttcaaagacgaaaacggcaaaaaccgcttggtacatactttgaacggctccggcttggctgtcggcagaacgctggtcgccgtattggaaaaccatcaaaacgccgacggcagcatcaacatccctgccgcactgcaaccgtatatgggcggtgttgccaagttggaagtcaaataa

SEQ ID NO: 43154 - DNA, 657 bp, Neisseria meningitidis
atggattttgaaaaagcgcggttcaatatggtcgaacagcaaatccgtccgtgggatgtattggattttgatgtgttggacgctttggcggagattccgcgcgagctttttgtcgatgaggacttgcagggtttggcgtatgcggatatggcgctgccgcttgccaacggtcataagatgctcgagccgaaagtcgtggcgcggctggcgcagggcttgaagctgacgaaaaacgatacggttttggaaatcggcacgggttcgggctatgcgaccgcgctgttggcaaaattggctggtcgtgtggtgtcggacgacatcgatgtcgaacagcaaaaccgcgccaaagcggtgttggacggcttgggtttggacaatatcgattatgtgcaaaacaacgggttgaccgaactttccgcaggtgcgccgtttgatgcggtttatgtcggcggtgcggtaaaccttgtgcctgaagtgttgaaagaacagttgaaagatggcggacgcatggtggttatcgtaggtcgcaagcctgttcaacgcgcgcttttgattacgcgcaggggcgatgtgtttgaagagaaggtgctgttcgataccttggtggcgcatttggatgataaggatgccgatccgtttggcggtttcgatttttaa

SEQ ID NO: 43155 - DNA, 309 bp, Neisseria meningitidis; identical to SEQ ID NO: 38004

SEQ ID NO: 43156 - DNA, 708 bp, Neisseria meningitidis
atggaaggactgattaatgcattgaaatatttagccgaacatgagccaatagataattttgaagaaattagaactagaaatagtccgattgagttgccaagtggattaagtaattttgaacaaaatatttttttaaaagaaaatttatccccaaaattacaaaatgatgatagcttgaagacgcattattggattatccgtgaatggggtgggattaaaagttttaaacaatctgctgaaaatagccagcttattcgtcaatttttatcggaacttaattcgggaaaattgagtagtggtttgttgaaaatttcatcattatctaaattggcttcttttatagattgtgagcgattcgccatttatgattcacgcgctattttttcgttgaattggttgttgtttaaatttacaaatgcagatttgttttttcagccacaaggtagaaatagggaactagaaatccgaaatatgaacgtattgtttcatttttctgatatcaaaccgaattatcggaaaccagacgtttcgtttcatcaatattgtgggttgttacaagatttggcgaaacaagtttatggtaaacaagcaaaaccgtatcacatagaaatgttgttattcaaaattgcgacaacgtggatttgtgcggatatggatcaactgattaagtttgattgtttgcgtaaccaggattttcagactgcttga

SEQ ID NO: 43157 - DNA, 996 bp, Neisseria meningitidis
atgaaaacatctatccgatacgcactgcttgccgcagccctgaccgccgcaacccccgcgctggcagacattaccgtgtacaacggccaacacaaagaagcagcacaagccgttgcagatgcctttacccgggctaccggcatcaaagtcaaactcaacagcgccaaaggcgaccagcttgccggtcaaatcaaagaagaaggcagccgaagccccgccgacgtattctattccgaacaaatcccggcactcgccaccctttccgccgccaacctcctagagcccctgcccgcctccaccatcaacgaaacacgcggcaagggcgtgccggttgccgccaaaaaagactgggtggcactgagcggacgttcgcgcgtcgtcgtttacgacacccgcaaactgtctgaaaaagatttggaaaaatccgtcctgaattacgccacgccgaaatggaaaaaccgcatcggttacgcccccacttccggcgcgttcttggaacaggttgtcgccatcgtcaaactgaaaggcgaagcggccgcattgaaatggctcaaaggtctgaaagaatacggcaagccttacgctaaaaactccgtcgcccttcaagcggttgaaaacggcgaaatcgatgccgccctcatcaacaactactactggcacgcttttgcgcgtgaaaaaggcgtacaaaatgtccacacccgcctgaatttcgtccgccacagagatcccggcgcactcgttacctattccggcgcagccgtgttaaaatcctcccaaaacaaggatgaggcgaaaaaattcgtcgccttcctcgccagcaaggaaggacagcgcgccctgaccgccgtccgtgccgaatatcctttgaatccgcacgtggtatccactttcaatttggaacccatcgccaagttggaagcaccccaagtgtccgccaccactgtttccgaaaaagaacacgccacccggctgcttgagcaagccggtatgaaataa

SEQ ID NO: 43158 - DNA, 156 bp, Neisseria meningitidis; identical to SEQ ID NO: 39708

SEQ ID NO: 43159 - DNA, 966 bp, Neisseria meningitidis
atgagctacacgcaactgacccaaggcgaacgataccacatccaatacctgtcccgccactgcaccgtcaccgaaatcgccaaacagctgaaccgccacaaaagcaccatcagccgcgaaatcagacggcaccgcacccaagggcagcaatacagcgccgaaaaagcccagcggcaaagccagactatcaaacagcgtaagcgacaaccctataagctcgattcgcagctgattcagcacatcgacacccttatccgccgcaaactcagtcccgaacaagtatgcgcctacctgtgcaaacaccaccagatcacgctccaccacagcaccatttaccgctaccttcgccaagacaaaagcaacggcagcacgttgtggcaacatctcagaatatgcagcaaaccctaccgcaaacgctacggcagcacatggaccagaggcaaagtacccaaccgtgtcggcatagaaaaccgacccgctatcgtcgaccagaaatcccgtatcggcgattgggaagccgacaccattgtcggcaaaggacagaaaagcgcattattgaccttggtcgaacgcgttacccgctacaccatcatctgcaaattggatagcctcaaagccgaagacactgcccgggcagctgttaggacattaaaggcacataaagacagggtgcacaccatcaccatggataacggcaaagagttctaccaacacaccaaaataaccaaagcattgaaagcggagacttatttttgtcgcccttaccattcttgggagaaagggctgaatgagaacaccaacggactcatccggcaatacttccccaaacaaaccgatttccgtaacatcagtgatcgggagatacgcagggttcaagatgagttgaaccaccgaccaagaaaaacacttggctacgaaacgccaagtgttttattcttgaatctgttccaaccactaatacactag

SEQ ID NO: 43160 - DNA, 1746 bp, Neisseria meningitidis
atgttgattaagagcgaatataagcctcggatgctgcccaaagaagagcaggtcaaaaagccgatgaccagtaacggacggatcagcttcgtcctgatggcaatagcggtcttgtttgccggtctgattgctcgcggactgtatctgcagacggtaacgtataactttttgaaagaacagggcgacaaccggattgtgcggactcaaacattgccggctacacgcggtacggtttcggaccggaacggtgcggttttggcgttgagtgcgccgacggagtccctgtttgccgtgcctaaagagatgaaggaaatgccgtctgccgcacaattggaacgcctgtccgagcttgtcgatgtgccggttgatgttttgaggaacaagctcgaacagaaaggcaagtcgtttatctggattaagcggcagctcgatcccaaggttgccgaagaggtcaaagccttgggtttggaaaactttgtatttgaaaaagaattaaaacgccattacccgatgggcaacctgtttgcacacgtcatcggatttaccgatattgacggcaaaggtcaggaaggtttggaactttcgcttgaagacagcctgcatggcgaagacggcgcggaagtcgttttgcgggaccggcagggcaatattgtggacagcttggactccccgcgcaataaagccccgaaaaacggcaaagacatcatcctttccctcgatcagaggattcagaccttggcctatgaagagttgaacaaggcggtcgaataccatcaggcaaaagccggaacggtggtggttttggatgcccgcacgggggaaatcctcgccttggccaatacgcccgcctacgatcccaacaggcccggccgggcagacagcgaacagcggcgcaaccgtgccgtaaccgatatgatcgaacccggttcggcaatcaaaccgtttgtgattgcgaaggcattggatgcgggcaaaaccgatttgaacgaacggctgaatacgcagccttataaaatcggaccgtctcccgtgcgcgatacccatgtttacccctctttggatgtgcgcggcatcatgcagaaatcgtccaacgtcggcacaagcaaactgtctgcgcgtttcggtgccgaagaaatgtatgacttctatcatgagttgggcatcggtgtgcgtatgcactcgggctttccgggcgaaactgcaggtttgttgagaaattggcgcaggtggcggcctatcgaacaggcgacgatgtctttcggttacggcctgcaattgagcctgctgcaattggcgcgcgcctataccgcactgacgcacgacggcgttttactgccggtcagctttgaaaaacaggcggttgcgccgcaaggcaaacgcatattcaaagaatcgaccgcgcgcgaggtacgcaatctgatggtttccgtaaccgagccgggcggcaccggtacggcgggtgcggtggacggtttcgatgtcggcgcgaaaaccggcacggcgcgcaagttcgtcaacgggcgttatgccgacaacaaacacatcgctacctttatcggttttgcccccgccaaaaatccccgtgtgattgtggcggtaaccattgacgaaccgactgcccacggttattacggcggcgtagtggcagggccgcccttcaaaaaaattatgggcggcagcctgaacatcttgggcatttccccgaccaagccactgaccgccgcagccgtcaaaacaccgtcttaa

SEQ ID NO: 43161 - DNA, 393 bp, Neisseria meningitidis
atgcccacttccaccaaaccctacatcctccgcgccctctgcgaatggtgcagcgacaacagcctcacaccgcacatccttgtctgggtcaacgaacacacgcgcgtccccatgcagtacgtccgcgacaacgaaattatgctcaacatcggcgcgaccgccacgcaaaaccttcaaatcgacaacgattggatcagcttttccgcccgcttcggcggacaggcgcacgatatatggatacctgtcggacacgtcctcagccttttcgcacgggagaccggagaaggtatggggtttgagttggaagcgtaccgccccgatacgccgcctgaaaacacctctgccgaaaccgcgccccgacccgccaaaaaaggcttgaaattggtcaaataa

SEQ ID NO: 43162 - DNA, 2463 bp, Neisseria meningitidis
atgacacaaaaagaaaagcattttgaggaatatgccgccttggcaacccttcctttgcgggatgtcgtcgtttacccgcatatggttctgccgctgtttgtcggcagaccgaaatccatcgccgcactggaaaacgccattacccgcgaggagccggttttcctgttggcgcaaaccgatgcggcggtagaagaaccgattgccgccgacctgtatcagaccggtacggtcgcacaagtcctgcaagtgttgaaactacccgacggcacggtaaaagtattggtcgaagggctgtatcgcggacgtgttctgaccattgaagacacgggcggtctgttcgtttcccatatagagacggtcgtggaagaagacacgggcggcaataccgacctcgaagccgtgcgccgcaccctgttggcgcagtttgaacaatacgccaaactcaataaaaaaatccccgccgaaattatcggcagcatcaacggcattgccgaaaacagccggctaaccgatacggtcgcagcgcatttgcagttgaaactggcgcaacgccaacagattttggaaattcccgaaatcggcaaacggatggaattcctgctggcacagctggaatccgaactcgacattatgcaggccgaaaaacgcatacgcggacgcgtcaaacgccaaatggaaaaatcccagcgcgaatattatctgaacgaacagattaaagcgatacacaaagaactgggcgaagaagacgaaaacggcgaactggatgccttggaagcagatatcaaaaaggcgggtatgaccaaagaagcggaagaaaaatgcctgtccgaactgaaaaagctcaaaatgatgccaccgatgtctgcggaatccaccgtcgtacgcaactacatcgacactttgctcgagctgccgtggaagaaaaaatcccgcgtcagcaaagacatcgccaaagccggactggtgctggatgccgaccactacggcctggaaaaagtcaaagaacggattttggaatacctcgccgtccaaaaacgtatggacaaactcaaaggcccgattctgtgcctggtcggccctccgggcgtgggcaaaacctctttgggcgaatccatcgccaaagcaacggggcggaaatatgtccgcatggctttgggcggcgtgcgcgacgaaagcgaaatcaggggacaccgccgcacctatatcggctctatgcccggtaagattttgcagaatatggcaaaagccggcgtgaaaaaccccttgttcctgctcgacgaaatcgacaaattgggtaacgacttccgaggcgatcccgccagcgcgttgctcgaagtgctcgatcccgaacaaaacaacaagtttgccgatcattatgcggaagtggattacgatttgagtgatgtgatgtttatcgccacatccaatagtctgaatattccgactccgttgctcgaccgtatggaaatcatccgtctgtccggctataccgaagacgaaaaaatcaatatcgcgatgcagtacctcgtaccgaagcaaatgaagcgcaacggtgtaaaagaaggggaattggcaatcgaagaaagcgcggtgcgcgatattatccgttattacacccgagaggcgggcgtgcgttcgctcgaccgcgaaattgccaaaatctgccgcaaggtggtgatgcagattaccttggacgaagataagaagaggttgtctgaaaccaagaaaaccagcaaagccaaacctaaagcggttaaagtaaatgagaaaaatctgcacgactatttgggtgtgcgccgcttcgattacggcgttgccgaaagcgaaaaccgtatcgggcaggttaccggtttggcgtggacggaagtcggcggcgaattgctgaccgtcgaagccgcagcattgccgggtaagggcgtgattcagtgcaccggccagttgggcgatgtgatgaaggaatccgtgtccgcagcgtggtcggttgtccgctcccgtgcggaatcagtgggtttggctcctgatttttacgagaaaaaagacatccacatccacgttcccgaaggcgcgacgccgaaagacggccctagtgcgggtattgcgatgaccttggcggcggtatctgcctttaccaaaatcccggtacgcgccgatgtggcgatgacgggcgaaattaccctgcgcggcgaagttttgcccatcggcggtttgaaggaaaaactgttggccgccttgcgcggcggcatcaaacacgtcctgattccgaaagacaacgtcaaagacttggaagaaatccctgaaaacgtgaaaaccggcctgaccatccatccggtcaaatggatagacgaggtattggctctgggtttggaaagccagcctgagccttgggcagaaccttctggtgcggaagcggcggcggaatccgcttcaaaaccaaaaccccgcagcagggcaaccaaacattga

SEQ ID NO: 43163 - DNA, 1152 bp, Neisseria meningitidis
atgagtaatagagaccaactttttaaagccccgccgtttgaaaaccacagcccgctgacctggtatcaggctgcctcacaactgcccaacttcatccgcgacgacgcgcaggcagccgccatcgaacacctcgatcggctttggaccgaattgatgatgttcaaacgcaaaagaaaccgttttttaggcaggagtttgcgttccccgcaagtccccaaagggctttatttctatggcggggtcggacgcggcaaaagctttctgatggacgcttttttcggctgcctcccgtaccgccgcaaacgccgcgtccactttcatgcctttatggcagaaatccaccagcggctgaaaaccctgaaaagcgaaagcaacccgttgaaatccgttgccgccgagattgccaaagaaacccgcgtattgtgttttgacgaatttcatgtcagcgatattgcggatgcaatgattttaggccgtctgctggaaaacctgcttaacgagggcgttgttttggtggcgacttcaaactacgcgccttccgaactctacccgcaaggtcaaaaccggagcagttttcttcccacaatcgcgctcatcgagtccagcctgaccgtcttaaacgttgacggcggtgaagactaccgactgcgtaccctccgccccgccgagattttctttacgcctgccaatgaagaaaatgaggcaaaactggcaaaactgttcaaagaaatgacaggcattaccgatttgaaccccggcatcagcaccatccacggtcgggagattccccacaaagccgagtccggccgtgccatatggtttgatttccgcgcactgtgcttcggcccccgctcacagtccgactatctgtatttggccgaacattatgaaatggtttttatttcaggtttggaacaactctcaccgcaagaaaaggcggaggcgcggcggctgacttggctgattgacgtactctacgatttccgggtcaaactgtgtgccaccggcgcggtagatgtcaaccatatctatacggaaggcgattttgccgaagaatttacccgcaccgccagccggatggtcgaaatgcagtccgaagtttatttggaacagccgcacctgaccctatctcccaaggcttcaggcggataa

SEQ ID NO: 43164 - DNA, 1266 bp, Neisseria meningitidis
atgtctgaagcccttgcaaaagaaaccctcaatccgtttgaaatcgcgcgcaaacaggtgaaaaccgcctgtgaccggctgaaaaccgatccggccgtttatgaaatcctgaagagtccgacccgcgtgttggaagtcaattttcccgtcaaactcgacgacgacacggtcaaaaccttcacgggctaccgttcgcaacacaacaacgccgtcggcccctataaaggcggcgtgcgcttccatcccagtgtgaatttggacgaagtcaaagccctgtcaatttggatgaccatcaaatgctgcgttgcgggtattccttacggcggcggcaaaggcggcattaccttggatccgcgcgattattccgaggcggaactggaacgcatcgcccgcgcttatgctgaagcgattgccccgctgattggcgagaaaatcgatattcccgcccccgatgtgaataccaacggcaaaattatgtcgtggatggtggatgcttatgaaaacgtggtgaaacattccgcgccgggcgtatttaccggaaaaccggttgagttcggcggctctttggcgcgtaccgaggctaccggttacggcgtgaacctcgccgccgtccaagctttggaaaaactgggcaaggacgtgaagggtgccacttacgccattcaaggtttcggtaatgtgggttaccacacaggttattacgcgcatcaatccggcgcgaaagttgttgcggtttctactgttgacgttgccatttacaacgaaaacggtttggatatggaagctttgtttaaagagttccaagaaaaaggcttcatcaccaacgaagccggttacggcaaagaaattaccaacgccgaacttttggctttggatgtggacgtactcgccccttgcgcgctggaaaaccaactgacttccgaaaacgccggtaaagtccgcgcgaaaatcgtagtcgaaggcgcgaacggcccgactacgcccgaagccgacgtgatcctgcgtcaaaacggcgtattggtcgtgcctgatattctggcgaactgcggcggcgtggtcgtttcctatttcgagtgggtgcaaaacctgcaaggctattattgggagtttgacgaagttcaagagaaagaaaccgtcgtcctgcgacgcgcgttccgcgatatatggaacttggcgcaagagtatgatgtcgatttgcgaaccgcgtcttacatgatgagtatccgccgtgttgaaaaagcgatgaaactgcgcggttggtattga

SEQ ID NO: 43165 - DNA, 4374 bp, Neisseria meningitidis
atgaaaacaaccgacaaacggacaaccgaaacacaccgcaaagccccgaaaaccggccgcatccgcttctcgcctgcttacttagccatatgcctgtcgttcggcattcttccccaagcctgggcgggacacacttatttcggcatcaactaccaatactatcgcgactttgccgaaaataaaggcaagtttgcagtcggggcgaaagatattgaggtttacaacaaaaaaggggagttggtcggcaaatcaatgacaaaagccccgatgattgatttttctgtggtgtcgcgtaacggcgtggcggcattggtgggcgatcaatatattgtgagcgtggcacataacggcggctataacaacgttgattttggtgcggaaggaagaaatcccgatcaacatcgttttacttataaaattgtgaaacggaataattataaagcagggactaaaggccatccttatggcggcgattatcatatgccgcgtttgcataaatttgtcacagatgcagaacctgttgaaatgaccagttatatggatgggcggaaatatatcgatcaaaataattaccctgaccgtgttcgtattggggcaggcaggcaatattggcgatctgatgaagatgagcccaataaccgcgaaagttcatatcatattgcaagtgcgtattcttggctcgttggtggcaatacctttgcacaaaatggatcaggtggtggcacagtcaacttaggtagtgaaaaaattaaacatagcccatatggttttttaccaacaggaggctcatttggcgacagtggctcaccaatgtttatctatgatgcccaaaagcaaaagtggttaattaatggggtattgcaaacgggcaacccctatataggaaaaagcaatggcttccagctggttcgtaaagattggttctatgatgaaatctttgctggagatacccattcagtattctacgaaccacgtcaaaatgggaaatactcttttaacgacgataataatggcacaggaaaaatcaatgccaaacatgaacacaattctctgcctaatagattaaaaacacgaaccgttcaattgtttaatgtttctttatccgagacagcaagagaacctgtttatcatgctgcaggtggtgtcaacagttatcgacccagactgaataatggagaaaatatttcctttattgacgaaggaaaaggcgaattgatacttaccagcaacatcaatcaaggtgctggaggattatatttccaaggagattttacggtctcgcctgaaaataacgaaacttggcaaggcgcgggcgttcatatcagtgaagacagtaccgttacttggaaagtaaacggcgtggcaaacgaccgcctgtccaaaatcggcaaaggcacgctgcacgttcaagccaaaggggaaaaccaaggctcgatcagcgtgggcgacggtacagtcattttggatcagcaggcagacgataaaggcaaaaaacaagcctttagtgaaatcggcttggtcagcggcaggggtacggtgcaactgaatgccgataatcagttcaaccccgacaaactctatttcggctttcgcggcggacgtttggatttaaacgggcattcgctttcgttccaccgtattcaaaataccgatgaaggggcgatgattgtcaaccacaatcaagacaaagaatccaccgttaccattacaggcaataaagatattgctacaaccggcaataacaacagcttggatagcaaaaaagaaattgcctacaacggttggtttggcgagaaagatacgaccaaaacgaacgggcggctcaaccttgtttaccagcccgccgcagaagaccgcaccctgctgctttccggcggaacaaatttaaacggcaacatcacgcaaacaaacggcaaactgtttttcagcggcagaccaacaccgcacgcctacaatcatttaaacgaccattggtcgcaaaaagagggcattcctcgcggggaaatcgtgtgggacaacgactggatcaaccgcacatttaaagcggaaaacttccaaattaaaggcggacaggcggtggtttcccgcaatgttgccaaagtgaaaggcgattggcatttgagcaatcacgcccaagcagtttttggtgtcgcaccgcatcaaagccacacaatctgtacacgttcggactggacgggtctgacaaattgtgtcgaaaaaaccattaccgacgataaagtgattgcttcattgactaagaccgacatcagcggcaatgtcgatcttgccgatcacgctcatttaaatctcacagggcttgccacactcaacggcaatcttagtgcaaatggcgatacacgttatacagtcagccacaacgccacccaaaacggcaaccttagcctcgtgggcaatgcccaagcaacatttaatcaagccacattaaacggcaacacatcggcttcgggcaatgcttcatttaatctaagcgaccacgccgtacaaaacggcagtctgacgctttccggcaacgctaaggcaaacgtaagccattccgcactcaacggtaatgtctccctagccgataaggcagtattccattttgaaagcagccgctttaccggacaaatcagcggcggcaaggatacggcattacacttaaaagacagcgaatggacgctgccgtcaggcacggaattaggcaatttaaaccttgacaacgccaccattacactcaattccgcctatcgccacgatgcggcaggggcgcaaaccggcagtgcgacagatgcgccgcgccgccgttcgcgccgttcgcgccgttccctattatccgttacaccgccaacttcggtagaatcccgtttcaacacgctgacggtaaacggcaaattgaacggtcagggaacattccgctttatgtcggaactcttcggctaccgcagcgacaaattgaagctggcggaaagttccgaaggcacttacaccttggcggtcaacaataccggcaacgaacctgcaagcctcgaacaattgacggtagtggaaggaaaagacaacaaaccgctgtccgaaaaccttaatttcaccctgcaaaacgaacacgtcgatgccggcgcgtggcgttaccaactcatccgcaaagacggcgagttccgcctgcataatccggtcaaagaacaagagctttccgacaaactcggcaaggcagaagccaaaaaacaggcggaaaaagacaacgcgcaaagccttgacgcgctgattgcggccgggcgcgatgccgtcgaaaagacagaaagcgttgccgaaccggcccggcaggcaggcggggaaaatgtcggcattatgcaggcggaggaagagaaaaaacgggtgcaggcggataaagacaccgccttggcgaaacagcgcgaagcggaaacccggccggctaccaccgccttcccccgcgcccgccgcgcccgccgggatttgccgcaactgcaaccccaaccgcagccccaaccgcagcgcgacctgatcagccgttatgccaatagcggtttgagtgaattttccgccacgctcaacagcgttttcgccgtacaggacgaattagaccgcgtatttgccgaagaccgccgcaacgccgtttggacaagcggcatccgggacaccaaacactaccgttcgcaagatttccgcgcctaccgccaacaaaccgacctgcgccaaatcggtatgcagaaaaacctcggcagcgggcgcgtcggcatcctgttttcgcacaaccggaccgaaaacaccttcgacgacggcatcggcaactcggcacggcttgcccacggcgccgttttcgggcaatacggcatcgacaggttctacatcggcatcagcgcgggcgcgggttttagcagcggcagcctttcagacggcatcggaggcaaaatccgccgccgcgtgctgcattacggcattcaggcacgataccgcgccggtttcggcggattcggcatcgaaccgcacatcggcgcaacgcgctatttcgtccaaaaagcggattaccgctacgaaaacgtcaatatcgccacccccggccttgcattcaaccgctaccgcgcgggcattaaggcagattattcattcaaaccggcgcaacacatttccatcacgccttatttgagcctgtcctataccgatgccgcttcgggcaaagtccgaacacgcgtcaataccgccgtattggctcaggatttcggcaaaacccgcagtgcggaatggggcgtaaacgccgaaatcaaaggtttcacgctgtccctccacgctgccgccgccaaaggcccgcaactggaagcgcaacacagcgcgggcatcaaattaggctaccgctggtaa

SEQ ID NO: 43166 - DNA, 273 bp, Neisseria meningitidis
atgtactaccaagtcggaaataaatgtcttgagaagcaccaggctgaaaacctttatttcagcttggtagtaccaagaatcaaagaaaacggacagattgtcaggccggaatataacggcagcctgtggaagatgtcggacggtctgccgctaaggcttttattggcggaatgcagtccgaaagacaacctgcaaagcggtcttgaaacaggctggatagtattcggcatcctcgcgtccgtttactttgtttccctgctgaaaaagttttga

SEQ ID NO: 43167 - DNA, 4179 bp, Neisseria meningitidis
atgaactattcgtttaccgagaaaaaacgtatccgtaagagttttgcaaagcgggaaaatgttttggaagttcctttcttgctagcaacccaaattgattcttatgcgaagtttttgcagctggaaaatgcttttgacaaacgtaccgatgacggtctgcaggcggcatttaattctattttcccgattgtgagccataacggttatgcgcgattggagtttgtgcattacacattgggcgagcctttgttcgatattcccgaatgtcagttgcgcggaatcacttatgcagcccccttgcgcgcgcgtatccgtttggtgattttggataaggaagcatctaaaccgacggtaaaagaagttcgtgaaaacgaagtgtatatgggcgaaattccgttgatgaccccgagcggttcttttgtgattaacggcacagagcgtgtgattgtctcccagttgcaccgttcgcccggcgtattcttcgagcatgacaaaggtaagacgcactcttccggcaaattgttattctccgcccgcatcattccctaccgtggttcatggttggattttgaatttgatccgaaagatttgctgtatttccgtatcgaccgccgccgtaaaatgccggtaacgattttgttgaaggctttaggctacaacaatgagcaaatcttggatattttctacgacaaagaaacgttctatttgtcttcaaacggtgttcaaaccgatttggttgcagaccgtctgaaaggcgaaactgccaaggtcgatatcttggataaagaaggcaatgtattggttgccaaaggtaagcgcattactgcgaaaaatatccgtgatattaccaatgcaggcctgacccgtttggatgtagaaccggaaagcctgctgggcaaagcattggctgccgatctgattgattcggaaaccggcgaggtattggcttctgccaatgatgaaattacagaagagttgttggccaaatttgatatcaacggcgtaaaagaaattacgaccctttatatcaatgagctggatcagggtgcttatatctccaataccttgcgtacggatgagactgccggccggcaggcggctcgtgttgcgatttaccgtatgatgcgtccgggcgaaccgcccaccgaagaggcggtcgagcaattgtttaaccgcttgttcttcagtgaagacagctacgatctgtcccgcgtaggccgtatgaaatttaatacgcgcacatacgaacaaaaactgtccgaagcccaacaaaactcttggtacggccgcctgctgaacgaaacgtttgccggtgctgccgacaaaggcggttatgtcctgagcgtcgaagatattgtcgcctcgattgcgactttggtcgagttgcgtaacggccatggcgaagtggacgatatcgatcacttgggcaaccgccgagtacgttcggtaggcgagctgactgaaaaccaattccgtagcggtttggcccgtgtggaacgtgccgtaaaagaacgtttgaatcaggcggaatcagaaaacttgatgccgcacgatttgattaatgcaaaacctgtttctgccgctattaaagaattcttcggctccagccaattgagtcagtttatggatcagaccaaccccttgtctgaagtaacccataaacgccgtgtatctgcattgggtccgggcggtttgacccgcgaacgtgcaggatttgaggtgcgggacgtgcatccgacccactacggtcgcgtatgtccgattgaaacgcctgaaggtccgaacatcggtttgatcaactcattgtccgtttatgcgcgcaccaatgattacggtttcttggaaacgccttaccgccgcgttatcgacggcaaagtaaccgaggaaatcgattacttgtctgccatcgaagaaggccgctatgtgattgcacaggcgaatgccgatttggattcagatggcaatctgattggcgatttggttacctgtcgtgaaaaaggcgaaaccattatggcaacgcccgaccgcgtccaatatatggacgtggcaactggtcaagtggtatccgttgcagcatccctgattccattcttggaacatgatgacgcgaaccgcgcattgatgggtgccaacatgcaacgtcaggcagtgccttgcttgcgtcctgaaaaaccgatggtcggtaccggtatcgagcgttccgttgccgttgactctgctactgcaatcgttgcccgccgaggcggcgtggtcgagtatgtcgatgccaaccgcgttgtgatccgtgtccatgacgacgaagcgactgccggtgaagtgggtgtcgatatttacaacttggttaaattcacccgttccaaccagtctaccaatatcaatcagcgtcctgccgtcaaagccggcgatgttttgcaacgcggcgatttggtggccgacggcgcgtccaccgattttggcgaattggctttgggtcaaaatatgaccatcgccttcatgccgtggaacggttacaactacgaagactcgattctgatttccgaaaaagtggctgcggacgaccgctatacttcgattcacattgaggaattgaatgtcgttgcccgcgatactaagctgggtgcggaagacattacccgcgatattccgaacttgtccgagcgtatgcaaaaccgtttggacgaatccggtatcgtttacatcggtgcggaagtagaagccggcgatgtgttggtaggcaaggtaacgcctaaaggcgaaacccaactgacgccggaagaaaaactgctgcgcgccatcttcggtgaaaaagcatctgacgtaaaagatacttcattgcgtatgcctaccggcatgagcggtaccgttatcgacgttcaagtcttcactcgtgaaggtattcaacgcgacaaacgtgctcaatccattatcgattccgaattgaaacgctaccgtttggatttgaacgaccaattgcgtattttcgacaacgacgcattcgaccgtatcgagcgtatgattgtcggtcagaaagccaacggtggtccgatgaagctggccaaaggcagcgaaatcacgaccgaatatctggcgggtctgccgagcaggcacgattggttcgatatccgtctgaccgatgaagatttggccaagcagttggaactgattaaagtgagcctgcaacaaaaacgcgaagaagcggacgagttatacgaaatcaagaagaaaaaactgacccaaggcgacgaattgcaacccggcgtacaaaaaatggtgaaagtttttatcgccatcaaacgccgtctgcaagccggcgacaaaatggcgggccgccacggtaacaaaggcgtggtatcgcgcattctgccagtggaagacatgccttacatggcggacggccgtccggtagacatcgtactgaacccattgggcgtaccttcccgtatgaacatcggtcagattttggaagttcacttgggttgggcagcaaaaggtatcggcgagcgtatcgaccgtatgctgaaagagcaacgcaaagcaggcgagttgcgcgagttcttgaacagactctacaacggcagcggtaagaaagaagatttggatgccctgactgatgaagaaatcatcgaactggcctccaacctgcgcaaaggtgcatctttcgcctctcctgtattcgacggtgcgaaagagtctgaaatccgcgaaatgctgaacttggcttatccgagcgacgatcctgaggttgaaaaactgggcttcaacgacagtaaaacccaaatcacgctgtatgacggccgttcaggcgaagcatttgaccgcaaggttacagtaggtgtgatgcactatctgaaactgcaccacttggttgacgaaaaaatgcacgcgcgttctaccggtccgtacagtctggttacccagcagcctttgggcggtaaagcccagttcggcggccaacgtttcggcgagatggaggtttgggcattggaagcatacggcgcggcatacacgctgcaagagatgctgactgtgaagtctgacgacgtgaacggccgtaccaaaatgtacgaaaacatcgtcaaaggcgaacacaaaatcgatgccggtatgcccgagtccttcaacgtattggtcaaagagattcgctcactgggcttggatatcgatttggaacgttactaa

SEQ ID NO: 43168 - DNA, 777 bp, Neisseria meningitidis
atgaactttatccgttccgtcggggcgaaaaccctcggccttattcaatccctcggcagtatcacgctgtttctgctgaacattctggcgaagtccggtacggctttcgtccgtccgcgcctgagcgtgcgccaagtgtatttcgccggtgtgctgtcggtgttgattgttgccgtttcggggctgtttgtcggcatggtcttgggtttacagggctatacgcagttgtcgaaattcaaatccgccgatattttgggctatatggtcgcggcttcgctattgcgcgagctgggtccggtattggcagcgattttgtttgccagcagcgcgggcggtgcgatgaccagcgaaatcggtctgatgaaaacgaccgaacagctcgaagcgatgaatgtgatggcggtaaaccctgtcgcccgcgtggttgcgccgcgcttttgggcgggcgtgttttccatgccgcttttggcttcgattttcaacgtggcgggcattttcggtgcgtatttggttggtgtaacctggctgggcttggacagcggtattttctggtcgcaaatgcagaacaacatcacgatacattacgatgtaatcaacggtctgatcaaatccgccgcgttcggcgtggcggtaacgctgattgccgtgcatcagggcttccattgcgtcccgacttcggaaggcattttgcgcgccagcacgcgcacggtggtttcgtccgccctgacgattttggcggtcgattttatattgaccgcgtggatgtttacagattga

SEQ ID NO: 43169 - DNA, 1503 bp, Neisseria meningitidis
atgagtcgtgaaatgttacagctggcagaagcactggcaagcgaaaaaaacgttgatgcggaagtcgtcttccaagcactggaattcgccctgtctaccgccgccaagaaaaaggcagaccgcgaacacatggacgtgcgcgtccaaatcaaccgcgacaccggcgaataccaaaccttccgccgctggctgattgtcgccgatgaagactatacctatcccgatgtcgaaaaaaccatcgaggaaatccaagaggaaattcccggcactaccatccaaatcggcgaatactacgaagagcagctgcccaacgaaggcttcggccgccaagccgcgcaaaccgccaaacaaatcatcctgcaacgcatccgcgatgccgagcgcgagcagaatctgaacgagtttctcgccgtcaaagaagacatcgtgtccggcacggtcaaacgcgtcgaacgccacggcatcatcgtcgaagtcgttgccggcaaactggacgcgctgattccgcgcgaccaaatgattccgcgcgaaaacttccgcagcggcgaccgcatccgcgccctcttcctgcgcgtcgaagaaatcggcaacaccggccgcaaacaagtcattctgagccgtacttccggcgatttcctcgtcaaactgtacgccaatgaagtacctgaaattgcagacggcatgcttgaaatccgcgctgtcgcccgcgacccgggacaacgtgccaaagtcgccgtcaaagccaacgaccagcgcatcgatccgcaaggcacctgtatcggcgttcgcggttcgcgtgtcaatgccgtcagcaacgaattgtccggcgagcgcatcgatgtcgtcctctggtcgcccgaacccgcgcaattcgtgatgagcgcgctctcacccgccgaagtcagccgcatcgtcatcgacgaagacaaacacgccgtcgatgtcatcgttgccgaagaccagctcgcgctcgccatcgggcgcggcggtcaaaacgtgcgccttgcttccgacctgaccggctggcagctcaacatcatgacttccgccgaggcagacgaacgcaatgcggcagaagatgccgccatccgccgcctgtttatggatcacttgaacgtggacgaagaaaccgccgacgtactggttcaggaaggttttgcaaccttggaagaagtcgcctatgttcctgccgccgaactgcttgccattgaaggatttgacgaagaaatcgtcgatatgctccgcaaccgcgcccgcgatgccatcctgaccatggcgattgccgccgaagaaaaactgggcgaagtgtccgacgatatgcgcaacctcgaaggcatagatgccgatatgctccgcagccttgccgaagcaggcattaccacccgcgacgacttggcagagcttgctgtggacgaactgattgaaatcaccggtgtaaacgaagaaaccgcaaaagccgtcatcctgaccgcacgcgaacactggtttaccgaagacaaataa

SEQ ID NO: 43170 - DNA, 639 bp, Neisseria meningitidis
atgaaaaaaatcaatgttgcccccgaaaatccgcaataccgtatcgtcgaaattttcgagagcctgcaaggcgaaggctggaacacgggcatgcccgccgttttcgtccgcttgggcaaatgcaatctggcgtgcggctggtgtgataccgattatttgacattcggtatgatgggcttgtccgatatcttaggccgtctgaaaacctacgccgcccgcaacatcatcatcaccggcggcgagccgaccatacagccgcatctcgatatgctgctggacacgctcaaggcggaaggctatttcctctgtctcgaaaccaacggactcaatcccgcgccgccgcaaatcgactacgtcgccaccagccccaaagcctgctacgccgccaaatatgaaaatagctgtatcgaaacagccgacgaagtgcggattgttgccgatggtgatgtccttgcgttctgcgaaaacatggaacgcaaaatccgcgcacatcattactacctttcgccctgtgagcaagacggtgcgatgaacatctacgacaccatccgccaaatcggtattttaaacagtcgccccgacgcatccgtgcattggcagttgagcgtgcagacgcacaaatgggcgggaatagagtag

SEQ ID NO: 43171 - DNA, 1104 bp, Neisseria meningitidis; identical to SEQ ID NO: 42777

SEQ ID NO: 43172 - DNA, 360 bp, Neisseria meningitidis
atgatacgttatcttttaattgcctgcggctgcatttccctactgttgggtatcatcggcatttttttgccgctgttgccgaccacgccgttcgtactgctctccgccgcctgctgggcaaaggcatccccgcgcttttaccgctggctgcaccggcaccgctatttcggcccgatggttcataactgggaacaaaacggcgcagtgccgcgcaaagccaaaatattcgccatcagtatgatgaccgcatcctgcctgataatgttttggcagtttccccaacgctggtgggtcggggcggtttcatcggttttttgttcccttgtcgccatatggatgtggcgcaggcccgaatcttga

SEQ ID NO: 43173 - DNA, 1260 bp, Neisseria meningitidis
atgaaacagaccgtcctcaaaaataacctgcaaaacctgcttgaaagcgcagaaaatatcctgctgcttcaaggccctgtcggcgatttttttctgcgccttgccgactggctgactgcaaacggcaaaaccgtacataaattcaactttaatgcaggcgacgactatttttatccgcccactcaagcgcataccgttgtttttaacgacaactacgatgcctttcctgagtttttgcaagaatacatcactcaacatcacatccaggccgttgtctgctttggcgacacacgcccttatcacgtcattgcaaaacgcattgcaaacgaaaaccaagccagtttctgggcgtttgaagaaggctatttccgcccctactacatcaccttagaaaaagacggcgtcaacgcattttccccgttgccgcgccgtgccgacttttttcttgaacaattccctaagcttgcccagcaagaatataaagcgccaacgccggtacacggcggttttacgcccatggcaaaaaacgctatccgttactatatcgagttgttccgcaatccacgcaaataccccgactacatccaccaccgcgcacccaatgccggccattacctcaaaccgtggtcgctctccatcctcaagcgtttgaactactatattgaagacatccaaatcgccaaacgtgtggaagcaggcaaatacggcaagttttttattgttcccttacaggtattcaacgacagccaagtccgtatccattgcgactttcccagcgtccgcagcttcctgctccatgttttgagttcatttgccgagcacgcgcctgccgataccaacatcatcatcaagcatcatccgatggaccgcggttttatcgactactggcgcgacattaaacgctttatcaaagaacaccccgaactcaaaggccgtgtgatttatgtccatgatgtccccctgcccgttttcctgcgccacggtctcggcatggtcaccatcaacagcaccagcggcctgtccggactgattcacaatatgccagttaaggttctcggccgtgcctattatgatattcccggcattactgaccaaaataccttggcagaattttggaatcatccgacaccgcctgacaaagagctgttccatgcctaccgaatgtaccacctcaacgtgacccaaattaacggcaacttctacagtcaggtgtttttccccaacaaaaaaacctccaactcttccacaccagtaatctga

SEQ ID NO: 43174 - DNA, 1173 bp, Neisseria meningitidis
atgaaacgccaagccttagctgcaatgattgcttccttattcgcattagccgcctgcggcggcgaacctgccgcgcaagcccctgccgaaacccctgccgctgccgccgaagccgcaagctccgccgcacaaaccgccgccgaaacaccgtccggcgaactgcccgttatcgatgcggttaccacccacgctcccgaagtgcctcctgcaatcgaccgcgactaccccgccaaagtccgcgtaaaaatggaaaccgtcgaaaaaaccatgaccatggaagacggtgtggaataccgctactggacatttgacggcgacgttccgggccgtatgatccgcgtacgcgaaggcgatacggttgaagtggaattttccaacaatccttcttctaccgttccgcacaacgtcgacttccacgcggctaccggccagggcggcggcgcggccgcaacctttaccgctccgggccgtacttccacattcagcttcaaagccctgcaaccgggtctgtacatctaccactgcgccgtcgcaccggtcggtatgcacatcgccaacggtatgtacggtctgattttggtcgagcctaaagaaggcctgccgaaagtggataaagagttctacatcgtccaaggcgacttctacaccaaaggcaaaaaaggcgcgcaaggtctgcaaccgttcgatatggacaaagccgttgccgaacagcctgaatacgtcgtattcaacggtcacgtaggtgctatcgccggcgataacgcgctgaaagccaaagcaggcgaaactgtacgtatgtacgttggtaacggcggtccgaacttggtatcttccttccacgtcatcggcgaaatcttcgacaaagtttatgttgaaggcggcaaactgattaacgaaaacgtacaaagcaccatcgttcctgccggcggctctgccatcgtcgaattcaaagtcgacatcccgggcagctacactttggttgaccactctatcttccgcgcattcaacaaaggcgcactgggtcaattgaaagtagaaggtgcagaaaaccctgaaatcatgactcaaaaattgagtgataccgcttacgccggtaacggtgcagctcctgctgcttccgctcccgcagcttctgccccggcagcctctgcatccgaaaaaagcgtttattaa

SEQ ID NO: 43175 - DNA, 210 bp, Neisseria meningitidis; identical to SEQ ID NO: 39235

SEQ ID NO: 43176 - DNA, 2178 bp, Neisseria meningitidis
atgacacgcttcaaatattccctgctgtttgccgccctgttgcccgtgtacgcgcaggccgatgtttctgtttcagacgaccccaaaccgcaggaaagcactgaattgccgaccatcaccgttaccgccgaccgcaccgcgagttccaacgacggctacactgtttccggcacgcacaccccgctcgggctgcccatgaccctgcgcgaaatcccgcagagcgtcagcgtcatcacatcgcaacaaatgcgcgaccaaaacatcaaaacgctcgaccgcgccctgttgcaggcgaccggcaccagccgccagatttacggctccgaccgcgcgggctacaactacctgttcgcgcgcggcagccgcatcgccaactaccaaatcaacggcatccccgttgccgacgcgctggccgatacgggcaatgccaacaccgccgcctatgagcgcgtagaagtcgtgcgcggcgtggcggggctgctggacggcacgggcgagccttccgccaccgtcaatctggtgcgcaaacgcctgacccgcaagccattgtttgaagtccgcgccgaagcgggcaaccgcaaacatttcgggctggacgcggacgtatcgggcagcctgaacaccgaaggcacgctgcgcggccgcctggtttccaccttcggacgcggcgactcgtggcggcggcgcgaacgcagccgcgatgccgaactctacggcattttggaatacgacatcgcaccgcaaacccgcgtccacgcaggcatggactaccagcaggcgaaagaaaccgccgacgcgccgctcagctacgccgtgtacgacagccaaggttatgccaccgccttcggcccgaaagacaaccccgccacaaattgggcgaacagccgccaccgtgcgctcaacctgttcgccggcatcgaacaccgcttcaaccaagactggaaactcaaagccgaatacgactacacccgcagccgcttccgccagccctacggcgtagcaggcgtgctttccatcgaccacaacaccgccgccaccgacctgattcccggttattggcacgccgacccgcgcacccacagcgccagcgtgtcattgatcggcaaataccgcctgttcggccgcgaacacgatttaatcgcgggtatcaacggttacaaatacgccagcaacaaatacggcgaacgcagcatcatccccaacgccattcccaacgcctacgaattttcccgcacgggtgcctacccgcagcctgcatcgtttgcccaaaccatcccgcaatacggcaccaggcggcaaatcggcggctatctcgccacccgtttccgcgccgccgacaacctttcgctgattttgggcggacgatacacccgttaccgcaccggcagctacgacagccgcacacaaggcatgacctatgtgtccgccaaccgtttcaccccctacacaggcatcgtgttcgacctgaccggcaacctgtctctttacggctcgtacagcagcctgttcgtcccgcaatcgcaaaaagacgaacacggcagctacctgaaacccgtaaccggcaacaatctggaagccggcatcaaaggcgaatggcttgaaggccgtctgaacgcatccgccgccgtgtaccgcgcccgtaaaaacaacctcgccaccgcagcaggacgcgacccgagcggcaacacctactaccgcgccgccaaccaagccaaaacccacggctgggaaatcgaagtcggcggccgcatcacgcccgaatggcagatacaggcaggttacagccaaagcaaaacccgcgaccaagacggcagccgcctgaaccccgacagcgtacccgaacgcagcttcaaactcttcactgcctaccactttgcccccgaagcccccagcggctggaccatcggcgcaggcgtgcgctggcagagcgaaacccacaccgaccctgccacgctccgcatccccaaccccgccgccaaagcccgcgccgccgacaacagccgccaaaaagcctacgccgtcgccgacatcatggcgcgttaccgcttcaatccgcgcgccgaactgtcgctgaacgtggacaatctgttcaacaaacactaccgcacccagcccgaccgccacagctacggcgcactgcggacagtgaacgcggcgtttacctatcggtttaaataa

SEQ ID NO: 43177 - DNA, 2115 bp, Neisseria meningitidis
atgtcagttttccgcatcaatatgaccgccgccacggttttggcagcactctcgtcttcggtttttgccgcacaaacggaaggtttggaaaccgtccatattaagggtcagcgttcttacaacgcgattgccaccgagaaaaacggcgattacagctcgtttgccgccaccgtcggtacaaaaatccccgcttctttgcgcgaaattccgcaatccgtcagcatcattaccaaccagcaggtcaaagaccgcaatgttgatacgtttgaccagttggcacgcaaaacgcccggcctgcgcgtgttgagcaacgacgacggacgctcttcggtttacgcgcgcggttacgaatacagcgaatacaacatcgacggcctgcccgcgcagatgcagagtatcaacggcacgctgcccaacctgttcgccttcgaccgcgtggaagtgatgcgcgggccgagcggactgttcgacagcagcggcgagatgggcggcatcgtgaatctggtgcgcaaacgcccgaccaaagcgttccaaggtcatgcggcggcagggttcggtacgcacaaacaatataaagccgaggcggacgtatcgggcagcctcaattcagacggcagcgtgcgcggccgcgtgatggcgcagaccgtcggcgcgtctccgcgtcccgccgagaaaaacaaccggcgcgaaaccttctacgcggcggcggattgggacatcaaccccgatacggttttgggcgcgggctatctttaccagcaacgccgcctcgcgccgtacaacggcctgcctgccgatgccaataacaaattaccgtccctgccgcaacacgtatttgtcggcgcggattggaacaaatttaaaatgcacagccacgacgtgttcgccgatttgaaacattacttcggcaacggcggctacggcaaagtcggtatgcgctattccgatcggaaagccgattccaattatacgtttgcgggcagcaaactcaacaataccggacaagccgacgtagcgggtttgggtacggacattaaacaaaaagcctttgcggttgacgcaagttacagccgtccgtttgccttgggcaacaccgccaacgaatttgtgattggtgcagactacaaccgcttgcgcagtactaatgaacaagggcgttcgactttgtcaaaaagcgtcgctttagatggtttccgcgctttgccttataacggcatacttcagaacgcccgcgccggaaacaaaggtttcaatcactccgttaccgaagaaaacctcgacgaaaccggtttgtatgccaagacggtgttccgtcctctggaaggtttgtcgttgattgcaggcggacgtgtaggacatcacaaaatcgagtcgggcgacggcaaaaccctgcataaagcttcgaaaaccaaatttacaagctacgccggcgcggtttacgatatagacggcagcaacagcctgtacgcttccgcctcccaactctacacaccgcaaaccagcatcggcaccgacggcaagctgctcaaaccgcgcgaaggcaaccagtttgaaatcggctacaaaggcagctacatggacgaccgcctcaatacccgggtttcgttctaccgcatgaaggataaaaacgccgccgcaccgctggactcaaacaacaaaaaaacccgttacgccgcattgggcaaacgcgtgatggaaggtgttgagaccgaaatcagcggcgcgatgacaccgaaatggcaaatccatgcaggttacagctacctgcacagccaaatcaaaaccgcctccaattcgcgcgacgaaggcatcttcctgctgatgcccaaacacagcgcaaacctgtggacgacttaccaagttacgtccgggctgaccatcggcggcggcgtgaacgcgatgagcggcattacttcatctgcagggatacatgcaggcggttatgccacgttcgatgcgatggcggcataccgcttcacgcccaaactgaagctgcaaatcaacgccgacaacatcttcaaccgccattactacgcccgcgtcggcagcgagagcacctttaacattcccggttcggagcgcagcctgacggcaaacctgcgttacagtttttaa

SEQ ID NO: 43178 - DNA, 753 bp, Neisseria meningitidis
atgaccgacatccttattgacaacaccgccaccgaaaccgtccgcaccctgatacgggcattcccccttgtgcccgtttcccaaccgcccgaacaaggcagttacctccttgccgaacacgataccgtcagcctcaggcttgtcggggaaaaaagcagcgtcatcgtcgattttgcctccggcgcggcacaataccggcgcacaaaaggcgggggcgaactcatcgccaaagccgtcaaccacaccgcgcaccccaccgtttgggacgcaaccgcaggattggggcgcgacagcttcgtcctcgcctcgctcgggctggccgttaccgccttcgagcaacatcccgccgtcgcctgcctgctttcagacggcatccgccgcgccctcctcaatcccgaaacgcaaaacaccgccgcgcacatcaacctccatttcggcaacgccgccgaacaaatgcccgcacttgtccaaacacaaggcaaacccgacatcgtctatctcgaccccatgtatcccgaacgccgcaaaagtgccgccgttaaaaaagaaatgacctacttccaccggctcgtcggcgaagcgcaagatgaagcggcactcctgcataccgcacgccaaacagcaaaaaaacgcgtcgtcgtcaaacgcccccgcctcggcgaacaccttgccggacaagaccctgcctaccaatacacaggcaaaagcacccgcttcgacgtttacctgccctacgggacggacaagggataa

SEQ ID NO: 43179 - DNA, 2664 bp, Neisseria meningitidis
atgtccacccaattacacgatgttgaccctatcgaaacccaagagtggctggacgcgttaagctccgtcctcgaatatgaaggcggcgaacgcgcacaatacctcttggaaaacctggtcaaatactgccgcgacaagggcgtacgtatgccacacggcacgaccaccccgtatttgaataccgtttcggttgaaaacgaaaaaggcattccgggcgaccaaaacatcgaacaccgcatccgcgcattcgtgcgctggaacgccgccgccatcgtattgcgcgccggcaagaaagatttggaactgggtgggcacatcgcatctttccaatctgccgccaccatgtacgaagtcggtttcaaccacttttggaaagccaaaggcgaaggcgaagaaggcgatttggtcttcttccaaggtcacgtcgctccgggcatctatgcacgcgcattcgtcgagggccgtctgaccgaagaccagctgaacaacttccgccaagaagtggacggacacggtctgccttcctatccgcacccccacctcttgcccgacttttggcagttcccgaccgtatccatgggcttggggcccatcatggcgatttatcaggcgcgtttcctgaaatacttggaatcgcgtggtttggcaaaaaccaaaggccgtaaagtatggtgtttctgcggcgacggcgaaatggacgaacccgaatctcaaggtgcaatcgcactggctgcacgcgaaggcttggacaacctgattttcgtcatcaactgcaatctgcaacgcttggacggtccggtacgcggcaacggcaaaatcatccaagaattggaaggcaactttgccggcgccggctggaatgtcgtcaaagtcatttggggccgccgctgggaccgcctcttggcgaaagacaaagacggtatcctgcgccaacgtatggaagaatgtttggacggcgactaccaaacttacaaatccaaagacggcgcgtatgtgcgcgaacacttcttcaatacgcccgaactgaaagcattggttgccgatatgaccgatgagcaactctgggcattgaaccgcggcggccacgacccgcaaaaagtgtacaacgcctacgaccgcgcagcgaaccatgccgacggcaaacctaccgtcatcttggcgaaaaccattaaaggttacggtatgggcgcatccggcgaaggtcagaacgttgcccaccaagccaaaaaaatggacaaagcgtccctgaaacaattccgcgaccgctttgacattccggttaccgacgaacaaatcgaaagcggcgatctgccttacctgacttttgcccccgatacggaagaatacaaatacctgcacgcacgccgcgatgctttgggcggctacctgccgcaacgcaaaccgacgcaggaagtattggaagtgcccgagctgtcagcattcgacgcacaactcaaatccagcggtgaacgcgagttctcgaccacgatggcattcgtccgcatcctgtccactttactgaaagacaaaaaaatcggcaaacgcgtcgtacctatcgttcccgacgaaagccgtactttcggcatggaaggtatgttccgccaatacggtatttggaatccgaaaggtcagcaatatacccctcaagacaaagaccaactgatgttctataaagaatccgttgacggtcaaatcttgcaagaaggtattaacgaaccgggcgcgatggccgactggattgcggctgcaaccagctacgccaacagcaacttcgccatgattccgttctacatttactattctatgttcggtttccaacgtatcggcgacttggcttgggcggcgggcgatatgcacgcgcgcggcttcctgctgggcggtactgccggccgtacgacgctgaacggcgaaggcctgcaacacgaagacggccacagccacatccaggccgacctgattccgaactgcgtatcttatgacccgactttccaatacgaagtcgccgtcatcgtacaagacggtctgcgccgtatgtatgccaataatgaagacgtgttctactacatcaccctgatgaacgagaactacacccatccggatatgcccgaaggtgcggaacaagacatcttgaaaggtatgtacctgctgaaagccggcggcaaaggcgataagaaagttcaattgatgggctccggtaccatcctgcaagaagtcattgccggtgccgagctgctgaaagccgacttcggcgtagaagcagacatctggtcttgcccgtccttcaacctgctgcaccgcgacgctgtcgaggtagaacgcttcaaccgcctgcatccgctggaagccgaaaaagtacctttcgttacttcccaactgcaaggtcatgacggtccggttattgccgctaccgactatatccgcagctatgctgaccgtatccgcgcctacatcccgaacgactaccacgtcttgggcactgacggtttcggccgttccgacagtcgcgccaacctgcgccgcttctttgaagtggatcgctacaacgttgccgtggccgcattggccgcattggcggaacaaggcaaagtcagcaaagaaaccgttcaacaagccattgagaaatacggcatcaaagccgattcagctcctagctggaaacgctga

SEQ ID NO: 43180 - DNA, 453 bp, Neisseria meningitidis
atgaatattgaagtagaaatgaaagtattggacgaacggatggcggatgttgtccctgtctatgcaacggagggttctgcaggtttagatttgcgcgcctgtttggatgaggaagtcgttttgcagccgggtgaaacgtttcttgtgccgacgggtttggcaatttatttggcgaatcccgcatatgccgccgttttgctgccccgttccggcttggggcataaacacggcattgttttgggcaatttggtcggtttgattgactccgattatcaaggggaattgaaggtgtcgttatggaacagaagcagcgaaccgtttactgtcaaaccgtttgagcgtatcgcgcagatggttgtcgtgccaatcgtgcaggcgggcttcaaacgtgtcgaggagtttgtcggaagcagccggggtgagggcggcttcggcagtacgggttctcactaa

SEQ ID NO: 43181 - DNA, 1200 bp, Neisseria meningitidis
atgcaggcggcccgtccgtccctgcaatgttttttatttttgaacgaaaggtcgaaaaccatgaaaaaaacactggtggcggcggcaatcctgagcctcgccttgactgcgtgcggcggcggaagcgataccgccgcccaaaccccctccgccaagcccgaagccgaacaatcgggcaaactcaacatctacaactggtcggattatgtcgatcccgaaaccgttgccgcctttgaaaaagaaaccggcatcaagacgcgttccgattattacgacagcaacgaaacactggaggcaaaagtcctgaccggcaaatccggctacgacctgaccgcgccgtccatcgccaacgtcggccggcaaatcaaagcgggcgcgtatcagaaaatcgacaaggcgcaaatcccccattacggcaacatcgataaagatttgctgaaaatgatggaagccgtcgatccgggcaacgaatacgccgtcccctatttctggggcatcaataccttggcaatcaatacccagcaggtgaaaaaagcattgggtacggacaagctgcccgaaaacgaatgggatttggtgttcaaacccgaatacaccgccaaactcaaatcctgcggcatcagctatttcgacagcgcaatcgaacagattcccttggcgttgcactatttgggcaaagaccccaacagtgagaatcccgaagacatcaaagccgccgtcgatatgatgaaagccgtccggggcgacgtgaaacgcttcagctcttccggctatatcgacgatatggcggcgggcaacctgtgtgccgccatcggttacggcggcgatttgaacattgccaaaacccgtgccgaagaagccgcaaacggcgtggaaatcaaagtattgaccccgaaaaccggcgtgggcgtgtgggtggattcctttatgattccgcgcgacgcgcaaaacgttgccaatgcccaccgctatatcgactacacgctccggcccgaggtggcggcgaaaaacggcagcttcgttacctacgcgcccgccagccgtcccgcgcgcgagctgatggatgaaaaatacacctccgacgcatcgattttcccgaacaaagaactgatggaaaaaagtttcatcgtatcgcccaaatccgcagaatccgtcaaactgggcgtgaagctgtggcaagggctcaaagcgggcaaataa

SEQ ID NO: 43182 - DNA, 117 bp, Neisseria meningitidis
ttggaattgaaatactgcaatcgtgaggctaaggcttccgttgtaacgtttaccatatatttcattattttaatttcatcaaaaaacaaaattcaagattatacataccgccaatag

SEQ ID NO: 43183 - DNA, 591 bp, Neisseria meningitidis
atgggtttgaagctgcctttgattttgggcacgagttcggttttccgccgcgaacagatggaaaggctcggcatcgcctttcaggcggcatcccccgattttgacgaaacgccgatgctgggggagtctgcccctcagacggcattgcgccttgccgaaggtaaagcgcaatcgttaatcgggcggtttccggagtccttgattgtcggggcggaccaggtggcgtggtgcgacggcaggcagtggggcaagccgatgaaccttgccaacgcgcaaaagatgctgatgcacttgagcggcagggagattgagttttacagcgcggtcgtgctgttgaatacggttacgggcaggatgcagcggcatatcgataagacggtggttgtgatgaggaagttggacgagttgcatatactccgctatttggagcgcgagcctgatgcggtttattgctcgtgtgcgttgaagagcgaggatttgggtgcattgttgatcgaacggattgaaagcagcgatccgaatgctttaatcggtttgccggttttccgtttggtcgattttttgaaaaatgagggcgtggatgttttgtaa

SEQ ID NO: 43184 - DNA, 432 bp, Neisseria meningitidis
atggatatccaaaccatcctcgaaaaaaccctgcccggcctgggctacgaactggtcgatttcgaactgaccgcgcaaggaacattgcgcgtgttcatcgacaaagaaagcggcattaccgtcgaagactgcgcaaccgtcagcaaccacttgagccgcgtcttcatggttgaagacatcgactacaaaaacctggaaatttccagccccggactcgaccgccccttgaaaaaagccgccgacttcgtgcgctttgccggtcagaatgccaaaatcaaaacccgcctgccgatagacggtcagaaaaactttatcggtaaaatcgaaggctgcgaaaacgataccgttaccgtatccttcgacggcaaaaccgtacaaatcgaattgggcaacatcgacaaagcccgtctgcgccccgaattcaaattctaa

SEQ ID NO: 43185 - DNA, 2952 bp, Neisseria meningitidis
atgccgtctgaacaagggtttcagacggcatttgccttttccgttataatccggggttgtccgggggcgggttttaagccggcatcgtccttccctatttttttctgtcccttatcggttttaagcgggttttttatgtccaacagacctacactcctcctcgttgacggatcgtcctacctctaccgtgcgtatcacgcgatggggcaaaacctgaccgcccccgacggcgcgccgacgggtgcgctgtatggtgtattgaatatgttgcgccgtttgcggtcggaatatccgcacgattattgcgcggtggtttttgatgcgaaaggcaaaaatttccgccatcaaatgtttgaagaatacaaggcgacgcgcccgccgatgcccgacgatttgcgcccgcaggcggaagcactgccggatttagtgcgcctgacaggctggccggtattggtgattgggcaggtggaggcggacgatgtgatcggcacgctggcgaaacagggggcggaacatggtttgcgagtcattgtttcgaccggcgataaggacatggcgcagttggtggatgagcgcgttacgctggtgaacacgatgagcagcgaaacgctggacattgaaggcgtgaaggcaaaattcggcgtgcgccccgaccaaatccgcgattatctcgcgctgatgggcgacaaggtggacaacgtgccgggcgtggaaaaatgcggcccgaaaacggcggtgaaatggctggaagcctacggttcgctggctggtgtgatggaacacgcttcggaaatcaagggcaaagtgggcgaaaacctgcaagccgcgctgccccaactgccgctgtcgtatgatttggtcacgattaaaaccgatgtggacttgcacgccgagctttcagacggcatcgaaagcctgcgccgtactacgccgaaatgggcgcagctggttgtcgatttcaaacgctggggcttccgcacctggctgaaagaagcggaatcaaacatgaataccggctcgaccgatgatttgttcggcagcgacagcatcggcgagcaggcggctttgaatgcggaaatgccgtttgaaaaacaagccgaaaaagccaccgcccccgaaaaactggattatcaagccgttaccaccgaagcgcagtttgccgctttgttggacaaactgtcgcgggcggacacaatcggcatcgatacggaaaccacgtcattagacgcgatgaacgcctcgctggtcggcatcagcatcgctttccaagcaggcgaagcggtttacatccccgtaggacacagcctgaccgccgcgcctgaacagcttgatttacaagacgtattaggccgtctgaaaccgcatttgggaaaccccgccctaaaaaaaatcgggcaaaacctcaaatacgaccaacacgttttcgccaactacggcatcgccctgaacggcattgccggcgacgccatgctcgcttcctacatcatcgagagccatctcggacacggcttggacgaattgtccgaacgctggctcggcttggaaaccattacctacgaatcgctgtgcggcaaaggcgcgaagcaaatcggttttgccgatgtcgccatcgggcaggcgaccgaatacgccgcccaagacgccgatttcgccctgcgcctcgaagcgcacctgcgcgcgcaaatggacgaaaaacagcttgaaatgtatgaaaaaatggagctgcccgtcgcgcaggtattgtttgaaatggaacgcaacggcgtgcaaatcgaccgcgccgaactcgcccgccaaagcgcggaactcggcgccgagctgatgaagctcgaacaggaagcctatgccgccgcaggccagccgttcaacctcaattcgcccaaacagctgcaagaaatcctgttcgacaaaatgggcatccccaccaaaggcctgaaaaaaaccgccaaaggcggcatttccaccaacgaagccgtgctcgaacagctcgcgcccgactaccccctgcctaaaatcatcctgcaaaaccgcagcctggcgaagctcaaatccacctacaccgacaaactacccgaaatgatttcccccaaggacggccgcgtgcataccacctacgcccaagccgtcgccattaccggccgcctcgccagcaacaaccccaacctgcaaaatatccccatccgtaccgaagaagggcgtaaagtccgccgcgcctttaccgcaccgcaaggcagcgtcatcgtttccgccgactattcccaaatcgagctgcgcattatggcgcacctctccggcgacaaaaccctgattgccgcgttccaaaacggcgaagacgtacaccgccgcaccgccgccgaagtgttcggcactgcgcccgaaaacgtctcgtccgagcaacgccgctatgccaaaaccatcaacttcggcttaatttacggtatggggcaatacggtttggcaaaatcattgggcatcgacaacctttccgccaaaaactttatcgaccgctacttcgcccgctaccccggcgtcgccgaatacatgcagcgcaccaaagaacaagccgccgcccaaggctacgtcgaaaccctgttcggcagaaggctctacctgcccgacatccgcaacaaaaacgccaacgcccgcgccggagccgaacgcgctgccatcaacgcccccatgcagggcaccgcctccgacctcatcaaacgcgccatgatagacgtgtcccgctggctttcagagtgcgaagcctccccgtgggacgaactcttacaaagcaaactgattatgcaggtgcatgacgaactggtgctggaagtcgttgaaaccgaactggattttgtcaaagaaaaactgccgcagattatggcgaaagtggacggcggattattggatgtaccgctggtggctgaggttggcgtaggggagaattgggaagaggcacattga

SEQ ID NO: 43186 - DNA, 321 bp, Neisseria meningitidis
atgaattttcaagactatctcgccacatttccttcaatcgaccatctgggcggtttggacgttcaggatgccgacggcaaaacggttcaccacattcctgccgttcagggtaagctcggttcgctcaagctgtacaatgctttggcggaacgttttgacggaaaattgggtaaagaagcggcagaacagggtttgatatggtttgccgaacacgttgccgacgcgcgtgcccatccgggcaagcatccgaacatcgatctgctggaaaatgtcgtgcaaagcggtgaaacctggttgctcaagccgctttccgcgcaataa

SEQ ID NO: 43187 - DNA, 2304 bp, Neisseria meningitidis
atgcttgcacccgaattggaacagattttgcagcagctttaccgcgaggcgcgtaaggctcattatgaatttatcagcctcgagcatctgcttttggtactcatcgaagaagatgcctccgtccacaacgtcctcaagctctgcggcgcggatttgaaagtggtgtccgaacagctcgccgccagcgttgccgaaaacacccccctgattcccgaacaccttttagacacggtcgaaacccggcccacgctcggcttccaacgcgtgatgcaacgggcgatggtgcatacccagtctgccggaaaagccgcagtcgaaccgttggacgttttggtcgcgctgatgagcgaaaccgacagccacaccgtctatttcctcaagctgcaatcggttacgcgttttgaagttttgcgctgtattgcccacggctctcccgatgaagatgaagatgaagatgaagacgatggcaactattcttcagacggcatggacgacgataatggaaaccgcaccaaaccgggcaaaaaccctttatcggcgtacaccgtcaacctcaacgccgaagtcaaagccggccgtatcgaccctttgattggtcgcaaacacgaaatggaacggctggtgcaaatcctatgccgccgccgcaaaaacaatccgcttttggtcggcgaagcgggcgtgggcaaaaccgcgctggcggaaggtttggcacatcaaatcgtcaacggcggcattccagacgcgcttaaagatgccgaagtgtacgcgctggatatgggctcgctgttggcgggcacgaaataccgcggcgactttgaagcgcgggtcaaatccgtcttgaaacagctcgaaaaaatcccgcacgccattttgtttatcgacgaaatccacaccatcatcggcgcgggcagcaccagcggcggcaccatggacgcgtccaacctgctcaaacccgcgctggcaaaaggttcgctgcgctgcatcggcgcgaccacctacgacgaataccgcaccattttcgacaaagaccatgccttaagccgccgcttccaaaaaatcgacgtggtcgaacccaccgtttccgaaaccgttcaaatcctgcgcggcttgaaaccgatgtttgaagccttccaccaagtccgctacactcaaggcgcactcgaagccgccgccgaactctccgcacgctacatcaacgagcgtttcctgcccgacaaagccatcgacgtgatggacgaagcaggcgcggcgcaacggattctgcccaaatccaaacagaaaaaagtcatcggcaaagcgcaaatcgaaaccgtcatcgccaaagtcgcgcggattccagaaaaaaccgtgtcgcacgacgacaaacaggtgctgcaattcctcggccgcgatttgaaaaacatggtttacggtcaggaaaacgccatcgacgcgttggttgctgccgtcaaaatgtcgcgttccggccttgccctgcccgacaaaccgataggcagtttcctcttctccggtccgactggcgtcggcaaaaccgaagtcgccaaacagcttgcctactcgatgggcgtaccgctgcaacgctttgatatgtccgaatatatggaacgccacgccgtatcgcgcctcatcggcgcaccaccgggctacgtcggctttgaacaaggcggccttttgaccgaagccatcaacaaacagccgcattgcgtattgctcttggacgaaatcgaaaaagcccaccccgacattttcaacgtcctcctgcaagtcatggacgcaggcaaactgaccgacaacaacggcaagagtgccgatttccgcaacgtcatcctaattatgaccactaacgcaggtgcggagagtctcagccgacccagcctcggctttaccgccaaacgcgagcgcggcgacgaaatgcaggctatcaacaagctcttcacgcccgagttccgcaaccgcttggatgcgattatcccgtttgcgcccttatccgaacccgtcatcaccaaagtcgtggacaaattcctgctccagctcgaacaccggctcctcgacaaaaaagtcgaagccgaattcacgtcggcattgcacaaatatctggcggaaaaaggttttgacccgcaaatgggcgcgcgcccgatgcaccgcctgattcaggaaaaaatccgcaaaccgctcgccgacgaactcctgttcggcaaactatccgacggcggcttcgtacggatagactgggatgcggcaaaagaagaagccgtgttgaagtttaagaaaagcaaggtcaaaataaaaaccgcctccgcataa

SEQ ID NO: 43188 - DNA, 549 bp, Neisseria meningitidis
ttgagttttggtatttttgcccgacggggtgaaaaatacagttgcttttttatgtctgtccgtttcgcaaaaaacatcggcttaatactatatattgtgttttatgggtttgagatgcgccgggcgttgattgcgaaaattaagattgctcaaaaggagctgggcttggatgacggtacctatcgcgcggtgttggagcgtgtgacgggcaagcggtcgtgtgcggatatggatgtttccgaacttgagtctgttgtcgctgatatgcggtcgcacggatttaagcctaaagcaaaaggtaacccacacggcaaaccgcatctgcgtcggacatcatcagcggcaatgttggacaaagtcgaagccctgctgaccgtcggcggcaaacattggaactatgcacacgcaatggcgcggcggatgtttggtaaggataaggtcgaatatttagacgatacgcagctacataaactggttgctgcgttgcagattgcggaaaacaggaaaacggaaaaagcgggtggggatgatggggttcgaaaaagttga

SEQ ID NO: 43189 - DNA, 150 bp, Neisseria meningitidis; identical to SEQ ID NO: 41322

SEQ ID NO: 43190 - DNA, 771 bp, Neisseria meningitidis
gtgtccgaaacacaaaacgaacaacccgtccaaccgcttgtcgaacacctcatcgagctgcgccgccgcctgatgtggacggttgtcggtatcttagtctgctttttcggcctaatgccgtttgcccaacaactctatacttttatcgccaacccgctgatggcaaacctgcccaaagacaccagcatgattgccaccgatgtcatcgcaccgtttttcgtgccggtcaaagttaccctgatggcggcatttttgatttcgctgccgcatacgctctaccaaatctgggcattcgtcgcgcccgcactctaccaaaacgaaaaacgcctgattacgccgctcgtcctctccagcgtcagcctgtttttcatcggcatggcatttgcctactttttggttttccccgtcattttcaaattccttgccggcgttacccctgtcggtgtcaatatggcgacagacatcgacaaatacctctccttcatcttggggatgtttgtcgcattcggtacaacgtttgaagtccccattgtcgttatcctgttaaccaaaattggtgtggtaacaaccgaacagctcaaacgcgcccgcccctatgtgattgtcggcgcgtttgtcattgccgccatcatcacgccgcccgatgtgatttcacaaaccctgcttgccattccgctgattctcttatacgaagcaggtatttggttcggacgctttttcacgccacgttcagaacaggatggcgacatacagccgcctgcaacaacctga

SEQ ID NO: 43191 - DNA, 999 bp, Neisseria meningitidis
atgagcagacccgtacccgccgtattcggcagcgtttttcacagtcaaatgcccgtcctcgcctaccgcgaaggcaaatggcagccgaccgaatggcaatcttcccaagacctctccctcgcaccgggcgcgcacgccctgcactacggcagcgaatgtttcgagggactgaaagccttccgtcaggcagacggtaaaatcgtactgttccgtccgactgccaatatcgcgcgtatgcggcaaagtgcggacattttgcacctgccccgccccgaaacccaagcctatctcgatgctttggtcgaactggtcaaacgtgccgccgacgaaattcccgatgcgcctgccgccctgtacctgcgcccgaccttaatcggtaccgatcccgtcatcggcaaggccggttctccttccgaaaccgccctgctgtatattttggcttcccccgtcggcgactatttcaaagtcggctcgcccgtcaaaattttagtggaaaccgaacacatccgctgcgccccgcatatgggccgcgtcaaatgcggcggcaactacgcttccgccatgcactgggtgctgaaggcgaaagccgaatacggcgcaaaccaagtcctcttctgcccgaacggcgacgtgcaggaaaccggcgcgtccaactttatcctgattaacggcgatgaaatcattaccaaaccgctgaccgacgagtttttgcacggcgtaacccgcgattccgtactgacggttgccaaagatttgggctataccgtcagcgaacgtaatttcacggttgacgaactgaaagctgctgtggaaaacggtgcggaggcgattctgaccggtacggcagccgtcatctcgcccgttacttccttcgtcatcggcggcaaagaaatcgaagtgaaaagccaagaacgcggctatgccatccgtaaggcgattaccgacatccagtatggtttggcggaagacaaatacggctggctggtcgaagtgtgctga

SEQ ID NO: 43192 - DNA, 525 bp, Neisseria meningitidis
atgtcattgaacaaagtcatcctcatcggccgcctcggacgcgatcccgaagtgcgctatatgcccaacggcgaggcggtttgtaatttcagcgtcgccaccagcgaaacttggaacgaccgcaacggccaacgtgtagagcgtactgagtggcacaacatcaccatgtaccgcaaactggcggaaattgccgggcaatacctcaaaaaaggcgggctggtttatttggaaggcagaatccaaagccgcaaataccaaggcaaagacggcatcgaacgcaccgcttacgatattgtcgccaacgaaatgaaaatgttgggcgggcgcaatgaaaacagcggcggtgcgccttacgaggaaggttacggtcagagtcaggaggcttaccaacgccccgcgcagcaaagccggcagcccgcctccgacgcgccgtcccatccccaagaagcaccagccgcgccgcgccgccaacccgtgcctgccgccgccccggtcgaggacattgacgacgatatcccgttctga

SEQ ID NO: 43193 - DNA, 1512 bp, Neisseria meningitidis
atgagcgaacaaaaccatccgcaaaccgagccgcagttggacgaaaaccaaatcatcgccctgcgccgcgaaaaactgcacaacatccgccaacagcgcaacgcctatcccaacgacttcaaacgcgacagcttcgccgccgatttgcacgcccaatacggcgaaatcggcaaagaagaactcgatccgcaaggcattcccgtcaaagtggccggccgcatgatgctgaagcgtcaaatgggcaaggcgagttttgccaccattcaagacgtgtccgggcaaatccagctttatctgaacaacaaaggcgtgagccaagaagttttggacgacttcaaccattgggatttgggcgacatcgtcggcgcggaaggcactttgttcaaaaccaaccacggcgaactgaccgtacgcgtgtccggcatccgcctgctgtccaaatccctacgcccgctgcccgacaaacacaaaggtttgagcgatcaggaaaccaaataccgccaacgctatgttgatttgattgccaatgaagaatcgcgcaatacctttatcaaacgcagccaaatcatccaatccgtgcgtaattttatggtgggcgagcattatctcgaagtcgaaaccccgatgatgcacccgattcccggcggcgcgacggcaaaacccttcgttacccatcacaatgccttagatattccgctttacctgcgtatcgcgcctgagctgtatttgaaacgcctggttgtcggtggtttggaacgcgtgtttgaaatcaaccgcagcttccgcaacgaaggcatgtccgtgcgccacaaccccgaattcaccatgatcgaattctacgaagccttctccgactacgaacgcatgatgcagatggcggaagacatcatccgcaacgcatcgcgcacggtaaacggcacggcaaacatcacttacaacggcaaagaagtcgatttggaaagcccgtttgaacgcctgaccattctcgaagccatcaaaaaatacaatccgcactacaccgacgagcagttgaacgatgcggaatggctgaaaaaagaaatcgtcaaacacggcgaaagcctgccgccgtccccgggcatcggcagcctgcaactcgcgctgtttgaaggttgcgccgagggcaagctgtggaatccgaccttcatcgtcgattacccggtcgaagtttcaccgttggcgcgcgcttcggataccaaacaaggtctgaccgaacgtttcgaattgttcgttgtcggccgcgaactggcaaacggctattccgagttgaacgaccccgaagaccaagccgaacgcttcaaagcgcaagtggtgcaaaaagacgcgggcgacgacgaagccatgcactacgatgccgactacatccgcgcgatggaattcggtttgccgccgaccggcggttgcggcatcggtatcgaccgcttggtaatgctgctgaccgattcgcaaaccatccgcgatgtgattctgtttccgcagatgcgccccgagtaa

SEQ ID NO: 43194 - DNA, 279 bp, Neisseria meningitidis; identical to SEQ ID NO: 36210

SEQ ID NO: 43195 - DNA, 1218 bp, Neisseria meningitidis
atggagattattttaggtatcgtgatgtttaccgtcatcgttttggttttggcactgatgattctgtttgccaaatccaaactggtcagcgaaggcgacatcaccatcaaagtcaacggcgaaaaagagctgacgatgcccgccggcggcaaactcttgggcgcgcttgccaacgaaggcatctttatcccctccgcctgcggcgggggcggttcgtgcggacaatgccgcgtcgtcgtaaaaagcggcggcggcgacatcctgccgaccgagctgtcccacatcagcaaacgcgaagcacgcgaaggctgccgtctgtcgtgccaagtcaacgtcaaaaccgacatggacatcgaagtccccgaagaagtgttcggcgtgaaaaaatgggaatgcaccgtcatctccaacgataacaaagccacgttcattaaagaactcaagcttgccattcccgaaggcgaagaagtccccttccgcgccggcggctacattcaaattgaagctcctcctcacactgttgcctacaaagacttcgacattcctaaggaatatcacgaagactgggacaaatacaatttgtggcaatacgtttccaaagtggacgagccgattttgcgtgcctactctatggcttcgtatcctgaagaaaaaggcatcattatgctgaacgtgcgtatcgccacgccgcccccgcgcgtacctgatgcgcctccgggacaaatgtcgtcctacatctggtcgctcaaacccggcgacaaagttacgatttccggcccgttcggcgaatttttcgccaaagacaccgatgccgaaatggtatttatcggcggcggtgcgggtatggctccgatgcgttcccacattttcgaccagttgaaacgtttgaactccaaacgtaagattaccttctggtacggcgcacgttccaaacgcgagatgttctatgtcgaagactttgaccaactcgcggcagagttcccgaacttcacgtggcacgtcgccctgtccgacccgctgccggaagacaactgggacggctacacgggcttcattcacaacgtggtttacgaaaaccacctgaaaaaccacgaagcaccggaagactgcgaattttatatgtgcggccctccgattatgaaccagtccgtcatcaaaatgctcaaagacttgggcgtggaagacgaaaacatcctcttggacgatttcggcggttaa

SEQ ID NO: 43196 - DNA, 561 bp, Neisseria meningitidis
atgaaaacagcacaagaactgcgcgccggcaatgtatttatggtcggcaacgatcctatggtcgttcaaaaaaccgaatacatcaaaggcggccgctcttccgccaaagtcagcatgaaactgaaaaacctgctgaccggcgcggcttccgaaaccatttacaaagccgacgacaaattcgacgtggtcatcctgtcccgcaaaaactgtacgtacagctactttgccgacccgatgtacgtctttatggacgaagaattcaaccaatacgaaatcgaagctgacaacatcggcgacgcgttgaaattcatcgttgacggtatggaagaccaatgcgaagtaaccttctacgaaggcaaccctatctccgtagaactgcccaccatcatcgtgcgcgaagtcgagtacaccgagcctgccgtcaaaggcgatacttccggcaaagtgatgaaaaccgcccgcctggtcggtggcaccgaaatccaagtgatgtcttacatcgaaaacggcgataaagtcgaaatcgacacccgcaccggcgaattccgcaaacgcgcctga

SEQ ID NO: 43197 - DNA, 567 bp, Neisseria meningitidis
atggctaagaaaatcagtattttggtgggcagcctgcgccgtgcttcttttgcgcgcaaagtggcattgaatgcggcggagatgttccccgaaggctggcaggcggaaatcgttgaaatcggacatctgccgctttacaatttcgattatgacgaccctgcggtggaagatgtgccgctacccgaaagctacacggctttccgcgaaacgattaaggcttcggacggcattttgttcgttacgtccgaaaataaccgcaccattcccgcctgtttgaaaaatgcggtggacatcggctcgaaaccgaatgccgacgtggcgtggaaaaacaaaccggcaggcatcatcagccattccgtcggcaagatgggcggttacagttcccaaaaaaacctgcgccttgcgctgtcttatttcgatatgcccgtaaccggacagccggaagtgtttttgggcaattcgccgacgctgtttgatgaaaacggcaaattgattgactcggcaagggattttgttcagtcatatattaatcagtttgtcggtttgattgaaagaaatgccaaataa

SEQ ID NO: 43198 - DNA, 948 bp, Neisseria meningitidis
atgatgattgagaaaagtatttctattgtagatggaaaggaatactccgtttttgctgtatcacacgagtttcgttatacctttgatgagcctattttagtcgctgacttgattagttctctaaaagcttatgaaacactgacaagtagttatcttccagcaattttgaatcagctgtttgatgtcaaaatccaaaaaatcaaagtagctgtatctgaaattgaaagaggatctttccttgaaaaactgattttcaatttattcttcaaagatgaagatgcttataatgaattttgtcttaaaatacgaaaatttctaggaacagaaaatcaggacggaagtattaatatgtccaaaatcattatgtttgcaatgactacacttttaggggtaggtgctggttatctcttgtttaaaaacccgccacaagagaagcaggcaataaccaacaacatcgttaccgtcattaatgctgatagttctgtcgcactggatggtgaacatttggtttcagtggtaaaagaagtaacaggaagcagcaagcaaaaaactgcagaaaatgtggcaaaagtatatgctccagcaagtaaaaataatggcagtattacccttgggacagatgatgttcggattgaacctgttgcacaacaaactgtagcaactttgcctaaagatgtggacttacgtgatacgccattgactgaagattacaccgatattgatgtgcaaattcgtgctactgaccgtgataaaaattcagggtggtatgcagtcatagaccaaattgttccatcacgtgttcgattagaactgcctgaagatattgatttgaataggctggctaacaatgctactatccgtgcaaatgtaacagttgagtttgacttaaagcaaaatggctctcgtaagcctaaaaaaatcatcctcacatctctctctactgattaa

SEQ ID NO: 43199 - DNA, 213 bp, Neisseria meningitidis
gtgtgcttcagcccgctgcatcaaaaatttttggagaaccggcgggagtcggcggttttggtttcggcggggacggtggaaatgggtaacattgacggaatcgacggaagcggtggactgaagcccacccttgtatattggaatcaccgtatcatagcaacaaaccgcccagccgccacccgcgcccacccaaggcacacaaccgttgcgtag

SEQ ID NO: 43200 - DNA, 627 bp, Neisseria meningitidis
gtgaaccctttttcagaggacggcaaaatgagcgagttggataacatccttgcccataaccggcagtttgtcgagtcgggcgaatatgaaaaatactttaccgacaaataccccgaacgcgggctggcagttttgtcctgtatggatgcgcggattatcgggctgctgcccgacgcgttgggtttgaaaaacggcgatgccaagctgattaaaaatgccggcgcgctggttacgcacccgtggggttcggtgatgcggagccttttggttgccgtgtttgaactgaaggtcagagagattatggtcatcgcccatcacgattgcggtatgcaggggctgaatgccgaagaattcctcgggcgcgtccgggaaagccggattcccgaagaccgtatcgaaaccctgcgttatgccggtatcgacctcgacggctggctgaccggtttcgacaacgtcgaagacagcgtgcgccacacggtggaccttatccgtaaccatccgctgatgccgcgccatatcgccgttcacggactggtcatccatcccgttaccggcaaactgacgctggttgtggacggcagtgtttcagacggcatggacttatcggaaggaatggaaacatcatga

SEQ ID NO: 43201 - DNA, 1785 bp, Neisseria meningitidis
atggaactgatgactgttttgctgcctttggcggcgttggtgtcgggcgtgttgtttacatggttgctgatgaagggccggtttcagggcgagtttgccggtttgaacgcgcacctggcggaaaaggcggcaagatgtgattttgtcgaacaggcacacggcaaaaccgtgtcggaattggcggtgttggacgggaaataccggcatttgcaggacgaaaattatgctttgggcaaccgtttttccgcagccgaaaagcagattgcccatttgcaggaaaaagaggcggagtcggcgcggctgaagcagtcgtatatcgagttgcaggaaaaggcacagggtttggcggttgaaaacgaacgtttggcaacgcagctcggacaggaacggaaggcgtttgccgaccaatatgccttggaacgccaaatccgccaaagaatcgaaaccgatttggaagaaagccgccaaactgtccgcgacgtgcaaaacgacctttccgatgtcggcaaccgttttgccgcagccgaaaaacagattgcccatttgcaggaaaaagaggcggaagcggagcggttgaggcagtcgcataccgagttgcaggaaaaggcacagggtttggcggttgaaaacgaacgtttggcaacgcaaatcgaacaggaacgccttgcttctgaagagaagctgtccttgctgggcgaggcgcgcaaaagtttgagcgatcagtttcaaaatcttgccaacacgattttggaagaaaaaagccgccgttttaccgagcagaaccgcgagcagctccatcaggttttgaacccgctaaacgaacgcatccacggtttcggcgagttggtcaagcaaacctatgataaagaatcgcgcgagcggctgacgttggaaaacgaattgaaacggcttcaggggttgaacgcgcagctgcacagcgaggcaaaggccctgaccaacgcgctgaccggtacgcagaataaggttcagggcaattggggcgagatgattctggaaacggttttggaaaattccggccttcagaaagggcgggaatatgtggttcaggcggcatccgtccgaaaagaggaagacggcggcacgcgccgcctccagcccgacgttttggtcaacctgcccgacaacaagcagattgtgattgattccaaggtctcgctgacagcttatgtgcgctacacgcaggcggcggatgcggatacggcggcacgcgaactggcggcacacgttgccagcatccgtgcacacatgaaaggcttgtcgctgaaggattacaccgatttggaaggtgtgaacacattggatttcgtctttatgtttatccctgtcgaaccggcctacctgttggcgttgcagaatgacgcgggcttgttccaagagtgtttcgacaaacggattatgctggtcggccccagtacgctgctggcgactttgaggacggtggcgaatatttggcgcaacgaacagcaaaatcagaacgcactggcgattgcggacgaaggcggcaagctgtacgacaagtttgtcggcttcgtacagacgctcgaaagcgtcggcaaaggcatcgatcaggcgcaaagcagttttcagacggcattcaagcaacttgccgaagggcgcgggaatctggtcggacgcgccgagaaactgcgtctgttgggcgtgaaggcaggcaaacaacttcaacgggatttggtcgagcgttccaatgaaacaacggcgttgtcggaatctttggaatacgcggcagaagatgaagcagtctga

SEQ ID NO: 43202 - DNA, 621 bp, Neisseria meningitidis; identical to SEQ ID NO: 39955

SEQ ID NO: 43203 - DNA, 966 bp, Neisseria meningitidis
atgagctacacgcaactgacccagggcgaacgataccacatccaatacctgtcccgccactgcaccgtcaccgaaatcgccaaacagctgaaccgccacaaaagcaccatcagccgcgaaatcagacggcaccgcacccaagggcagcaatacagcgccgaaaaagcccagcggcaaagccggactatcaaacagcgtaagcgacaaccctataagctcgattcgcagctgattcagcacatcgacccctttatccgccgcaaactcagtcccgaacaagtatgcgcctacctgtgcaaacaccaccagatcacgctccaccacagcaccatttaccgctaccttcgccaagacaaaagcaacggcagcacgttgtggcaacatctcagaatatgcagcaaaccctaccgcaaacgctacggcagcacatggaccagaggcaaagtacccaaccgtgtcggcatagaaaaccgacccgctatcgtcgaccagaaatcccgtatcggcgattgggaagccgacaccattgtcggcaaaggacagaaaagcgcattattgaccttggtcgaacgcgttacccgctacaccatcatctgcaaattggatagcctcaaagccgaagacactgcccgggcagctgttagggcattaaaggcacataaagacagggtgcacaccattaccatggataacggcaaagagttctaccaacacaccaaaataaccaaagcattgaaagcggagacttatttttgtcgcccttaccattcttgggagaaagggctgaatgagaacaccaacggactcatccggcaatacttccccaaacaaaccgatttccgtaacatcagtgatcgggagatacgcagggttcaagatgagttgaaccaccgaccaagaaaaacacttggctacgaaacgccaagtgttttattcttgaatctgttccaaccactaatacactag

SEQ ID NO: 43204 - DNA, 900 bp, Neisseria meningitidis
atggttgcaaaaataaaaaaattctcagattcaaccctttccgttttgaataacggcgagcgtcggttttatgtctattgtctgaccgacctgaaaaaagacaaaatcctctacatcggcaaaggctgcggtaatcgtatcttcgagcatgaatgggttgctagtcgttcacaagatccagtctccggcgagattatcgatcggaaactcaaagccatctccaaatgcaagaaactcggtcgctatatcatcagctatcatctgactgaagtcgaagcactcgccgccgaatctgccttaattcattttgttaaatctgtcttgggtaaaaaactcaaaaataaaattgccgggcatggtccgggtggtattagcgtagaagaactagatcgccgctttggattctcttctctcccacttaacgagattaaccccgacgggctgattctcgccatcaaaatccacaatgctttcgatttagatactgacgaagaattagactaccttttcgacaaccaagacgatgccaacctcaaatcgcgtacgttgggcaactgggttatcggtaaagatgttgcttcaaaagtgaaatacgttatcggcgttcacaccggtctgcaaaacgctgttgtcagtgcatacgaagtggacggttttgaaacaatggttgaggaaaccaaaaacggtagaaaacaatcccgttaccgtttccgcactacctctcgtagcgaagaggtattagccaaactcggtctgcaacaaaaatgcctgcccgaattgaagtttggtagcgggggagaaaaagcgtatatcagacccaaaacagagacagaaactgaacaagagaatattcagacgacccccaatccaaaaataaaaaaggaaaaaaccaaatcatga

SEQ ID NO: 43205 - DNA, 588 bp, Neisseria meningitidis
atgccgctacccgacctgaccgatgccgaattaatagagtcgcgtaaactgcttctgcattttgcgcggcttcagttgcccgaccaccctgatttggctgaagatttagtgcaggaaacattgctgtccgcatacagcgcaggcgacagttttcaaggcagggcacttgtcaacagctggctttttgccatattgaaaaacaaaattattgacgcattacgtcaaatcggaaggcagaggaaagtctttaccacactggatgacgagctactggatgaagcatttgaaagccatttttcccaaaacgggcattggacgcaggaagggcagccgcaacattggaacactccggaaaaatcattaaacaacaacgaattccaaaaaattctgcaaagctgcctatacaacctgcctgaaaacaccgcacgggtatttaccctgaaggaaatactcggtttttcatccgacgaaatacaacaaatgtgcggtatcagcacgtccaactaccacaccattatgcaccgcgcccgagaatcattgcgccaatgcctgcaaatcaaatggttcaaccaagaaaacccgaagtaa

SEQ ID NO: 43206 - DNA, 969 bp, Neisseria meningitidis
atgaacgagaaaaccatcatccttgccaatccgcgcggcttctgcgctggtgtggatcgggcaatcagtattgtcgaacgtgctttggaagagttcggcgcgccgatttatgtgcgccacgaagtcgttcacaacaaattcgtcgtggacaacctgcgtgaaaaaggtgcggtgtttattgaagacttggcggaagtgccgccgggcgcgacactggtttattcggcacacggcgtatcgaaggcggtgcggcaagaagcggcggagcgcggtttccgcgtgtttgatgcgacttgcccgctggtgacgaaagtgcataaggaagtcgcccgactggatgcccaagactgtgaaatcatcatgatcgggcataaggggcacgtcgaggtcgaaggaacgatggggcagcttgcgccgggcaaaatgcttttggtcgaaacggtcggagatgtggcaaaactcgaagtcagaaaccccgacaaactcgcctatgtcagccaaaccacgctctcggtcgatgaaaccaaagacatcatcgccgcgctgaacgcgcgtttccccaatatccgcaatccgcacaaggaagatatctgctatgcgacgaccaaccggcaaaccgccgtcaaagagttggcagaacagtgcgacatcgtgattgtggtcggttcgcccaattcgtccaacagcaaccgcttgcgcgaagtggcggcatcgcgcggaatcgatgcgtatatggtggataatgcaggctacctgcaacgcgcatggtttgagggcaaaaacaaagtcggcgtaacggcaggcgcgtccgcgcccgaagtgttggtgcgggaagtactggcaaccatacgcggatgggggcacgaaaccgtacgcgaaggcgagggtgcggaagaaagcattgtgttcgtcctgcccaaagagttgcgccgcgagggcgaaaccaaacccgatttgtgcaaacgttga

SEQ ID NO: 43207 - DNA, 942 bp, Neisseria meningitidis
atgaaaaccctgctcctcctcatccccctcgtcctcacagcctgcggcacactgaccggcatacccgcccacggcggcggcaaacgctttgccgtcgaacaagaactcgtcgccgcatcgtcccgcgccgccgtcaaagaaatggatttgtccgccctaaaaggacgcaaagccgccctttacgtctccgttatgggcgaccaaggttcgggcaacataagcggcggacgctactctatcgacgcactgatacgcggcggctaccacaacaaccccgaaagtgccacccaatacagctaccccgcctacgacactaccgccaccaccaaatccgacgcgctctccagcgtaaccacttccacatcgcttttgaacgcccccgccgccgccctgacgaaaaacagcggacgcaaaggcgaacgctccgccggactgtccgtcaacggcacgggcgactaccgcaacgaaaccctgctcgccaacccccgcgacgtttccttcctgaccaacctcatccaaaccgtcttctacctgcgcggcatcgaagtcgtaccgcccgaatacgccgacaccgacgtattcgtaaccgtcgacgtattcggcaccgtccgcagccgtaccgaactgcacctctacaacgccgaaacccttaaagcccaaaccaagctcgaatatttcgccgttgaccgcgacagccggaaactgctgattacccctaaaaccgccgcctacgaatcccaataccaagaacaatacgccctttggaccggcccttacaaagtcagcaaaaccgtcaaagcctcagaccgcctgatggtcgatttctccgacattaccccctacggcgacacaaccgcccaaaaccgtcccgacttcaaacaaaacaacggtaaaaaacccgatgtcggcaacgaagtcatccgccgccgcaaaggaggataa

SEQ ID NO: 43208 - DNA, 297 bp, Neisseria meningitidis
atggacgctaaacatcggctgaaaaaatacgtttaccacctgttggtagccatcgaccaactgttcaacgccctaaccggcggcgcggcggacgaaaccctctcaagccgcacctatcgccgcgcgcggctcgcccaaaagcccaaaacccgctggaagattttatataccctgatcaacggcgtgtttttcgaccgccaccactgccggcaggcgtatatcagcgaactgaaaggcaggcagcacgacgcgcggttcaaccaaagccgcgccgccggggaaaaggggacgcgatga

SEQ ID NO: 43209 - DNA, 1377 bp, Neisseria meningitidis; identical to SEQ ID NO: 36747

SEQ ID NO: 43210 - DNA, 1071 bp, Neisseria meningitidis
atggcggcttgcccgaacgagagtgtaaaaatggatatttcagattttgattttaccctgcccgaaaagctgattgcccagcatccgcccgaagtgcgcggcagcagccgccttttggttgcgttgcccgatatgccgctgcaagaccgggtgttcggcgatttgccggattatgtcgaggcgggcgacgttttggtgttcaacaacaccaaagtcatgaaggcgcggctgtttgggcagaaagacagcggcggcaggatcgaagccctgattgagcgcgtgttggacaaccataccgcactggcgcacatccgttcgtccaaatcgcccaagcccggtatggggctggtgtttgaaggcggcatccgcgccgtgacggtcgggcgtgagggcgaactgttctgcctgcgttttgaaggcggagagaccgtttacgaacttttggaacagaacggacacctgcccctgccgccttatatcgaacgcgccgccgatgcggatgacgacagccgttatcaaaccgtttatgccaaatatcagggcgcggtcgccgcgccgacggcgggcctgcattttacggaagaacttttgcaccgtctgaaagacaaaggcgcggtaaccgcagaagtaaccctgcacgtcggtgccggaacgttccaacccgtgcgtgtggacaaaatcgaagagcacaaaatgcacagcgaatggtttgaagtgccgtctgaaaccgccgccgccgttgaggcggcaaaagcccgggggaacaaagtctgggcggtcggcacgacttccatgcgcgccctcgaatctgccgcgcgtgcgacgggtcgtctgaaagcggggcagggcgacaccgatattttcatcacgccgggctaccgttttaatgttgtcgacagactggttaccaattttcatttgccgaaatcgacgctgctgatgttggtcagcgcgttttcgggtatgggtcatatccgcgccgcgtatcgtcatgcggtcgaacgcgaataccgtttcttcagctacggcgatgcgatggttttggggcggaacgaaggggtggtacgttag

SEQ ID NO: 43211 - DNA, 1212 bp, Neisseria meningitidis
atgaaccaactgaaacttgccgtttccggtgcacagattttatttgtggcattcggcgcaatggtgctggttcccctgctgaccggtctgaatccggctcttgcgcttttgggcgcaggcttgggaacgctgctgttccaaatcacaaccaaacgcaaagtgccgatttttcttggttcttcgtttgcctttatcgcaccgattatctactccgtcggcgaatgggggctgccttccaccatgttcggactgtttgccgccggctttatgtattttgtgtttgccgcgctgatccgttggcgcggactggcagcggtacacaaactgctgcctccggtcgtcatcggccccgtcatcatggtcatcggtctgtctgttgccgtggcggcaagcagcatggcaatgggtcaggcggacggcaaacaggtcatcgactataccgattcgctgattctttccggctttacctttgccgttaccgccatcgtatcggttttcggcagcaggatgatgaagctgattcccatcttgatcggtgtcgcttcgggttatgttttggcactgctgatgggactggtggacacggcaagcattgcacacgcgccctggttcgccgttccccattttgaaacgcctcagatcaactggcaggctgcactgtttatgctgcccgttgccgtcgcccccgccatcgaacacatcggcggcatcatggcaatcggcaatgtgacggggaaagactatacgaaagacccgggcttggacaaaacccttgcaggcgacggtttgggcgtatgcgttgcgggtctgatcggcggcccgccggttacgacctacggcgaagtaacgggtgcggtgatgattaccaaaaacagcaaccccgtcatcatgacttgggcggcggtttttgccgtctgcatggcgtttttcggcaaattcaatgcgtttttggcttccattccgatgccagtaatgggcggcattatgctgctgctgttcggcacgattgcttctttgggcgtgaaaacgctgattgatgccaaagtcgatttgatgctgccgaaaaacctggtcatcgtcagctcggtactgaccacgggcatcggcggcatgacgctcaaattgggcagcttcagctttgccggcgtgggcttgtgcgccgtacttgccattatgttgaacagcctgctgcccgatccgaaagaatcctga

SEQ ID NO: 43212 - DNA, 804 bp, Neisseria meningitidis
atgaaaaaaattcttttaacggtttcattaggtttggcactgagtgcctgtgccactcaaggtacggtcgataaagatgctcagattacccaagattggagtgtggagaagctctatgccgaagcccaggacgaattgaacagcagcaattatacgcgggctgtcaagttatacgaaatcttggaatcgcgcttccccaccagccgccatgcccggcaatcccaactggataccgcatacgcctattataaagacgatgaaaaagacaaggctctggcggcaatcgaacgcttccgccgcctccatccgcagcatccgaatatggattacgcgctgtatctgcgcggcttggtgctgttcaacgaagaccagtccttcttgaacaaactggcctcgcaagactggtccgaccgcgacccgaaagccaaccgcgaagcgtatcaggcctttgcggaactcgtccaacgcttcccgaacagcaaatacgccgccgatgcaaccgcacgcatggtcaaactggtcgatgcactgggcggcaatgaaatgtcggtggcgcgttactacatgaaacgcggcgcatatatcgccgccgccaaccgcgcccaaaaaattatcggcagctatcaaaatacacgctatgtcgaagaatcgctcgccatattggaacttgcctaccaaaaactcggcaaaccgcagcttgccgccgatacgcgccgcgtgttggaaaccaacttcccgaaaagcccgtttttgacgcacgcctggcagcccgacgatatgccctggtggcgttactggcattaa

SEQ ID NO: 43213 - DNA, 1101 bp, Neisseria meningitidis
atggcaggcaacactttcggacaactcttcaccgttaccaccttcggcgaaagccacggcgcgggtttgggctgtatcatcgacggctgcccgcccggcttggaattaagcgaagcggatatccaatttgacctcgaccgacgcaaacccggcaccagccgccacgttacccaacgccgcgaagccgaccaagtcgaaatcctctccggcgtattcgaaggcaaaaccaccggcacgcccatcgccctcttaatccgcaataccgaccagcgcagcaaagactacggcaacatcgccaccagcttccgccccggccacgccgactatacctattggcacaaatacggcacgcgcgactaccgcggcggcggcaggagctccgcccgtgaaaccgccgcccgcgttgctgccggagccgttgccaaaaaatggttgaaagaaaaattcggcacggaaatcaccgcctacgttacccaagtcggcgaaaaagaaatccggtttgaaggctgcgaacacatttcccaaaatcctttttttgccgccaaccatagccaaattgccgagctggaaaactatatggacagcgtgcgcaaatccttggattccgtcggcgcgaagctgcatatcgaagcagccaatgtccctgtcggcttgggcgaacctgtttttgaccgcctcgatgccgaaatcgcctacgcgatgatgggcatcaacgccgtcaaaggcgtggaaatcggcgcaggttttgacagcgtaacgcaacgcggcagcgaacacggcgacgaactgaccccgcaaggcttcctgtccaaccactcaggcggcatcctcggcggcatcagcaccgggcaagacatccgcgtcaatatcgccatcaaacccaccagctccatcgccaccccgcgccgcagtatcgacatcaacggcaaccccatcgaactcgccacgcacggcaggcacgacccctgcgtcggactgcgctccgcgccgatcgccgaagccatgctcgcgttagtcctcatcgaccacgccctgcgccatcgcgcgcaaaatgccgacgttcaggttaatacgcccgacattaccctttcaaacaaataa

SEQ ID NO: 43214 - DNA, 1242 bp, Neisseria meningitidis
atgcccaacaaaaccccttcactgttcggcggcgcgatgattatcgccggcacggtcatcggcgcaggcatgctcgccaacccgaccgccacatccggcgtatggtttaccggctcgctggccgtgttgctgtacacctggttttctatgctttccagcggcctgatgattttggaagtcaacacccattatccgcacggcgcaagtttcgacacgatggtcaaagacctgctcggacgcggctggaacatcatcaacggcatcgccgtcgccttcgttttatacctgcttacttacgcttatatcttcgtcggcggcgacctgaccgccaaaggcttaggcagcgcggcaggcggcgacgtttcactcaccgtcggacaactcgtcttcttcggcatcctcgccttttgcgtatgggcatccgcacgcttggtcgaccgcttcaccggcgtccttatcggcggcatggtattgacctttatttgggcggccggcgggctgattgccgatgccaagccgtccgtcctcttcgatacccaagcccccgccggcacaaactactggatttacgccgccaccgccctgcccgtctgcctcgcttccttcggcttccacggcaacgtctccagcctgctcaaatactttaaaggcgacgcgcccaaagtggctaaatccatctggacgggcacactgattgcgctggtaatttacgtcctctggcaaaccgccatccaaggcaacctgccgcgcaacgagttcgcccccgtcatcgccgccgaagggcaagtctccgtcctcatcgaaaccctgtccaaattcgcccaaaccggcaatatggacaaaatattgtccctgttttcctatatggcgatcgccacctcgtttttaggcgtaacgctcggactcttcgactacatcgccgacatcttcaaatggaacgacagcatctccggccgcaccaaaaccgccgcgctgaccttcctgccgcccctgatttcctgcctgctcttccccaccggcttcgttaccgccatcggctacgtcggcctggcggcaaccgtctggacaggcatcatccccgccatgctgctctaccgttcgcgcaaaaaattcggcgcaggcaaaacctataaagtttacggcggcttgtggctgatggtttgggtcttccttttcggcatcgtcaacatcgccgcacaggtattgagccaaatggaactcgtccccgtatttaaaggataa

SEQ ID NO: 43215 - DNA, 738 bp, Neisseria meningitidis
atgctgctgatacccgccatcgatttgaaagaaggacgctgcgtccgcctgaaacaagggctgatggaagaggcgaccgtcttttccgattcgcccgccgaaaccgcgctgcactggttcaaacaaggcgcgcgccgcctgcatctggtagatttgaacggcgcgtttgccggcgttccgcaaaacctgcccgccatcaaagacatccttgccgctgtcgccaaagacatccccgtacagctcggcggcggcatacgcgatttgaaaaccatcggacaatatttggatttgggcttaaacgacgtgattatcggcacggcggcggtcaaaaaccccgacttcgtgcgcgaggcgtgcaaagccttccccggcaggattattgtcgggctggatgccaaagacggtatggccgccatcgacggctgggcaaccgtaaccgggcatcatgtaattgatttggcaaaacgctttgaagacgacggcgtcaacagcatcatctacaccgacatcgggcgcgacggtatgatgagcggcgtgaacatcgacgcgacggtcaaactcgcccaaaccgtccgcattcccgtcatcgcctccggcggactgaccggcttggacgacatccgcgccctgtgtgccgccgaaaaacatggcgtagcaggcgcgattaccggccgcgcgatttacgagggtagcatcgattttgcccaagcgcagcaactggcagattccctcgactaa

SEQ ID NO: 43216 - DNA, 1146 bp, Neisseria meningitidis
atgcaaaataattcatacggctatgccgtgtcggtgcgcgtgggcggtaaagagcaccgccactgggagcgctacgacatcgacagcgactttttaatccctgccgacagcttcgattttgtcatcggcaggttgggaccggaggcggccatacccgatttaagcggagagagctgcgaggtagtgatagacgggcaaatcgtgatgacgggcatcatcggcagccagcgccacggcaaaagcaagggcagccgcgagttgagcttgagcgggcgtgatttggccggttttttggtggattgctccgcgccgcagctcaatgtaaagggcatgacggtattggatgcagccaaaaagctggccgcgccgtggccgcagattaaagcggtggtgcttaaggccgaaaacaaccccgctttgggcaaaatcgacatcgagccgggcgaaaccgtatggcaggcattaacccatattgccaactcggtcgggctgcatccgtggctggagccggacggcacgttggtggtgggcggtgcggattacagcagcccgccggtggcgacattgtgttggagccgcaccgacagccgctgcaatatcgagcgcatggacattgagtgggataccgacaaccgcttttccgaggttacttttttggcgcaatcgcacggccgcagcggcgacagcgccaaacacgatttaaagtgggtgtacaaagacccgacgatgacgctgcaccgccctaaaacggtggtggtgtccgatgccgacaatttggccgcattgcaaaagcaggctaaaaagcagctggccgactggcggctggagggatttacactcacgataaccgtgggcggccataaaacccgcgacggcgtattgtggcaacctggcctgcgtgtgcatgtgatcgacgacgagcacggtatcgatgcggtgttttttctgatggggcggcggtttatgctatcccgcatggatggtacgcaaaccgagctgcggctcaaagaggacggtatttggacacccgacgcttaccccaaaaaggccgaggcggcgcgcaagcgcaaaggcaaacgcaaaggcgtgagccataagggcaaaaaaggcggcaaaaaacaagcagaaacggcggtgtttgaatga

SEQ ID NO: 43217 - DNA, 546 bp, Neisseria meningitidis
ttgatattggcggttgccttgggcagcctgtcggcatggttgggtcgtatcagcgaagtcgagattgaagaagtcaggctcaatcccgacgaaccgcaatacacaatggacggcttggacggcaggcggtttgacgaacagggatacttgaaagaacatttgagcgcgaagggcgcgaaacagtttccggaaagcagcgacatccattttgattcgccgcatctcgtgttcttccaagaaggcaggttgttgtacgaagtcggcagcgacgaagccgtttaccataccgaaaacaaacaggttctttttaaaaacaacgttgtgctgaccaaaaccgccgacggcaaacggcaggcgggtaaagttgaagccgaaaagctgcacgtcgataccgaatctcaatatgcccaaaccgatacgcctgtcagtttccaatatggtgcatcgcacggtcaggcgggcggcatgacttacgaccacaaaacaggcatgttgaacttctcatctaaagtgaaagccacgatttatgatacaaaagatatgtaa

SEQ ID NO: 43218 - DNA, 1209 bp, Neisseria meningitidis
atgaccggcatcatacattcgctgcttgacaccgacctctacaaattcactatgctgcaagtggttctgcaccagtttccgcagacgcacagcctttacgaattccgctgccgcaacgcctcgaccgtctatccgcttgccgacatcagggaagacttggaagccgaactcgacgcgctctgccaactacgcttcacccacgacgaactcggctatctgcgctccctgcgtttcattaaaagcgactttgtcgattatctcgaactcttccagctccaacgccgctttgtcgaaatcggcacagacgataaagaccgtctgaacatccgcatcgaaggtccgatgatacaggcgatgttttttgaaatcttcatcctcgccattgtcaacgaactttacttccgccgcctggaaacccctgcagtcatagaagaaggcgaacgccggcttcaagccaaagccgcgcgcctcaaagaaatcgccgccgcacaaaaccccgacgaaccgcccttcctgatttccgacttcggcacgcgccgccgctacaagctcgcgtggcaggaacacgtcatccgcaccctgcttgaagccgcccccggcatcgtacgcggcaccagcaatgtctttctcgccaaaaaactcggcatcacccccatcggcaccatggcgcacgagttcctgcaggcattccaggccctcgacgtacgcctgcggaatttccaaaaggccgcgctcgaaagctgggtgcacgaataccggggcgatttgggcgttgccctgaccgacgtggtcggtatggatgccttcctgcgcgatttcgacctctatttcgccaaacttttcgacgggctgcgccacgacagcggcgacccttacgtttggggcgacaaagcctacgcccactatcaaaagctcaaaatcgacagccgcaccaaaatgctgaccttctccgacgggctggacatcgaacgctcttgggcattgcaccaatatttcaaagaccgcttcaaaaccggcttcggcatcggcaccaacctcaccaacgatatggggcatacgcccttgaatatcgtcttgaaactggtcgaatgcaacgggcagtccgtcgccaagctgtccgactctccgggcaaaaccatgaccaacaacagcaccttcctcgcctacctgcgccaagtgttcgacgtacccgaacccgaaacgccgtaa

SEQ ID NO: 43219 - DNA, 702 bp, Neisseria meningitidis
atgttccgcatcatcaaatggctgattgccctgcccgtcggcatctttatctttttcaatgcctatgtgtacggcaacatcattacctaccgcgccgtcgcgccccatcggactgcctttatgtcgatgcggatgaagcagtttgaacaggaaggtcgcgatgtcgcactggattaccgctggatgccctacaaacgcatttccaccaacctgaaaaaagccctgattgcttccgaagatgcccgtttcgccgggcacggcggcttcgattggggcggcattcaaaacgccatcaggcgcaaccggaacagcggcaaagtgaaggcgggcggctcgaccatcagccagcagcttgccaaaaacctgtttttaaacgaaagccgcagctatatccgcaaaggcgaagaagcggcgattaccgcgatgatggaagccgttaccgacaaagacaggatttttgaactgtatttaaactcaatcgaatggcactacggcgttttcggcgcggaagccgcgtcccggtatttttatcaaatacccgccgccaagctgaccaaacagcaggcggcaaaactgacggcgcgcgtccccgccccgctctactacgccgaccatccgaaaagcaaacggctccgcaacaaaaccaatatcgtgctcaaacgcatgggttcggcagagttgcctgaaagcgacacggactga

SEQ ID NO: 43220 - DNA, 426 bp, Neisseria meningitidis
atgacacaagaaaccgctttgggcgcggcactaaaatccgccgtccaaactatgagcaaaaagaaacagaccgaaatgatcgccgaccacatctacggcaaatacgatgtattcaaacgcttcaaaccgttggcgctcggcatcgatcaggatttgattgccgctttgccgcaatacgatgccgcactgattgcacgcgtcctcgccaaccactgccgccgtccgcgctatctgaaagccttggcgcgcggaggcaaacgtttcgatttgaacaaccgtttcaaaggcgaagttacccccgaagaacaggcgatcgcgcaaaaccatccttttgtgcagcaggctttgcaacagcagtccgcccaagctgccgccgaaacgctgtctgttgaagccgaagcagccgaatcttccgcagcagaataa

SEQ ID NO: 43221 - DNA, 363 bp, Neisseria meningitidis
atgaagctgccgcgcaaccgcttcagcctgctttccgcattgtggtttgccggcggcatctattcgctgctcttcaaagctgccgacaccgcgccgccgccgtttccgcatttcgacaaagcagcacaccttgccctgtttttcgcacaaatctggcttttgaccaaagcattcaaaaccggaaaacttcccatcccctaccgcagcctgatggtctttgccctctgtttcgccctcttcagcgaatgcgcgcaggcatggtttaccgcaacgagaaccggcagtttgggcgatgttcttgccgatatggcaggtacggttctcgcactctttgccgcccgcgccgccgaccgcccggactga

SEQ ID NO: 43222 - DNA, 627 bp, Neisseria meningitidis
atgacacaagaacatttcccatcattcttcaaccaagccccgaccatcaccgttagagacccgcttgccgcattcctcggcgcggccgaaaacggcatcctcacttaccgctacgccgatgccgtgcgcctgtgcggacattcctgcccgaccgtcgcgggcgcgtacctgatggttatcaaaggtctgaaagccctttacggcgaagagctgcccgaacgcggcggcatcgaagccgccatgcagggagcgcgcgacgaaggcacggtcggcgtaaccgcgtccgtcgtccaactcctcaccggcgcagcccccgaaaccggctttggcggcatcggaatgcagggacgctttgcccgccgccacctcttatcctttggtgtaggcgaaatcaacggcacactgaccctgcgccgcaaagacaacggcaaaaccgtcgccgtcggcctcaacgccgccctgcaacccttcgcacccgaaatgcgcgacatcatgcccaaagccgtcggcggcagcgcaagcgcagaagaactcgaacgcttcggacaactctggcaggcacgcgttaaagcatttttgaccgaatcggcggacgacccgcagttcgtcatcgtccgcgaagtgtga

SEQ ID NO: 43223 - DNA, 471 bp, Neisseria meningitidis
atgcggattatacaggcaaacgtgttcagacggcatctgaacgccatgccgtctgaacacgcggcttatgccgacttgacggcgagttccgccaagcgtttgctttgtgcgaaggcgatattgttttcttcggcggtcaggacgggagccgctgtcgggaatatcttttttgacggcttcgcagacggcggagactttggggacggtgcgcaatacggcttcgcaaccttcaacgctgtcgatgccgcgagcgattcggcgggcgggattgcgggtgctgccgttttggaaatagtagaggacgaggattttgagggggatttgggttcatgggcggattccgttaaaatggttcggtcttcagacggcataacagttgttccgatgccgtctgaaacagccgcagttcaggcatttgttcctgacggcaaaattggctataacatcgggcatcaatgcccaacttactga

SEQ ID NO: 43224 - DNA, 354 bp, Neisseria meningitidis
gtgaacaaacaaaccgcttacctccttacctctttcagcctgatcgcactgataatcctgtccctttcctgggaactgtggattgcaccgttgcgcccgggcggctcgtggctcgcgctcaaagccctccccctctgtctgccgctttcaggtatcttgaaaaagaaaatctatacctaccaatacagctccatgctggttctgatttactttgccgaagccgtcatgcgcctgttcgacgcctatcccgcagaacagatttgcgccgcgctttccgcagtattcagcatcatcttcttcatatcctgcctgtcgttcgtcaaacaatacaaggaaacaaacaatgcccgctga

SEQ ID NO: 43225 - DNA, 213 bp, Neisseria meningitidis; identical to SEQ ID NO: 36410

SEQ ID NO: 43226 - DNA, 1122 bp, Neisseria meningitidis; identical to SEQ ID NO: 36484

SEQ ID NO: 43227 - DNA, 816 bp, Neisseria meningitidis; identical to SEQ ID NO: 38138

SEQ ID NO: 43228 - DNA, 594 bp, Neisseria meningitidis
atgacgacattacaagaacgcgttgccgcccattttgccgaaagcatccgtgccaagcaggaagccggaaaagtattggtcgagccgaccgtacaggctgccgagctgatgctgcaatgcctgatgaatgacggcaaaatcctggcctgcggcaacggcggttcggctgccgacgcgcaacacttcgccgccgaaatgaccggccgttttgaaaaagaacgcatggaactcgccgctgtcgcgctgacaacagacacttccgcgctgacagccatcggcaacgactacggtttcgaccacgtattcagcaaacaggtgcgcgcgctcggacgtgcaggcgatgtattggtcggcatttccacctccggcaattccgccaacgtcatcgaagccgtcaaagccgcacacgaacgcgatatgcacgtcatcgccttgaccggccgcgacggcggcaaaatcgccgccatactcaaagacaccgacgttttgctcaacgttccccatccgcgcaccgcccgtattcaagaaaaccacatcctgctgatacacgccatgtgcgactgtatcgactccgtactgctggaaggaatgtaa

SEQ ID NO: 43229 - DNA, 1167 bp, Neisseria meningitidis
atgagaaaattcaatttgaccgcattgtccgtgatgcttgccttaggtttgaccgcgtgccagccgccggaggcggagaaagctgcgccggcagcgtccggtgaggcgcaaaccgccaacgagggcggttcggtcagtatcgccgtcaacgacaatgcctgcgaaccgatggaactgaccgtgccgagcggacaggttgtgttcaatattaaaaacaacagcggccgcaagctcgaatgggaaatcctgaaaggcgtgatggtggtggacgagcgcgaaaacatcgcccccggactttccgataaaatgaccgtcaccctgttgccgggcgaatacgaaatgacttgcggtcttttgaccaatccgcgcggcaagctggtggtaaccgacagcggctttaaagacaccgccaacgaagcggatttggaaaaactgtcccaaccgctcgccgactataaagcctacgttcaaggcgaggttaaagagctggtggcgaaaaccaaaacttttaccgaagccgtcaaagcaggcgacattgaaaaggcgaaatccctgtttgccgacacccgcgtccattacgaacgcatcgaaccgattgccgagcttttcagcgaactcgaccccgtcatcgatgcgcgtgaagacgacttcaaagacggcgcgaaagatgccggatttaccggctttcaccgtatcgaatacgccctttgggtggaaaaagacgtgtccggcgtgaaggaaattgcagcgaaactgatgaccgatgtcgaagccctgcaaaaagaaatcgacgcattggcgtttcctccgggcaaggtggtcggcggcgcgtccgaactgattgaagaagtggcgggcagtaaaatcagcggcgaagaagaccggtacagccacaccgatttgagcgacttccaagccaatgtggacggatctaaaaaaatcgtcgatttgttccgtccgctgatcgaggccaaaaacaaagccttgttggaaaaaaccgataccaacttcaaacaggtcaacgaaattctggcgaaataccggactaaagacggttttgaaacctacgacaagctgggcgaagccgaccgcaaagcgttacaggcctctattaacgcgcttgccgaagaccttgcccaacttcgcggcatactcggcttgaaataa

SEQ ID NO: 43230 - DNA, 207 bp, Neisseria meningitidis
atgccgtctgaaaaatgtttcagacggcattttttggttgccgatatgttaacggacgacgttggcgcgcatgaccacgcggacgtggaacgagcctgcctgacagtcgtattgtccgccttgcagcggctgcttgtcgaagtagctgtggaagccggtaacgccgcgtccgcaagggtggcggcagatgccgcattgtgtttataa

SEQ ID NO: 43231 - DNA, 657 bp, Neisseria meningitidis
atgaaaaacaaaaccaaagtctgggacctccccacccgccttttccactggctgcttgccgcgtccctgccctttatgtggtatagcgcgaaagccggcggcgatatgctgcaatggcacacgcgcgtcgggctgttcgtccttttcctgctcgtatttcgcctctgctggggcatttggggcagcgataccgcccgtttttcccgtttcgtccaaggctgggcaggcatacgcggctatctgaaaaacggtattcccgaacacatccagcccggacacaaccccttgggcgcactgatggtcgttgcgcttttggccgccgtgtccttccaagtcggcaccgggctttttgccgccgatgaaaacaccttcagcaccaacggctacctcaaccatttggtttccgaacatacgggcagccttatgcggaaaatccacctcaactttttcaagctgctcgccgttttttctgcaatccacatcgccgccgtcgccgcataccgcgtattcaaaaagaaaaacctcatcctcccgatgataaccggcttcaaatacatcgaaggcaaaacctcaatccgctttgcaggcaaagccgcgcttgccgccgcattatcggttgcctcgcttgccgcagccgccatcctgctcctgtcctga

SEQ ID NO: 43232 - DNA, 132 bp, Neisseria meningitidis
atgcgtgatttcgacaaaccggctgaagaagctgccgaatacgccgctgaaggcgcggtgaaattcatagaaggcaagcctgccaagaaaatcatcgccgtaccgggcagactggagaacatcgtggtgtaa

SEQ ID NO: 43233 - DNA, 876 bp, Neisseria meningitidis
atgccgaccgtccgttttaccgaatccgtcagcaaacacgaccttgatgccctgttcgagtgggcaaaagcaagttacggtgcagaaagttgctggaaaacactgtatctgaacggcctgcctttgggcaacctgtcgccggaatgggtggaacgcgtcaaaaaagactgggaggcaggctgctcggagtcttcagacggcattttcctgaatgcggacggctggccagatatgggcagacgcttgcagcacctcgcccgcagttggcactgtgcgggactgttggacggctggcgcaacgagtgtttcgacctgaccgacggcggcggcaaccccttgttcacgctcgaacgcgccgctttccgcccgttcggactgctcagccgcgccgtccatctcaacggtctgaccgaatcggacggccgatggcatttctggataggcaggcgcagtccgcacaaagcagtcgatcccgacaaactcgacaatactgccgccggcggtgtttccggcggcgaaatgccgtctgaagccgtgtgccgcgaaagcagcgaagaagccggtttggataaaacgctgtttccgtttatccgtccggtatcccggctgcacagcctgcgccccgtcagccggggtgtgcacaatgaaatcctgtatgtattcgatgccgtcctacccgaaaccttcctgcctgaaaatcaggacggcgaagtggcgggttttgagaaaatggacatcggcggtctgttggatgccatgttgtcgggaaacatgatgcacgacgcgcaactggttacgctggacgcgttttgccgttacggtctgattgatgccgcccatccgctgtccgagtggctggacggcatacgtttatag

SEQ ID NO: 43234 - DNA, 768 bp, Neisseria meningitidis
atgtcttcaaataaagcttcattttttacacgtctgcgccgcttgtgccgtttggcggtctggctgttcaaaaccgggaaaaacctgcgcggtattgacggcggttgccccgagtcgcgcaatcgggcggtaatcgagttgggcaggggggttttggcggctttggatatcggattggaggtgggcagacccgcacccgaacatccgaacggtgtcttggttgccgccaaccacgtgtcctggctggatattttcgcgatgagcgcggtttatccgagcagctttatcgccaagcaggaaatcaaaagctggccggtattgggcaagatggggcagaacgcgggaacggtgttcatcaaccgcaattcgcggcgcgacatcgaaccgattaaccgcgccgtctgcgaaaccttgcaacgcggtcaaaacgtcagttttttccccgaagcgcggacttcctccggattggggcttttgccgttcaaagccgcgctgttccaatccgccatcgatgcgggggcaaaggttttggcggtcgcgctgcgttattatgacgaaacgggaaaaaggacggctcgtccctcatatgccgatgtcggtttgccgacctgcctgtggcgcatcgtgtctatgaaaaaattgacgataagagtcgatttcgtttgcgtggcggatgcggcggaaagcgaagaccgttatgctttaaaagataaaatcgaagaaagcatccgtgccgttgtcgccgacgatgcggatatcgctgtctga

SEQ ID NO: 43235 - DNA, 273 bp, Neisseria meningitidis; identical to SEQ ID NO: 41596

SEQ ID NO: 43236 - DNA, 756 bp, Neisseria meningitidis
atggattcttttttcaaaccggcagtttgggcggttttgtggctgatgtttgccgtccgccccgcccttgccgacgagttgaccaacctgctcagcagccgcgagcagattctcagacagtttgccgaagacgaacagcccgttttacccatcaaccgagcccccgcccggcgggcgggcaatgccgacgaactcatcggcagcgcgatggggcttaacgaacagcccgttttacccgtcaaccgagtccccgcccggcgggcgggcaatgccgacgaactcatcggcaacgcgatggggcttaacgaacagcccgttttacccgtcaaccgagcccccgcccggcgggcgggcaatgccgacgaactcatcggcaacgcgatgggacttttgggtattgcctaccgctacggcggcacatcggtttctaccggttttgactgcagcggcttcatgcagcacatctttaaacgcgccatgggcatcaacctgccgcgcacgtcggcagaacaggcacggatgggtacgccggttgcccgaagcgaattgcagcccggagatatggtgtttttccgcacgctcggcggcagccgcatttcccatgtcggactttatatcggcaacaaccgcttcatccacgcgccgcgcacggggaaaaatatcgaaatcaccagcctgagccacaaatattggagcggcaaatacgcgttcgcccgccgggtcaagaaaaacgacccgtcccgctttctgaactga

SEQ ID NO: 43237 - DNA, 2559 bp, Neisseria meningitidis
atgcctgcaaacctgtcttcagcactggaaaccttcaaacagcagcgcgatgccgccgaagcgcattatttgaaagccaaccgcgtgtcggtatttttcagagaatacacggcggcagtcgaaaccttactggcggcattgtgggcagagtattttcaaaacagcgcgttatgcctgatggcggtaggcggcttcggacgcggcgaactgtatccctgttcggatgtggatttggcggttgtctcccctgccccgctttcagacggcattcaggaacagattgcccggtttgttcaaaccctgtgggactgcaaactgatgccgtctgtaaaaagcggcagcgttgatgaactatgtgaaagcgtgcgcaatgatattacgggggacacagcgtttttagaggctaggtttttgtttggcaaccgccaaacggtggataaactggcggaaaaaatgaacgcgcagcgcaatgtggcggcgtttgtcgaggcaaaactggtggagatggaacaccgccacgccaaatcgcaaggttcgggggcagtattggagccgaatatcaaaagctgtccgggcggtctgcgcgatatccacaccctgctttggatagcgaaggcgcaaggcttggcgaccgacctgcccgacctgctcaaacagcggattttgacgcgtgccgaagccggtatgctttcgcacggctaccgccgcctcgcccacatccgcatccatctgcatttaaacgccaagcgcgccgaagaccgcctgctgttcgatttgcagccgcaagtcgccgaaagcatgggttatgaaggcttgaacctccgccgccaaagcgaagaactgatgcgcgtgttttaccgcgcgattaaaaccgtcaaacaactgggcggcatcctcacgcctatgctgcaaagccgcgtttcctccaccccgttgcgcgttaccctgcggattgacgacgactacatccaagtcaacaaccaaatcgccgcgcggcacaccgatatttttttcagacggcccgaacacattttcaaaatcgtcgaaatcatgcagcagcgcaacgacattaccgcgctcgaaccgcaaaccctgcgcgcctggtggggcgcgacgcgcaaaatcaaccgcagcttctaccaaaatcccgaaaaccgccgccgcttcgccggttttttccgcaacggcaacgggctgacccagaccctgcgctttctcaacctctacggcgtgttgggccgctacctgcccgcgtgggaaaaaatcatcggcctgctccaacacgacctgttccacatctatcccgtggacgaccacatcctcaccgtcgtccgcaacgtccgccgccttgccttggatatgcacagccacgagctgccctacgcctctgcactgatgcagtcctttgaaaaacaagacatcctctaccttgccgcctttttccatgacatcgccaaaggacgcggcggcgaccatgccatacaaggcatcgcagacgcgcgccaatttgccgctgaccacttcctgaccggagaagaaagcgacctgctcgcctggctggtcgaaaaccacctgctgatgtctgccgtcgcccaaaaagaagacatccaagaccccagcgtactcgatgccttctgcaaacgcgtgcaaacccacgaacgcctcagcgcgctctaccttctgaccatttccgacatacgcggcaccaatcccaagctgtggaacgcatggcgcgccagcctgctggaaagcctcttccatgccgccggacgctaccttacaggcaacggcggcaacccgcacaccctcttcggccgccgccggcaggaagccgccgacttactcacccgcgccgccgtccccgaaaaacagcagaaaaaactatggaacgcgctcggttccgcctacttcgcccgccaccagtcccgcgaaatcctgtggcacgccgccaacctagtccacgactttgaaacccccatcgtccgcagccgcatcctgcccaaaagcgacagctttcaagtcatggttttcatgcccaacggcccgcgcctgttcgcccgcctctgccgcatcttcagccgccacggcttcgacatcctcgccgcccgcgccttcatcaccgaacacgactacatcctcgacaccttcatcgtgcaaatcccctcgcagcacgcccccgaagactaccccgacatccaaagcgcgctcgaagccgaactcaacagctttatccacggacacaccgttgccgaaacccaaagccgcagccgccgcatcagccgccgcagccgctatatgccgatcgcaccgagcatcaccatcacccccgaagaagactatcccgactggtattccgtcgaaatcaccgccgtcaaccgccccttcctgctcgccgatatggcggaagtctttttcgcccacaacgtcagcctgcgctatgccaaaatctccacactggatgaacgcgccgaagacagttttaccgtttttagccccgacctgaaaaacccaaaaatccagtcctcattgaagcagacgctgctggaacaattatcataa

SEQ ID NO: 43238 - DNA, 867 bp, Neisseria meningitidis
atgaaagcaaaaatcctgacttccgttgcactgcttgcctgttccggcagcctgtttgcccaaacgctggcaaccgtcaacggtcagaaaatcgacagttccgtcatcgatgcgcaggttgccgcattccgtgcggaaaacagccgtgccgaagacacgccgcaactgcgccaatccctgctggaaaacgaagtggtcaataccgtggtcgcacaggaagtgaaacgcctgaaactcgaccggtcggcagagtttaaaaatgcgcttgccaaattgcgtgccgaagcgaaaaagtcgggcgacgacaagaaaccgtccttcaaaaccgtttggcaggcggtaaaatatggcttgaacggcgaggcatacgcattgcatatcgccaaaacccaaccggtttccgagcaggaagtaaaagccgcatatgacaatatcagcggtttttacaaaggtacgcaggaagtccagttgggcgaaatcctgaccgacaaggaagaaaatgcaaaaaaagcggttgccgacttgaaggcgaaaaaaggtttcgatgccgtcttgaaacaatattccctcaacgaccgtaccaaacagaccggtgcgccggtcggatatgtgccgctgaaagatttggaacagggtgttccgccgctttatcaggcaattaaggacttgaaaaaaggcgaatttacggcaacgccgctgaaaaacggcgatttctacggcgtttattatgtcaacgacagccgcgaggtaaaagtgccttcttttgatgaaatgaaaggacagattgcgggcaaccttcaggcggaacggattgaccgtgccgtcggtgcactgttgggcaaggcaaacatcaaacctgcaaaataa

SEQ ID NO: 43239 - DNA, 285 bp, Neisseria meningitidis; identical to SEQ ID NO: 42876

SEQ ID NO: 43240 - DNA, 891 bp, Neisseria meningitidis
atgagcgtattgattaataaagacactaaagtattggttcaaggtttcaccggtaaaaacggtactttccactccgaacaagctctggcttacggcactaaagttgtcggcggcgttaccccgggcaaaggcggtcaaacccacctgaacctgcccgtgttcaacaccatgaaagaagccgttaaagaaaccggcgcggatgcatccgtgatttacgttcctgctccgtttgtgttggattctatcgttgaagcagttgattcaggcgtaggcttggtcgttgtgattaccgaaggcgtgccgactttggacatgctcaaagccaaacgctacttggaaaccaacggtaacggaacacgtttggtcggccctaactgcccgggcgtgattactccgggcgagtgcaaaatcggcattatgccgggccacatccatactcccggccgcatcggcatcatttcccgttccggtacattgacttacgaagccgtggcacaaaccaccaaactgggcttgggtcaatcaacctgtatcggtatcggcggcgacccgattccgggtatgaaccaaatcgacgcactgaaacttttccaagaagacccggataccgacgccatcatcatgatcggtgaaattggcggtactgcggaagaagaagcagccgaatacatccaatccaacgtaagcaaacctgttgtcggctatatcgccggtgttaccgcacctaaaggcaaacgcatgggtcacgccggtgcgattatctccggcggcaaaggtactgcggaagaaaaattcgccgctttcgaaaaagccggtatcgcttacacccgcagccctgccgagttgggcactaccatgctggaagtgttgaaagcaaaaggtttggcataa

SEQ ID NO: 43241 - DNA, 2256 bp, Neisseria meningitidis
atgggacagtacaagaagctttggtacttgctgtttgccgttctggcggtatgctttaccattcttggctatatgggcagcgaggtttacaaaaaagccccgccttaccccgaacaggtcgtttccgcatccggcaaggtcttgatgacgaaagacgatattttggcaggtcagtctgcatggcagactaccggcggtatggaagtcggttcgattttgggtcacggtgcatatcaggctccggactggacggcggactggctgcatcgtgagttggttgcctggttggatttgaccgcgcaacagacttacggcaaaaaattcgacgaggtttcccccgaggaacaagccgtcttgaaaacacgcctggccgacgaataccgcaatcaaagccgcgtgaaggaagacggcagcgtcgtcatcagcgatacgcgcgtgaaagccatcgaaagcatcctgccttactaccacggtgtgtacagcgacgatcctaagttccaaaccactcgcgaacactttgcaatgaaaaacaatacattgccaagccaagaagcgcgtgaaaaactgttcaacttcttcttctggacttcttggtctgcttcgaccaaccgtcctgacgagaattttacttacaccaacaactggccgcacgaacctttgatcaacaacgtaccgaccactgaaaactatatgtggtcattcaccagcgttgttcttctgctgatgggcatcggtttgctgatgtggggttattccttcctgaccaaacacgaggaagtggaagtgccgtctgaagacccgatttccaaaatccaactgaccccttcgcaaaaagcattgggcaaatacgtcttcctgacggtcgccctgtttgtggtacaagtattgctgggcggactgaccgcgcactacaccgtcgaaggccagggtttctacggcattgacgaggcgttgggctttgaaatgtccgactggttcccctacgccctgacccgtacttggcacatccaatccgccatcttctggattgcaaccggctttttgacggcaggtttgttcctcgcgccgattgtcaacggcggtaaagatcccaagttccaacgtgccggcgtaaacttcctctatatcgccctcttcatcgtggtcggcggttcttacgcgggcaacttcttcgcgttgacgcacatccttcccccggaatttaacttctggttcggacaccaaggttacgaatacctcgatttgggacgtttctggcaactccttttgatggtcggtctgctgttatggctgttcctgatgttgcgttgcacggtttccgcctttaaagaaaaaggcgtggacaaaaacctgttggctatcttcgtagcttctatggtcggtgtgggcgtattctacgcaccaggcctgttctatggcgaaaaatccccgattgccgttatggaatactggcgttggtgggtggttcacctgtgggtagaaggcttcttcgaagtatttgccactgccgcctttgcctttgtcttctacaatatgggctttgtccgccgcagtaccgccactgcctccactttggccgctgccgccatctttatgttgggcggcgttccgggcacgctgcaccacctgtacttctccggctctacctccgcctctatggcaatcggtgcctgcttctccgctttggaagtcgtgccgctggtgttgctgggccgtgaagcatacgaacactggtcttaccaacacctgtccgactgggcgaaacgcctgcgttggccgctgatgtgcttcgtggcagtcgccttttggaatatgatcggtgccggcgtattcggcttcctgatcaatccgccgatttccctgttctatatccaaggtttgaacacttctgccgttcacgcgcacgccgccttgtttggtgtgtacggtttcttggcattgggcttcgtattgctggttgcccgttatttgaaaccgaacgcgcagtttgacgacaaactgatgacttggggcttctggctgctcaacggcggcttggtcggtatgattgccatcagcctgctgcctgtcggcgcgattcaggcatacgcctccatcacgcacggtctgtggtatgcccgcagcgaagagttcctgcaaatggaaatcctcgataccttgcgttgggtacgtacggcagctgacttggtctttatcggcggtgcaatctgtgtcgccatccaagccactaaaatcgtattcggccgcgacaaataa

SEQ ID NO: 43242 - DNA, 1338 bp, Neisseria meningitidis
atgaccgacacagccggtctgcgccgccacaacctgcggcagtggatagaaaaatactacggcggtttgcaaactcgttttgctgaagccgttgccctcaacacaggcgaactctccgcccttttgaaaaacaaatccttcggcgagaaaaaagcccgtaaaatcgaacaggcggcaaaaatgcccgccttttggctcgataccgaacacaccgcccgcccgtccgaacacacaggaaaacacaccatgtcccatatctcccccatccccgaaatcctagccgacatcaaagccggcaaaatggtcatcatcaccgatgccgaagaccgagaaaacgaaggcgacctgctgatggcggcgcaattcgtcacgcccgaagccatcaacttcatgatcaaacacgcgcgcggcttggtctgcctgccgatggacggcgaaatggtcgaaaaactcgggctgccgatgatgacccaaaaaaacggcgcgcaatacggcaccaactttaccgtctccatcgaagccgcacacggcattaccaccggcatttccgccgccgaccgcgccctgactattcaaaccgccgtttccccgaccgctaaacccgaagacatcgtccaacccggtcatatctttccgcttcgcgcccaaaaaggcggcgtactcgtccgcgccggacacaccgaagccggcgtcgacctggcgcaaatgaacgggctgattcctgcctccgttatttgcgaaatcatcaacgacgacggcacgatggcgcgtatgcccgaactgatgaaattcgccgaagaacacaagctcaaaatcggcacgattgccgacctcatcgaataccgcagccgtaccgaaagcctgcttgaagacatgggcaatgcgcctgtacaaaccccgtggggcgagttccaacaacacgtttacgtcgacaaactctccggcgaaacccacctcgccctcgtcaaaggcacgcccgccgccgacaccgaaaccctcgtccgcgtccacgaacccttcagtgtgatggacttcattcaagccaacccgcgccattcatggtcgctgcccaaagcccttgagcacatccaacaagccgaaagcggcgtcgtcatcctcttacaccgcaccgaagacggcgcatccctgctcgaccgaaccctacccaaaggcgcaaaccaagcctacaaatgggacagcaaaagctacggcatcggcgcacaaatcctcgccggcctcaacgtcaaaaaactgcgcgtcctcgggcagccctcatctttcaccggcctgaccggcttcggtttggaagtcgtcggctttgaagaagcggaaaaataa

SEQ ID NO: 43243 - DNA, 390 bp, Neisseria meningitidis
ttgaaagcgggaagcaggctgttatccgaaagcggcagaacccaaaccgtccgcaaaaccgttgtcaaaccaaaaccgctcaaagcctacaatctgaccgttgccgattggcatacttacttcgtcaagggtaatcaggcggaaacggaaggggtttgggttcataattcttgtccgcctaaaagaacaggaagctccaagaatgaaaaacatggagatggcggtcgaagtcaaatatcagcggaatcaaaaattgctgaattaacaaataaaattattcccggaatgtccaaaaatgaacgcttaaagattaagcaaaaaatcagaaatattgccaaaaatgccaatcgaaaaacaaaaggagaagagcatggtcgacgcggtcgttaa

SEQ ID NO: 43244 - DNA, 144 bp, Neisseria meningitidis
atgaattgccttgataaggcattagtaaaactgaatatctattttgagaatgatgaagaaaagtacaaaaacaaaacagtaatggatatttactatcagtgcattaaaaatcctaattatgttgtaacacacaataacttataa

SEQ ID NO: 43245 - DNA, 1986 bp, Neisseria meningitidis
atgaaaatatctgcatctgatattgcgaaattaggaattccgagcctaccaactgatagacaagggattgaataccatgccaagaaaaataattggcaacactgttttgagcaaaaaggaagaggccgtcctaaaaaactgtatgaaatcgcttccctccctgccgaaatccgagcagccatcatgaaacggcagtcggacgagctggcggagaagatgccgaaaatgctgcccaaagtcagaccggggacggcgatgtcggctcaagcactggctgaagcggccaagctgttgaacgagaaacaacggtcggtggcggatgcgcgatgtgcggtggtagcggcggtattggggattaaatacgaatacgattgctctgccaaggctgcggtggctcagtttttgggcttgctggcagaaggtaaattggacgcggtcacgcttgggaacttggaaaaggccaatgaccgcagccggacggcgaaggtcggcgaacgtactttagacggctggatttctgcttatttgaaagcggaaaacgcgacggagcggttggttgctttggctccgaagacgacgaaggcggtcaagccgattgaaagttacggatggttgccgatgtttatgcagtttcacaatattccgtccgcgccaaagctggcgcacagctaccgctggtttgtgcagtgggcggaagcggaaaatatgccggtcaatgatgtgcctaacttgagtatggtgcggcgcgtttgggaaaagctcccgttgattatgcaggagcgcggcaggaaaacgggggcggcttataaatcgctgctgccttatgtgaaacgtgattggggggctttgaagccgaacgatgtttggatcggcgacggccatagctttaaggcaaaggtggcgcatccggtacatggcagaccatttaagccggaagtgacggtgattattgatggttgtacgcggtttgtggtcgggttttcggtctctcttgctgaaagttgtgtggcggtatcggacgctatgcgtatcggggtcaagcattttggtttgccgattatctattactcggataacggcggcggccaaaccggcaagacgatagaccatgaaatcacgggtattacgtcccgaccgggtatccgccatgaaacgggtatcgcgggcaacccgcaagggcgcggcatcattgagcgatggtggaaagacaatctgattgagatggcgcgccagtatgagacgtttgcgggtgcagggatggacagcagcacgaagaacctgatgtaccgcaagatggaaagtgcgtttaacgctttggaaaaaggcaaggatttgacggaggaacaacagaaatatttgaaaaaactgccgagctggtcgcgttttatagcggatgtggtcaagtgtatcgacgaatacaacaaccgcccgcacggcgagctgccccgacatcctgacggcgggcattatacgcctaaggcttatcgggaaatgaggctggaacaggacggtatcgcgccggatatgttgtcggcgcaagagctggcgacgatgtttatgccgcaagaggtgcgaaaggtacagcgcggttggctggatttgtttaacaactcttatttctcaaccgagctggcggagtatcacaaagacgaggtacgggtcagctacgatttgagcgatgcgtcggcggtcaatgtgtttgatatggacggcaagtttattactaaggcgcaggccaacggcaatacccgcgaggctttcccgacggctcgtatcgaccaactggcggaaaaacgtcgaaaaggcaaaataaagcgggcggaaaatgcaatcaagctcgcaaacgcggaagtcaatcctgctctggaacaggctgcggtttgggacgagctgggacatttgggcggaaacgacatcgaggcggagtatgcggtattgccgaaaacgggcacagacgattttgtgttgtttgaggcggatagataa

SEQ ID NO: 43246 - DNA, 1110 bp, Neisseria meningitidis
atgagcaactggaaacccaatattccctataacgatttaccacccctgccgccaaaacaggatattgaaagcaaaaccatcctgaaacgttgtatagccgcccgtgcatcccttgcccgtttaaagcaggcggcagaattgataccgaatcaagccatgctgattaacacccttcctgttatggaagcccgtgcaagttcggaaattgaaaacatcgtaaccaccacggacaagctgtttcaatccctgcaaatggatacggaacggcaagaccctgccacgaaagaagccctgcaataccgcaccgccctgtttgcaggctatgaatcactgacgagccgccctttatgcacacaaaccgccatcatggtctgcaacgccatcaagcacccctacgaaatggccatccgcaaaacaggcggcacagccctaaaaggaggcaacagcggaaatgttgtctataccccgcccgaaggagaagaaaccatacgcggcaagctggcaaattgggagcggtttattcacgaaagcggcgatttagacccgcttatcatcatggcggcggcacattaccaatttgaagccatccatccgtttacggacggcaacgggcggacggggcgcatattgaacagcctgctattgattgaaaaagggcttttggatttgcctattttgtatttgagccgctacatcatcgaaaacagggcggactattaccgcctgcttttaggcgtaaccgaacggcaggactgggaaagctggataatctacatcttagacggcgtagctgacaccgccgattggacggtatcgaaaatagatgcgatacgccgcctgttcgagcagacacggcaacacatacggacacacgcacaaggaatctacacgcacgaactggtaaatcttctgtttgagcagccatatacacgcattgccaacctagaagcggcagggatagccaaacggcagacggcctctaagtacctgaaagagctttcagacataggtgtgctgcaagaaatcgtcatcggcagggacaaactattcattcatccgcgcctaatggaactattgcggggagagggcaacagctttacttcattctaa

SEQ ID NO: 43247 - DNA, 336 bp, Neisseria meningitidis
atgttcggaaaagccggattaggcggcctgatgaaacaggcgcagcaaatgcaggaaaatatgaaaaaagcgcaagccaaactcgccgaaaccgaaatcgaaggcgaagcaggcaacggcctggtcaaaatcacaatgacctgcgcgcacgaagtacgcaaaatcgacatcagccccgatttgattcaagaagccgccgacgacaaagaaatgcttgaagacctcatcctcgccgccctcaaatccgcccgaggcaaagccgaagaaaccgcaaacaaaacaatgggcgcattcacgcaaggtctaccccccggagtgggcgacttcttccgctga

SEQ ID NO: 43248 - DNA, 366 bp, Neisseria meningitidis
atgaacctgattcaacagctcgagcaagaagaaattgcccgcctgaataaagaaatccccgaattcgcaccgggcgacaccgtagtcgtatccgtacgcgtcgtggaaggtacccgcagccgtctgcaagcctacgaaggcgtggttattgcccgtcgcaaccgtggtctgaacagcaacttcatcgtccgcaaaatctccagcggcgaaggtgttgaacgtactttccaactgtactctccgaccgtcgaaaaaatcgaagtcaaacgccgtggcgacgtacgccgtgccaaactgtactacctgcgcggcctgaccggtaaagctgcacgcatcaaagaaaaactgcctgcacgcaaaggttga

SEQ ID NO: 43249 - DNA, 621 bp, Neisseria meningitidis; identical to SEQ ID NO: 37903

SEQ ID NO: 43250 - DNA, 321 bp, Neisseria meningitidis
atgaacaagccgtttatcacgcaggcgcagttggcactttataaatatcagccgtccagcaagtattttgggcagtcgatggcattaattgcgtctaaggaatttgaagagtttgtaagaaatgtaaaagaatacgacgtaatagaatgtttctcttattttttaaataagagggtaacgcataatatttggaaaatttatttttctgatgagtctaatatttttattaggaagtcagaagaaaatggaaaaatttcgcatgaatttatttactcggaattttctgatagcaacaccgattttaatgtgttgttctcttag

SEQ ID NO: 43251 - DNA, 540 bp, Neisseria meningitidis
atgaaacagcgcaaactgtccctgcgcccatccgacaagagggcaccgcgaggcggtgcaaaaggagaatacgatatgtacaaacatttggttgttgccgttgacggcagtgaaacgtccatcaatgccctgaaacatgccgccgagcttgccggggtcaacggtgcgcgcctgactttggtgcacgttgccaatcctgccgaatatatggcactcgcccccgaatttttgcaacacgaaagctacgaagccgccgccgtcgcgcaaggcaacgaagttttggatgccgccgagcgcaccgcccaggaactgggtgtggaaaataccgtcaaacacctgctggttgccaataagggtgcgcgtgaaatggcgcaggatttggttgattatgccgatgaaaacggtgccgacctgctggtgttgggtacgcacggacgtaccgggctgatgcaccttttaatgggcagttttgccgaaacggtaatgcgccaaagccacctgccgcttttgattatccgcagcaaagccgaagaggcgtag

SEQ ID NO: 43252 - DNA, 588 bp, Neisseria meningitidis
atgcgggctgtcgggcattgttggaaaagatttccaaataaagcaattgaatacaaatataaaaccgcctcctgccgtatcggttgttcagacggcataaacagagaatttatgaaaacaaatttcaaacagaaaattatcgaacaggcacgcagcgaaggcttgcaggtaaccgctttgcgcgagcaggtattagatattgtcttgcagcaaagcggcgtgattaaagcctacaacgtcttgtcgcagatgcagcagcaaagcgagggcgtgcttgcaccgcctaccgcctaccgcgcccttgatttttgggcggagcagggcgttttgcacaaagtggcggcggtcaacggctatattttgtgcagccacgcgcagcacgagtgcgacgaccattgccacgaccacgaagaagccgaagcgcaccacagcgcgtttattttggtctgcaccgaatgtggcacggcggacgagcaaaccctgagccacgagtgggcggcactgcgcgcaggcgttgccgaaagcggctttgcgctgaaagaagaacacgttgttttaaccgggatttgtaaaaaatgtcagcagtaa

SEQ ID NO: 43253 - DNA, 621 bp, Neisseria meningitidis
ttgctgggtgtggttccgggtatcggtgaatcgatacaggcctataaagtagcgaaagcggcaaaaaatttacaaggcatgaaaaaagccttggacaaggcagcaaccgttgccactgcacagggctatgtcagtaaaaccaaaatcaaaatcggtcaaactgaattaagggttactgcagcaactgacaaacaattgctgaaaaccattagcgaaggaagggacacgacaggtaaaatgaccgagcagttatttgactctttagctaaacaaaatggcttcagagtgctttcgggcggcaaatacggcgcaaataacggttttgatcatgtatggcaggctgccgatggtagtgtcgttttgattgtagaaagtaagcagattaggaacggtacggtacagctgaatccgaatggtgcgggtggatatacgcaaatgagtgaggattggattaaacaagttattactaacttaccagataatcatcccactaaaaacatccttcgagaagcagtacgttcgggtaaaatcaaaactgcggttactggagtagatcgtcaaacaggtaaagcagttattcttcctgttaaagttccttctaaaaccaatataaggagataa

SEQ ID NO: 43254 - DNA, 246 bp, Neisseria meningitidis
  misc_feature 227, 228, 229, 230, 231: 'n' is a, c, g or t
atggctaaggaaaaattcgaacgtagcaaaccgcacgtaaacgttggcaccatcggtcacgttgaccatggtaaaaccaccctgactgccgctttgactactattttggctaaaaaattcggcggtgctgcaaaagcttacgaccaaatcgacaacgcacccgaagaaaaagcacgcggtattaccattaacacctcgcacgtggaatacgaaaccgaaacccgccnnnnncacacacttaattaa

SEQ ID NO: 43255 - DNA, 864 bp, Neisseria meningitidis
atgagtgagattggtttggtaaagatctattttggaaaagtgcgcgatttatatgaaatcgacgataaacgtatgctgatggtcgcttccgaccgcctgtccgcgtttgatgtgattttggacgacccgattccgagcaaaggggagattctgacgcagatttccaatttttggtttaaaaaactggcgcatattatgcccaaccactttaccggtcaaacggtttacgatgttttgcctgaaaacgaagccaaagctttagagaaacgcgccgtcgtggctaaaaagctcactccggtgaaagtagaggcgattgtgcgtggttatctggcaggcagcggttggaaagattatcaaaaaaccggctcggtttgcggtattcaactgcctgaaggtatgcaggaagcgcaacaactgcctgaagtgatttttacgccctcaaccaaagccgcagtcggcgatcacgatgaaaacatcagctttgaagaatgcggacgcattatcggcaaagaattggcggaagaagtgcgcgccaaggcggttcggctttacaccgaagcggcggaatatgccaaatcgcgcggtattattatttgcgataccaaatttgaattcggtttggatgaaaacggtacgctgacgctgatggatgaggtattgactcccgattcgagccgtttttggcctgccgaccaatacaaagtcggcaccaatccgccgtcttttgacaaacaattcgtccgcgactggctggaacaaagcggttggaacaaaaaagcccctgcgccgaaagtgcctgccgatgtgattcagaaaactgtcgagaagtatcgggaagcattgactttgctgactcaggattga

SEQ ID NO: 43256 - DNA, 1632 bp, Neisseria meningitidis
ttgaaaaagattaaaggaactcaaatgagtatcgtagaaatcaaagtccccgatatcggcggtcacgaaaacgtcgacatcatcgccgtagaagttaaagcgggcgacaccatcgccgttgacgacaccctgattacactggaaaccgacaaagccacgatggatgtgcctgccgatgcggccggtgtcgtgaaagaagtaaaagtcaaagtcggcgacaaaatctccgaaggcggcgtaattctgaccgttgaaaccggtgccgccgccgccgaagccgccccggctgctgccgaagcacaacctgcacctgctgccgcacccgctgccgcaggcggtgcaaccgttcaagtagccgttcccgatatcggcggccataccgatgtggatgtaatcgccgttgaaatcaaagtgggcgacaccgttgccgaagacgacacgctgattactttggaaaccgataaagcgacaatggacgtaccttgtaccgctgccggtgtcgttaaagccgtattcttaaaagtcggcgacaaagtatccgaaggctctgccattatcgaagtagaaaccgtcggctctgccgcagcagcccctgctcaagccgctcaagctgccgcaccggctgccgctccgcctccgactgctgccgccgcacccgccgccgcgcctgcaccttctgcacctgccgctgccaaaatcgacgaggccgctttcgccaaagcacacgccggtccttccgcacgcaaactggcgcgcgaattgggcgtggatttgggccaagtcaaaggcaccggcttgaaaggccgtatcatgggcgacgacatcaaagcctttgtgaaatccgtgatgcagggcggcgcggcaaaacctgccgcagccagcgcatctttgggcggcggtctggacttactgccgtggcctaaagtggacttctccaaattcggcaatgtcgaagttaaagaattgtcccgcattaagaaaatttccggtcaaaacctgtcccgcaactgggttgtgattccccacgttaccgtacacgaagaagcggacatgaccgagctggaagaattccgcaaacagctgaacaaagaatgggaacgcgaaggcgtgaaactgtccccgttggcgttcatcatcaaagcctctgtttccgcgttgaaagcattccccgaattcaacgcctcactggacggcgacaacctggtgctgaaaaactacttcaacatcggtttcgcagccgatacgccgaacggcttggttgttcccgtcatcaaagacgtggatcaaaaaggcttgaaacaaatcagccaagaattgaccgaattgtccaaaaaagcccgtgaaggcaagctcaaaccgcaagaaatgcaaggcgcgtgctttaccatttccagcttaggcggcatcggcggcacaggcttcacgccaattgtgaacgctcccgaagtcgccatcttgggcgtgtgcaaatcccaaatcaaacctgtttggaacggcaaagagtttgccccgcgcctgatgtgcccgttgagcctgtccttcgaccaccgtgtcatcgacggtgcggccggtatgcgcttcaccgtattcttggcgaagctgttgaaagacttccgccgcattaccttataa

SEQ ID NO: 43257 - DNA, 1485 bp, Neisseria meningitidis
atgtcgaaacctgtttttaagaaaatcgcactttatactttgggtgcaatcagcggcgtggccgtcagtctggcggtgcagggttttgccgccgagaaggacaggcgggataacgaagtcctgccggtgcaatccatccgcacaatggcggaggtttacggtcaaatcaaggcaaactactatcaggacaaacccgatgccgatttgtttgaaggtgcgatgaagggtatggtggccggtttggatccgcattccgaatatatggataaaaaaggttatgccgagataaaggagtccaccagcggcgaatttggcggcttggggatggaaatcgggcaggaagacggatttgtcaaagtggtttcgccgattgaggacacgcctgcggaacgggcgggggtgaaaagcggcgatttcattgtgaaaatcgataatgtttcgacacgcggcatgacggtcagcgaagcggtgaagaaaatgcggggcaagccgggtacgaagattactttgacgctgtcgcgcaaaaatgccgacaagccgatagtcgtcaacctgacccgtgccattattaaagtgaaaagcgtccgccatcacctgatcgaacccgattacggctatatccgcgtgtcgcagttccaagagcggacggtcgaaagcgtcaataccgccgcaaaagagctggtaaaggaaaataaaggaaaaccgctcaaggggctggtgttggatttgcgcgacgaccccggcgggcttttgactggcgcggtcggcgtgtcggcggcatttctgccgtctgaagcagtcgtcgtcagcaccaagggacgcgacggcaaagaccgcatggtactgaaagccattcctgaagattatgtgtacgggatgggcggcgattcgttggcgggcattcctgccgagttgaaaaccataccgatgacggtattggtcaattccggttcggcttccgcgtcggagattgtcgcaggtgcattgcaggatcataaacgcgcggtcatcgtcggtacgcagagcttcggcaaaggttcggttcagactttgattcctttgtccaacggcagcgcggtcaagctgacaacggcactgtattatacgccgaacgaccgttctattcaggcgcaggggattgttcccgatgtcgaagtaaaagataaggaacgcatttttgaaagccgcgaggcggatttggtcggacacatcggcaatcccttgggcggcgaggatgtgaacggtgaaacccttgccgtgccgcttgaaaaagatgcggataagcccgctgtaaaagaaaaaggtaaaaagaaaaaggacgaggatttgtcttcaaggcggattcccaaccctgccaaagacgaccagttgcggaaagctttggatttagtcaagtcgcccgagcagtggcagaagtctttggggctggcggcgaaaaagccggtttcaaataaagataagaaagataaaaaagataagaagtag

SEQ ID NO: 43258 - DNA, 783 bp, Neisseria meningitidis
gtgggggagattgtcggggaggctttggttaagaataccgatttcagcggtatgactgcttctgaaattgaaaaagctaaagcgaatattactgcgtatgcaaaattggtagccggagcgactgtaggtgttacaggaggcaatgttgatgtggcggcaaatgcttccgaaacagctgttaaaaataatgcattagatattatttgggatattggcaacctcgtatgggacggcggtaaatggatttacgccaaatctattggcgataagcagatggctcgagaagcggcgattgattttggtgtggatgccgccgcagctgccgttccctttgttccggcaggtgcgactaaaatcagccgaggcggggcttatgttctgaaggcgggagacgaagcagttgatacggctaaagccatacaggaaattcagaagcagaccggaatcaagcttacttatgataaggttaataaggtttggacaacaccggcggggttagattatgggttagatgctaagcatggtaataggattaaacatgttttagcccatacaattccaaatccaaacaaacctgttcattctgtttttaatgtgtcccgtaaagaagttttgcctttggttgatgaagcttggagaatgaaaggaaatcctttgccaaatgattcatccgtatatcttgtagatatgaagaaacctattggaacaaaaggagaaacaaaagtgcggattgttgtgcaaaaaggaacaaataaaatcatttctgcatatcctcagaaataa

SEQ ID NO: 43259 - DNA, 426 bp, Neisseria meningitidis
atgaaaacagcccgccgccgttcccgcgagcttgccgtacaagccgtttaccaatcccttatcaaccgcaccgccgcgcccgaaattgctaaaaacatccgcgaaatgtccgactttgccaaggcagacgaagaattgttcaacaaacttttcttcggcacgcaaaccaatgcggcagagtatatccgacaaatccgcccgctacttgacagggacgaaaaagacctcaaccccatcgaacgcgccgttttgctgaccgcctgccacgagctgtccgccatgcccgaaacgccctaccccgtcattatcaacgaagccatcgaagttaccaaaaccttcggcggcacggacgggcacaaattcgtcaacggcatcctcgacaaactcgccgcccaaatccgccccgacgagcccaaacgccgttga

SEQ ID NO: 43260 - DNA, 387 bp, Neisseria meningitidis
gtgagaaagattctgcttgatacccatgcgttgctgtggtggttgttggatgacaagaaactggggatatctgcacgcaaactgatagaaaatccgagaaatgcgatctttgtcagtgcagcaagtatttgggaaatttccatcaagcagaacaaggggttgttgaaattaccggaagagttttttgatgtgcttcaagaagaggattttgaaatgttgcctataggtctgtttcatgcaaaacaggctggaagccttccggagatacacaaagaccctttcgataggatgttgattgcacaaacccaagcggaaggctttgaactgatgactgtcgatgaatatattccgcaatatggaattagagttgtcaacgcatcaagctga

SEQ ID NO: 43261 - DNA, 237 bp, Neisseria meningitidis
atgcgcaaagcctgccgcaaccgtccgctgacggaggcgcaaaccaaacgcaaccgatatttgtcgaagacccgttatgtggtcgaacagagcttcggtacgctgcaccgtaaattccgctacgcccgggcagcctatttcggactgattaaagtgagtgcgcaaagccatctgaaggcgatgtgtttgaacctgttgaaagccgccaacaggctaagtgcgcccgctgccgcctaa

SEQ ID NO: 43262 - DNA, 2058 bp, Neisseria meningitidis
atgcccgaacaaaaccgcatcctctgccgcgaactgagcttgctggcattcaaccgccgcgtgttggcgcaggcggaagaccaaaacgtcccccttttggaacgcctgcgcttcctgtgcatcgtttcatccaacctcgacgagtttttcgaagtccgtatggcgtggctgaagcgcgaacacaaacgctgcccgcagcgcaggctggacaacggcaaaatgccgtctgaaaccatcgccgacgttaccgaagcggcgcgctccctgatacggcaccagtacgacctgttcaacaacgtccttcagcccgagctggcacaagaaggcatccatttttaccgccgccgaaattggacagacacacagaaaaaatggattgaagactatttcgaccgcgaattgctgccgatcctgacccccatcggactcgacccttcccaccccttcccgcgcccgctgaacaaatcgctcaacttcgccgtcgaactcgacggcacagacgcgttcggcaggccttcggggatggcgattgtgcaggcaccacgcatcctgccgcgcgttgttcccctgccgtccgaactgtgtggcggcggacacggcttcgtcttcctctcctccatcctgcacgcccacgtcggaaaactcttcccgggcatgaacgtcaaaggctgccaccagttccgcctgacgcgcgacagcgacttgaccgttgacgaagaagacctgcaaaacctccgcgccgccattcaaaacgagttgcacgaccgcgaatacggcgacggcgtgcggctcgaagtcgccgacacctgtcccgcctacatccgcgactttctgctcgcgcaattcaaactgaccgccgccgaactctatcaggtcaaaggcccggtcaacctcgtgcgcctcaacgccgtccccgacctagtcaaccgccccgatttgaaatttcccacacacacgccgggcagactgaaagccttgggcaaaaccgcgtccatattcgatttggtgcgccaatcgcccatcctgctgcaccacccctaccaatcgttcgaccccgttgtcgaaatgatgcgcgaagccgccgccgaccccgccgtgcttgccgtcaaaatgacgatttaccgcaccggcacgcgttccgaactcgtccgcgccctgatgaaggcggcactcgccggcaaacaagtaaccgtcgtcgtcgaactgatggcgcgttttgacgaagccaacaacgtcaactgggcgaagcagctcgaagaggcgggcgcgcacgtcgtgtacggcgtgttcggctacaaagtccacgccaaaatggcactggtcatccgccgcgaagacggcgtgctcaaacgttacgcccatctcggcacgggcaactaccaccaaggcacatcgcgcatctacaccgacttcggcctcattaccgccgacgaacaaatcaccgccgatgtgaacatattgtttatggaaatcacaggtttgggcaaacccgggcggctgaacaaactctaccaaagtccgtttaccctgcacaaaatggttatcgaccgcatcgcacgcgaaaccgaacacgcaaaagccggcaaaccggcgcggattaccgccaagatgaattcgctcatcgaaccgaccgtcatcgaagccctgtatcgggcaagcgcggcaggcgtacaaatcgatttgattgtgcgcggtatgtgcaccttgcgcccgggtgtaaaaggcttgtccgaaaacatccgcgtccgctccatcgtcggcaggcagctcgaacacgcgcgcgtgtattacttccataacaacggcacggacgatacctttatctccagcgcggattggatggggcgcaacttcttccgccgcatcgaaaccgccacgccgattaccgcgcccgaactcaaaaagcgcgttatacatgaaggactgaccatggcactggacgacaacacccacgcgtggctgatgcagcccgacggcggctatatccgcgccgcacctgccgagggcgaatccgaagccgacctgcaaaacgatttgtggacactgctcggaggctga

SEQ ID NO: 43263 - DNA, 2208 bp, Neisseria meningitidis
atgtttcccgaccaatccgcccccaacctgctgcaaggcttgaatcccgaacaactctccgccgtaacctggccgccgcaatccgcacttgtgctggcgggcgcgggcagcggcaaaacgcgcgtgctgaccacgcgcatcgcatggctgttgcaaagcggacaagccagcgtgcacagcattatggcggtaacgtttaccaacaaagccgccaaagaaatgcaaacccgtttgggcgcgatgattcccatcaatgtccgcgccatgtggctcggcacgttccacggtctctgccaccgctttttgcgcctgcaccaccgcgacgccggtctgccgtcttcctttcaaatcctcgacggcggcgaccagctttccctcatcaaacgcctgctcaaaagcctcaacatcgccgaagaaatcatcgcgccgcgttcgctgcaaggctttatcaacgcgcaaaaagaatccggtttgcgcgcttccgtgttgagcgcgcccgatccgcacacacgccgcatgattgagtgctacgccgaatacgacaaaatctgccaacgcgaaggcgtggtcgattttgccgaactcatgctccgcagctacgaaatgctgcaaaacaacgaaatcctgcgccagcactaccaaaaccgcttcaaccacattctcgttgacgagttccaagacaccaacaaactgcaatatgcttggctgaaactgattgccggcaaccacgcagcagtatttgccgtcggcgacgacgaccaaagcatttaccgtttccgtggcgcaaacgtcggcaacatgaccgcgctgatggaagaattccacatcgacgcgcccgtcaaactcgaacaaaactaccgctccgtcggcaacatccttgccgccgccaatgccgtgattgaaaacaacgacgaacgactcggcaaaaacctgcgcaccgacgccgaagcaggcgacaaaatccgctactactccgcctttaccgacctcgaagaagcccggttcatcttggacgaaaccaaagccctcgaacgcgaaggctgggatttggacgaaatcgccgtcctctaccgtagcaacgcccaatcccgcgttatcgaacaaagcctgttccgcagcggcattccctacaaaatctacggcggcttgcgtttttacgaacgccaagaaatcaaacacgcgctcgcctacctgcgcctcgccgtcaatcccgacgacgacaacgccctcttgcgtgtcatcaacttcccaccgcgcggcatcggtgcacgtaccgtcgaaaatcttcagacggcctcaaacgaacaaggcatcaccctctggcaagccgcctgcaacgccggcgcgaaagccgccaaagtcgtcgccttcgtccgcctgattgaagccctgcgcaaccaagtcggacaactgtccctgtccgaaatcatcgtcggcatcctcaaagacagtggcttgaccgaacactaccgcacccaaaaaggcgacaaccaagaccgtctcgacaaccttgacgaactcgtcaacgccgccatcgaattcaaacccgaagacagcaacttcgaaatcctgcctgaaaacatttcagacgaccccgccttccccattctcgccttcctaagcaatgccgccctcgaatccggtgaaaaccaggcaggcgcaggcgaaaaggccgtccaactcatgaccgtccacgccgccaaaggcttggaatttaacgccgtcttcctcaccggcatggaagaaggccgcttccccagcgaaatgagccttgccgaacgcggcggcctcgaagaagaacgccgcctcatgtacgtcgccatcacccgcgcccgcaaacgcctctacatcaccatggcgcaacaacgcatgctgcacggacaaacccaattcggcatcgtctcccgcttcgtcgaagagatcccacccgaagtattgcactacctgtccgtcaaaaagcctgcctacgacagttacggcaacacgcgccaaaccgccgcatccaaagataaaatcatcgacgactacaaacagccccaaacctacgcaggtttccgtatcggacaaaacgtccgccacgccaaattcggcaccggcgtgattatcgatgccgcagataaaggcgaatccgcccgactgaccatcaatttcggcaaacagggcgtgaaagagttggacaccaagtttgcgaaattggaagagatgtaa

SEQ ID NO: 43264 - DNA, 1662 bp, Neisseria meningitidis
atgactgacaacagccctcctccaaacggacacgcccaagcacgcgtccgcaaaaacaacaccttcctctctgccgtctggctggttccgctgatcgcgctgattgccggcggctggctttgggttaaggaaatccgcaacagggggcctgtggttacgctcttgatggacagcgcggaaggcattgaggtcaacaatacggtcatcaaagtattgagcatcgatgtcggacgcgttacccgaatcaaactgcgcgacgaccaaaaaggcgtggaagtaaccgcccaactcaatgcggacgtatccggcctcatccgcagcgatacccagttttgggtggtcaagccgcgtatcgaccaaagcggcgtaaccggtttgggtacgctgctttcgggttcgtacatcgcctttacacccggcaaaagcgacgaggcaaaagacgtgttccaagtgcaggacattccgcccgttaccgccatcgggcaaagcgggctgcgcttgaatttgattggtaaaaacgaccgcatcctcaacgtcaacagccctgttttgtatgaaaattttatggtcgggcaagtcgaaagcgcgcatttcgacccgtccgaccaaagcgtgcattacaccatcttcatccaaagccccaacgacaaactgattcattccgccagccgtttttggctggaaagcggcatcaatatcgaaaccacaggcagcggcatcaaactcaattccgcccctctgcctgccctgctgtcgggcgcgatttcatttgattcgccgaaaaccaaaaacagtaaaaacgtcaaaagcgaagacagcttcacgctttacgacagccgcagcgaagtcgccaacctgcctgacgaccgctcgctgtactacaccgcgtttttcaaacaatccgtgcgcggcctgaccgtcggttcgcccgtcgagtacaaagggctgaatgtcggcgtggtttccgacgttccttatttcgaccgcaacgacagcctgcacctgtttgaaaacggctggatacccgtacgcatccgcattgaaccttcccgtttggaaatcaatgccgacgaacaaagcaaagaacattggaaacaacaatttcagacggccttaaacaaaggcctgaccgccaccatctccagcaacaacctgctgaccggaagcaaaatgattgagttgaacgatcagccttccgcatcacctaagctgcgaccgcataccgtttatgcaggcgataccgttatcgcgacccagggcggcggtttggacgatttgcaggtcaaattggcggatttgctggacaagttcgacaaactgcctttagataagacggttgccgaattgaacggttcgcttgccgagctcaaatccacactcaaatctgccaatgccgccctaagctccatcgacaaactggtcggcaaaccgcagacacaaaacattccgaacgaactgaaccaaaccctgaaagagttgcgcacaaccctgcaaggcgtatcgccgcaatcgcctatctacggcgacgtacaaaatacgctgcaaagtttggacaaaactttaaaagacgttcaacccgtgattaatactttgaaagaaaaacccaacgcgctgattttcaacagcagcagcaaagaccctatcccgaaaggaagccgataa

SEQ ID NO: 43265 - DNA, 1065 bp, Neisseria meningitidis
atggcactcgtatccatgcgccaactgcttgatcatgctgccgaaaacagctacggcctgccggcgttcaacgtcaacaacctcgaacagatgcgcgccatcatggaggctgcagaccaagtcgacgcccccgtcatcgtacaggcgagtgccggtgcgcgcaaatatgcgggtgcgccgtttttacgccacctgattttggcggctgtcgaagaatttccacacatccccgtcgtcatgcaccaagaccacggcgcatcacccgacgtgtgccaacgctccatccaactgggcttctcctctgtaatgatggacggctcgctgatggaagacggcaaaaccccttcttcttacgaatacaacgtcaacgccacacgtaccgtggttaacttctcccacgcttgcggcgtatccgttgaaggcgaaatcggcgtattgggcaacctcgaaaccggcgaagcaggcgaagaagacggtgtaggcgcagtgggcaaactttcccacgaccaaatgctgaccagcgtcgaagatgccgtatgtttcgttaaagataccggcgttgacgcattggctattgccgtcggcaccagccacggcgcatacaaattcacccgtccgcccacaggcgatgtattacgtatcgaccgcatcaaagaaatccaccaagccctgcccaatacacacatcgtgatgcacggctccagctccgttccgcaagaatggctgaaagtcatcaacgaatacggcggcaatatcggcgaaacctacggcgtgccggttgaagaaatcgtcgaaggcatcaaacacggcgtgcgcaaagtcaacatcgataccgacttgcgccttgcttctaccggcgcggtacgccgctaccttgccgaaaatccgtccgactttgacccgcgcaaatacctgagcaaaaccattgaggccatgaagcaaatctgcctcgaccgttatcttgcgtttggctgcgaaggtcaggcaggcaaaatcaaacctgtttcgttggaaaaaatggcaagccgttatgccaagggcgaattgaaccaaatcgtcaaataa

SEQ ID NO: 43266 - DNA, 873 bp, Neisseria meningitidis; identical to SEQ ID NO: 41087

SEQ ID NO: 43267 - DNA, 579 bp, Neisseria meningitidis
atgagcgaacagacacagcagcaaaacagtgaagaagcggttgaaaatgtggaggcggtggaaaccgtcgagacagtaggaaatgcggacggtgtgcaggaacaggctgccgcagagccggcttatgaggatttgcaggcgcggattgccgagctggaagcgcagttgaaagacgagcagctgcgcgctttggcaaacgagcaaaacctgcgccgccgccaccagcaggaaattgcggatacgcacaagttcgccggacagaagtttgccgtggaaatgctgccggtcaaggattatctggaaatggcgcttttggatcagagcggcaatttcgatgcgctgaaaatgggcgtgcagatgactttgaacgagttgcagaaagcatttgatgctacgcaaatcaaggaaatcaaccctaaagcgggcgataagctcgatccgaatatccatcaggcgatgcaggcggtggcaagcgaacaggagccgaataccgtggtgggtgtgatgaagaagggttatacgctgtccgaccgcgtgttgcgcccggctatggttacggtggcgcagaaggaagcctga

SEQ ID NO: 43268 - DNA, 978 bp, Neisseria meningitidis
atgatttatccgtggcataatgagcaatggcggcagattgcggaacattgggagcgtcgtcccaatgcatggctgtttgccggcaaaaaagatacggggaaaactacatttgcccgctttgcggcgaaggcactgttgtgcgaaacccctgcaccgggctgcaaaccctgtggcgaatgtatgtcctgccatctgtttggacagggaagccatcccgatttttacgaaatcacccccttgtcggacgaacccgaaaacggacgcaaactgttgcagatcaaaatcgatgccgtcagggaaatcatcgataatgtgtacctgacttcggtacggggcggtttgcgcgtgattctgattcatcctgcggaaagtatgaatgtccaagccgccaacagtttgttgaaagtgttggaagaaccgccgccacaagtggtctttttgctggtcagccacgcggcggacaaggttttaccgaccattaaaagtcgctgccggaagatggttttgcccgctccttcccatgaagaggcattggcatatctgcgtgaaaggggtgtggcggaacctgaggaacgtctggctttccattccggagcgccgctgtttgatgaggcggacggtgtccgtgcgttgcggattaaactgttggatattttggcagaaccaaggttgttgaagattttggattacgccgcgcttttcgataaggaaaaacttccgctcgccgtatttgtcgggtggatgcagaaatggctggtcgatttgggattgtgcctgcaacacatgaaacccgtctattatcccgcttatgaagacaggctgcttcagacggtatccggtttccgtccgcgcaatgtatttgcggcggaggatatgctcaaacagcttgccccctacgggtttcatactttaaatgtcaaaatgcagatcgagcatctgctcatcaactatttggaattgaagaaagagaacgggtga

SEQ ID NO: 43269 - DNA, 1569 bp, Neisseria meningitidis
atgaaacaccgtactttcttttccctttgcgccaagttcggctgcctgcttgcgctgggtgcttgttcgcccaaaatcgtcgatgccggagccgcgaccgtgccgcacactttatccactttgaaaaccgcagacaaccgccccgccagtgtttacttgaaaaaagacaaaccgacgctgattaaattttgggcgagctggtgtcctttgtgtctgtccgaattgggacagaccgaaaaatgggcgcaagatgcaaaattcagctccgccaacctgattaccgtcgcgtctccgggctttttgcacgagaaaaaagacggcgacttccaaaaatggtatgccggtttgaattatcccaagctgcccgtcgtaaccgacaacggcggcacaatcgcccaaagcctgaatatcagcgtttacccctcgtgggcgttaatcggtaaagacggcgacgtgcagcgcatcgtcaaaggcagcatcaacgaagcgcaggcgttggcgttaatccgcgacccgaatgccgatttgggcagcttgaaacattcgttctacaaacccgacactcagaaaaaggattcaaaaatcatgaacacgcgcaccatctacctcgccggcggctgcttctggggcttggaagcctatttccaacgcatcgacggcgtggttgacgcggtatccggctacgccaacggcaacacgaaaaatccgagctatgaagacgtgtcctaccgccatacgggccacgccgaaaccgtcaaagtgacctacgatgccgacaaactcagtctagacgacatcctgcaatatttcttccgcgtcgttgatccgaccagcctcaacaaacagggcaacgacaccggtacgcaataccgcagcggcgtgtactacaccgaccccgccgaaaaagccgtcatcgccgccgccctcaaacgcgagcagcaaaaataccaactgcccctcgttgttgaaaacgagccgctgaaaaacttctacgatgccgaggaataccatcaggactacctgattaaaaaccccaacggctactgccacatcgatatccgcaaagccgacgaaccgctgccaggcaaaaccaagaccgccccgcaaggcaaaggcttcgatgcggcaacgtataaaaaaccgagtgacgccgaactcaaacgcaccctgaccgaagagcaataccaagttacccaaaacagcgcgaccgaatatgccttcagccacgaatacgaccatttgttcaaacccggcatttatgtggacgttgtcagcggcgaacctttgttcagctccgccgacaaatatgattccggctgcggctggccgagcttcacgcgcccgattgatgcaaaatccgttaccgaacacgatgatttcagctacaacatgcgccgcaccgaagtgcgcagccacgccgccgattcgcatttgggacacgtcttccccgacggcccgcgcgacaaaggcggactgcgctactgcatcaacggcgcgagcttgaaattcatcccgctggaacaaatggacgcggcaggctacggcgcgttgaagagtaaagtgaaataa

SEQ ID NO: 43270 - DNA, 1266 bp, Neisseria meningitidis
atgagcaaaaaacaacccgcacaaccgaccaggcgcactctttttaaaaccgcgatcgcagccggagcagtcggcgcaatcggaggttatctcggcggcaaaaaacagggcgaaaccgccgaacgcaccgccgaaagccaacactcgccccaagcctatccctgctacggcgaacatcaggcaggcatcgttacgccgcagcaggcgttttcgattatgtgcgccttcgacgtaaccgcgcaaagtgccaagcagctggaaaacctgttccgcccgctgaccgcccgcatcgagtttctcacccaaggcggcgaataccaagacggcgacgacaaacttccgccagccggcagcggcattttgggcaaagccttcaaccccgacgggttgaccgttaccgtgggggtgggcagcagcctgtttgacggccggttcggactcaaagacaaaaaaccgattcatttgcaggaaatgcgcgacttctccaacgataagctgcaaaaaagctggtgcgacggcgatttgagcctgcaaatctgtgccttcacccccgaaacctgccaagccgccctgcgcgacatcatcaaacacaccgtccaaaccgccgttatccgttggagtatcgacgggtggcagcccaaatccgaacccggcgcgatggcggcgcgcaacctgttgggcttcagggacggcacgggcaaccccaaagtttccgatcccaaaactgccgacgaggttttgtggacgggggtggccgccaacagcctcgacgaaccggagtgggcgaaaaacggcagctatcaggcagtccgccttatccgccactttgtcgagttttgggacaggacaccgcttcaagagcaaaccgacattttcgggcggcgcaaatacagcggtgcgccgatggacggcaaaaaagaagccgaccaaccggattttgccaaagaccccgagggtgatatcacgcccaaagacagccatatacgcctggcgaatccgcgcgatcccgaattcctcaaaaaacaccgcctcttccgccgcgcctacagctattcgcgcggactcgcctcaagcggacagcttgatgtcgggctggtgttcgtctgctatcaggcaaaccttgccgacggattcatcttcgtgcaaaacctcctcaacggcgaaccgctggaagaatacatcagccccttcggcggcggctatttcttcgtcttgcccggcgtggaaaaaggcggctttttggggcaagggctgctgggcgtataa

SEQ ID NO: 43271 - DNA, 1266 bp, Neisseria meningitidis
atgaacacactccaacgccgcaagacgcatcaagtccgcatcgatcatattaccgtcggttcagaagcacccgtcgttatccaatctatgaccaacaccgacactgccgatgcaaaagccaccgcattgcagattaaggaattgagcgatgccggatccgaaatggtgcgtattaccgtcaacagctccgaagccgcgtccaaagttgccgaaatccgccgccgcttggacgatatgggctatgccacaccgcttatcggcgatttccacttcaacggcgaacgcctgttggcggaatttccagaatgcggcaaagcattgtccaaataccgcatcaatcccggcaatgtcggcaaaggcgtaaaaggcgatgaaaaatttgcctttatgattcggactgctgctgaaaacgataaagccgtccgcatcggcgtaaactggggttctttggatcaaagcctcgccaaacgtatgatggatgccaacctcgcttcttccgcgccgaaaccgcccgaagaagtgacgaaggaagcactgattgtctccgctttggaatctgccgaaaaagccgttctattgggactgcccgaagacaaaatcatcctgtcgtgcaaagtcagcgcggttcaggatttgattcaggtttaccgcgaactgggcagccgttgcgcctatccgctgcatttgggtttgaccgaagccggtatgggcagcaaaggcattgtcgcatcaacggcggcattatccgtcttgcttcaagaaggaatcggcgacaccatccgcatttcactgactccggaacctggcagcccgcgtactcaggaggtcgtcgtcgggcaagagattttacagactatgggattgcgttcgtttacgccgatggttaccgcctgccccggctgcgggcgtaccaccagtaccgtatttcaagagctggcacaagatgttcaaaattacctgcgccaaaaaatgtctatatggcgtaccctttatcctggggttgaatccctgaacgttgccgtaatgggctgcgttgtcaatgggcccggagaaagcaaattggccgacatcggcatcagcctgcccggtacgggagaaacacccgttgcccctgtttatgtagatggtgaacgtaaagtaacgctgaaaggcgacaacattgcaacggaatttctggctattgttgaagagtatgtcaaaaccaattatggggagaacggactcaaacgccatcaagggaaggttatcccgatacactccctataa

SEQ ID NO: 43272 - DNA, 1272 bp, Neisseria meningitidis
gtgggcgacggtgtccacactctgctgctcgacaggccgattgtgcgcgacggcaggaaattcgacgcgccgcttttgtggatggtggtgctgatgacggcgttcagcctgctgatgatttattcggcttctgtgtatttggcatcaaaagaaggcggcgatcagtttttctatttgaccagacaggcggggttcgtcgttgccggcttgatagcgagcggtttgttatggtttctttgcaggatgaggacatggcggcggcttgtgccgtggatttttgccctatccggcctgttgctggtagtcgtattgattgccgggcgcgaaatcaatggcgcgacccgttggatacctttgggtccgttgaatttccagccgaccgagctgttcaagctggcggtcatcctttatttggcaagcctgttcacgcgccgtgaagaagtgttgcgcagcatggaaagtttgggttggcagtcgatttggcgggggacggccaatctgatcatgtccgccaccaatccgcaggcacgtcgtgaaacattagaaatgtacggccgtttccgggcgatcatcctgccgattatgctggtggcgttcggtttggtgctgataatggtacagccggatttcggttcgtttgtcgtcattaccgtcattgccgttggaatgctgtttttggcaggattgccgtggaaatattttttcgtcctggtaggcagcgtcttgggcgggatggtgctgatgattaccgccgctccctaccgtgtgcagcgggtagtggcatttttggacccgtggaaagacccgcagggtgccggctaccagcttacccactctctgatggcaatcgggcgcggagagtggttcggtatgggtttgggtgcgagtttgagcaaacgcggctttctgccggaagcgcataccgattttatttttgccatcatcgccgaagaattcggtttcttcggtatgtgcgtgctgatattctgttacggctggctggtggtgcgggcgttttccatcggcaagcagtcgcgcgatttgggtttgactttcaacgcctatatcgcttcgggtatcggcatttggatcggtatccaaagtttcttcaatatcggtgtgaacatcggtgctttgccgaccaaaggtctgacgctgccgttgatgtcctatggcggttcgtcagtctttttcatgctgatcagcatgatgctgctgttgcgtatagattatgaaaaccgccggaaaatgcgcggttatcgggtggagtaa

SEQ ID NO: 43273 - DNA, 822 bp, Neisseria meningitidis
atggctgttttaattaccggtgcttcggcaggattcggcgaagcgatgtgccgcgcgtttgtcggggcgggataccgcgttatcggtgcggcgcgccgcgcggacaggcttcaggccttggcggatgaattgggtgctttgttttaccctttggaaatggacgtgtcgcgccgcgaatcggtggaaaacgccttaaacggcatccccgatgaattttccgacatcgactgcctcatcaacaatgccgggctggctttgggtttggacacggcggacaaggcggattttggagattgggaaacaatgattcaaaccaatgttttgggtttgacgttcctgacgcgcaagattttgccgcaaatggtggaacgcggcggcggttatgtgatgaatttgggttcgattgcaggcaattatgcttatgccggcagcaacgtttacggggcgaccaaggcgtttgtgcgccagttcagcctgaatttgcgcgcggagttggcggataagaacatccgcgttaccaatatcgagccgggtttgtgcggcaatacggagttttccaacgtgcgcttcaaaggcgatgacgagaaggcagcaggcgtgtatgagggtgtggaatttatccgccccgaagatattgcggaaaccgcattgtggctgtaccgccggccggcgcatatgaatgtgaacacgattgaaattatgcccgtggcgcagacttttgcaggaatgaaagtgataaaaaaagccgtgccggaagtgcgggaagactttgaaaaacaaagtatgtcgctgttttcccgcatcaggtcttggttcaaatga

SEQ ID NO: 43274 - DNA, 192 bp, Neisseria meningitidis
  misc_feature 173, 174, 175, 176, 177: 'n' is a, c, g or t
atgaaaaagtctttgattgctttatgtgttgcccattgtgcaaagttgaaaaacgattttggcgtaccaccgttacctgaaatcaaaatcacgccaagccctgttcgggtaggctctttgaaacaacatccgagcctgcgcttgggtaaatcaggcgtggcggctgctaaacnnnnncacacacttaattaa

SEQ ID NO: 43275 - DNA, 783 bp, Neisseria meningitidis
atgaccgacatcctcaataaaatccttgccaccaaagcacaggaagttgccgctcaaaaagccgccgtcaacgccgaacacatccgcacacttgccgcagaagccgcgcccgtccgcagcttcatcgattcgatacgcggcaaacaccgcctaaacctgcccgccgtcatagccgaaatcaaaaaggcaagcccgagcaaagggttaatccgtccggacttccgccctgccgagattgcacgcgcctatgaaaacgccggagcggcgtgtttgtccgtactgaccgacgaaccctatttccaaggttcgcccgaatacctcaaacaggcgcgcgaagccgtatcgctgcccgtgctgcgcaaagacttcatcatcgacgaataccaggtttatcaggcgcgcgcatggggggcggatgccgtcctgctgattgccgcagcactggaacaggaacaattggaacgctttgaagcggtggcgcacgaattgggcatgaccgtcctactcgagctgcacgacgaaaccgaattggaaaaatgccgcaacctgaccacgccgctgtggggcgtaaacaaccgcaacctgaggacttttgaagtctccctcgaccaaaccctgtcgctgctgcccgcgctggaaggcaaaaccgtcgttaccgaaagcggcattacaggcaaggcggatgtggaatttatgcaatcgcgcggcgtgcataccttcctgatcggcgaaacgtttatgcgtgccgacgatattgaagcagaagtgggcaaactattctaa

SEQ ID NO: 43276 - DNA, 138 bp, Neisseria meningitidis
ttgcctcgccttgccgtactatctgtactgtctgcggcttcgtcgccttgtcctgatttaaatttaatccactatatcataaaacaacagatttccaagccggaacatcttttacgaagcctgaaaatcatttcatga

SEQ ID NO: 43277 - DNA, 813 bp, Neisseria meningitidis
atggaaaatatcggcaggcagcgacccatcggcgtttttgactcgggaatcggcggtttgaccaatgtgcgagcgctgatggaacggctgccgatggagaacatcatttatttcggcgacacggcgcgcgtgccttacgggacgaaatctaaggcgaccatcgaaaatttctcgatgcagattgtcgattttttattggaacacgatgtcaaggcgatggttatcgcgtgcaatacgattgcggcggtggcggggcagaaaatccgtcaaaaaaccggcaatatgcccgttttggacgtgatttccgccggcgcgaaagccgcgctggcaacgacgcgcaacaataaaatcggcattatcgccaccaatacgacagtcaacagcaatgcttatgcgcgcgccatccataggaacaaccccgacacgctcgtccgcacgcaggccgcgccgctgctcgtccctttggtggaagagggctggctggaacacgaagttacccgcctgaccgtatgcgaatacctcaaaccattgcttgcagacggcatcgatacgctggtgttgggctgcacgcactttcccttgctcaagcccttaatcggcagggaggcgggcaatgtcgcgttggttgattctgcaattacaacggccgaagaaaccgcacgcgtccttgctcaggaaggattgctcaataccgacaacaacaatcccgactaccgtttttacgtcagcgatattcctttgaaattcagaaccatcggcgagcgttttctgggcaggacgatggagcagattgaaatggtgtctttgggttaa

SEQ ID NO: 43278 - DNA, 1011 bp, Neisseria meningitidis
atgaaccacaccgttaccctgcccgaccaaaccacctttgccgccaacgacggcgaaaccgttttgaccgctgccgcccgtcaaaacctcaacctgccccattcctgcaaaagcggtgtctgcggacaatgcaaagccgaactggtcagcggcgatattcaaatgggcggacactcggaacaggctttatccgaagcagaaaaagcgcaaggcaagattttgatgtgctgcaccactgcgcaaagcgatatcaacatcaacatccccggctacaaagccgatgccctacccgtccgcaccctgcccgcacgcatcgaaagtattattttcaaacacgatgtcgccctcctgaaacttgccctgcccaaagccccgccgtttgccttctacgccgggcaatacattgatttactgctgccgggcaacgtcagccgcagctactccatcgccaatttacccgaccaagaaggcattttggaactgcacatccgcaggcacgaaaacggtgtctgctcggaaatgattttcggcagcgaacccaaagtcaaagaaaaaggcatcgtccgcgttaaaggcccgctcggttcgtttaccttgcaggaagacagcggcaaacccgtcatcctgctggcaaccggcacaggctacgcccccatccgcagcatcctgctcgaccttatccgccaaggcagcaaccgcgccgtccatttctactggggcgcgcgtcatcaggatgatttgtatgccctcgaagaagcacaagggttggcatgccgtctgaaaaacgcctgcttcacccccgtattgtcccgccccggagagggctggcagggaagaaatggtcacgtacaagacatcgcggcacaagaccaccccgacctgtcggaatacgaagtatttgcctgcggttctccggccatgaccgaacaaacaaagaatctgtttgtgcaacagcataagctgccggaaaacttgtttttctccgacgcattcacgccgtccgcatcataa

SEQ ID NO: 43279 - DNA, 669 bp, Neisseria meningitidis
atgttaccctcgaaatatgaagataacgcactgcaaattaaagaaaaaagtacagaaagaactgctccgttttttgtgctggaagttaccgcccgttctgccgccgatattttgggtatccatcccaattcggcagtactgttctaccgtaaaatccgcacggttatcaaccatcatttggccttggctgccgatgaggtttttgagggccctgtcgagccggacgaaagcgatttcggcggacggcgtaaaggcagacgtggtcgcggtgcggcaggaaaagtggttgtcttcggcattctgaaacgcaacggacggggctataccgttgtcgtagataatgccaagtctgaaacgttactccctgtcatcaaaaagaaaatcatgccggacagtattgtttataccgatagtctgagcagctgcgacaagttggacgtgagcggttttatccattaccgcatcaaccattccaaggaatttgcagaccgtcagaaccacattaacggcattgagaatttttggaatcaggcaaaacgcgtcttgcgaaaatacaacggaatcgatcgtaaatctttcccgctgttcttgaaagaatgcgaatttcgatttaacttcggcacaccgtctcaacagcttaaaatcctgcgggattggtgtggaatttag

SEQ ID NO: 43280 - DNA, 126 bp, Neisseria meningitidis; identical to SEQ ID NO: 39360

SEQ ID NO: 43281 - DNA, 1173 bp, Neisseria meningitidis
atgaaacgtgatttgagcaaaatgacctgcatcgaagacttgcgccgcgttgccaagcgcaaaatgccgcgtatgttttacgattacatcgattcgggttcgtggacagaaactacctaccgtgaaaacacttcggatttcaaagacatccgcttccgtcaaaaagtattggtcaatatggaaggccgaagcctggaaaccaaaatgatcgggcaggatgtgaaaatgccggtggcgattgcgccgacgggtttcacgggtatggcacacgccgacggtgaaattttggcggcgcgggcggcggagaagttcggcattccgtttacgctgtccacgatgtctatctgctcgattgaagacgttgccgagaacacttccgcaccattttggtttcagctttatgtgatgcgcgaccgcgagtttatggaaaacctgattaagcgcgcgaaggatgccaaatgttcggcattggtattgaccgctgatttgcaggttttggggcaacgccacaaagacatcaaaaacggcctgtccgcgccgccgaaaccgaccatcgccaatttaatcaatctggcgaccaagcccgaatggtgtatgaaaatgctgaacacggaacgccgcacgttccgcaatatcgtcggacacgcgaagaacgtcggcgatttgtcttcgctgtcttcatggacttccgaacaattcgacccgcgcctgagctgggacgatgtggcgcgcattaaagatttgtggggcggcaagctgattatcaaaggcattatggaacctgaagacgcggaaaaagcagcgaaaagcggcgcggacgcattgattgtttccaaccacggcggtcgacagctcgacgataccgtgtctgccatcaaagccttgcccgacatcgtcagcgcagtgggcagcgacatcgaagtttggatggacagcggcatccgcagcggtcaggatattttgaaggcgtgggctttgggcgcgaaaggtacaatgataggtcgggcgttcctgtatggcttgggcgcgtatggagaagaaggcgtaacccgtgcgctggaaatcctgtataaagaaatggatatatctatggcgtttacgggacaccgcgatattcaagatgtcgatgcttcgattttgagaggcaaagattggggcagggaaacggtttag

SEQ ID NO: 43282 - DNA, 1059 bp, Neisseria meningitidis
atgtcaggctatacaggcggcctcgttgtttcaggtggtatatcattaattgacagacttgatattatggaaaatgtaaaccgcatcgttgcagaaggcattgccgcagtagaagctgcgcaagacttcaacgctctagaacaaatcaaagcccgttatcttggtaaaaccggcgagttgaccggacttctgaaaactttggggcaaatgtcgcctgaagagcgcaaaaccataggtgcgcatatcaatgaatgcaaaaaccggtttcagacggcttttaatgccaaacgcgaagccctcaacgaagtcaagctgcaagcccgacttgccgccgaagccctcgatattaccctgcccggacgcgctcaggaaggcggcagcctgcatcccgtaaccctgaccttgcaacgtgtggtcgaactctttcacggaatgggtttcgaagtggcggacgggcctgaaatcgaagacgattttcacaatttccaagccctgaacatccctgcaaaccatcctgcccgtgcgatgcaggatacgttttacgttgaaaacggcgatgttttgcgtacgcacacttccccgattcaaatccgctatatgctcgataaaaaagagccgcccatccgcattatcgcccccggccgcgtttaccgtgtggacagcgatgccacgcactcgcctatgttccatcaggcggaaggtttgtgggtagaagagggcgtaacttttgccgacttaaaagcagtgttcacggattttatccgtcgcttctttgaacgcgatgatttgcaagtacgtttccgcccgtctttcttcccgttcaccgaaccgtctgccgaaatcgacattatgggcgaaaacggcaaatggctggaagtaggcggttgcggtatggtacatcctaacgtgttgaaaaacgtcaatatcgaccctgaaaaatataccggtttcgcctttggtattggtctcgaccgcttcgctatgctgcgttacaacgtgaacgacttgcgcctgttcttcgataatgatttgaactttttgaagcagtttgcgaaatga

SEQ ID NO: 43283 - DNA, 153 bp, Neisseria meningitidis
atgtctggtatctacctaccccgcctattcccgccccatatcgccgaacgcggcctgttgtattttcagcagggcaaggttctcgatgtccgaaaaacttccgccgggcattatcgggcggaggtgtgcggttcggaaaactattgggtatag

SEQ ID NO: 43284 - DNA, 1851 bp, Neisseria meningitidis
atgattatgttacctaaccgtttcaaaatgttaactgtgttgacggcaaccttgattgccggacaggtatctgccgccggaggcggtgcgggggatatgaaacagccgaaggaagtcggaaaggttttcagaaagcagcagcgttacagcgaggaagaaatcaaaaacgaacgcgcacggcttgcggcagtgggcgagcgggttaatcagatatttacgttgctgggaggggaaaccgccttgcaaaaggggcaggcgggaacggctctggcaacctatatgctgatgttggaacgcacaaaatcccccgaagtcgccgaacgcgccttggaaatggccgtgtcgctgaacgcgtttgaacaggcggaaatgatttatcagaaatggcggcagattgagcctataccgggtaaggcgcaaaaacgggcggggtggctgcggaacgtgctgagggaaagaggaaatcagcatctggacggactggaagaagtgctggctcaggcggacgaaggacagaaccgcagggtgtttttattgttggcacaagccgccgtgcaacaggacgggttggcgcaaaaagcatcgaaagcggttcgccgcgcggcgttgaaatatgaacatctgcccgaagcggcggttgccgatgtggtgttcagcgtacagggacgcgaaaaggaaaaggcaatcggagctttgcagcgtttggcgaagctcgatacggaaatattgccccccactttaatgacgttgcgtctgactgcacgcaaatatcccgaaatactcgacggctttttcgagcagacagacacccaaaacctttcggccgtctggcaggaaatggaaattatgaatctggtttccctgcacaggctggatgatgcctatgcgcgtttgaacgtgctgttggaacgcaatccgaatgcagacctgtatattcaggcagcgatattggcggcaaaccgaaaagaaggtgcttccgttatcgacggctacgccgaaaaggcatacggcagggggacggaggaacagcggagcagggcggcgctaacggcggcgatgatgtatgccgaccgcagggattacgccaaagtcaggcagtggctgaaaaaagtatccgcgccggaatacctgttcgacaaaggtgtgctggcggctgcggcggctgtcgagttggacggcggcagggcggctttgcggcagatcggcagggtgcggaaacttcccgaacagcaggggcggtattttacggcagacaatttgtccaaaatacagatgctcgccctgtcgaagctgcccgataaacgggaggctttgagggggttggacaagattatcgaaaaaccgcctgccggcagtaatacagagttacaggcagaggcattggtacagcggtcagttgtttacgatcggcttggcaagcggaaaaaaatgatttcagatcttgaaagggcgttcaggcttgcacccgataacgctcagattatgaataatctgggctacagcctgctgaccgattccaaacgtttggacgaaggtttcgccctgcttcagacggcataccaaatcaacccggacgataccgctgtcaacgacagcataggctgggcgtattacctgaaaggcgacgcggaaagcgcgctgccgtatctgcggtattcgtttgaaaacgaccccgagcccgaagttgccgcccatttgggcgaagtgttgtgggcattgggcgaacgcgatcaggcggttgacgtatggacgcaggcggcacaccttacgggagacaagaaaatatggcgggaaacgctcaaacgtcacggcatcgcattgccccaaccttcccgaaaacctcggaaataa

SEQ ID NO: 43285 - DNA, 1155 bp, Neisseria meningitidis
atggttgataaaaaaagccctttgattgccgtcagtgtcggcgaagcgtcgggcgacctgttgggggcgcacctgatacgcgccatccgcgagcgttgcccgcaggcgcggtttaccggtatcggcggggaactgatgaaggcggaaggtttcgagagcctttatgatcaggagcggctggcggtgcgcggctttgtcgaagtggtcaggcggctgccggaaattttacggatacgcagggggctggtacgggatttgctgtcgttgaaacctgatgtctttgtcggtatcgatgcgcccgatttcaatttgggtgtggcggaaaagctgaaacggacgggcattccgaccgtgcattatgtcagtccgtcggtgtgggcgtggcggcgggaacgcgtgggcaaaatcgtgcatcaggtcaaccgcgtgctgtgcctgttcccgatggagccgcagctttatctcgatgcgggcggacgtgcggagtttgtcggtcatccgatggcgcagcttatgcccttggaagacgaccgtgaaacggcgcggaaaactttgggcgtggatgccggcatccccgtattcgccctgctgcccggcagccgcgtcagcgaaatcgactatatggcgccggtgttttttcagacggcattgttgctgctgaaacgctatcccactgcacgcttcctgctgcctgccgcaacggaggcgacgaagcggcgtttggcggaagttttgcagcggccggagtttgccggcctgccgctgacggtaaccgacagacagtctgaaacggtgtgcagggcggcggatgcggtgctggtaacgagcggtacggcgactttggaagtggcgctgtgcaagcgtccgatggtcatcagctacaagatttcgccgctgacctatgcttatgtgaaacgcaaaatcaaagtgccgcatgtcggcctgccgaatatcctgttgggtaaggaggccgtgccggaattattgcaatctgaagcaaaaccggaaaaactggcggcggcgttggcggactggtacgaacaccccgataaggttgccgcgctgcaacaggatttcagggcgttgcacctgctgttgaaaaaagatacggcggatttggccgcgcgcgcggttttggaagaggcgggatgttga

SEQ ID NO: 43286 - DNA, 303 bp, Neisseria meningitidis
ttgggattcaataatcttgtttcgcttgccgcgttaattgaaaaggttttccctattcgatatacgcctgccggaatccctgttttagatattattttaaagcacgaatcgtggcaggaggaaaacgggcagcaatgccttgtccaattggaaattccggcacggattttaggcaggcaggcggaagagtggcagtatcggcaaggtgtatatgttcacgtcgaaggttttttagctcaaaaaagcagacgttcccttatgccgatgctcaggatacaaaatattcaagaatataaaggttaa

SEQ ID NO: 43287 - DNA, 918 bp, Neisseria meningitidis
atgagcatcatccactacctctcgctgcacgtcgaatccgcgcgcaccgcgctcaagcagctcctgcgccaacccttcggcacactgcttaccctcatgatgctcgccgtcgcgatgaccctgccgctgtttatgcatctgggcatccaaagcgggcaaagcgtgttgggcaaactcaacgagtcgccgcaaatcacaatctatatggaaacctccgccgcacaaagcgacagcgataccgtccgcagcctgctggcgcgcgacaaacggctcgacaacatccgcttcatcggcaaagaagacggtctggaagaattacagtccaatctcgaccaaaatctgatttccatgcttgacggcaaccccctgccggatgtctttatcgttacccccgacccggcaaccacgcccgcccaaatgcaggcaatctaccgagacattaccaaactgcctatggtcgaatccgcgtctatggataccgaatgggtgcaaacgctgtaccaaatcaacgagttcatccgcaaaattttgtggtttctttccctgacgctggggatggcgttcgtccttgtcgcacacaacaccatccgcctgcaaatcctcagccgcaaagaagaaatcgaaatcaccaaactcttgggcgcgcccgcgtcgtttatccgccgcccattcctttatcaagccatgtggcagagcatcctttccgccgccgtcagcttggggctttgcggttggctgctctctgccgtgcgcccattggtcgatgccattttcaaaccctacggacttaatatcggctggcggttcttctacgctggcgaactcgggctggtgttcggcttcgtcatcgcgttgggcgtattcggcgcgtggcttgccaccacccagcacctgctcggcttcaaagccaaaaaataa

SEQ ID NO: 43288 - DNA, 525 bp, Neisseria meningitidis
atgaaaaaagcacttgccacactgattgccctcgctctcccggccgccgcactggcggaaggcgcatccggcttttacgtccaagccgatgccgcacacgcaaaagcctcaagctctttaggttctgccaaaggcttcagcccgcgcatctccgcaggctaccgcatcaacgacctccgcttcgccgtcgattacacgcgctacaaaaactataaagccccatccaccgatttcaaactttacagcatcggcgcgtccgccatttacgacttcgacacccaatcgcccgtcaaaccgtatctcggcgcgcgcttgagcctcaaccgcgcctccgtcgacttgggcggcagcgacagcttcagccaaacctccatcggcctcggcgtattgacgggcgtaagctatgccgttaccccgaatgtcgatttggatgccggctaccgctacaactacatcggcaaagtcaacactgtcaaaaacgtccgttccggcgaactgtccgccggtgtgcgcgtcaaattctga

SEQ ID NO: 43289 - DNA, 294 bp, Neisseria meningitidis; identical to SEQ ID NO: 37088

SEQ ID NO: 43290 - DNA, 606 bp, Neisseria meningitidis
atgaagaaaatcggattgttcggcggtactttcgacccgatacacaacggacatcttcatatcgcccgtgcctttgccgacgaaatcggcttggacgcggttgttttcctgccgacaggcggcccgtatcacaaagacgcagcctccgcttccgccgccgaccgccttgccatggtcgaattggcgacggcagaagacgcgcgttttgccgtcagcgattgcgacatcgtccgagaaggtgcaacctatacttttgataccgtccaaatcttccgccagcagttcccatccgcgcaactctggtggctgatgggcagcgacagcctgatgaagctgcacacatggaaaaaatggcagatgctcgtgcgcgaaaccaatatcgccgtcgccatgaggcagggcgacagcctgcaccaaaccccgcgcgaactgcacgcgtggctgggcaagtcccttcaggacggcagcgtccgcatcttgtccgccccgatgcataatgtgtcgtcaacggaaatccgccgcaaccttgccggccaaggcgtttcagacggcatcccgcctgccgccgcacgctacatccgcgaacacggtttgtatgaaaaataa

SEQ ID NO: 43291 - DNA, 1131 bp, Neisseria meningitidis
atgtttaccgatgaaaatatgaccgcaaaggaagaactgttcgcatggctgcgccatatgaaccaaaacaaaggttccgacctgttcgtgacaacccatttcccgcccgcaatgaagctggacggcaaaatcacccgcatcacggacgaaccgctgacggcggaaaaatgtatggaaatcgccttttcgattatgagtgcgaagcaggcggaagaattttcatcgaccaacgagtgcaacttcgccatcagcctgccggacaccagccgcttccgcgtcaatgcgatgatacagcgcggcgcgacggcgttggtattccgtacgattaccagcaagattcccaagtttgaaagcctgaacctgccgccagtcttgaaggatgtcgcgctgaaaaaacgcgggctggttatttttgtcggcggcaccggctcgggtaaatcgacttcgcttgcctcgcttatcgactaccgcaatgaaaattcgttcggacacatcatcaccatcgaagacccgatcgagtttgtccacgaacacaaaaactgcatcatcacccagcgcgaggtcggcgtggatacggaaaactggatggcggcgttgaaaaacacgctgcgtcaggcgcctgatgtcatccttatcggcgaaatccgtgaccgcgaaacaatggactacgccattgcctttgccgaaacggggcatttgtgtatggcgacgctgcacgccaacagcaccaatcaggcactcgaccgcatcatcaactttttccccgaggagcggcgcgaacaattgctgacggatttgtcgctcaaccttcaggcgtttatttcgcaacgcctcgttccgcgagacggcggcaagggcagggtggcggcagtcgaggtgctgctcaattcgcccctgatttcggagttgattcacaacggcaacatccatgaaatcaaagaagtgatgaaaaaatccactaccctgggtatgcagaccttcgatcaacacctttaccaattgtatgaaaaaggcgatatttccctgcaagaagcattgaaaaatgccgattccgcacacgatttgcgtttggcggtacagttgcgcagccgccgcgcgcaaagttccagccccgatttggaactgctctga

SEQ ID NO: 43292 - DNA, 1692 bp, Neisseria meningitidis
atgataaaatgcccgtcaataccgattaacgggcattttacaaaaatcagttggttgattttaaacaaatattttttacgacaaaaaatatttccgcccattttgccaacaaaacccaaaccggaggcggacagatacgctcccatccggacgcttaacacccccataaccatgcagctgatcgactattcacattcatttttctcggttgtgccaccctttttggcactggcacttgccgtcattacccgccgcgtactgctgtctttaggcatcggtattctggtcggcgttgcctttttggtcggcggcaaccccgtcgacggtctgacacacctgaaagacatggtcgtcggcttggcttggtcagacggcgattggtcgctgggcaaaccaaaaatcttggttttcctgatacttttgggtatttttacttccctgctgacctactccggcagcaatcaggcgtttgccgactgggcaaaacggcacattaaaaaccggcgcggcgcgaaaatgctgaccgcctgcctcgtgttcgtaacctttatcgacgactatttccacagtctcgccgtcggtgcgattgcccgccccgttaccgacaagtttaaagtttcccgcaccaaactcgcctacatcctcgactccactgccgctcctatgtgcgtgctgatgcccgtttcaagctggggcgcgtcgattatcgccacgcttgccggactgctcgttacctacaaaatcaccgaatacacgccgatggggacgtttgtcgccatgagcctgatgaactattacgcactgtttgccctgattatggtgttcgtcgtcgcatggttttccttcgacatcggctcgatggcacgtttcgaacaagccgcgttgaacgaagcccacgatgaaactgccgtttcagacgctaccaaaggtcgtgtttacgcactgattattcccgttttggccttaatcgcctcaacggtttccgccatgatctacaccggcgcgcaggcaagcgaaaccttcagcattttgggggcatttgaaaacacggacgtaaacacttcgctggtattcggcggcacttgcggcgtccttgccgtcgttctctgcacgctcggcacgattaaaaccgccgactatcccaaagccgtttggcagggtgcgaaatctatgttcggcgcaatcgccattttaatcctcgcttggctcatcagtacggttgtcggcgaaatgcacaccggcgattacctctccacactggttgcgggcaacatccatcccggcttcctgcccgtcatcctcttcctgctcgccagcgtgatggcgtttgccacaggcacaagctgggggacgttcggcattatgctgccgattgccgccgccatggcggtcaaagtcgaacccgcgctgattatcccgtgtatgtccgcagtaatggcgggggcggtatgcggcgaccactgctcgcccatttccgacacgaccatcctgtcgtccaccggcgcgcgctgcaaccacatcgaccacgttacctcgcaactgccttacgccttaaccgttgccgccgccgccgcatcgggctacctcgcattgggtctgacaaaatccgcgctgttgggctttggcacgacaggcattgtattggcggtgctgatttttctgttgaaagataaaaaacgcgccaacgcctga

SEQ ID NO: 43293 - DNA, 591 bp, Neisseria meningitidis
atgcttttgtttatcgacaattacgacagttttacttacaacatcgtccagtatttcactgaattggggcaggaagttgccgtgcgccgcaacgatgatattacgttggaggaaatcgaggcattgaatccgcaatatctcgttatcggccccggcccgtgttcgcccaaagaagcggggatttccgtggcggcgatgcgccatttcgccggccggctgccgattatgggcgtgtgcctcgggcatcagacgataggcgaggcgttcggcggcaggatagtccgcgccaaaacgctgatgcacggtaaggtgtcgcccgtgtcccattcgggcaagggtatgtttaagggtttgcccaatccggttacctgtacgcgttatcacagcctcgttatcgatcggaatacgatgcccgaatgtttggaagtaacggcttggactgaggacggcgagattatgggtgtgcgccataaggaatatgccgtcgagggcgtgcagttccaccccgaagccctcttgaccgagcacggacatgatatgttaaacaattttttaatcgaatttcaaaacttcaaaccgcaaaaaatctga

SEQ ID NO: 43294 - DNA, 1311 bp, Neisseria meningitidis; identical to SEQ ID NO: 39855

SEQ ID NO: 43295 - DNA, 1215 bp, Neisseria meningitidis
atggataaatttcccaagtctgcaaagctcgatcacgtctgttacgacatacgcgggccggttcacaaaaaagcccttcagttggaagaggagggcaataaaatccttaaactcaatatcggcaaccctgcgccgttcggctttgaagcccctgatgaaatcttggtcgatgtcatccgcaacctgccgacttcgcaaggctattgcgattctaaagggctgtattccgcccgcaaagccattgttcactactatcagaccaaaggtttgcgcgatattacggttgatgatgtctatatcggcaacggcgtgtccgagctgattacgatgtctatgcaggcattgctcaacgacggcgacgaaatcctgattcccgcgcccgactatcccttgtggacggcggcggcaacgcttgcgggcggtacggtacgccattatctgtgcgacgaagaaaacggctggttccccaaccttgccgatatggaagccaaaatcacgcccaaaaccaaagccatcgtcgtcatcaatcccaataatccgacaggcgcggtgtacagcagggaaatcctgttggaaatcgccgaactggcgcgcaagcacggtttgattattttcgccgacgagatttacgacaaaatcctttatgacggcgcggttcaccaccacatcgccgcgcttgcccccgaccttttgacggtaacgttcaacggtttgtccaaagcctaccgtgtagccggattccgccaaggctggatggtgctcaacgggccgaaacatcatgcaaaaggttacatcgagggtttggatatgctctcgtctatgcgcctgtgtgccaatacgccgatgcagcacgcgattcagacggcattgggcggctatcagagcatcaacgaattcattttgcccggcggacggcttttggaacagcgcaacagggcgtgggaactggtcaaccagattcccggcgtatcctgcgtcaaaccgatgggcgcgatgtatatgttcccaaaaatcgataccgaaatgtaccgtatccgcgatgacatgaaattcgtttacgatttgctggtgcgcgaaaaagtcttgctggtgcagggaacggggtttaattggatcaagcccgaccatttccgcattgttacgctgccttacgtccatcagattgaagaggcgatgggcaggctggcaagattcctgcaaacctaccgccaataa

SEQ ID NO: 43296 - DNA, 918 bp, Neisseria meningitidis
  misc_feature 4, 5, 6, 7, 8: 'n' is a, c, g or t
gtgnnnnntgtttggcagcttgagcaagacgtatccgttgccggcggcggcgcgacccagtggggcaacagggaatcctttgtcggcttggcaggcgaattcggtacgctgcgcgccggtcgcgttgcgaatcagtttgacgatgccagccaagccattgatccttgggacagcaacaatgatgtggcttcgcaattgggtattttcaaacgccacgacgatatgccggtttccgtacgctacgactctccggacttttccggtttcagcggcagcgtccaattcgttccgatccaaaacagcaagtccgcctatacgccggctcattatactaggcagaacaatgctgatgttttcgttccggctgttgtcggcaagcccggatcggatgtgtattatgccggtctgaattacaaaaatggcggttttgccgggagctatgcctttaaatatgcgagacacgccaatgtcggacgtgatgcttttgagttgttcttgctcggcagcacgagtgatgaagccaaaggtaccgatcccttgaaaaaccatcaggtacaccgcctgacgggcggctatgaggaaggcggcttgaatctcgccttggcggctcagttggatttgtctgaaaatggcgacaaagccaaaaccaaaaacagtacgaccgaaattgccgccactgcttcctaccgcttcggtaatgcagttccgcgcatcagctatgcccatggtttcgacttgatcgaacgcggtaaaaaaggcgaaaataccagctacgatcaaatcatcgccggcgttgattatgatttttccaaacgcacttccgccatcgtgtctggcgcttggctgaaacgcaataccggcatcggcaactacactcaaattaatgccgcctccgtcggtttgcgccacaaattctaa

SEQ ID NO: 43297 - DNA, 780 bp, Neisseria meningitidis
atgaaaaccatcacagaaaccctaaatctcgccccgaaaggcaaaaacttcctgaccgccgattggcccgcgcccgccaatgtgaaaaccctgattaccacgcgcaacggcggcgtgagccaaggtgcgtatcagagtttgaacctcggtacgcacgtcgacgacaatcccgaagccgtgcgccgcaaccgcgaaatcgtgcaacagcaggtcggattgcccgttgcctacctcaatcaaatccacagtaccgtcgtcgtcaatgctgccgaagcgttgggaggcacacccgatgcggacgcttccgtagacgacacgggcaaagttgcctgtgccgtgatgaccgcagactgcctgcctgttttgttttgcgacagggcgggtacgacggttgccgccgcacacgcgggctggcgcggtttggcgggcggcgtattgcaaaacaccattgccgcgatgaaggttccgcctgtcgaaatgatggcgtatctcggccccgccatcagtgcggatgcgtttgaagtcggacaggacgtgtttgatgcgttctgcacgcccatgcccgaagccgccgccgcatttgaaggcataggtggcggcaaattccttgccgacctttacgcgctcgcccgcctgattctgaagcgcgaaggcgtgggcggcgtatatggcggcacgcattgtacggttttggaacgggatactttcttttcctaccgccgcgacggagcgacagggcgtatggcgagcctgatttggctggacggcaatgccgtctga

SEQ ID NO: 43298 - DNA, 3045 bp, Neisseria meningitidis
atgttttggatagttttgatcgttattttgttgcttgcgcttgccggcttgttttttgtccgcgcacaatccgaacgcgagtggatgcgcgaggtttctgcgtggcaggaaaagaaaggggaaaaacaggcggagctgcctgaaatcaaagacggtatgcccgattttcccgaacttgccctgatgcttttccatgccgtcaaaacggcagtgtattggctgtttgtcggtgtcgtccgtttctgccgaaactatctggcgcacgaatccgaaccggacaggcccgttccgcctgcttctgcaaaccgtgcggatgttccgaccgcatccgacggatattcagacagtggaaacgggacggaagaagcggaaacggaagaagcagaagctgcggaggaagaggctgccgatacggaagacattgcaactgccgtaatcgacaaccgccgcatcccattcgaccggagtattgctgaagggttgatgccgtctgaaagcgaaatttcgcccgtccgtccggtttttaaagaaatcactttggaagaagcaacgcgtgctttaaacagcgcggctttaagggaaacgaaaaaacgctatatcgatgcatttgagaaaaacgaaacagcggtccccaaagtccgcgtgtccgataccccgatggaagggctgcagattatcggtttggacgaccctgtgcttcaacgcacgtattcccatatgttcgatgcggacaaagaagcgttttccgagtctgcggattacggatttgagccgtattttgagaagcagcatccgtctgccttttctgcagtcaaagccgaaaatgcacggaatgcgccgttccaccgtcatgcagggcaggggaaagggcaggcggaggcaaaatccccggatgtttcccaagggcagtccgtttcagacggcacggccgtccgcgatgcccgccgccgcgtttccgtcaatttgaaagaaccgaacaaggcaacggtttctgcggaggcgcgaatttctcgcctgattccggaaagtcagacggttgtcgggaaacgggatgtcgaaatgccgtctgaaaccgaaaatgttttcacggaaaccgtttcgtctgtgggatacggcggtccggtttatgatgaaactgccgatatccatattgaagaacctgccgcgcccgatgcttgggtggtcgaaccacccgaagtgccgaaagttcccatgaccgcaatcgatattcagccgccgcctcccgtatcggaaatctacaaccgtacctatgaaccgccgtcaggattcgagcaggtgcaacgcagccgcattgccgagaccgaccatcttgccgatgatgttttgaatggaggttggcaggaggaaaccgccgctattgcggatgacggcagtgaaggtgcggcagagcggtcaagcgggcaatatctgtcggaaaccgaagcgttcgggcatgacagtcaggcggtttgtccgtttgaaaatgtgccgtctgaacgcccgtcctgccgggtatcggatacggaagcggatgaaggggcgttcccatctgaagaaaccggtgcggtatccgaacacctgccgacaaccgacctgcttctgcctccgctgttcaatcccgaggcgacgcaaaccgaagaagaactgttggaaaacagcatcaccatcgaagaaaaattggcggagttcaaagtcaaggtcaaggttgtcgattcttattccggccccgtaattacgcgttatgaaatcgaacccgatgtcggcgtgcgcggcaattccgttctgaatctggaaaaagatttggcgcgttcgctcggcgtggcttccatccgcgttgtcgaaaccatccccggcaaaacctgcatgggtttggaacttccgaacccgaaacgccaaatgatacgcctgagcgaaatcttcaattcgcccgagtttgccgaatccaaatccaagctgacgctcgcgctcggtcaggacatcaccggacagcccgtcgtaaccgacttgggaaaagcaccgcatttgttggttgccggcacgaccggttcgggcaaatcggtgggtgtcaacgcgatgattctgtctatgcttttcaaagccgcgccggaagacgtgcgtatgattatgatcgatccgaaaatgctggaattgagcatttacgaaggcatcccgcacctgctcgcccctgtcgttaccgatatgaagctggcggcaaacgcgctgaactggtgtgttaacgaaatggaaaaacgctaccgcctgatgagctttatgggcgtgcgtaatcttgcgggcttcaatcaaaaaatcgccgaagccgcagcaaggggagaaaaaatcggcaatccgttcagcctcacgcccgacgatcccgaacctttggaaaaactgccgtttatcgtggtcgtggtcgatgagtttgccgacctgatgatgacggcaggcaagaaaatcgaagaactgattgcccgcctcgcccaaaaagcccgcgcggcaggcatccatttgattcttgccacacaacgccccagcgtcgatgtcatcacgggtctgattaaggcgaacatcccgacgcgtatcgcgttccaagtgtccagcaaaatcgacagccgcacgattctcgaccaaatgggcgcggaaaacctgctcggtcagggcgatatgctgttcctgctgccgggtactgcctatccgcagcgcgttcacggcgcgtttgcctcggatgaagaggtgcaccgcgtggtcgaatatttgaaacagtttggcgaaccggactatgttgacgatattttgagcggcggcggcagcgaagagctgcccggcatcgggcgcagcggcgacgacgaaaccgatccgatgtacgacgaggccgtatccgttgtcctgaaaacgcgcaaagccagcatttcgggcgtacagcgcgccttgcgtatcggctacaaccgcgccgcgcgtctgattgaccagatggaggcggaaggcattgtgtccgcaccggaacacaacggcaaccgtacgattctcgtccccttggacaatgcttga

SEQ ID NO: 43299 - DNA, 180 bp, Neisseria meningitidis
atgttctgtatcgttgtttaccgcttccgcacctttgtccgccttaaagcaggtagacaccgcaatgaatcgacgcaaagaaaatgccgtctgaacatgcgttcgggcggcgttttgttggggggtatcggagcggaacgtctgaaaaagggtttcaggcggtctttgggcgtgtggtga

SEQ ID NO: 43300 - DNA, 726 bp, Neisseria meningitidis
atgcgtattccgctgcttgcccctgacaattatgcctttcccgatcctgcctatgctttggcacggtgcgacgggctggtcggcgtgagcagggatttggacgcggggcggctgctcgaggcgtatcggaacggcgtgtttccttggtttttgcgagacggttggtttttttggtatgcggtcgggccgcgtgcggtgattgttcccgaacgtctgcacgttccgcgctcgctggagaaaacgctacgcaactgcagctatcgggttacggtcaacggctgttttgcggaagtggtcgcgcattgtgcggcagcggtgcgcccgaatcaggacggaacttggattgcgcccgagtttcagacggcatatttgaagctgcacgaaatgggatacgcgcattcgtttgagtgccattatcccgatgaaaacggtaaaacgaggttggcgggcgggttttacggcgttcagatcggcagggtgttttacggcgaatcgatgttcgcattacaaccggatgcgtcgaaaatcgcgtttgcctgcgccgtgccgtttctcgcgtctttgggtgtggaactgatagactgccagcaggatacggggcatatgcgccgtttcggttcggagctgctgccgtttgcggattttgccgaacgtctgcggatgttgaacgccgtgccgttgaaagaggaaatcgggcggcgcgaagtggcgtgcaaggggctttga

SEQ ID NO: 43301 - DNA, 1041 bp, Neisseria meningitidis
atgcaacccatccgataccgaaccgaccttaccccctacaacaccttcggtcttcgcgcccaagcccgggcctttatcgcgctcgaacatgccgacgagttgcgcgacatcgtccgactgctggagttcgaccgcgatactgttttatggctgggcggcggcagcaacatccttttgatgcaggattacgccggactggtcgtacacatggaaaacaaaggcatacgcgagattgcgcgttcagacggcatggttctgattgaagcgcaggcgggcgaaatttggcacgattttgtcctgcacaccgttgcgctgggtttgagcggtttggaaaacctgagcctgattccgggtacggtcggcgcatcgcccgtgcagaacatcggcgcatacggcgtggaggcgaaagacgtgattcacagcgtgcgctgctttgatttggatacggagacctttgtcgagcttgccaatgccgactgccgcttcgcctaccgcgaaagcctgttcaagcaggagggtaaagggcgttatgtgattgtttcggtcgtatttgcattaaaaacgcattttgtgccgactttgggttacggcgatttggcggccgccgttgccgaactgagcgcgggcagggtcccgacggcgaaagatgtttccgatgcagtgtgtgcaatccgcaacagtaaacttcctaatcctaacgtgcttggcaatgtcggcagtttctttaaaaaccccgtcgtcagcgcagaaaaagccgccaccttgttgcagcggcatcctgatatgccgcgctatccgcagcccgacggttcggtcaaactcgccgccggctggctgatcgaccaatgccgtctgaaaggcttccaaatcggcggcgcggcggtacatgacaggcaggctttggtcttagtgaacaaaaacaacgcctcggcaaacgatgtccggcagttggcgcaacacatcaaatttacagtatttgctcggtttcaggtagaattgcacgccgaacctaattggctgcctgcttcgttcagcctgtaa

SEQ ID NO: 43302 - DNA, 1248 bp, Neisseria meningitidis
atgagtcagagaagagtagtcattacaggcttaggtcaggtttcccctgtcggcaacactgtcgcagaggcttgggacaccctgctcaccggcaaaagcggcatcggcgcgattacccgctttgacacatccgacatcaacagccgtgtcgccggcgaggtgcgcggtttcgacatcggacaatacatcagcgcgaaagaagcgcgccggatggacgtattcatccactacggcattgccgccgcattgcaggcaatcgccgattcgggtttggacgatgtggaaaacctcgacaaagaccgcatcggcgtgaacatcggttccggcatcggcggactgcccggcatcgaggtcaccggcaaagccgtaatcgaaggcggcgcgcgcaaaatcaaccctttctttatccccggttctctgattaatctgatttccggacacgttaccatcctcaaaggctaccgcggcccgagctacgggatggtttccgcctgcaccaccggcgcgcacgccatcggcgattccctccgtatgattaaatacggcgacgcggacataatggttgccggcggcgcggaaggcgcaatcagcactttgggcgtgggcggttttgccgcgatgaaagccctctccacccgcaacgacgaccccgccaccgcttcccgtccgtgggacaaaggccgcgacggcttcgttatcggcgaaggcgcgggcatattggtgttggaagaattggaacacgccaaaaaacgcggcgcgaaaatctacgccgaaatcgtcggcttcggcatgagttccgatgcttaccatatcaccgcgccgaacgaagaaggccccgcccttgccgttacccgcgcgctgaaagatgccggcatcaatcccgaagacgtggattacgtcaacgcgcacggcacgtccacccccttgggcgatgccaacgaaaccaaagccctcaaacgcgcgttcggcgaacacgcctacaaaaccgtcgtcagctcgaccaaatccatgaccggccacctgctcggcgcggcgggcggcgtggaggccgtgtacagcattttggcgatacacgacggcaaaatcccgccgaccatcaacatttttgaacaagacgttgaagccggctgcgatttggactactgcgccaacgaagcgcgcgacgcggaaatcgacgttgccatttccaactccttcggcttcggcggcaccaacggcacgctggtcttcaaacgcttcaaaggctga

SEQ ID NO: 43303 - DNA, 450 bp, Neisseria meningitidis
  misc_feature 427, 428, 429, 430, 431: 'n' is a, c, g or t
atgaaagaactagataaaatcgatttccgcatccttaagatccttcaacagaatgcccgcatcccgatgacggagcttgccgagaaggtaggcttgtccaccacgcccgttacagagagggtgcgccgtttggagcgggaacattatatttccggttatcacgcccatctcaatccccatctgttgggcaaacctttattggtttttgtcgagctgaagctgcaatccaaatcgggcaatattttcgaagatttcaaaaaagaagtgctgaaaattccgcaaattatggaatgccacttggtgtcgggcgaatacgactatctgattaaagtacgtttgcccgatatgtctgcctatcgggatatgctaggcaatatcctattgcaactgcctgccgcttcggagagtaggagttatgttgtgatgnnnnncacacacttaattaattaa

SEQ ID NO: 43304 - DNA, 789 bp, Neisseria meningitidis
atgaaccatcaggacgcacgctggcaggttcaccgccatcttgccgaacataccgaccaacggctgacactcgtccgcaacgcgcccaagcatatcctgcttgccggtgcggatgcggacatcagccgcagcctgctggcgaaacgctatccgcaggcggtatttgaagaatacgattcccgtgcggattttttggcggctgccgctgccgcccgcaaaggcggtttttggcaaaggtttacgggtaagggcgtggtgcaacactgccaatccccgatcgcgccgctgcccgaagcgtgtgccgatatgttgtggtcgaatctcggactgttggcggcggaacaaatccttcctgtgctgcacaactgggcgcgcgccttgaagacggacgggctgctgttttttacctgcttcgggcgagataccttggcggaactgaaatgccgtctgaaagaaaacggcattgaaagccgcagcgcgcttttccctgatatgcacgacttgggcgatatgcttgctgaaaacggcttttacgaccccgttaccgatacggcgaagctggtgttggattacaaaaaggcggaaacgttttgggcggatatggacacgctgggcgtttggcgggcgatggcgtggaacgatgaaaacgccgcgcgttcgtgtgtcgggacaatatttgagcgggaaggcggtttgggcattacgctggaaacggtgtacggacacgccgtgaaaaaactgatgctgccgcaaggggagaacgtggtgcagttttttccgaagagatga

SEQ ID NO: 43305 - DNA, 672 bp, Neisseria meningitidis
atgacgacacaagacgaactcaagcgcatcgccgccgaaaaagcagtcgaattcgtacccgaaaatgaatatatcggcatcggtaccggctcgaccatcaactttttcatcgaagccttgggtaagagcggcaaaaaaatcaaaggcgcggtatctacttccaaaaaatccggcgaactgcttgcccagtacgatattcccgtcgtttctttgaacgaagtatcggggttggcggtctatatcgacggtgcggatgaagtgaaccacgccctgcaaatgattaaaggcggtggcggcgcgcacctcaacgaaaaaatcgtcgccagcgcgtccgaaaaattcatctgcattgcggatgaaagcaaatatgtttcacgtttgggcaaattccctctgcctgtggaagtcgtcgaaagcgcgcgctctcttgtttcgcgcaaactgctcgctatgggcggacagcccgaactgcgtatcggctacaccacgttttacggcaaccaaatcgtcgatgtccacggcttgaatatcgatcagccgctgacgatggaagacgaaatcaacaaaatcaccggcgtgctcgaaaacggcatattcgcccgcgatgccgccgatgtgttgattttggggacggaagagggtgcgaaagtcatctatccctgccaagggtaa

SEQ ID NO: 43306 - DNA, 876 bp, Neisseria meningitidis
atgttacaaggtagcttggttgccctgattaccccgatgaatcaagacggcagcatccattacgaacaactccgcgacttaatcgactggcacattgaaaacggcacggacggcatcgttgccgtcggcacgacaggcgaatccgccaccctctccgtcgaagaacacaccgccgtcatcgaagccgtcgtcaaacacgttgccaaacgcgtccccgtcatcgccggcacaggggcaaacaacaccgtcgaagccatcgccctttcccaagccgccgaaaaagccggggcggactacaccctctccgtcgtcccctattacaacaagccctcccaagaaggcatttaccaacatttcaaaaccatcgccgaagccacttcgattccgatgattatctacaacgtgcccggccgtaccgtcgtcagcatgactaacgacactatcctgcgccttgccgaaatccccaacatcgtcggcgtgaaagaagccagcggcaacatcggcagcaacatcgaactcatcaaccgcgcgcccgaaggcttcgtcgtcctttccggcgacgaccacaccgccctgccgttcatgctctgcggcggacacggcgtgattaccgtagccgccaacgccgcgcccaagctctttgccgatatgtgccgcgccgcgcttcaaggcgatatcgcccttgcacgcgaactcaacgaccgactgattccgatttacgacaccatgttctgcgaacccagccccgccgcaccgaaatgggcggtatccgccctgggcagatgcgaaccgcacgtccgcctgccgctcgttccgctgacggaaaacggacaagcaaaagtccgcgccgccctgaaagcctcaggacaactttaa

SEQ ID NO: 43307 - DNA, 798 bp, Neisseria meningitidis; identical to SEQ ID NO: 38316

SEQ ID NO: 43308 - DNA, 447 bp, Neisseria meningitidis
gtgcgcgcctttcagacggcattgaggccgtcccgcatcctgaacatcctgactgtatcgcttcacgccgcctcccttgccgtctgcctgacttggttttacggccggatgatgtggttcggtttggcggctttggtggcaagttacgcatactcgctcaggataacgaatctgaaacaccgccatgccataaccgccattaccatagaccgcgacggacaggcggaaatcgtatccggcaaagacaaaacggcaaaggcggcggcactgtcgggcagcagtatggttacgccttatgccttattcttacaatgggacaccggcggcaaaaccgtccgccaatgcatcatgcccgacatgacggacaaagaatcctaccgcaagctgaaagtttgggtactttggcggcagccgaaaaaaaccgccgaaaccgatacatcagactga

SEQ ID NO: 43309 - DNA, 1521 bp, Neisseria meningitidis
atgtccaagtggcggggtttaaaccaaaaaggaaatacgatgaaggagatgatgatgtttaaacgcagcgtaatcgcaatggcttgtatttttgccctttcagcctgcgggggcggcggtggcggatcgcccgatgtcaagtcggcggacacgctgtcaaaacctgccgcccctgttgtttctgaaaaagagacagaggcaaaggaagatgcgccacaggcaggttctcaaggacagggcgcgccatccgcacaaggcagtcaagatatggcggcggtttcggaagaaaatacaggcaatggcggtgcggtaacagcggataatcccaaaaatgaagacgaggtggcacaaaatgatatgccgcaaaatgccgccggtacagatagttcgacaccgaatcacaccccggatccgaatatgcttgccggaaatatggaaaatcaagcaacggatgccggggaatcgtctcagccggcaaaccaaccggatatggcaaatgcggcggacggaatgcagggggacgatccgtcggcaggcgggcaaaatgccggcaatacggctgcccaaggtgcaaatcaagccggaaacaatcaagccgccggttcttcagatcccatccccgcgtcaaaccctgcacctgcgaatggcggtagcaattttggaagggttgatttggctaatggcgttttgattgacgggccgtcgcaaaatataacgttgacccactgtaaaggcgattcttgtagtggcaataatttcttggatgaagaagtacagctaaaatcagaatttgaaaaattaagtgatgcagacaaaataagtaattacaagaaagatgggaagaatgataaatttgtcggtttggttgccgatagtgtgcagatgaagggaatcaatcaatatattatcttttataaacctaaacccacttcatctgcgcgagttaggcgttctgcacggtcgaggcggtcgcttcctgccgagatgccgctgattcccgtcaatcaggcggatacgctgattgtcgatggggaagtggtcagcctgacggggcattccggcaatatcttcgcgcccgaagggaattaccggtatctgacttacggggcggaaaaattgtccggcggatcgtatgccctccgtgtgcaaggcgaaccggcaaaaggcgaaatgcttgctggcacagccgtgtacaacggcgaagtgctgcatttccatacggaaaacggccgttcgtacccgaccagaggcaggtttgccgcaaaagtcgatttcggcagcaaatctgtggacggcattatcgacagcggcgatgatttgcatatgggtacgcaaaaattcaaagccgttatcgatggaaacggctttaaggggaattggacggaaaatggcggcggggatgtttccggaaggttttacggcccggccggcgaggaagtggcgggaaaatacagctatcgcccgacagatgcggaaaagggcggattcggcgtgtttgccggcaaaaaagagcaggattga

SEQ ID NO: 43310 - DNA, 573 bp, Neisseria meningitidis
atggacaatcacgccgaagcacactggcaaaacggctggcttcaaagcatacgccataccccgtcgcccaatttcagcccgagggaaacgggggaaacggtttccctgatcgtgttgcacaacatttcgctgccgccgttcgaatacggcacggatgcggtggaaaagctgtttgccaaccggctcgaccccgacggacatccgttcttcagcctgatacacactttgcgcgtatccagccatttcttaatcaaacgcgacggagaaacggtacagttcgtttcctgcgacaatatggcataccatgccggcgtatcttcattcggcggcagggaaaaatgcaacgcattttcaatcggcatcgaactggaaggctgcgatttcgaaccgtttgccgaagcgcaataccgttcgctcgaagccttgttggacgcaatctgccgccactaccccgtcacggcggtaacggggcaccaagacatcgcgcccggccgcaaaaccgaccccggccattttttcgactggcggcggatacgggagaaagggtttctcgtggacagaaatgccgtctga

SEQ ID NO: 43311 - DNA, 876 bp, Neisseria meningitidis
atggcttacctgttaatcagcatcgtgttcagcgtgtcggtttccattttgctgaaaatggcaaggaagaaaaaaatcgacatcgcgcaggcggtcgccgtcaattatgtggtcgcggtcatactgaccctgctggtattgaagccggatgtcggcaatatcggcgcatttttgccgacatggtggctgtttgccgcattgggcgtgctgctgccgtccgtatttgtcattatgggcaaatccgtagaatccgccggtatcgtcaaatccgacgcggcgcagcgtttgtcgctgtttttgccgattgttgccgccttgacgctgtttggcgaaaaactcagcgaaggcagactaatcgggctgtgcctcgcatttgccgcactgttctgcctgctttggaaacacagcggtggcaaaaaatcaggaagcgcgtggcggcaggcggcattgctgctgggcgtgtgggcaggttacggcattatcgatatcctgttcaaacagcttgccaaaagcggaacggcatttgcgggcaacctgctggttgcatttgtgctggcgggtgtgctgatgtttgcctgcctgtttgccaaatcggtcagatggcgtgttgagagtgtggttggcggcatattcttgggcggtttgaattttatgaatatcgtaacctacatcaccgcgcaccaaatgatgaaggataatccgaccttggtttttgccggtatgaatatcggcgtgattgttttgggtacgctttcgggcgcattgttctttaaggaaaaaatcaacacaatcaatacggcgggaatcgtgttggcactgtgttctatcgcctgcctgttttattggggggaagtcaaggtactgttcggcatataa

SEQ ID NO: 43312 - DNA, 207 bp, Neisseria meningitidis
atgaaagcagtcagggatatagccttatggctggcagtaacggtttggatcaactttttccccgacagttaccgctatgataccgttccacagggacggtacggatactggcatgcagaccatccgtggtatccctatgcgcgctttctgctgcctttatttttagcctgtatccttttctaccgtcattttcggaaacggaaatag

SEQ ID NO: 43313 - DNA, 213 bp, Neisseria meningitidis
atgcccgaccgcatcaaaccaagccgaaacggcggcggtgcagacgacatagcccgacagcaaggcacggcgcagacgggcgcgaaacccgaaacatcaccgaccgcgaggtacggggattttttgcgcccgttgcagggggggattggatttaagcggcgcgggcttgaaggcaaaacgggtggggcacagaactgtttaaatgcagtctga

SEQ ID NO: 43314 - DNA, 726 bp, Neisseria meningitidis
atggaaacacaaaacaaacctaccgttaccgacattgaccgccccatactcgtcccgcccggcggacataaaaaagtcttgctgcattcctgctgcgccccgtgcagcggcgaagtgatggaagccatgcttgcctccggcatcgactacaccatttatttttacaatcccaatatccatccgcacaaagaatatatgctccgaaaagaggaaaacgtacgctttgcggaaaagttcggcattcctttcatcgataaagacgacgactacgaaaacgaccgcaaagaatggtttgccaaagccaaaggcatggagtttgagccggaacgcggcatccgctgcaccatgtgtttcgatatgcgttttgaaaaggcggcgcaatacgcgcatgaacacgggttccccgtctttaccagttcgctgggcatttcacgctggaaaaatatggcgcaaatcaacgactgcggacaccgcgccgccgcgccttacgatgatgtggtgtattgggatttcaactggcgcaaaggcggcggcagcgcgcgtatgattgaaatcagcaaacgtgaaaacttctaccagcaggaatattgcggttgtgcctattccctgagggattccaacgcccaccgcaaatcgcagggacgcatccccatcaaactcggcgtgctgtattacggcgacgaatcgacacaatacgaacctgcacccatccgggtggacaaataa

SEQ ID NO: 43315 - DNA, 261 bp, Neisseria meningitidis
atgaaaatgtgtcctgcttgtcaacaaggctatctctaccattcgaaacctaaatatcttcatgatgaaattattctgtgtgatgaatgcgatgcagtatggctcaaaggtatgaatatattttatggagaatatgaaaaagatttttattcttatgttcctttcatggaatcccaaggtataacgagtgaatgtatttgggaaggagatttgtttgatcatccatattatgaagatgaaaactcaaatgatatggattga

SEQ ID NO: 43316 - DNA, 639 bp, Neisseria meningitidis
atgtccaaactgaccccccgcgaaattttgaccgccggcgcagttgtgccggtaatggcgattgacgacttaagcaccgccatcgatttgtcccacgcccttgtcgaaggcggcatccctaccctcgaaatcaccctgcgcacccctgtcggcctcgatgccatccgcctgattgccaaagaagtgcccaacgccatcgtcggcgcaggtacggtaaccaatcccgaacagctcaaagccgtcgaagacgcaggcgcggttttcgccatcagcccggggctgcatgaatccctcgccaaagccggccacaacagcggcatccccctgattcccggtgttgccaccccgggcgaaatccaactggctttggaacacggcatcgacaccctcaaactcttccccgccgaagtcgtcggcggcaaagccatgctcaaagccctgtacggcccttacgccgatgttcgcttctgcccgacaggcggcatcagcctcgccaccgcgcccgagtacttggcactgcccaacgtcctgtgcgtcggcggctcttggctgacaccgaaagaagccgtgaaaaacaaagactgggacaccatcacccgcctcgccaaagaagcggcggcgttgaaacccaaagcctga

SEQ ID NO: 43317 - DNA, 687 bp, Neisseria meningitidis
atgtttgatttcggtttgggcgagctggtttttgtcggcattatcgccctgattgtcctcggccccgaacgcctgcccgaggccgcccgcaccgccggacggctcatcggcaggctgcaacgctttgtcggcagcgtcaaacaggaatttgacactcaaatcgaactggaagaactgaggaaggcaaagcaggaatttgaagctgccgccgctcaggttcgagacagcctcaaagaaaccggtacggatatggaaggcaatctgcacgacatttccgacggtctgaagccttgggaaaaactgcccgaacagcggacacctgccgatttcggtgtcgatgaaaacggcaatccgcttcccgatgcggcaaacaccctatcagacggcatttccgacgttatgccgtccgaacgttcctacgcttccgccgaaacccttggggacagcgggcaaaccggcagtacagccgaacccgcggaaaccgaccaagaccgcgcatggcgggaatacctgactgcttctgccgccgcacccgtcgtacagaccgtcgaagtcagctatatcgataccgctgttgaaacccctgttccgcataccacttcgctgcgtaaacaggcaataagccgcaaacgcgatttgcgtcctaaatcccgcgccaaacctaaattgcgcgtccgtaaatcataa

SEQ ID NO: 43318 - DNA, 183 bp, Neisseria meningitidis
atgccgaccccgcctgctgcattgatggtcgcgccggtacgcccgaatccgccgaaagacggcaagacggccacgctgttggaacacgccgctgagtttggtggctatgtggcggagttggaaaatcaaaatcaggcttggcgcgactgggcgggcaatcactcccgcaaagtcggaaactga

SEQ ID NO: 43319 - DNA, 951 bp, Neisseria meningitidis
atgtcccaacaccgcaaactgattattttgggttccggccccgccggatacaccgccgccgtctatgccgcgcgcgccaatttaaaccccgtcattattacaggtatcgcgcaaggcgggcaactgatgaccaccaccgaagtggacaactggcctgccgatgccgacggcgtgcaagggccggaattgatggcgcggtttctcgcccacgccgaacgtttcggaacggaaatcatttttgaccaaatcaacgccgtcgatctgcaaaaacgcccgtttacactcaaaggcgatatgggcgagtacacttgcgatgccctgattgtcgcaacaggcgcgtccgccaaatacctcggtttgccgagtgaggaagcgtttgcaggaaaaggcgtttccgcttgtgccacctgcgacggtttcttctataaaaaccaagatgttgccgtagttggcggcggcaatacggcagttgaagaggcactctaccttgccaatatcgccaaaaccgttaccctgatccaccgccgcagcgagttccgtgccgaaaaaatcatgatcgacaaactgatgaaacgcgtggaagagggcaaaatcatcctcaagctggaaagcaacctgcaagaagtactgggcgacgatcggggcgtaaacggcgcattattaaaaaacaacgacggttctgagcaacaaattgccgtcagcggcatttttatcgccatcgggcacaagccgaataccgatattttcaaaggtcagttggaaatggacgaagccggttacctgaaaaccaaaggcggcacggcggacaatgtcggcgcaaccaatatcgaaggcgtatgggcggcgggcgacgtaaaagaccatacctaccgtcaggcgattaccagcgcggcttccggctgtcaggcggctttggacgcggaacgctggctgggcagccaaaacatttga

SEQ ID NO: 43320 - DNA, 879 bp, Neisseria meningitidis
atgaattatgcaaaagaaatcaatgcgttaaataacagtctttctgatttgaaaggcgacattaacgtttcgtttgaatttttcccgccgaaaaacgaacaaatggaaacgatgctgtgggactccatccaccgtctgcaaaccctgcatcccaagttcgtatccgtaacttacggcgcaaattccggcgaacgcgaccgcacgcacggcatcgtcaaacgcatcaaacaggaaaccggcttggaagccgcgcctcacctgaccggtatcgacgcttctcccgacgaattgcgccaaattgccaaagattattgggacagcggcatccgccgcattgtcgccctgcgtggcgacgagccgcccggttacgagaaaaaaccgttttacgccgaagacttggtcaagctattacgctccgtcgccgacttcgacatttctgtagcggcatatcccgaagtgcatcccgaagcgaaatccgcacaagccgacctgattaatttgaaacgcaaaatcgatgcgggcgcgaaccacgtcatcacccaattcttcttcgatgtggaacgctacctgcgcttccgcgaccgctgcgtgatgttgggcatcgatgtggaaatcgtccccggcatcctgcccgttaccaacttcaagcagctcggcaaaatggcgcaggtaaccaacgtcaaaatcccaagctggctgtcgcaaatgtatgaaggtttggacgacgaccaaggcacgcgcaatctggtggcggcaagtatcgccatcgatatggtcaaagtcctgtcccgcgaaggcgtgaaagatttccacttctatacgcttaaccgcagcgagctgacttacgccatttgccatattttaggcgtgcgcccttaa

SEQ ID NO: 43321 - DNA, 933 bp, Neisseria meningitidis
atgaagcagaaccgcacctttaccttccccgattttcgcaccgtttacagctatgcgcctttatatcggctgcaacatttaaaatacacattgcgaaaatttttcggaaaaaaagaaatttacgccttcgagcagtttgtcaacgcatcccctatccgtcaggggctgttcctccactgcccgcaaaatgcctatccgctgctgcgcgaatttgttgacaggcgttttaactgcaaacgccgtttagatgcgatgacggcagattttctcatggcggaaaaactgttcggcacagacatcctgcaccaaatggaagactaccgcttccatttggtcttggcgcacctttcagacggcatcagcttgtggctcaaccgcaacgacaactgcgtcgaagaaggcgcgtggtctttatctttgcgcgacgaagcaggcaaccggctgtatatggcgactttcgcctttgtcggcacacacctgctgacagcctccgtacaagggccggcgggtgaagaagccaaagacaccgtccgccgcataaccaaacaactccacggcttgcgtccccaacaactgatggtaaccgccctgcaatatttcgccgccgtactcggcttggacggcgcaatgggcattgcacaaaaacatcaggtcaaactgcgctggaaacttaaaaagcgcgtcaaaatgaattacgacgcattctggcaggaatacggcgcaagtttggaacgggacggctactggcatctcccccaaacccccgcccgcaaagaccttgccgacatcgaaagcaaaaagcgttcgatgtaccgcaagcgttatgaaatgctggacaatatggttgcagagatgaaagacagtctgaaaacagaagcacgcggcatttcagacggcatccaaacggaaaaaccgccccgccggacagcctga

SEQ ID NO: 43322 - DNA, 720 bp, Neisseria meningitidis
ttgactttaacccgaaaaacccttttccttctcaccgccgcattcggcacacactcccttcagacggcatccgccgacgcagtggtcaaggcagaaaaactgcacgcctccgccaaccgcagctacaaagtcgccggaaaacgctacacgccgaaaaaccaagtcgccgaattcacgcaaaccggcaacgcctcgtggtacggcggcaggtttcacgggcgcaaaacttccggcggagaacgatacgatatgaacgcctttaccgccgcccacaaaaccctgcccatccccagctatgtgcgcgtaaccaataccaaaaacggcaaaagcgtcatcgtccgtgtcaacgaccgcggccccttccacggcaaccgcatcatcgacgtatccaaagccgccgcgcaaaaattgggctttgtcaaccaagggacggcacacgtcaaaatcgaacaaatcgtcccgggccaatccgcaccggttgccgaaaacaaagacatctttatcgacttgaaatctttcggtacggaacacgaagcacaagcctatctgaaccaagccgcccaaaacttcgccgtttcgtcatcgggtacgaacctctcggttgaaaaacgccgttacgaatacgtcgtcaaaatgggaccgtttacctcgcaggaacgcgccgccgaagccgaagctcaggcgcgcggtatggttcgggcggtattgaccgccggctga

SEQ ID NO: 43323 - DNA, 1434 bp, Neisseria meningitidis; identical to SEQ ID NO: 40569

SEQ ID NO: 43324 - DNA, 351 bp, Neisseria meningitidis; identical to SEQ ID NO: 40802

SEQ ID NO: 43325 - DNA, 1254 bp, Neisseria meningitidis
gtggacaaactgaaaatctccgcaaacggcccgctcaacggggaaataacggtctcgggcgcgaaaaacgcggcattgccgctgatgtgcgcgggtttgctgacatcgggtacgttgcgcctgaaaaacgtccctatgctggcagatgtgaaaaccacgcaaaagctgcttcaggggatgggcgcgcgcgtcctgaccgacaatatcagcgaatttgaaatcaacggcggtacggtaaacaatacctgcgccccttacgagttggtccgaacgatgcgcgcttcgattttggtgctgggcccgacgctggcgcgtttcggcgaggcgcaagtcagcctgccgggcggctgcgccatcggttcgcgccccgtcgatcagcatttgaaaggcttggaagcgatgggtgctgagattgttatcgaacacggttacgtcaaagccaaaggcaaactcaaaggtacgcgcgtggcgatggatgtcgttaccgtcggcggcacggaaaacctgctgatggcggcgacgctggcggaaggtacgacggttttggaaaactgcgccattgagcctgaagtggtcgatttggcggaatgcctggtcaaaatgggcgcgaaaatcagcggcatcggtacgtccacaatgattgtggaaggggtggacgagctgcaaggctgcgaacacagcgtcgtccccgaccggatcgaggcggggacgttcctgtgcgcggtggcgataaccggtggcagggtggttttgcggaatgccgcgccgaaaacgatggaagtggtgttggacaaactggttgaggcaggtgcggtgattgaggcgggcgacgattggatcgccatcgatatgcggcagcgtccgaaggcggtggacatccgcacggtcgtccaccccggcttccccacggatatgcaggcgcagtttatggcattgaatgccgtggcggagggaagctgccgcgtggtggaaacgatttttgaaaaccgctttatgcacgtccccgagttgaaccggatgggggcgaacatcacaaccgagggcaatacggcatttgtgcagggtgtggaacagctttccggcgcagtcgtcaaggcgacggatttgcgtgcgtccgccagcctcgttatcgccggtttggcggcgcgaggcgaaaccgtggtcgaacagatttaccacttggatcgcggttatgaaaatattgaaaaaaaactcggcagcgtcggcgcgaaaatcgagcgcgtatccggctga

SEQ ID NO: 43326 - DNA, 597 bp, Neisseria meningitidis
atggcttttattacgcgcttattcaaaagcagtaaatggctgattgtgccgctgatgctccccgcctttcagaatgtggcggcggaggggatagatgtgagccgtgccgaagcgaggataaccgacggcgggcagctttccatcagcagccgcttccaaaccgagctgcccgaccagctccaacaggcgttgcgccggggcgtgccgctcaactttaccttaagctggcagctttccgccccgataatcgcttcttatcggtttaaattggggcaactgattggcgatgacgacaatattgactacaaactgagtttccatccgctgaccaaccgctaccgcgttaccgtcggcgcgttttcgacagactacgacaccttggatgcggcattgcgcgcgaccggcgcggttgccaactggaaagtcctgaacaaaggcgcgctgtccggtgcggaagcaggggaaaccaaggcggaaatccgcctgacgctgtccacttcaaaactgcccaagccttttcaaatcaatgcattgacttctcaaaactggcatttggattcgggttggaaacctctaaacatcatcgggaacaaataa

SEQ ID NO: 43327 - DNA, 336 bp, Neisseria meningitidis
atgcaaatgcactggctctttctgactgtagcaattttaagcgaagtctgcggttcttccatgctcaaactgagtggcgggtttagcaaactgtggccttctattggcgtggtagtcagcttttcggtgtgtttttgggccttgtctatgacactgaaaaccatgccgctggctacagcatacgccatttgggcaggcgtgggactggttttaacggctttagtcagcgtggtgtttttcggtgagaaagctgatttcattgggattgtcagcatcggtttgattttgctgggcgtggtgcttctcaataccatgtcgcatatgtcggggcattga

SEQ ID NO: 43328 - DNA, 408 bp, Neisseria meningitidis
atgaagcggcaggctttcttcaaactgatggcgtgtgcggcatttctgtctgccgtttcgctgcgcctccccgtattgggcgcgtgttacgcaatattgtccctctatgcgtttgcactttacggcatcgacaaacggtgcgccatacgggggcaacgccgcattcccgaacaccgcctgctgctgcctgcattgctcggcggctgggtgggcgcgtatttcggcagcatgacattcaaacataagacagcgaaaaagcgttttgttgtgctgttccgtctgactgtttcaggtaatgtcttggcgaccctcatcctgatttatagtggattaaatttaaaccagtacggcgttgcctcgccttgccgtactatttgtactgtctgcggcttcgtcgccttgtcctga

SEQ ID NO: 43329 - DNA, 720 bp, Neisseria meningitidis
atgaaagacgatgttttgaaacagcaggcacacgcggcgatacagaagaaactgggctacgcgttccgcgatatttcgcttttgcggcaggctttgacgcacaggagccatcatgcgaagcacaacgagcggttcgagtttgtcggtgattcgattttgaattatacggtggcgcggatgctgtttgacgcgtttccgaagttgaccgagggcgagttgtcgcggttgcgggcaagtctggtcaatgagggcgtgctggcggaaatggcggcggaaatgaatgtcggcgacggcctgtacttgggggcgggcgagttgaagagcggcggcttcagacggccttcgatactggcagacgcgatggaggcgatgtttgctgccgtcagcttcgatgccgatttcaacacggcggaaaaggtggtgcgccatttgtttgccgatcgcgtccggcgcgccgattttcaaaatcaggcaaaagacggcaaaactgctttgcaggaggcgttgcaggcgcgccgtttcgccttgccgaaataccgtatcgaagagcaaatcggttatgccaacgacagtatgtttgtcatttcctgcgatttgggcgaactgggtttcgtgtgccgtgccaaagggacgagccgcaaggcggcggagcaggaagcggcgaaagaggctttgaaatggctggaagagaagctgccgctgaagaggaaaaagaaatga

SEQ ID NO: 43330 - DNA, 660 bp, Neisseria meningitidis
atggacacttggcacgatgcactcggcggcgaaaaacagcagccgtattttcaggaaattttaaatgcagtcaggcaggaacgtttgtcgggacaaatcatctatccgccggcggcggatgtgttcaacgcattccgcctgacagcgttcgaccgggtcaaagccgtcattctcggacaagatccgtatcacggggcagggcaggcgcacggtttggcattttccgtccggcagggtatccgcataccgccgtctttactcaatatctacaaggagttggaaaccgacatcgaaggcttttccattcccgcgcacggctgtctgacagcgtgggcggagcagggcgtattgcttctgaacacggttttgacggtgcgtgcaggacaggcgcattcgcacgcccttttaggctgggaacgctttaccgataccgttatcaggcagcttgcgacacaccgcaagcaccttgtcttcatgttgtggggtgggtatgcacaacaaaaagggaggctgatagacagtcaaaatcatttgatattgaccgcaccgcatccgtctcctctgtcggcatatcgcggttttttcggctgccgccatttttcacaggcaaacagctatttgagccggcacggtatcgatccgataaactggaagctgtga

SEQ ID NO: 43331 - DNA, 1287 bp, Neisseria meningitidis
atgacggcacaacaccaaaccccgctccgcttcattaccgccggcagcgtcgatgacggcaaaagcaccctgatcggacgactgctctacgacagcaaagccctgctgtccgaccaaatcaaaaccttggaatccggcaaaagcaaaggtttgaaagaagccatagacttctccatcctgaccgacggactggaagccgaacgcgaacagggcattacgatcgatgtggcataccgctatttttccacggcgaaacggaaattcatcatcgccgacacgccggggcacgaacaatacacgcgcaatatggttacgggcgcaagcaccgcttcggcggcagtcgtgctggttgacgcatcccaactggatttcggcgcgcagcccttgcagcttctgccgcagaccaaacgccattccgccatcctccgccaactcaactgcccgcatattgtggtggcggtcaacaaaatggacctgctggattacagcgaagacaaattcaacgccattgtggaggcataccgccgacttgccgaacagctcggtttgaaagacgcgcatttcgtaccgatgtccgcactcttgggcgacaacattgtttaccccggcggcaatatgccttggtataaaggcgaacccttattgtccattttggaaaccctgccgggggcggacgaagtcagccgcaccgccgacgatttttatttccccgtgcaactggtcgtccgccaagatgccgacaaggccgatgatttccgaggctatcaggggcgcatcgaacgcggttcggtcgccgtcgggcaaaccgtccgcatcgaaccgaacgggctgaccgccgaagtgtccgaaatcatcacgccgaaaggggaagtggcgcaggcttttgccggcgaggcggcaaccctccggctggaccgcgacatcgatgtttcgcgcggcgacctttttgtcgataaaaattccccgctcgccccgcaaaaacatctggaagccacgctttgctggtttgacgaacgtccgctcaacaccgcgcgcaaatacctgctcaagcacggcacgcaaaccgtgccggcaaaagtcggggaaattgaaagcgttttggatgtccgcacgctggaacaagaggccggcgcggaatccttgaagatgaacgacatcgccaaagtccgcatcaaccttcaaaaacccgttacggcaacgccttatgcggaaaacaccgccgccggttcgtttatcctgatagacgaagcgacatacggcactgttgcggcaggtatgattttatga

SEQ ID NO: 43332 - DNA, 1623 bp, Neisseria meningitidis
atgaaaacaaaagaattcctcaaatcccttgccgaactggccgccagtttgcgccaagtcatcgaagcggaagtggacggcttcgatgcgtcgcccaaggctattgctgcacgccgtgccaaggtgtttgacccggtaggcggttacgagtatttcgtgaatacctacttcccccattatatccgctcgcctgagaaatccgaactgcatgcgtttttattcagccgtctgccggagattatccgctcccccaaaggggaaaatgaggcggtgggtgcgccgcgtggagagggtaagtcgacgaaggttactcagttgtttacgctgtggtgtattgtgaccggccaaaaacattatgctgttattgtgatggacagtatcgaccaggcatatccgatgctggaagccatcaaggcggaacttgaatttaacccgcgcttgaaaaccgactttccggaagtatgcgggcagggccgtgtatggcaggccggtacgattgtgacggccaatgacgttaaagtccaagtggccggtagcggtaaaaagctgcgcggtttgcgtcacggcccttaccgtcctgacttaactgttttggacgatattgagaatgacgagcaagtccgcaaccccgaacagcgcgacaagctcaatgcgtggctgactaagaccgtattgcctctgggcggtgtcggtcagaaatacgatgtgatttatatcggcacgattttgcattacgacagcgtacttaaccgcactttgaataacccgttttggcacggtattaagtttaaggcgatgaaacgctggcctgaccgcatggatttgtgggacaggtgggaggaacttttccgaaacgacggcgagacggtggccgaggcgttttatcaggcaaacaaagacgagatggagcgcggcgcggtcacttcttgggcggcgcgtggcgtactcgcgctgatgaaaatccgtgcgcgtgacggccatgcgacgtttgattcagaatatcaaaacgatccggtcagtggcgaagatgcgccgtttgccaagtcgatgaagttttggaacgacctgccgtccgatttggtgtatttcggtgcgctcgacccgtcactcggaaaggccggggcgagccgtgacccgtccgcgattatcattggcggttatcaacgtgtaaccggcaaactgtatgtcgtggaggctcagattaaaaaacgtctccctgatttgattattgaggacgttattcgattgcaccgtcaatatcgttgcaaactgtggtttgttgagactgttcaatttcaggaatttctgaaagacgagctggtcaagcgcagcgcggcgcgtggaatacctgtcccagcgcgggcggtcaaaccggtatcggacaagctgttgcggatcgagactttacagcctcacatggcgaacggtttgattctgttgaatgagagccaacaaacgctgatacagcagttccgccattttccaaaggctgatcatgatgatggtcctgatgccgtgcatatgctctggtcgggggcggtggccaattgtgtgccgatagaatggcaaagccctaccgataacgattttgatgacgagataaaaagtaaatggagccgataa

SEQ ID NO: 43333 - DNA, 360 bp, Neisseria meningitidis
atgctttccaacatcatccccctttccatcggtgcggcactcggtgcaacggcgcgttggctgctcaacctcgccgttcccgcatcaatacctcccgccacaggcaacctgtttgccaactggataggcgcttttcttatcggaatctttgccgaaaccgtcaaccacccgcaatggaagctgctgctgattaccggttttctcggcagcctgaccacgctttccggattttcgctggaaaccgtaaccctgctccaattgaaccgtcccgcttcagcacttgccaatattttcctgcacacggcaggttcgctgctgctgacctggctcgggctgaagataggggcggcagtcaaataa

SEQ ID NO: 43334 - DNA, 423 bp, Neisseria meningitidis
atgcaggttacatcaaaatggatagacgggatgtgttttgtcggcacgacggaaggcgggcacagcgtcgttatggaggggtcggcggcagaaggtaaggctaagcgcgggcccagccctttggaaatgctgctgttgggcgtggcgggctgttcgagcatcgatgtggtgatgattgccgaaaaacagcgtcagaaagtgactgactgccgtgcgacggttacggcgaaacgggcggacgatgcgccgcgcgtgtttaccgaaatccacatccatttcaaagtattcgggcatgatttgaaagaatcggccattgagcgcgccgttcagatgtctgccgaaaaatactgttcggcttcgattatgttgggcaaagcggcaaagattacccacagttttgaaattgccggggcagataaatag

SEQ ID NO: 43335 - DNA, 285 bp, Neisseria meningitidis; identical to SEQ ID NO: 42100

SEQ ID NO: 43336 - DNA, 900 bp, Neisseria meningitidis
atgtggttcaagcagattagtttttatccgctcaacaaagaaaagctgcctgaggcagacgtacttgccgacaaacttgctgaagctgaatttacccattgccaaggcttagactggttcagcgaaggctttaccgcaccggtttcattctcccctgaactcgttttccctgccgactttaccttgcgcgtcgccctgaaaaaagaagaaaaagtcctgcctgccggcgtcatccgcgatattttggaagagaaggtagcggaaatccaaaacaatgaagcccgcaatgtcggccgtaaagaaaaacaagagcttaaagagcaaattacagacgacctgctgccccgagcgtttacccgcagcagccgtacagaagcggtgtttaacacccgccacggctacctgctcgtcaataacgcggcttccgccaaagcagaaaacatcctgaccaagctgcgcgaagctttgggcggtttggaagcctcgctgccgaataccaagcaatcgccctcttccttgatgaccggctggctgttgcaagggcattgcgaaggcggttttgaattagacagcgattgcgaactcaaaggtacgggcgatattgttcccgtcgtcaaagtatccaaacaagatttaaccgccgacgaagtggttcaacacgtcaaaaacggtaaaaccgttacccaactgggcttggtgtggcgcgaacaaattgcctttatcctcactcaagacttcacactcaagcgcatccaatacctcgacgtattgcaggaagaagccgaaagcaacggcgacgatgccgccggccttgccttcgcctcgcaaattctgatggcggaatccgtcagcaccatgttggaagaactggtttcctatttgggcggctggcaagattga

SEQ ID NO: 43337 - DNA, 3435 bp, Neisseria meningitidis
atgaccgagccgacctacattcccctgcgcctgcataccgaattttcgattaccgacggtatggtgcggattaaaaaactgattgccaaagcgcaggaatacggtttgcctgctttgggcatcagcgatttgatgaacgaattcggtttggtgaaattttataaagcctgccgcagcgcggggattaagcctatcggcgcggcggatgtgcggataggcaatccggatgcgcccgacaagccgttccgcgctatgctgattatccgtaacgatgcgggctatctgcgcttgagcgagcttctgacggcggcttatgtcggcaaagaccgcaatgtccatcatgcggaactcaatcccgaatggctggaaaacggcgacaacagcggcttgatttgtttgagcggcgcacattacggcgaagtgggcgtgaatctgttgaacggcaatgaagacgcggcgcgtacggcggcgttgaagtatgcggcgtggttccccgatgcgttctatatggagctgcaacgcctacccgaacgccccgaatgggaggcttgcgtttcgggcagcgtgaagctggcggaggaattgggtttgccggtggtggcgacgcatccgacacagtttatgagccgcgacgatttcaacgcgcacgaggcgcgagtgtgtatcgcaggcggctgggtattgacggacaagaaacgtccgcgcgatttcacgccgggccagtttttcattccgccggaaaccatggccgaacgtttcgccgatttgcctgaagccttggaaaacacggtagaaattgccaaacgctgcaacctgcacatcacattgggcaaaaacttcctgccccttttccccacgcccgacggtttatcactcgatgactatctcatcaaactctccaacgagggtttgcaggaacgtatggttcagctttatcccgacgaggcggagcgggcggcaaaaatgccggaatatcaggaacgtttggattttgagctgaacatcatcatccaaatgaaattccccggctatttccttatcgtacaagactttatcaactgggcgaaaacacacggctgtccggtcgggccgggccgtggttcgggcgcgggttcgctggtggcgtattcattgaagattaccgaccttgatccgctcaaatacgcgctgctgttcgagcgtttcctaaaccccgaacgcgtttctatgcccgacttcgacgtggacttttgccaaagcaaccgcggccgcgtgattgaatatgtgcgcgagaaatacggcgcggaggcggtcagccagattgttaccttcggcacgatgtcgtccaaagcggtcatccgcgacgtcgggcgcgtgttagagctgccgtttatgctgtgcgacaaactgtccaagctgattccgttggaagccaacaaacccctgagtttggaaaaagccatggagaccgagccacagattcaggaattaatcgaagcggaagaagcggacgaactgattacgctggcgaaaaagctggaagatttaacgcgcggtttgggtatgcacgcaggcggcgtgttgattgcgccgggcaagatttccgattacagccccgtgtatcaggcggacgaatccgcctcgcccgtatccatgtacgacaagggcgacgtggaagatgtgggtttggtgaaattcgactttttgggtctgcgcaacctgaccattatcgaaatggcgcagaacaacatcaaaaacactaccggcgacatcatcgatgtcggcaaaatcccgcttgacgaccaggtcgcctaccaaatcttccgcgatgcgaacaccaccgccgtcttccagtttgagtcgaccggcatgaaaaaaatgctgaaaacggcgcacacgaccaagtttgaagaactcatcgccttcgtatcgctctaccgccccggcccgatggacaacattcccgacttcgtcgcacgtatgaaggggcaagaattccaatacatccatccgctactcgaaggcatcctcgcgccgacctacgggattatggtgtatcaggaacaagtgatgcaggcggcgcaaattatcggcggctactcgctcggcggcgcggacctgctgcgtcgcgccatgggtaagaaaaaacccgaagaaatggtgaaacaccgcgaaatcttcgccgaaggcgcggcaaaacaaggcatttcgcgcgaaaaatccgacgaaatcttcaactacatggaaaaattcgccggctacggtttcaacaaatcccacgccgccgcctacgccctgatttcctaccagaccgcatggcttaaagcgcactaccccgccgaatttatggcggcgaccatgtcgtccgaattggacaacaccgaccagctcaagcatttctacgacgactgccgcgccaacggcattgagttcctgccgcccgacatcaacgaatccgactaccgcttcacgccgtatccggacatgaaaatccgctacgcgctcggcgcgattaaaggcacgggcgaagccgccgtcgaatccatcaccgccgcgcggcaaagcggcggcaagtttaccggtctgttggacttctgcgagcgcgtcggcaaagaacacatgaaccgccgcaccctcgaggccctgatacgcggcggcgcgttcgacagcatcgaacccaaccgcgccatgctcttggcgaacatcgacctcgctatggacaacgccgaccaaaaagccgccaacgccaatcagggcgggcttttcgacatgatggaagacgccatcgaaccggtgcggctcatcgacgcgccgatgtggagcgaatcggaaaaactcgccgaagaaaaaaccgtcatcggcttttacctgtccggccacccgttcggcccgtatgcccaagaagtccgccaaatcgcaccgaccaaattagaccgtctgaagccgcaagacagcgtgcgcctcgccggattcgttaccgccgtgcgtacgatgatgggcaaacgcggcaaaatcgccttcgtcagcctcgaagatttgagcggacaggttgaaatcatggtcggcggtcagacgttggaaaactgcgccgactgcctcaaagccgaccaagtgctgattatcgaatccaaagtcagccgcgacgactacggcggcggcgacgggctgcgtattctggcaaaccaagtcatgaccctgcaaacggcgcgcgaacgctacgcccgcagcctcagcctcgccctcgccccgcatcacgacatcggcggactggtacggctgctcgccgcccaccaactgcccgacacgccgcgcatcccgctgcaactgtcgtatgccaacgaaaaagcgtcgggcaggcttcaagtgccgccgaaatggacggttacaccgagctccgcattgttcggcgaactggaaacattgctcggcagccggtcggtgcgcgtcaactggtaa

SEQ ID NO: 43338 - DNA, 1059 bp, Neisseria meningitidis; identical to SEQ ID NO: 40263

SEQ ID NO: 43339 - DNA, 1929 bp, Neisseria meningitidis
atggcaaaagtaatcggtatcgacttaggtacaaccaactcttgtttggccatttccgaaaacggtcaaaccaaagtgatcgaaaacgcagaaggcgcacgcaccacgccgtccgttatcgcttatttggacggcggcgaaatcctcgtcggtgcgcctgccaaacgccaagcggtaaccaacgccaaaaacactatttacgccgccaaacgtttgatcggccacaaatttgaagacaaagaagtccaacgcgacatcgaatctatgcctttcgaaatcatcaaagccaacaacggcgacgcatgggtaaaagcacaaggcaaagagctgtctcctcctcaaatttccgcagaagtcctgcgtaaaatgaaagaagccgccgaagcttacttgggcgaaaaagtaaccgaagccgtgattaccgtccctgcctacttcaacgacagccaacgtcaagccaccaaagacgcaggccgtatcgccggtttggacgtgaaacgcatcatcaacgagccgaccgcagccgctttggcattcggtatggacaaaggcgacaacaaagaccgcaaagtagccgtatatgacttgggcggcggtactttcgatatttccatcatcgaaatcgccaacctcgacggcgacaaacaattcgaagtattggcaaccaacggcgataccttcttgggcggtgaagacttcgaccaacgcctcatcgaccacatcatcgccgagttcaaaaaagaacaaggcattgatttgaaacaagacgtgatggctctacaacgcctgaaagaagctgccgaaaaagccaaaatcgaattgtccagcggccagcaaaccgaaattaacctgccgtacatcaccatggacgcaaccggcccgaaacacttggcgatgaaaattacccgcgccaaattcgaaagcctggttgaagacctgattacccgctctatcgaaccttgcaaaattgcattgaaagatgccggcttgagcaccggcgacatcgacgacgtaatcttggtcggcgggcagtcccgtatgccgaaagtacaagaagccgttaaagccttcttcggcaaagaaccgcgcaaagacgtgaaccctgacgaagccgttgccgtaggcgcagcgatccaaggcgaagtattgagcggcggccgcagcgacgtattgctactggacgtaactcctctgtctttgggtatcgaaaccatgggcggcgtgatgaccaaactgattcagaagaacaccaccatcccgaccaaagcgtcgcaagtgttctctaccgccgaagacaaccaaagcgcagtaaccatccacgtactgcaaggcgaacgcgaacgcgcttctgccaacaaatctttgggtcagttcaacttgggcgacatcgcacctgcaccgcgcggtatgccgcaaatcgaagtaaccttcgacatcgacgccaacggcatcctgcacgtttccgccaaagacaaaggcaccggtaaagcagccaacatcaccatccaaggttcttcaggtttgagcgaagaagaaatcgaacgcatggtgaaagatgccgaagccaatgccgaggaagataaaaaactgactgaattggtcgcttcccgcaaccaagccgaagccctgattcactctgtgaaaaaatctttggccgactacggcgacaaactcgacgcagccgagaaagaaaaaatcgaagccgcgctgaaagaagccgaagaagcagttaaaggcgacgacaaagccgctatcgatgccaaaaccgaggcgctgggcgcagccagccaaaaactgggggaaatggtttacgctcaagcacaagctgaagcccaagcaggcgaaagcgaacaagccaatgcttctgcaaagaaagacgatgatgtcgtagatgccgactttgaagaagtaaaagacgacaaaaaataa

SEQ ID NO: 43340 - DNA, 870 bp, Neisseria meningitidis
atgaagcgcatctttttgcccgccttgcccgccatcctgcctttatccacttatgccgacctgcccttgacgattgaagacataatgaccgacaagggaaaatggaaactggaaacttcccttacctacctgaacagcgaaaacaaccgcgccgaacttgccgcaccggtttacattcaaaccggcgcaacctcgtttatccccattccgaccgaaatccaagaaaacggcagcaataccgatatgctcgtcggcacgctcggtttgcgctacggactgaccgggaataccgacatttacggcagcggcagctatctgtggcacgaagaacgcaaactcgacggcaacggcaaaacccgcaacaaacggatgtccgacgtatccctcggcatcagccacactttccttaaagacgacaaaaaccccgccctaatcagctttcttgaaagcacggtttacgaaaaatcgcgcaacaaagcctcgtcgggaaaatcctggctcatcggcgccaccacctacaaagccatagatccgattgtcctttccctcaccgccgcctaccgcatcaacggcagcaaaaccctttcagacggcatccgctacaaatcgggcaactacctgctgctcaaccccaacatctcatttgccgccaacgacagaatcagcctgaccggaggcatccaatggctgggcacacagcccgaccgcatagacggcaaaaaagaaaccgcaagaaacacatccacctacgctcatttcggcacaggtttcggtttcaccaaaaccacggctttaaacgcatccgcacgtttcaacgtttcagggcaaagcagttccgaactgaaatttggcgtacagcatacattttaa

SEQ ID NO: 43341 - DNA, 387 bp, Neisseria meningitidis
atggcatacagcgataaagtaatcgaccactatgaaaatccgcgcaacgtcggcacattcgacaagggagacgattccgtcggcaccggcatggtcggcgcgcccgcctgcggcgacgtcatgcgcctgcaaatcaaagtgaacgacgagggcatcatcgaagatgcgaaatttaaaacttacggctgcggctcggccatcgcttcgtccagcctgattaccgagtgggttaaaggcaaaagcctggatgacgcgctggcaatcaaaaacagcgaaatcgccgaggagttggaattgccgccggtaaaaatccactgctccatcttggctgaagatgcggtaaaagcggccgttgccgactaccgcaaacgtcaggaaaacagataa

SEQ ID NO: 43342 - DNA, 927 bp, Neisseria meningitidis
ttgccgcaatacttccctttttcagacggcatgtttcgtttacaattcaggctgtttccccctttgcgaaccgccatgcacatcctgttgaccgccctgctcaaatgcctctccctgctgccgctttcctgtctgcacacgctgggaaaccggctcggacatctggcgttttaccttttaaaggaagaccgcgcgcgcatcgtcgccaatatgcggcaggcgggtttgaaccccgaccccaaaacggtcaaagccgtttttgcggaaacggcaaaaggcggtttggaacttgcccccgcgtttttcagaaaaccggaagacatagaaacaatgttcaaagcggtacacggctgggaacatgtgcagcaggctttggacaaacacgaagggctgctattcatcacgccgcacatcggcagctacgatttgggcggacgctacatcagccagcagcttccgttcccgctgaccgccatgtacaaaccgccgaaaatcaaagcgatagacaaaatcatgcaggcgggcagggttcgcggcaaaggaaaaaccgcgcctaccagcatacaaggggtcaaacaaatcatcaaagccctgcgttcgggcgaagcaaccatcgtcctgcccgaccacgtcccctcccctcaagaaggcggggaaggcgtatgggtggatttcttcggcaaacctgcctataccatgacgctggcggcaaaattggcacacgtcaaaggcgtgaaaaccctgtttttctgctgcgaacgcctgcctggcggacaaggtttcgatttgcacatccgccccgtccaaggggaattgaacggcgacaaagcccatgatgccgccgtgttcaaccgcaatgccgaatattggatacgccgttttccgacgcagtatctgtttatgtacaaccgctacaaaatgccgtaa

SEQ ID NO: 43343 - DNA, 522 bp, Neisseria meningitidis
atgtcctgtttttcaatcaaacgtatgtccgcgtttcgggcgcggataacggcgttttttgccgcctttgtctttttgacggcggcactgcccgcttatgcggagcgtctgcctgattttctggcgaaaatacagccttcggaaatttttccgggtgcggaccgttacggcaagccggaaggtaagcctatggttgcccgcgtttacaaaggcgatgagcagttgggcttggtctatatcacgaccgatgcggtcaatacgcgcggttattcgagcaaaccgattgatacgctgatggtgttggcaaacgacggcacgatagccggggcgaaactggtcgaccatcacgaaccgattatgctgatcggtatcccgcatttgcccgcgcccgggcgggcgatacgctcaaactggcttccggcgtatataaaaccaaacttcacattgacaaaccgattacgattgaagggcctgccgaccgttccgcaaccatcgaaggcgacaggagcgggcgtaccatag

SEQ ID NO: 43344 - DNA, 402 bp, Neisseria meningitidis; identical to SEQ ID NO: 36186

SEQ ID NO: 43345 - DNA, 819 bp, Neisseria meningitidis
atgcggatattttcgacaggaggaaaaatggatacgcaggcagttatcacacatatcgcccgatggttggacgaatacgccgcccgggcaaatgcaaaagggtttgtcgtgggcgtttccggcggcatcgattccgccgtcgtctccgcactcgccgcccgcaccggccgccccacgctgcttctggatatgccgatacgccaacaccccggccagcttgagcgggcaaggctgcacatccgcaatctgcaacggcaatatgccaatgtaagcgcgcaaacggtcgatctgaccgacaccttccagacctttgaacaaaccgtcggtgctcatcagacggcatttgacagtcagccgctttccctcgccaacgccagaagccgcctacgtatgctgaccctgtactactacgggcagatacacggactgctggttacggggacaggtaataagattgaagatttcggcgtgggcttttttactaaatacggcgacggcggcgtggacatcagcccgattgccgacctgaccaaaacgcaggtttaccggcttgccgaagcattgggcgtggacgaggcgattcaaaaagccccgccgaccgacggcctgtgggatacggaacgcaccgacgaagaacagatgggcgcaagctatcccgaactggagtgggcaatgggcgtgtacggcacgcgcaaacccgaagattttgaagggcggcagcgcgaagttctagaaatctatacgcgacttcaccgcgccatgcagcacaaaatcaacccgattcccgtatgccgcattccgcccgaattgctgggctga

SEQ ID NO: 43346 - DNA, 1110 bp, Neisseria meningitidis
atgttttcggacacagatatatccatgatggaaaacgccctccgacttgccgctttggggcgtttttccacttcgcccaatccgcgcgtcggctgcgttatcgcacacggcagccaaattgtcgggcaaggcttccacgtcaaagcgggcgaaccccatgccgaagtccacgccctgcgtcaggcgggcgaaatggcacaaggcgcgaccgcctttgttaccctcgaaccgtgcagccattacgggcgcacaccgccctgtgccgaagcactggtgcgggcgggcgtgtcccgcgtcgttgccgccatgcgcgaccccaacccgctggttgcaggcaaagggcttgccctgctcgaagcagcaggcatcaagacggaatgcggtttactcgaacatcaggcaagggaactcaaccgaggcttcctgtcgcgcatcgaacgccgccgcccctttgtccgcctcaaatgcgccgtttcgctggacggcaaaaccgccctttcagacggcagcagcttttggattaccggcgaagacgcgcgtgccgacgtacaggttttgcgtgccgaaagctgcgcggtgctgaccggcatcggcacggtgttggcggacaatccccggctcaacgtccgcgcttttccaactttgcgccaacccgcacgcatcgttttagacagccgcctgcgcctgcccccgaacagccatttggttaccgacggacaatctccgacctacatcgccacactcgaacgcaacgaagacagactgcacccctatcgggaacacgcacacgtccgcatcctgatgccgtctgaaacggcagacagcaaaatcgacctgcaccacctgatgcgcctccttgctgacgaaggtttcggcgaaatcatggtcgaagcaggctccgaactcacatccgcatttttggcagaaaatctggcagacgaaatcgtcctgtaccgttcgcccaaaatcctcggcagcggcaaagacctgttttccctgctcgaaaaccgcgccgccctttccgcaccgcccttgtggacacccgtttcaagcgaaatcctcggacacaacatcaaaaccgtgttccgaaaaaacggcaacgccttttaa

SEQ ID NO: 43347 - DNA, 1497 bp, Neisseria meningitidis; identical to SEQ ID NO: 42468

SEQ ID NO: 43348 - DNA, 1113 bp, Neisseria meningitidis
atgagcaccttcttccagcaaaccgcacaagccatgattgccaaacacatcaaccgcttcccgctattgaagttggatcaagtgattgattggcagccgatcgaacaatacctgaaccgtcaaaaaacccgttaccttcgagaccaccgcggccgtcccgcctatccgctgctgtccatgttcaaagccgtcctgctcggacaatggcacagcctctccgatcccgaactcgaacacagcctcattacccgcatcgacttcaacctgttttgccgtttcgacgaactgagcatccccgattacagcaccttatgccgctaccgcaactggctggcgcaagacgacaccctgtccgaattgctcaaactgatcaaccgccaactgaccgaaaaaggtttaaaagtagagaaagcatccgccgccgtcattgacgccaccattattcagaccgccgacggcaaacagcgtcaggccatagaagtcgatgaagaaggacaaatcaacggccaaaccacaccgagtaaggacagcgatgcccgttggatcaagaaaaacggcctctacaaactcggttacaaacaacatacccgtaccgatgcggaaggctatatcgagaaactgcacattacccccgccaatgcccatgagtgcaaacacctgccgcctttgttggaaggactgcccaaaggtacgaccgtctatgccgacaaaggctatgacagtgcggaaaaccggcaacatctggaagaacatcagttgttggacggcattatgcgcaaagcctgccgcaaccgtccgctgacggaaacgcaaaccaaacgtaaccgatatttatcgaagacccgttatagtggattaaatttaaatcaggacaaggcgacgaagccgcagacagtacaaatagtacggcaaggcgaggcaacgccgtactggtttaaatttaatccactatatgtggtcgaacagagcttcggtacgctgcaccgtaaattccgctatgcgcgggcagcctatttcggactgattaaagtgagtgcgcaaagccacctgaaggcgatgtgtttgaacctgttgaaagcggccaacaggttaagtgcgcccgctgccgcctaa

SEQ ID NO: 43349 - DNA, 414 bp, Neisseria meningitidis
atgataccctcctacacctacgccgccctcgccttttccgcattcacttccgccaccctcctgcccggcacatccgaagccgcctttgccctgttcgtccaccgctttcccgaacacgcatacggcgcgttgctgtgcgccggccttgccaacggattgggcagtatggtttcctattggatggggcgtttgctgccctcccgaaaaatgccgtctgaaaaaacactgaatctgatgcggcgtttcggtatttggctgcttgcgtttacctggctgcccgtcgtcggcgacgcactgccgcttgccgccggctggctgcggttgaatccgtggacaagcgggctgatgctggttatcggcaaaacggcgcgttacgccttcattctgtggggaatgcaatattacgccgcctga

SEQ ID NO: 43350 - DNA, 198 bp, Neisseria meningitidis
atgaaatggaccgacacccagcgcatcgccgaagaactctatgacctgcacggcgaaaccatcgatcccagaaccgtgcgctttacccaactgcgcgacctgattatggcattgcccgaatttgacgacgaccccgcccgttgcggcgaacgcatcctcgaagccgtgcagcaggcatggatagacgaggcggaataa

SEQ ID NO: 43351 - DNA, 825 bp, Neisseria meningitidis
atggacggcgcacaaccgaaaacgaatttttttgaacgcctgattgcccgactcgcccgcgaacccgattccgccgaagacgtattaaacctgcttcggcaggcgcacgagcaggaagtttttgatgcggatacgcttttaagattggaaaaagtcctcgatttttccgatttggaagtgcgcgacgcgatgattacgcgcagccgtatgaacgttttaaaagaaaacgacagcatcgagcgcatcaccgcctacgttatcgataccgcccattcgcgcttccccgtcatcggcgaagacaaagacgaagttttgggcattttgcacgccaaagacctgctcaaatatatgtttaaccccgagcagttccacctcaaatccattctccgccccgccgtcttcgtccccgaaggcaaatcgctgaccgcccttttaaaagagttccgcgaacagcgcaaccatatggcgattgtcatcgacgaatacggcggcacatccggcttggtcacctttgaagacatcatcgagcaaatcgtcggcgaaatcgaagacgagtttgacgaagacgatagcgccgacaatatccatgccgtttcttccgaacgctggcgcatccatgcagctaccgaaatcgaagacatcaacaccttcttcggcacggaatacagcagcgaagaagccgacaccattggcggcctggtcattcaagagttgggacatctgcccgtgcgcggcgaaaaagtccttatcggcggtttgcagttcaccgtcgcacgcgccgacaaccgccgcctgcatacgctgatggcgacccgcgtgaagtaa

SEQ ID NO: 43352 - DNA, 1509 bp, Neisseria meningitidis
atgcaaaccgattgcgacgtattgattgccggaaacgggctggcggcactgacgctcgccctgtcgctgcctgaatcgttccgcatcgttattttgtgcaaaaaccggctggacgacaccgccagccgtcatgcgcaaggcgggattgcggcggcgtggtcgggagaggacgacatcgaaaaacacgttgccgatactttggaagcgggcgcgggtttgtgtgatgaagccgccgtccgcgccatcctgtcgcagggcaaaccggcaatcgaatggctgctggcgcagggcgtggcgttcgaccggaatcataacggcctgcacctgacgcgtgaaggcgggcatacctgccgacgaatcgcccacgtcgccgactacacgggcgaagccgtcatgcagagcctgattgcccaaatacgccgccgcccgaacatccgcgtttgcgagcggcagatggcgttggacattcaaaccgaatcaggcgcggcgtgcggactgaccgtcctcgactgccgaacacaagaaacctaccgcatccgcgcccgccataccgtactcgcaggcggcggcttgggacagatttacgccgccaccaccacgccgcccgaatgcacgggcgacgccatcgccatggcgatacgcgcaggctgcgcagttggaaacctcgaatttatccaattccaccccacaggcttggcaagaccgtctgaaaacggacgcaccttcctcatttccgaagccgtgcgcggcgaaggcggcatcctgaccaaccaagcgggcgaacgatttatgccgcattacgaccgccgcgccgaactcgcaccgcgcgacatcgttgcccgcgccatcgcagccgaaatcgccaaacaaacgcaagacttcgtctcgctcgacatcagccatcaacccgcagcgttcgtccgccggcatttcccatccatccatcgacactgtttatcccaatgcggcctagacatcacgcgccaagccatccccgtccgccccgtgcaacactacacctgcggcggcatccaaaccgacccctgcggcagaacctccctgccgcagctctacgccttgggcgaaaccgcctgcactgggctgcacggagccaaccgccttgccagcaactccctgctcgaatgcgtcgtgaccgcaaggctctgcgcccaagccatcgcagacggacaagcattccaagccgaaccattccaaaggccgtctgaaagcctctccgccgaagcaggcatcttttcagacgaccttcaaaacacattcagccgccccgtcctgcaaacgttcaaccaacgccatctaggcatcctacgcaacgataccggcctgcgccgcgccatcgcccaactgcagctttggaagcaaaaccaagccgaaccgcacaccgcgtccgaatacgaaaaccgcaacctgctcgaatgcagcctcgccgtcgcccaagccgcatacaggcggagacagaacatcggcgcgcattttaatagtgattgttaa

SEQ ID NO: 43353 - DNA, 735 bp, Neisseria meningitidis
atgacgacacgccaaatcatcctcgataccgaaaccaccggtctgtatgccgacggcggcgaccgcttggtcgagtttgccggtttggaaatggtcaaccgccaaatgaccgacaaaaacctgcacctctatgtccaccccgagcgcgatatgcccgaagaggcggcacgcgtccacggcttgacgatacaggttttggaagggaaaaacgcgccgccgtttgcagaggtcggcaggcagattgccgatttcctgcgcggtgcggaactgattatccacaatgccaaattcgacgtgggcttcctcaatatggagttccgccggatggggttgccgaccgttgaggaactcggctgtaccgttaccgataccctggcgatggcgcgcgaaatgttccccgggcagaaagccagcctggatgccttgtgcaaccgtttttccgtcgaccgcagcaagcgcgtcctgcacggcgcattgatcgactgcgaacttttgggcgaagtctatcttgctatgacgcggcggcagttcgacctgatgggtgcggccgcagaggaaaaaatggaaaccaaacccgtggtgcataccgaaaccaaacgcagcggcaaactgaaagtcatcagggcggacgaaaacgagttggcggcgcacgggcaatatttggacggcttgggcgaagcctgtatctggcgcaaggaagccgtgccgtctgaaaacggcgggacggacgcatga

SEQ ID NO: 43354 - DNA, 1011 bp, Neisseria meningitidis
atgagcgatacccccgctacccgcgatttcggtctgatcgacgggcgtgccgtaaccggctatgtgctgtccaaccggcgtggtacgcgtgtctgcgtgctggacttgggcgggattgtgcaggaattttccgttttggcagacggcgtgcgcgaaaacctcgtggtgtcgttcgatgatgcggcttcctatgcggacaatccgtttcagattaacaaacagatagggcgcgtggccggacgcatccgcggtgcggcgttcgacatcaacggcaggacttaccgcgtggaggccaacgaaggcaggaacgcgctgcacggcggttcgcacgggctggccgttacccgtttcaacgcggtggcggcagacggccgttcggtggtgctgcgcagccgcctgcaacagtcggccgacggttatcccaacgatttggatttggatatttcctaccgcttggacgaggacgaccggcttaccgttagctatcgcgccaccgcgctcggcgacacggtgttcgacccgacgctgcacatttactggcggctggacgcgggcctgcacgatgcggttctgcatattccgcagggcggacatatgccggccgatgccgaaaaactgcccgtctcaacggtttcagacgacctcgaagtatttgatttcagccggcccaagccgctggatgccgccgttgccgccctgcgccgcgaaacgggtcgggccggttttgacgacgcttaccgcgtgccgtccgatataggccgtcccgccgctgtgttgcaagccggacgccgccgtcgtatcagcatatacagcgaccgcaatggcttggtcatctttaccgccgccccgcaggatttcgcgcggcacgatgcgggcgtttacgacgcgctggcgaccgaggcgcagacgctgcccgacagcctgaattggcccgagttcggcaatattcgtctgaacaagggtgataccagggaggcgacgattgcttacggcatcgaatccctttcttag

SEQ ID NO: 43355 - DNA, 1764 bp, Neisseria meningitidis
atgggttttcctgttcgcaagtttgatgccgtgattgtcggcggtggtggtgcaggtttacgcgcagccctccaattatccaaatccggtctgaattgtgccgttttgtctaaagtgttcccgacccgttcgcataccgtagcggcgcagggcggtatttccgcctctttgggtaatgtgcaggaagaccgttgggactggcacatgtacgataccgtgaaaggttccgactggttgggcgaccaagatgcgattgagtttatgtgccgcgccgcgcctgaagccgtaattgagttggaacacatgggtatgccttttgaccgtgtggaaagcggtaaaatttatcagcgtcctttcggcggccatactgccgaacacggtaaacgcgcggtagaacgcgcctgtgcggttgccgaccgtacaggtcatgcgatgctgcatactttgtaccaacaaaacgtccgtgccaatacgcaattctttgtggaatggacggcacaagatttgattcgtgatgaaaacggcgatgtcgtcggcgtaaccgccatggaaatggaaaccggcgaagtttatattttccacgctaaagctgtgatgtttgctaccggcggtggcggtcgtatttatgcttcttctaccaatgcctatatgaataccggcgatggtttgggcatttgcgcgcgtgcgggtattccgttggaagatatggagttctggcaattccacccgacaggtgtggcaggtgcaggcgtgttgattaccgaaggtgtacgcggtgaaggcggtattttgttgaacgccgacggcgaacgctttatggagcgctatgcgccgaccgtaaaagacttggcttctcgcgacgttgtttcccgcgcgatggcgatggaaatctacgaaggtcgcggctgcggtaaaaacaaagaccatgtcttactgaaaatcgaccatatcggcgcagaaaaaattatggaaaaactgccgggcatccgcgagatttccattcagttcgccggtatcgatccgattaaagacccgattcctgttgtgccgactacccactatatgatgggcggcattccgaccaattaccaaggcgaagtcgttgtgccgcaaggagacgaatacgaagtgcctgtaaaaggcctgtatgccgcaggtgagtgcgcctgtgcttccgtacacggtgcgaaccgtttgggtacgaactctctgctggacttggtggtgttcggtaaagctgccggcgacagcatgattaaattcatcaaagagcaaagcgactggaaacctttgcctgcggatgcgggcgagctgacccgccaacgtatcgagcgtttggacaatcaaactgatggcgaaaacgtcgatgcgctgcgtcgcgaactgcaacgctctgtacaactgcacgccggcgtgttccgtactgatgagattctgagcaaaggcgttcgagaagtcatggcgattgccgagcgtgtgaaacgtaccgaaatcaaagacaagagcaaagtgtggaataccgcgcgtatcgaggctttggaattggataacctgattgaagtggcgaaagcgactttggtgtctgccgaagcacgtaaagaatcacgcggtgcgcacgcttcagacgaccatcctgagcgcgatgatgaaaactggatgaaacatacgctgtaccattcagatatcaataccttgtcctacaaaccggtgcacaccaagcctttgagcgtggaatacatcaaaccggccaagcgcgtttattga

SEQ ID NO: 43356 - DNA, 159 bp, Neisseria meningitidis
atgaaaaccttcgaaaaaacatggtctgcacaatatcgggatatggaaatttcagtacggaatttttggaatttggagcggacaagggcggaagtctatatcaacggaaggcgggtttatcataacgaagccgaaatggcgtctgcttctttgcgttag

SEQ ID NO: 43357 - DNA, 201 bp, Neisseria meningitidis
atggaaaccatcaccatccctaaagaaaatttcgacgctttgctaaatctcgcaagaaccgccgtcgccctgaacgaaaattttattccaaaaataaattacggagcatccaccataccagcagccggctttgccgcacttaacgagtttggaatagcccgctccaccgtggaatctttggaaattctcaaaattaaataa

SEQ ID NO: 43358 - DNA, 798 bp, Neisseria meningitidis
atgcgcgcagtccccccgccccatatctccatcacaggcctaggttacctcggcctgccgctggcacaaaagttttaccaacacggcagccgcgttgccgccgtcaaacgcagcctgacttcggacgatatcaatctgcccatacacctcgataccatcgacctcaatcaagacagcgcgtttcaaagcgcgaaccttgcccgagatacaagcttttggcggcaccatgccaacaaacccgtttggttctgcctcttgccgccatcatcgctgacacattacgccgataccgtcaaacaatgggcagaacttgcccgggcgtgcaacgtgcaacacctgattttcacaagcagtaccagcgtttacggcgatacagcgcgcgaatgcgacgaaatcgccctacccgatccgcaaaccgagtccgcccgccaaatcctcgccgccgaacaacacctgctcgacagcggcgttccgaacatcgacatcctgcggctgggcgggctttattgcgccgaacgccatcccgtcggccgccttgttcaaaagcaaaacatcccgggcggcaaccgccccatcaacatcgtccaccgtaatatcgccgtcgaaagcctgtttcagacggcatttaaccccggcggcaggcggctgaaaaacattatcgaaccgcgccacccgacacgacgcgaattctatacggaagaagccgccaaactcggcttgcccgcgccggattttgcacccgacgacagcgtgggcaaaatcatccgtaccgtttgcgataacggcttaagcctgtaa

SEQ ID NO: 43359 - DNA, 621 bp, Neisseria meningitidis
atgatgagccacaaaaaacaagatgccttccaaggattgatcgacgcgctgaaggttttacccaacgtcgggccgaaatcggcacagcggatagcgtatcatttgctccaacacaagcgcaaagaggctgaaaaactggtggatgccttgcagacggcattgaagcaggtttaccattgcgcgatgtgcaacacgttttgcgaaggcggattgtgcgatatttgtgccgatgaaacacgcgacgggcggcggctgatggtggtgcatatgcctgccgacgtgtcgaatatggaagcggcaaactgccacgacgggctgtatttcgtcctgatggggcaaatcaatacggcattgggaatggacgtatccgccatcgcattggacaggctggcgcaacggctgggcggcggggaagtcgaagaaatcattattgcaaccgcttttaccgcagaaggcaatgcgacggcgtatgtcctgtccgagttttttaaaaacctgccttacaaagtcagcaggctgtcgcagggcattcccttgggcggcgaattggaatatgtcgatgcgggaacgctggcgcaggcggtgtacgaacgccgcctgattaaagaaggcggggcataa

SEQ ID NO: 43360 - DNA, 678 bp, Neisseria meningitidis
atgacgggatttaatgatgccgccggcgtggcatcctcctctaaaatcaaaggaaaatatgttaaggaagttacagtcgcaaacggcgtcgttaccgccacaatgctttcaagcggcgtaaacaaagaaatccaaggcaaaaaactctccctgtgggccaagcgtcaaaacggttcggtaaaatggttctgcggacagccggttacgcgcgccggcaccgacgacaccgtcgccgccgacaacaccggcaacaagaaaaccaacaccaagcacctgccgtcaacctgccgcgacgcagcatctgccgtttgcacaaaaacacccgagtattacccgaatcacggcgaatggccgaaaaacaacacttctgccggcgtggcatcttcttcaacaatcaaaggcaaatatgttaaggaagttacagtcgcaaacggcgtcattaccgccacaatgctttcaagcggcgtaaacaaagaaatccaaggcaaaaaactctccctgtgggccaagcgtcaagacggttcggtaaaatggttctgcggacagccggttacgcgcaacgccgccaacgccaaagccggcaccgacgaagtcaccgccgccacacccgacaccgacaaaatcaacaccaagcacctgccgtcaacagcaccgacaagaaaatcgacaccaaactag

SEQ ID NO: 43361 - DNA, 1410 bp, Neisseria meningitidis
atggatacacaaatcaaaactgaagccgacaatcagagcaaccggcgttatctgaccgtttggcggtggcatttttatgccggtctgctggttatgccttttcttaccctgcttgccgttacgggtttgggtatgctgctgtttgccaatattaccggtaaggagggcgagcggattcatgttgtgccgcaggcaacggtacaacctctgtctgttcaggcggaagcggcacgcagtgccgttaatccggaaacttcgtccgtcgttcagtatattgcgccgcgtgccgatgatatggttgccgtgttccgtgtcaacaatgagggcaaagcaacgatggtcgcggtcgatccttatacggcaaaagtggtcagtaccatgccgcgcaatcagggttggtattacacgatggatgaaatccacagcgatatgatgctcggtgcggcaggcgattatcttttggaaacggcagcttcactgaccattattatggttgtcagcggcttgtacctttggtgggtgaaacggcgcggcatcaaggcgatgctgctgccgtcaaaaggcagggcgcgttcttggtggcggaatctgcacggcacgtttggaacttgggtgtcgttgattttgctgttgttctgcctgtcgggtattgcttgggcgggtatttggggcggcaagttcgtacaggcttggagtcagttccctgccggtaaatggggtgtcgaaccgaaccccgtttcagtcgtgccgacccacggcgaggtattgaatgacggcaaggttaaggaagtgccgtgggttttggagcttacgcctatgcctgtttcagggacgactgtgggcaaagacggcattaaccctgacgagccgatgacattggaaaccgtcgaccgctttgcgcgggaaatcggtttcaaagggcgttatcagttgaatttgcccaaaggcgaggacggcgtatggactttgtcgcaggattctatgagttacgacatgatcagcccgtttgccgaccgcacggtacatatcgaccagtacagcggcaaaatccttgccgacatccgttttgacgattacaacccgttcggcaaatttatggcggcaagcattgcgctgcatatggggactctgggctggtggagcgtgttggcgaacgtcttgttctgccttgccgtcatttttatcggtatcagcggctgcgtgatgtggtggaaacgccgtccgaccggagcggtgggcatcgttccgccggcgcagaaagtcaagctgccggtttggtggatgatggcattgccgctattggcaatcgcactgctcttcccgacctcactgcttgccattgccgtgatttggctgttggatacgctgctgttgtcgcggattcctgttttgaggagatggtttaaatga

SEQ ID NO: 43362 - DNA, 516 bp, Neisseria meningitidis
atgaaaatcaaacaaatcgtcaaaccgggcttggcagtattggcggcgggcgttctgtctgcctgcgcaaccaaaagcaacgtcaaagccgacggcacgaccgacaatccggttttcccgaaaccctattccgtaacgctcgacaacaagcgcggcacattcccgacttatgacgaactggatcagatgcgccccggcctgaccaaagacgacatctacaaaatcctgggccgcccgcattacgacgaaagtatgtacggcgtgcgcgaatgggattacctgttccacttccataccccgggcgtaggtatcgaccctgaaaacacttccggcgtagaagatgttactacctgccaatacaaagtgattttcgataaagacaaatttgcccgcagcttctactggaaccccgtcttcccgaaagatgccgcctgtccgccgcccgcacccaaagccgagccgcaagtcatcatccgcgaaatcgtgccggcaaaaccgaaacgtatccgccaataa

SEQ ID NO: 43363 - DNA, 1719 bp, Neisseria meningitidis
atgaacctacatcaaaccgtcgaacacgaagccgccgccgcctttgccgccgcaggcatcgccgacagccctattgttttgcagccgaccaaaaacgccgaacacggcgatttccaaatcaacggcgtgatgggtgcggcgaaaaaagccaaacaaaacccgcgcgagttggcgcaaaaggtcgccgaagcattggcggacaacgccgtgattgaaagcgcggaagtcgccggtccgggcttcatcaacctgcgcctgcgccccgaatttctcgcgcaaaacattcagacggccttgaacgacgctcgtttcggcgtggcaaaaaccgacaaaccgcaaaccgtcgttatcgactattcttcgcccaatctggcgaaggaaatgcacgtcggccacctgcgttccagcatcatcggcgacagcatttcgcgcgtgttggcatttatgggcaataccgttatccgtcaaaaccacgtcggcgactggggtacgcagttcggtatgttggtcgcttatttggtcgagcagcaaaaagacaatgccgcgttcgagctggcggatttggagcagttttaccgcgccgccaaagtgcgctttgacgaagaccctgcctttgccgacaccgcacgcgaatacgttgtgaagctgcaaggcggcgatgaaaccgttttggcattgtggaaacagtttgtcgatatttcgctctcgcacgcccaagccgtttacgacacgctgggcttgaagctgcgtcctgaagacgtggcaggcgaatcgaaatacaacgacgatttgcagcccgtggtcgatgatttggttcaaaaaggtctggcggttgaggacgacggcgcgaaagtcgtgttcttggacgaatttaaaaacaaagaaggcgaacccgccgcatttatcgtgcaaaaacaaggcggcggcttcctctacgcctccaccgatttggcgtgcctgcgctaccgcataggccgtctgaaagccgaccgcctgctgtacgtcgtcgaccaccgccaagccctgcacttcgaacaacttttcaccacttcccgcaaagcaggctatctgccggaaaacgtcggcgcggcatttatcggcttcggcaccatgatgggcaaagacggcaagccgttcaaaacgcgcagcggcgacaccgtgaaactggtcgatctgctgaccgaagccgtcgagcgcgccaccgctttggtgaaagaaaaaaatcccgaattgggtgcggacgaagccgctaaaatcggtaaaaccgtcggcatcggcgcagtcaaatacgccgacttgagcaaaaaccgcaccagcgactatgtgttcgactgggatgccatgctctcgtttgaaggcaacaccgccccctatctgcaatacgcctacacccgcgtgcaaagcgtgttccgcaaagcaggcgaatgggatgcaaatgcgccaaccgttttgaccgaaccgctggaaaaacagcttgccgccgagctgctgaaatttgaagacgtactgcaaagcgtggcggacacggcgtatccgcactacctcgccgcctacctctatcaaattgcgaccctgttcagccgcttctacgaagcctgtccgatactcaaagccgaaggcgcaagccgcaacagccgcctgcaactggcaaaactcaccggcgacacgctgaaacaaggcttggatttgctgggcatcgatgtgttggacgtaatgtaa

SEQ ID NO: 43364 - DNA, 225 bp, Neisseria meningitidis
ttggttttttggttgcagcgtttgaaatacccgttgttgctttggattgcggatatgttgctgtaccggttgttgggcggcgcggaaatcgaatgcggccgttgccctgtgccgccgatgacggattggcagcattttttgccggcgatgggaacggtgtcggcttgggtggcggtgatttgggcatacctgatgattgaaagtgaaaaaaacggaagatattga

SEQ ID NO: 43365 - DNA, 639 bp, Neisseria meningitidis
atgcaaaccgccattatcgattacggtatgggcaacctgcattccgtattgaaatccgtccggacggcggggcagcttgccggaaaaaataccgaaatctttttaagcggcgaccccgaccgcgtgtcccgcgccgacaaagtcatttttcccggtcagggcgcgatgcccgactgtatggcggcattaaaacgagacggtttggacgaggcagtcaaagatgccttaaaaaacaaaccgtttttcggaatctgcgtcggcgcgcaacttttattcgaccacagtgaagaaggaaacaccgacggcttgggctggttcggcggcaaagtcagacgctttgagcgcgacctccgcgacccgcagggatgccgtctgaaagtcccgcatatgggctggaacaccgtgcgccaaacccaaaaccacccgctgtttaaagatattccccaagacacgcgtttttacttcgtccacagctactatttcgcccccgaaaatcccgaaaccatattgggcgaaagcgactacccgtccccgtttgcctgcatcgtcggcaaagacaacgtattcgccacgcaatttcacaccgaaaaaagccacgatgccgggctgacgatgttgaaaaactttttaaactggtaa

SEQ ID NO: 43366 - DNA, 210 bp, Neisseria meningitidis
atgaacatcaacgaactgggcgcaaggatagaccgcccgaccatccgcgaactgattgcctacgcaacctgccgcaaccgccccatttcaaactcgacactgctgcgtatggaaaaagacggacggataccgtgccgtctgaaaaccccactcacatcccccgtatgggacacccgcgaagttttggaagccctggggttacagcaataa

SEQ ID NO: 43367 - DNA, 2016 bp, Neisseria meningitidis
atgagtaaatcccgtagatctcccccacttctttcccgtccgtggttcgcttttttcagctccatgcgctttgcagtcgctttgctcagtctgctgggtattgcatcggttatcggtacggtgttgcagcaaaaccagccgcagacggattatttggtcaaattcggatcgttttgggcgcagatttttggttttctgggactgtatgacgtctatgcttcggcatggtttgtcgttatcatgatgtttttggtggtttctaccagtttgtgcctgattcgcaatgtgccgccgttctggcgcgaaatgaagtcttttcgggaaaaggttaaagaaaaatctctggcggcgatgcgccattcttcgctgttggatgtaaaaattgcgcccgaggttgccaaacgttatctggaagtacaaggttttcagggaaaaaccattaaccgtgaagacgggtcggttctgattgccgccaaaaaaggcacaatgaacaaatggggctatatctttgcccatgttgctttgattgtcatttgcctgggcgggttgatagacagtaacctgctgttgaaactgggtatgctgaccggtcggattgttccggacaatcaggcggtttatgccaaggatttcaagcccgaaagtattttgggtgcgtccaatctctcatttaggggcaacgtcaatatttccgaggggcagagtgcggatgtggttttcctgaatgccgacaacgggatattggttcaggacttgccttttgaagtcaaactgaaaaaattccatatcgatttttacaatacgggtatgccgcgtgatttcgccagcgatattgaagtgacggacaaggcaaccggtgagaaactcgagcgcaccatccgcgtgaaccatcctttgaccttgcacggcatcacgatttatcaggcgagttttgccgacggcggttcggatttgacattcaaggcgtggaatttgggtgatgcttcgcgcgagcctgtcgtgttgaaggcaacatccatacaccagtttccgttggaaattggcaaacacaaatatcgtcttgagttcgatcagttcacttctatgaatgtggaggacatgagcgagggcgcggaacgggaaaaaagcctgaaatccacgctgaacgatgtccgcgccgttactcaggaaggtaaaaaatacaccaatatcggcccttccattgtttaccgtatccgtgatgcggcagggcaggcggtcgaatataaaaactatatgctgccggttttgcaggaacaggattatttttggattaccggcacgcgcagcggcttgcagcagcaataccgctggctgcgtatccccttggacaagcagttgaaagcggacacctttatggcattgcgtgagtttttgaaagatggggaagggcgcaaacgtctggttgccgacgcaaccaaaggcgcacctgccgaaatccgcgaacaattcatgctggctgcggaaaacacgctgaacatctttgcacaaaaaggctatttgggattggacgaatttattacgtccaatatcccgaaagagcagcaggataagatgcagggctatttctacgaaatgctttacggcgtgatgaacgctgctttggatgaaaccatacgccggtacggcttgcccgaatggcagcaggatgaagcgcggaatcgtttcctgctgcacagtatggatgcgtacacgggtttgaccgaatatcccgcgcctatgctgctgcaacttgatgggttttccgaggtgcgttcgtcgggtttgcagatgacccgttccccgggtgcgcttttggtctatctcggctcggtgctgttggtattgggtacggtattgatgttttatgtgcgcgaaaaacgggcgtgggtattgttttcagacggcaaaatccgttttgccatgtcttcggcccgcagcgaacgggatttgcagaaggaatttccaaaacacgtcgagagtctgcaacggctcggcaaggacttgaatcatgactga

SEQ ID NO: 43368 - DNA, 921 bp, Neisseria meningitidis
atgcctaatccgctttacagacagcatatcatctccatttcggatttgtcgcgcgaacagttggaatgcctgcttcagacggcattgaagctgaaggcgcatccgcgcggcgacctgttggaaggcaaacttatcggttcgtgctttttcgagccgtccacgcgcacgaggctgtcgtttgaaacggcggtgcagcgtttgggcggcaaggtcatcggtttctcggacggcgcgaataccagtgccaaaaaaggcgagacgcttgccgataccgcccgcatcatttccggatatactgatgctatcatccaacgccaccccaaagacggcgcggcgcgcgtggcagcggagttttcgcgcgtccccgttatcaacgccggcgacggcacgaaccagcaccccagtcagacgctgctcgacctggttaccatttatgaaacacagggacgtttggacaagctcaaaatcgccatggcgggcgacttgaaatacggacgtaccgtgcattcgctttgtcaggcgttgaaacgctggaattgtgaatttgcctttgtttcgccgcccagcctagccatgcccgactatattaccgaagagttggacgaagccggctgccgataccgtatcctcggtagtttggaagaagcggcggaatgggcggatatcctgtatatgacccgcgtccagcgcgaacgtttcgacgaacaggaatttgccaaaatccaaggcaaattcaacctcgaagcgtctatgctcgcccgcgccaaaccgaacctgcgcgtgctgcaccccctgccgcgcgtggacgaaatccatcccgatgtcgatgccacgccgcacgcctattatttcgagcaggcgaccaacggcgtttatgcgcgtatggcgatattgtcgctggtgttgaacgaagaagtgtga

SEQ ID NO: 43369 - DNA, 474 bp, Neisseria meningitidis; identical to SEQ ID NO: 36318

SEQ ID NO: 43370 - DNA, 633 bp, Neisseria meningitidis
atgccgtctgaaccgccttcagacggcattgcccgacaccccaaaagcacaatcaaaatggcaaaaaaaccgaacaaacccttcaggctgacccccaaactcctgatacgcgccgtattgctcatctgtatcgccgccatcggcgcattggcaataggcatcgtcagcacattcaacccgaacggcgacaaaacccttcaagccgaaccgcaacacaccgacagcccccgcgaaaccgaattctggctgccaaacggcgtagtcggacaagatgccgcccaacccgaacaccaccacgccgcctcatccgaacccgcacagccggacggcacagacgaaagcggcagcggactgccgtcccctgccgcacccaagaaaaaccgggtcaaaccgcaacctgccgacacagctcaaaccgacaggcagccggacgacgccggaacacaagctgaaaacacactcaaagaaacccccgtactgcccacaaacgtcccccgtcccgaaccccgaaaagaaacacccgaaaaacaggcgcagcccaaagaaacgcccaaagaaaaccataccaaaccggacaccccgaaaaacacgccgcccaaaccccataaagaaattctcgacaacctcttctga

SEQ ID NO: 43371 - DNA, 387 bp, Neisseria meningitidis
gtggttgtcttcggcattctgaaacgcaacggacgggtctataccgttgtggtggataatgccaagtctgaaacgttactccctgtcatcaaaaagaaaatcatgccggacagtattgtttataccgatagtctgagcagctgcgacaagttggacgtgagcggttttatccattaccgcatcaaccattccaaggaatttgcagaccgtcagaaccacattaacggcattgagaatttttggaatcaggcaaaacgcgtcttgcgaaaatacaacggaatcgatcgtaaatctttcccgctgttcttgaaagaatgcgaatttcgatttaacttcggcacaccgtctcaacagcttaaaatcctgcgggattggtgtgggatttag

SEQ ID NO: 43372 - DNA, 375 bp, Neisseria meningitidis
atgatgccggcaacgaggtcgtctgaaatgtatattcccgacaaaggcgatattttccatttgaatttcgacccttccagcggcaaggaaatcaagggcgggcggtttgcgctggctctgtctccaaaagcattcaaccgcgcaacgggattggtttttgcctgccccatttcacaggggaatgcagcagctgcacgaagcagcggcatgatttcaaccttactcggtgcaggaacggaaacgcagggcaatgtccactgccaccagctcaaatctctagactggcaaatccgcaaggcttcttttaaagaaactgtacccgattatgtattggacgatgtgctggcgcgcatcggcgccgtcttattcgattaa

SEQ ID NO: 43373 - DNA, 1200 bp, Neisseria meningitidis
atgtccgaccaactcatcctcgttctgaactgcggcagttcatcgctcaaaggcgccgttatcgaccgaaaaagcggcagcgtcgtcctaagctgcctcggcgaacgcctgaccacgcccgaagccgtcattacgttcaacaaagacggcaacaaacgccaagttcccctgagcggccgaaattgccacgccggcgcggtgggtatgcttttgaacgaactggaaaaacacggtctgcacgaccgcatcaaagccatcggccaccgcatcgcccacggcggcgaaaaatacagcgagtctgttttgatcgaccaggccgtaatggacgaactcaatgcctgcattccgcttgcgccgctgcacaaccccgccaacatcagcggcatccttgccgcacaggaacatttccccggtctgcccaatgtcggcgtgatggatacttcgttccaccaaaccatgccggagcgtgcctacacttatgccgtgccgcgcgagttgcgtaaaaaatacgctttccgccgctacggtttccacggcaccagtatgcgttacgttgcccctgaagccgcacgcatcttgggcaaacctctggaagacatccgcatgattattgcccacttaggcaacggcgcatccattaccgccatcaaaaacggcaaatccgtcgataccagtatgggtttcacgccgatcgaaggtttggtaatgggtacacgttgcggcgacatcgatccgggcgtatacagctatctgacttcccacgccgggatggatgttgcccaagtggatgaaatgctgaacaaaaaatcaggtttgctcggtatttccgaactttccaacgactgccgcaccctcgaaatcgccgccgacgaaggccacgaaggcgcgcgcctcgccctcgaagtcatgacctaccgcctcgccaaatacatcgcttcgatggctgtgggctgcggcggcgttgacgcactcgtgttcaccggcggtatcggcgaaaactcgcgtaatatccgtgccaaaaccgtttcctatcttgatttcttgggtctgcacatcgacaccaaagccaatatggaaaaacgctacggcaattcgggcattatcagcccgaccgattcttctccggctgttttggttgtcccgaccaatgaagaactgatgattgcctgcgacactgccgaacttgccggcatcttgtag

SEQ ID NO: 43374 - DNA, 294 bp, Neisseria meningitidis; identical to SEQ ID NO: 36355

SEQ ID NO: 43375 - DNA, 396 bp, Neisseria meningitidis
atgccgtctgatgtcggaatacggcttcagacagcatttaaatggaagttaaaaatgaaaaaaatattttattttctgatggttgttttttctacaagcgtatgggcaggggatgctgaagacaatctgctcagcatccaatccggttaccgcgccttattgcaaaagcaaaacaatctggacggaaaaatcatcgggatgcagtcggatttggaagatgcgcgccggcgtttgcagacggctcaggcagacatcgcccgtttggaagcggaaattcctgcagcaatggcgcaaaaagcccggcaggctgaagatttgaggcaaatcggagtgcgtttggaccatgcttggaatgcggtttacggcgcagggggaacgaaggcgtcggggaattga

SEQ ID NO: 43376 - DNA, 324 bp, Neisseria meningitidis
atgtctattttggaagagaatgtaattgattcagcctctattgaaaacggaatactcatattaactatttctgatcacttaaaatgggataacgagcatttgtttttgttgcaagaaaaaataaattcatatattcaatatattgaatcaggtcaaatttttgaagattttggagaaagtagctatgagactattgaaatacagcttatatataaatataaaccaaatgaaaattatagaaaatttttatatcgcctagaaggtgctttattaaaacttaaattacggttttcccatggaactatctcatatttttatagttga

SEQ ID NO: 43377 - DNA, 780 bp, Neisseria meningitidis
atgcatatcatcgattcgcactgccacctcaattttgaaggtttgaaagaacgcctgcccgaagttttgtccaacatggaagcaaacggcgtggggcaggcactcgccatcagcgtcagtagggaaagcttctccgaagtctttgccatcgccgaagcgcacgaacacatctattgcaccataggcgtacatcccgacagcaaggaagccgaagaattttccattgcggaaatggtcgaagccgccgcccatccgaaagtggtcggcatcggcgagacgggtttggattattactggtgcaaaggcgatttgtcctggcaacacaaacgctttgcagaccacatcgaagcagccaatcaaaccggactgcccgttatcgtccatacgcgtgatgcggcggcggacaccttgtctatcctgaaagaatgccgggttaattcgggcgttatccactgtttttccgaagacatcggttttgcccgtgcagcaatggatttggggctttatatttctttctcgggaatcgttacctttaaaaacgcacccttggttcaggaggcggcgaaatatgtgccggacgaccgcattttggtggaaaccgatgcgccgttcctcgcccccgttcccaaacgcggcaggcagaacgaaccggcttttgtgcgccataccgccgaacatatcgccaaattgcggaaccaaacattggaacaggttgcggcatatacgacggaaaacttttaccggctgtttaaaaaagtacccgatatgcggaccgtctga

SEQ ID NO: 43378 - DNA, 1374 bp, Neisseria meningitidis
atgagtaatccattttcctctttaggtttgggtacggaactcgtttccgcactgaccgcgcaaggttacgaaaacccgacgcccatccaagccgccgccattcccaaagcactcgccggtcatgatttgctagccgccgcgcaaaccggcacaggcaaaaccgccgcctttatgctgcccagtctggaacgcctcaaacgttacgccaccgccagcacctcgcccgcgatgcaccccgtgcgtatgctcgtcctcacccccacgcgcgaacttgccgaccaaatcgaccaaaacgtgcagggctacatcaaaaacctgccgctgcgccacaccgtcttgttcggcggtatgaatatggacaaacagaccgccgacctgcgtgccggctgcgaaatcgtcgtcgccaccgtcggacggctgctcgaccacgtgaaacagaaaaacatccatttgaacaaagtcgaaatcgtcgttttggacgaagccgaccgtatgctggatatgggttttatcgacgacatccgcaaaatcatgcagatgctgccccgccaacgccaaaccctgctcttttccgccaccttctccgccccgatacgcaaactggcgcaagacttcatgaacgcgcccgaaaccgtcgaagtcgccgcgcaaaacaccaccaacgccaacgtcgagcagcacatcatcgccgtcgataccattcagaagcgcaacctgctcgaacggctgattgtcgatttgcatatgaaccaggtcatcgtgttctgcaaaaccaaacaaagcgtcgaccgcgtaacgcgcgaactggtgcgccgcaacctgtccgcacaggcgatacacggcgaccgttcccaacaaagccggctcgaaacactcaacgccttcaaagacggcaacctgcgcgtcctcgtcgccaccgacatcgccgcgcgcgggctggacattgccgaactgcccttcgtcatcaattacgaaatgcccgcccagcccgaagactacgtccaccgcatcgggcgcacggggcgcgcgggcgcggacggcgtggcgatttccctgatggacgaatccgaacagaaaatgtttgaatccattaaagagctgaccggcaacaagctgctcatcgagcgcatcgagggcttcgagccgcaatggtgggaacagggcggcgcaaaaccggaaaaacccgaaatgcgcgaaccgagacaacgcaaccgctacgaatccgccaaagcgcaacgcgaaaaaaacacccggccggaaaatgcggcaaacgatgcgggcgcggcttgcggaaaaattgccggacgcagccgccgaagccgccgggaacaccggacgtgcgccctgctccaaccgcgttacggcgtaaaatag

SEQ ID NO: 43379 - DNA, 678 bp, Neisseria meningitidis
atgaatttatttgccgtctgcttcagacggcattttgagtcattgggaacggcagactgcaatcatgaaaacctcgaacttttccaagagaacatccgcaatgaaaacttttgccctgatactggccggcggtcaggcgagccgtatgggaggcgaggacaaagggcttgctcttttgggggtaaggcactgatagaccatgtcatcgacagggtcaggccgcaggtcagccatatcgccatcagcaccaaccggaatttggaagaatatgctcgaagaagtccgcatatttttcccgatgcgcggcagtggcagcatttcggcccgctttcggcattgtgtaccgcagccaacgatttgcagttggcggctgctgactggcttttggttgtgccgtgcgatatgccgtatctgccggacgatttggtggcgaggtttgaaaccgtgtcgaaacgcacaccgttgtgcaatgcgtattatgtggaaacgccgataacgatgcactacaacattatgtatatccgcccgcagattctgcaaagcgcgattccctatctgttttcgggtatgaaaacattaagaagctggttgcagcagcaaagggcgcggccggtcagattcgagtttgacgggcattttgccgacttgaacacgcaaatcgatttgcaggagggataa

SEQ ID NO: 43380 - DNA, 1473 bp, Neisseria meningitidis
atgaaccagacaagccgcgatctgacccgcatcagccacaacactaaaatcgtcgccacccttgggccgggcagcaacaacgtcgaactgttggaagacatgatccgcgtcggcggtctgaacgtcgtccgcttcaacttcagccacggcacgcccgaattccatcaggaaaacgccctcatcgtgcgcgaggcggcaaaacgcgccggacaggaaatcgccatcattgccgacctgcagggcccgaaaatccgcgtgggcaaaatcgccggcggcggcatcgaattgaacaaaggcgaaacgctggtactggatgccgcgctcgaaggcgaaggcacgcgcgaggcggtcggtttggactaccgcgacctgcccgacgacgttgccgcaggcgatgtcttgtggctggacgacggcctgctgaccctgaccgtggaatccgtcgaaggcagcaggattatcacaagggtggaaaacagccacgtcctgaaaagcaacaagggcatcaacaaacgcggtggcggtctgtccgcaggcgcgttgaccgaaaaagacttccgcgacctgaaaaccgcgattgccatcggttgcgactacctcgccatcagctttgtgaaatccgccgaagatttgcatatcgcgcgcgccaaagtcgaagaagaaatgaagggcagcacggccgtgcgccccggtttggtttccaaaatcgaacgcgtggaagcgattgaaaacttggacgaaatcatcctcgccggcgacggcattatggttgcgcgcggcgacttggcggtcgaagtcggacacgccgccgtccccgccctgcaaaaacggatgatccgccgcgcccgcgagttgcgccgcttcagcattacggcgacgcaaatgatggaatcgatgattaccaaccccgtaccgacccgcgcggaagtcagcgatgtggcaaacgcggtattggacggtaccgatgcggtgatgtgttccgccgaaaccgccgtcggcgcgtatccgtttgaaaccgtcagccaaatggcgattatctgcgcggctgcggaaaaagagcaggattcgctcaacggcgttgccgaacaggtcgagtatcccgaagcggtcagcaccaacctggcggttgccggcggtgcggtcagcgtggcgcgcgcggttcacgccaaagccatcgtcgccctgaccgaaagcggttcgaccgcctttgaaatcagccgccacaacatcaccctgccgattttcgcgctgaccccgagcgtttccgcccaacgccgtatggcgatgtaccggggcgtgcgcccgctgattttggcaaccagtaccgaccacgacacggcgttaaacgaagtcgaaacgatgctggtggaacacaacatcctgcattccggcgaccaatacatcattaccagcggttcgcaaatgcgcgaatccggttcgaccaacacactggaagtgctgcgcgtcaaataa

SEQ ID NO: 43381 - DNA, 318 bp, Neisseria meningitidis
atgaatatattaccaagctggctgcgagtcggtatgaatatagcaatgctgggcatgatacactcagatatcaggttaattaccgtagattacgaggaaggaagaaggtttttaaaaatcaaaaattatttatcaagagaagccatcacagaagaccatgaagatatggaatatttgattacagagttatggtctatgtgtggagaatattttgatgaagctgactttgaatgtatttattctaatcattcttctatggagttaaaccaaataaatggtgcagtattcaggagaaaggaattaatttcgcaagcgtag

SEQ ID NO: 43382 - DNA, 2751 bp, Neisseria meningitidis
atgctgacaaacattgccaagaaaatcttcggcagccgcaacgaccgcttgctgaaacaataccgtaaatccgttgccagaatcaacgcgctcgaagaacagatgcaagccctaagcgatgctgatctgcaagccaaaactgccgaattcaaacaacgcctcgccgacggtcagactttggacggcattttgcccgaagccttcgccgtctgccgcgaagcgtcccgccgcaccctcggtatgcgccacttcgacgtgcagcttatcggcggtatggtgctgcacgacggcaaaatcgccgaaatgcgtaccggcgaaggcaaaaccttggtcgccaccctcgccgtctatctcaacgcgctggccggcaaaggcgtacacgtcgttaccgtcaacgactacctcgcctcacgcgatgcgggcattatggagccgctctacaatttcctcggccttaccgtgggcgtgattatttcagatatgcagccgttcgaccgtcaaaacgcctatgccgccgatatcacctacggcaccaataatgaattcggcttcgactacctgcgcgacaatatggttaccgaccaatacgacaaagtgcagcgcgaattgaattttgccgttgtcgatgaagtggattccatcttgattgacgaagcgcgcactccgctgattatctccggtcaggcggatgacaacatccagttgtaccaaatcatgaacaccgttccgccccacctcgtccgtcaagagacagaagaaggcgaaggcgactattgggtcgacgaaaaggcacatcaggtcatcctgagcgaagcaggtcacgaacacgccgagcaaatcctgacccaaatgggattgctggcagaaaacgactccctctattccgccgccaatatcgccctgatgcaccaccttatggcggcattgcgcgcgcattccctcttccacaaagaccaacattacgtcatccaagacggcgaaatcgtcatcgtggacgaattcaccggccggctgatgtccggccgccgctggtcggagggtctgcatcaagccgtcgaagccaaagaaggcgtggaaatcaaacgcgaaaaccaaacgcttgcatctattaccttccaaaactatttccgcctgtacaccaagctctccggcatgaccggcacagccgataccgaagccttcgagttccaaagcatctacaacctcgaaaccgtcatcattccgaccaaccgccccgtacagcgcaaagacttcaacgaccagattttccgttccgccgaagaaaaattcgaagccgtcgttaaagacattgaggaatgccacaaacgcgggcagcccgtcctcgtcggcaccaccagcattgaaaactccgaactggtatccaagctgctgacccaagccggactgccgcacaacgtcctcaacgccaaagaacacgaacgcgaagccctgattgtcgcccaagccggcaaagtcggcgcgattaccgttgccaccaatatggcgggacgcggtacggacatcgttttaggcggcaacctgaagcaccaaaccgatgccatccgcgccgacgaaaccttgagcgacgaagagaaacaggcacaaatcgccgcactcgaagacggctggcaggcggaacacgacaaagtgatggaagcaggcggtttgcacatcatcggtacggaacgccacgaaagccgccgcatcgacaaccaattgcgcggacgttccggccgtcagggcgaccccggatccagccgcttctatctctcctttgaagacccattgctgcgcttattcgcactcgaccgcgccgccgccatcctcaaccgcctcgcccccgaacgcggcgtcgccatcgaacacaacctgctgacgcgccaaatcgaaggggcgcaacgcaaagtcgaaggcagaaacttcgatatgcgcaaacaggttttggaatacgacgacgttgccaacgaacagcgcaaagtcatttacagccagcgcaacgaaattctgaccagcaaagacatcagcgacctgatgcaggaaatccgttctgatgtcgtcagcgacctcgtggatacctatatgccgcccgacagcatggaagaacaatgggacatcccgactttggagaaccgtctggctgccgaattcagactgcacgaagacatccaatcctggctgaaggcggacaatgcgattgacggtcaagacatcaaagaacgcctgatcgaacgcatcgaaaacgaatatgccgccaaaaccgaactggtcggcaagcaggcaatggccgatttcgagcgcaacgtgatgttgcaggtcatcgacaaccaatggcgcgaacacctcgccgctatggactacctgcgacaaggcatacacctgcgcagctatgcccaaaaaaatccgaagcaggaatacaaacgtgaagcctttaccatgttccaagacctgtggaacggcatcaaattccatattgcctccctgcttacctcggttcaaatcgaacaaaaccctgtcgcggtggttgaagagcaacccatcggcaacatccagtccatccattccgaatcgcccgatatggaagaacttttgggtcagtcgcaaaccgatctggttaccgaagcctttaatcccgatgggacagatttcagccccgaagccttggaagcgcgggggcaaatcgtccaccgcaacgacccctgcccctgcggcagcggtttgaaatacaaacaatgccacggcaaactggcttaa

SEQ ID NO: 43383 - DNA, 966 bp, Neisseria meningitidis
atgagctacacgcaactgacccaaggcgaacgataccacatccaatacctgtcccgccactgcaccgtcaccgaaatcgccaaacagctgaaccgccacaaaagcaccatcagccgcgaaatcagacggcaccgcacccaagggcagcaatacagcgccgaaaaagcccagcggcaaagccggactatcaaacagcgtaagcgacaaccctataagctcgattcgcagctgattcagcacatcgacccccttatccgccgcaaactcagtcccgaacaagtatgcgcctacctgtgcaaacaccaccagatcacgctccaccacagcaccatttaccgctaccttcgccaagacaaaagcaacggcagcacgttgtggcaacatctcagaatatgcagcaaaccctaccgcaaacgctacggcagcacatggaccagaggcaaagtacccaaccgtgtcggcatagaaaaccgacccgctatcgtcgaccagaaatcccgtatcggcgattgggaagccgacaccattgtcggcaaaggacagaaaagcgcattattgaccttggtcgaacgcgttacccgctacaccatcatctgcaaattggatagcctcaaagccgaagacactgcccgggcagctgttagggcattaaaggcacataaagacagggtgcacaccatcaccatggataacggcaaagagttctaccaacacaccaaaataaccaaagcattgaaagcggagacttatttttgtcgcccttaccattcttgggagaaagggctgaatgagaacaccaacggactcatccggcaatacttccccaaacaaaccgatttccgtaacatcagtgatcgggagatacgcagggttcaagatgagttgaaccaccgaccaagaaaaacacttggctacgaaacgccaagtgttttattcttgaatctgttccaaccactaatacactag

SEQ ID NO: 43384 - DNA, 1245 bp, Neisseria meningitidis
atgtccaacgaaaaccgtacttgttccttttgcggaaaatccaaatcacacgtcaaacatttaattgagggcgaaaacgcctttatctgtgacgaatgcgtctcaaactgtattgaaatattgcatgaagacggaaatgacggcacgccttcggaaagtgccggaggggagccggaagaatccggcaagctgcccacgcccgccgaaatcgtcgccaacctcaacgaccacgttatcggtcaggaacaagccaagaaagccttggcggtgtcggtgtacaaccattacaaacgcctgcgccatcctaaagcaggagctaatgtcgaattgtcgaaatccaacatcctgcttatcggcccgaccggatcgggtaaaaccctgctggcgcaatctttggcgcgcaaactggatgtgccgttcgtgatggcggatgccacaactttgactgaagcaggttatgtcggcgaagacgtcgagcaaatcattaccaagcttttgggcaaatgtgatttcgatgtcgaaaaagcccagcgcggcattgtctatatcgacgaaatcgataaaatttcacgcaaaagcgacaacccgtcgattacccgcgacgtatccggcgaaggtgtgcaacaagccttgttgaaactgattgaaggtacagtggccagcgttccgccccaaggcggccgcaagcatccgaatcaggaatttatcaacgtcgataccaccaacatcctgtttatctgcggcggcgcgtttgcaggcttggaaaaagtcatccgccagcgtactgaaaaaggcggtatcggtttcggtgcgtccgttcacagcaaggacgaaaatgccgacattaccaagctgttcggcatcgtcgaaccggaagacttgattaaattcggtctgattccagaattaatcggacgtttgcctgtgattgcaactttagaagaattggacgaagacgcgctgattaatattttgaccgagccgaaaaatgctttggtcaagcagtatcaggcgttgttcggtatggaaaatgtcgaactggagtttgaagaaggcgcattgcgttccatcgcgcgtcaggcaatggaacgcaaaaccggcgcgcgcggcctgaggtccatcgtcgaacgctgcctgctcgatacgatgtaccgcctgcctgatttgaaaggcttgaaaaaagtggtggtcggtaaggcagtcatcgaagagggcagggaaccggaattggtgttcgagtcctga

SEQ ID NO: 43385 - DNA, 747 bp, Neisseria meningitidis
atgaacgttttgatttccaacgacgacggctacctctccgaaggcattgccgttttggcgcgcgttacggcggaatttgccaacgtcagggtggtcgcgcccgaacgcgacaggagcggggtcagcaattcgctgacgctggaacgccctttgcagttgaaacaggcgcaaaacgggttctactatgtcaacggcacgccgaccgactgcatccacatcgggcagtctgtattttcggattttcaggccgattttgtcttttcgggcatcaaccggggcgcgaatatgggggacgacacgctttattcggggacggttgcggcggcaaccgaagcctaccttatgggcatacccgccgtggcgttttccttaaacgacgcttccggacgctattgggcgaccgcagaacaggcactgtggacattgttggcgcattttttcaaaaaccccccgcagtcccctattttgtggaacatcaatatccccgccgttgcgccggaagatgtgcggggcattaaaatcgcccgtttgggcaggaggcatcacggtcagaacgtcattcccgcgcgcaatccgcgcggcgaacagatttattggataggaccggtcggcgaagtttccgatcgggaagagggaacggatttcggtgaatgcggcgcaggtttcattaccgtaacgccgctgcaaatcgacctgaccgcctatccggacatggcggaaacagcggcgttctggcatgcggactga

SEQ ID NO: 43386 - DNA, 372 bp, Neisseria meningitidis
atgagaaaaccccaacgcggctatgcccgccaagaccgtgtcaaagaacaaattatgcgcgagcttgccgaactcgtccgtaccggactgaaagacccgcgcgccggcttcattaccgtcaacgaagtcgaagttacccgcgattacagccacgccaccgtgttctacaccattttaaaccaagacgcgcgcgaaattacggaagaagtgctggaacacgcgcgcggacacctccgcagcgaattggccaaacgcatcaagctgttcaaaacgcccgaactgcatttcaaatacgacgaatctttggaacgcggtttgaacctgtccgcccttatcgaccaagtagcggcggaaaaaccggttgaagactga

SEQ ID NO: 43387 - DNA, 942 bp, Neisseria meningitidis; identical to SEQ ID NO: 43207

SEQ ID NO: 43388 - DNA, 966 bp, Neisseria meningitidis
atgagctacacgcaactgacccagggcgaacgataccacatccaatacctgtcccgccactgcaccgtcaccgaaatcgccaaacagctgaaccgccacaaaagcaccatcagccgcgaaatcagacggcaccgcacccaagggcagcaatacagcgccgaaaaagcccagcggcaaagccagactatcaaacagcgtaagcgacaaccctataagctcgattcgcagctgattcagcacatcgacacccttatccgccgcaaactcagtcccgaacaagtatgcgcctacctgtgcaaacaccaccagatcacgctccaccacagcaccatttaccgctaccttcgccaagacaaaagcaacggcagcacgttgtggcaacatctcagaatatgcagcaaaccctaccgcaaacgctacggcagcacatggaccagaggcaaagtacccaaccgtgtcggcatagaaaaccgacccgctatcgtcgaccagaaatcccgtatcggcgattgggaagccgacaccattgtcggcaaaggacagaaaagcgcattattgaccttggtcgaacgcgttacccgctacaccatcatctgcaaattggatagcctcaaagccgaagacactgcccgggcagctgttagggcattaaaggcacataaagacagggtgcacaccatcaccatggataacggcaaagagttctaccaacacaccaaaataaccaaagcattgaaagcggagacttatttttgtcgcccttaccattcttgggagaaagggctgaatgagaacaccaacggactcatccggcaatacttccccaaacaaaccgatttccgtaacatcagtgatcgggagatacgcagggttcaagatgagttgaaccaccgaccaagaaaaacacttggctacgaaacgccaagtgttttattcttgaatctgttccaaccactaatacactag

SEQ ID NO: 43389 - DNA, 501 bp, Neisseria meningitidis; identical to SEQ ID NO: 37165

SEQ ID NO: 43390 - DNA, 2940 bp, Neisseria meningitidis
atgagcggttttaattacgagaaaaaccagccgcaccaaatgcgggcggtttcggcggttttgggcgtgtttgacggggcaacgcccaaatatcggacggcagacgaaaatcccgaacttttgtttgctgcaaaacaatacgcaaacaatatcctgaaagtgcaaagccaaaacggtatagacggccgattccccgaccgttcggacgaccaaaatatccttgatatttccatggaaacgggcacgggcaaaacctatacctacacacaaaccatgttcgagctgcaccgttggctgggcgtgttcaaatttatcgtggtcgtgccgactttgtccattaaggcgggaacacagcagtttttgcaaagcaaggctttggcagagcattttgaacaggatttcggcggcgattatgaaggcgtacgcctgaaaacctatgtggtggaaagcgcgaaaaagaataagggcaaaaagtccaatgcgcccataacgattgagcaatttgtcaaagcggaaaacaaaaaggaaattcatgtgctgctgattaacgcgggcatggttaattcgtcgtccatgaacgatacgggcgacaaggcattgaaggatttgtttgacaatcccgttgatgcattggctgccgtgcgcccgtttatgattgtggacgaaccgcataaattcccgacccgagatagcgcgaaaacgtggggcaatatcaaacgcttaaaaccgcaatatattttgcgctacggtgcaacatttaacgatgaatattacaacttgctttaccgtttgacggcagtagacgcgtttaacgacgggctggtcaaaggcgtgcgcgtgtttcaggaagaaatgcagggcggcatggatgcggcggtaaaactggtgtcgtcggacggcaaagaagcgaaatttgaattaaacgaaaaggacaaaaagcagacgttcaaactggcaaaaggcgaagatttggcgcaaatccatccggctatttcggatttgaaaatcgacaaaatgaataaaaccgtggtggtgttaagcaacggcttggagttgaaaacgggtgccgtcatcaacccttattcctattcgcaaacggtgcaggatgcgatgatgcagcgggcggttgccgaacatttcaagctggaacgcgcgcttttggcagaacgcgcgccacagcccaaaatcaagccgctgacgctgttttttattgacgatatcgcgggctaccgcagcggcaacgagctttcaggcagcctgaaagataaatttgaaagctggattcgcgcggaagcggcacgccgtctgaaaacggaaagcgacccgttttaccgcgattacctgcaaaagacgttggacgatgtatccgcctgccacggcggctatttttccaaagacaatacagacagcgacgatagaatcgagcaggaaatcaatgaaatcctgcacgataaggaaaaactgctgtctttggacaacccgcgccgctttattttttccaaatggacgctgcgcgaaggctgggacaatcccaacgttttccagatttgcaaactgcgttccagcggcagcacgacttccaagctgcaagaagtcggacgcggcctgcgcctgccggtaaacgagctgatggcgcgggtgcgcgatgtaccgtacaaactgaattattttgtcgatagcagcgaaaaagactttgtgaagcagcttgtcggcgaaatcaacgacaattcttttcaggaagaaatctccaaaaagtttaccgaagagctgaaacaaaaaatattgcaaaaataccccgatatcaaaccgctggtattggtaaaccaactgtttttagatggcatcattgacgacaatgaaaactttgccgaagacggctatgacaaattaaaagccgcctatcccgaagccttccccaaaggtttggacaaaggcaaagtcagcaacgccaaagacgaaggcaaagacaccatcatcatgcgcgaaggcaaatatgaagaactcaaagccttgtgggagctgattcaccataaagccgttttgcagtataaaatcaaggatgaagccgaatttgccgatttatttaccgcctatttgcatgaaaacgctgccaaattcccacaggcaggcatacgcacggcggtaaacgaagcttatatcaacaacgggcttatgctttcccgccgcatagacagttttgaagatgaagattttatccgtttcaacacaatgacttaccgagagtttctggaaaaactggcacaaacggcaaaaatccgtatgcagactttgcatcaggcgttttactgcatccgcaacgaactgaacattggcgattttttgaatatgcaaaccatcgcccaaatcaaaaacggcttcaaccggtttttgcttcatcattccttccataaattcgaactggattaccggcttgtcggcagcaaaatccatccgaccaaatttaccaataaagacggcaaaccgcgcgcggtgaaaaaagcagatttgggcagatttgaagatacggagcaccggcctgccgccggctatctcttcggcgagattttctacgattcggatatagaacatgaaaatgtcgccaacaaccaaattgaaggcgtaatcgtatttaccaaaataccgagaaactccatcaaaatccctgttgccggcggcggcacgtattcgcccgattttgcctatatcgtgaaaaccaaaagcggcgagatcctgaactttgtgattgaagccaaagggactgacggggcggaagatttgcgaaaaagcgaagagcggaaaatcaaacatgccgaaaagctgtttgccgagatttccaaagaaatcaaggtggtgttcaaaacgcagtttgacggcgagaggatagccgaactgatcgggcaaaatatgcccgcaggcgggcattctgaaaacgggcgttaa

SEQ ID NO: 43391 - DNA, 555 bp, Neisseria meningitidis
atgaacaatatgtttgccgcaaaattgtccaaactggtttataccgcttccgaccatcctgattccctgtcggagatggaggagtttgaccgcctgattctgctgatacgcaaactgtatcaaatattggacgggcaacatatcctctccagagtaacggtttgccttcaccaccaaaaccggcgcgacctgattgccttggataaagcggctgccggttgcgattcggcaatgttgcgcgcccaacgttggctcatctacacgcaaattgcggaacgccttgccgggtcgggcggcggtttcacggttacggtagaaagcgtgtccgccgcctgtccggagcttgaaggacgctatctcgagcttgtccgccgcgccgccgtctctttcggtttcacgcaaggatgggaaaatccggcaggcgggcaggaaaaaacacaagccgtcccggatgccgcatcgggtcattccgtcagaaaaccaatcaaaatcaatatagaagcgagagtggaacgctatccggcatactgcccgaccgtcgccctaaaagtatag

SEQ ID NO: 43392 - DNA, 372 bp, Neisseria meningitidis; identical to SEQ ID NO: 40198

SEQ ID NO: 43393 - DNA, 456 bp, Neisseria meningitidis
atgttcggcggcgcacacgaattaagcatcgacagtaaggggcggttggctgttcctgccaaattccgtgacattctgtcgcgcctctatacgcctgccgtagtggtaacgctcgagtcgaaacacaagctgttgatgtaccctgttgcggagtgggaaaaggttgcggcgcaacttttaaacttaaaagtggcggataaccctgttttgcggcggtttcaaaatcttttgctgcataacgcggaaattttggaatgggacagcgccggccgggtgctggtttctgccggactgaggaagagggtggatttcgaccgtgaagtcgttttggtcggtcgtgccaaccgtttggagctttggggtcgcgagcagtgggaggctgagatggttcaggctttggatgacgatcctgacgaacttgccttccagttgagtcagacggatttgcaattgtga

SEQ ID NO: 43394 - DNA, 531 bp, Neisseria meningitidis
atgaacgcaatccgaactttccaaaaccgcacgcccgaaatccacgaaacctgtatgatagacgaagcctgcgtcgtcattggcgaagtgtcgcttgccgaagatgtttccgtgtggccgtgcgccgtgttgcgcggcgatgtgaacagcatcaccgtcggcgcgcgcagcaatatacaggacggcagcgtcttgcacgtttcccacaaaaccgccgccaaacccgaaggatcgccgctggttatcggcgaagacgttaccgtggggcacaaagtgatgctgcacggctgccgtatcggcaaccgcgtcctggtcggcatggggacgacggttctggacgatgccgtgattgaggacgaagtgatgatcggcgcgggcagcctcgttccgccgcgcaaacgcttggcgggcggctatctttatgtcggttcgccggtcagacaggtgcgcgtgctgaccgatgaggaaaaagcctttttgaaatattccgccgcgcattatgtgaagctgtcgaaacagtacgggatgtga

SEQ ID NO: 43395 - DNA, 483 bp, Neisseria meningitidis
atgaaatacttgaatcttgccgcaatcacccttgccgccacatttgccgcacataccgcctcggcagacgaactggccggatggaaagacaacaccccgcaaagcctgcaatcgctcaaagcccccgtacgcatcgtcaacctttgggcgacttggtgcggcccgtgccgaaaagagatgcctgccatgtccaaatggtacaaagcgcagaaaaaaggcagcgtcgatatggtcggcatcgcgctcgacacatccgacaatatcggcaacttcctcaaacaaactcctgtttcctacccgatttggcgttacaccggggcgaacagccgaaactttatgaaaacctacggaaacactgtcggcgtactgccctttaccgtcgtcgaagcaccgaaatgcggatacaggcagaccattaccggggaggtaaacgaaaaaagcctgaccgacgccgtcaaactcgcccattcaaaatgccgttaa

SEQ ID NO: 43396 - DNA, 1176 bp, Neisseria meningitidis
atgcagaatatttttgaccctttggttattcgtggaaaatcccttacccccatcgtgcaaggcggtatgggggtcggtgtttccgcatcgggtttatccagcgcggtggcgcgtgaaaacggtatcggaacgattgccagtgtggatttgcgccaccttcacgaagacctactcgccgaatcacaaatcaatccgagtgaagagaaatatacatctttgaactgtaccgcattagacagggaaatccaaaaagccaaaagcgcttcagagggaaaaggactgattgcggtcaacgtgatgaaggcggtcaaagaccacgccgcatatgtccgccaggcttgcgaatcaggggcggatgcggttgtaatgggtgccggcctgcctttagacctgccggaaatgaccgagggctatcataaagatgtcgcgctgctgccgattctgtccgaatcgcgcggtattaatatcgtcttgaaacgttggatgaaaaaaggcatattgcccgatgcgattgtagtcgaacatcctgcccacgcggccggacatttgggtgcatcaaccgttgaaggcgtaaacgatgccaagttcgacttcaaacgcgtgattgaggaaacgtttgaagttttcaaaagtttagggctggaaagcgaaaaaatcccgcttattcttgcgggaggcatggcaaattttgaaaaagtcaaaaccgccctaaagaactggggagcatccgccgttcaaatcggtacggcttttgccgttaccgaagaaggagatgcacaccttaacttcaaaaaaacgctcgccggtgcggaaactgaaaaagtagtcgaatttatgtctgttgccggtttgccggcgcgcggtgtccgcaccaaattcctagacagctacatcaagcgtgaaagcaaacttcagacaaacgccaaagccgacccgcgccgctgtacccaaggtttaaactgcctaaccagttgcggtctgcgcgacgggctttccaaagcaggacagttctgtattgatatccagcttgccgccgcattccgtggagaagtagataaaggcctgttcttcagaggtaaagacccgctgcccttcggcaatgccatccgcaccgtccgcgagacgatacaatatctgctgacggggagcgaacctgttgcaacgctcggacgctga

SEQ ID NO: 43397 - DNA, 1344 bp, Neisseria meningitidis
atgtttcacagtgtcaatgtatttacgggcgaaacgctttaccgccgccccgctcaagattatgcggagtttgaacggcggctggcggatttgaaaatgcgcggcggggcgttcgcgcaactgggcgtaaccgaacgtgccgcgcgcctgcaaaaatttgccgaccgtttggaggcggagaaagagcgttttgcggaaatggtgtgtgaggaagtcggacgctgcttgcacgaatgccgtgcggaaatcggcaagtctatcgaactgatacgctattacgcccgccttgcccccgaactgcttgcccacaaaaccatcgcgacgcaggcgagtttgagtcaggtgcgcttcgagcctttgggcgtggtgtttgccgtcatgccttggaactatcccgtctggcaggtattgcgtttcgccgttcccgctatgtgcgcgggcaacgcgtgcgccgtcaaacccgcgcccagcgtggcacgcgtcagtcaggcactgttcgatttggcttcagacggcattcctctggcaggcgtgtggctggatgaggcgggcacgctcaaggcggttgaagataccgatgcaatggcgtttaccggttcaacgcatacggggcgcatccttgcggcacacgcgggcgcaaaccttaagaaaaccgtgttggagctcggcggtagcaacgcctttatcgtgatgcccgatgctgatttggagcgtgccgccgcagaagcctgttattcccgtttccgcgatgcggggcaatcgtgtaacgccgccaagcgcatcatcgtaaccgaagccgcagccgatcgttttatcacgctgtttcttgccgaatgcgctaaattgaaaatgggcgaccccaaacatcccgatactacgcttgcaccgctgcaccgcgaagatttgcgggacagggttcacgggcaggttgaagatgccgtttcaaacggcgcggtatgcctgaccggcggaaaaatcccacaagggcgaggctggttttatcccgcgacggttttagacagggtaaatcctgcctgccgcgtctggagagaagaagtattcgggccggccgccctgattttgcgcgccgaaaacgaagaacatgccatcgcccttgccaatgattccccgttcgggctcggtgcctgcatttataccgccgataccgaacgcgcttggcggtttgccgaaaaaatacaggcgggatcggtgtttatcaaccgccataccagcagcgatttgcgcctgcctttcggcggagtcaaagattccggttacgggcgcgaattgtccgaattcgggctgtacgagttcgtcaacgtcaaaacctactggcagaaatga

SEQ ID NO: 43398 - DNA, 957 bp, Neisseria meningitidis; identical to SEQ ID NO: 42418

SEQ ID NO: 43399 - DNA, 465 bp, Neisseria meningitidis
atgattgagatgagtaaagattaccgaaacgatttgtacgatgtatatgtttcttacccgccccaagtggatcgcgggcttatccgggagtgccttaaggagaatctcggcgaggaaaaggcggaaggattgatcgaatcgctcgattccaaacctcaagtgctggttgaggaaaaatgcacttgggcgaaacgggaagagttgcatgattatttcagctatttgggtttggatattattacccggagatatatggagttggaaacggtcgtgccgccggaggaaggggagggcgaaggagaaggcgcggatggggaaatgcccgaatatcttgaacttcacggcgggcgggaagatgatatttccgcaccttcgcaacccgaaccgccgtcccgcaatatcaaactgctggttttcgggctgctgattgcctttttgggctatctgctcggtaagattttttga

SEQ ID NO: 43400 - DNA, 660 bp, Neisseria meningitidis
ttgtgtgcgtcctgtttgaatgttaacaaaatcgttataatcgcaacattctaccgcaatcctgaaaggccgtctgaaatgaggaacgaggaaaaacgcgccctgcgccgcgaattgcgcgggcggcgttcgcaaatggggcgggacgtgcgggcggcggcaacggtaaaaatcaaccacctgctcaaacgttatattaaaaaagggcggaaaatcggcgtgtattggccgatgggcaaggaattgcgtttggacggctttgtccgcgcggcgcaaaaacgcggtgcggaactctacctgccttatatcgaaccgcgttcgcggcggatgtggtttacgccgtatcctgccgatggagtaaaacaagaacgcaagcgcggtagggcgaagctgcatgtccctcagtttgcaggtcggaaaaagcgtgtgcatgatttgaacctcctgcttgtgccagtggtcggtatggacaggctgggctaccgcttgggacaggcaggcggctattacgatgcgacgctttcagcgatgaaataccgtttgcaggcaaaaaccgtgggcgtgggctttgcctgccagttggtggacaggctgccggtcgaggcgcacgaccggtctttggacggttttgtgtcggaggcggggatattgtgtttttag

SEQ ID NO: 43401 - DNA, 1131 bp, Neisseria meningitidis
atgaaaatcgtttttatcacaacagtcgcatccagcatttacggtttccgcgcccccgtcattaaaaaattaatcggcaaaaaccatcaggtgtatgcctttgtatcggagttttccgacaatgaattggatattatcagggaaatgggggttacacccgttacctaccgttcaaaccgcagcgggctgaacccgttttcggatataaaatccaccttcctcatctttaaagaactcaaaaaaatatcgccggatttggttttcccttatttcgcaaaacccgtgattttcggcacttttgccgcaaaactggcaggcgtgcccagaatcgtcgggatgctggaaggtttgggattcgcatttaccccgcagccggaaggcataccgttaaaaacaaaaatcataaaggggattttgattgccttataccgcattgccctgccgatgttggaaagcctgattgtattaaaccccgacgacaaagacgaactgacggacaaatacggcatcaaaataaaaaacatccatattttgggcggaatcggtctggatttgcggcaatatccttattccgaggcggatattcccgatgaaaaagaacccgtaaaattcctctttatcggcagatttctgaaagaaaaggggattgatgattttattcgggcggcggaacaggttaaggacaaataccccgatacggtttttaccgctttgggcgcaatcgacaaatcacgcgggggggggggcgatttggaacggcttgccgcccgcgatattatccgtttccccggttttgtgaacaatgtttccgaagtgataaaagaacatcatatattcgtattgccgtcttattatagggaaggcgttccccgaagcactcaggaggcaatggccgtcggcagggcagtgattacgacggatgtccccggatgcagggaaacggtcgccgacaaggtcaacggcttcctgatcgagccttggaatccccgcatcttggccgaaaaaatgatttattttatcgaaaacagggaagccgtccgcctgatggggaatgcaagttatgcgattgccaaagataaattcgatgccgaaaaagtcgatttgaaattgctcgatattttgaaggcgtaa

SEQ ID NO: 43402 - DNA, 1116 bp, Neisseria meningitidis
atgaaagtaggtttcgtcggctggcgcggtatggtcggttcggttttgatgcagcgtatgaaagaagaaaacgacttcgcccacattcctgaagcgtttttctttaccacttccaacgtcggcggcgcagcccctgatttcggtcaggcggctaaaacattattagatgccaacaatgttgccgaactcgccaaaatggacatcatcgttacctgccaaggcggcgattacaccaaatccgtcttccaagccctgcgcgacagcggctggaacggctactggattgacgcggcgtcctcactgcgcatgaaagacgacgcgattatcgtcctcgaccctgtcaaccgcgatgtcctcgacaacggtctcaaaaacggcgtgaaaaactacattggcggcaactgcaccgtttccctgatgctgatggctttgggcggcctgttccaaaacgatttggtcgaatgggcaaccagcatgacctaccaagccgcttccggcgcgggcgcgaaaaacatgcgcgaactcatcagcggtatgggcgcggttcacgcccaagtggcggacgcgcttgccgatcctgccggctcgattctcgacatcgaccgcaaagtatccgatttcctgcgcagcgaagactatccgaaagccaacttcggcgtaccgctcgccggcagcctgattccgtggattgacgtggatttgggcaacggccagtccaaagaagaatggaaaggcggcgtggaaaccaacaaaatcctcggccgcagcgacaatccaaccgtgattgacggcctgtgcgtccgcgtcggcgcgatgcgctgccacagccaagccatcactctgaagttgaaaaaagacctgcctgtttccgaaatcgaaacgattttggcaggcgcgaatgactgggtgaaagtcatccccaatgaaaaagaagccagcatccacgagctgactcctgccaaagttaccggcacgctgtccgtccctgtcggacgcatccgcaaactgggcatgggcggcgaatacatcagcgcgttcaccgtcggcgaccaacttttgtggggcgctgccgaaccgctgcgccgcgtattgcgtatcgtgttgggcagcctgtga

SEQ ID NO: 43403 - DNA, 567 bp, Neisseria meningitidis
atgggtttttatgctttgctcttgattgctctggggatgtcgatggatgcgtttgccgtcgcattggcaaagggtgcggcggtcagaatgcctccgcgcaaaattgcggcaacggctttggtgttcggcacggttgaagcgctcacgccgctggcaggctgggtaggcggtttttatgccaagccgtttatcagcgaatgggaccattgggtggctttcgtcctgctgggcgggctgggtctgaaaatgatgcgcgaagggctgtccggcgaggcggaagatgtgcgcgaaagcaaacgggaaagcctatggatgacggttttgactgcttttggaaccagtattgattccatgatagtcggggtgggcttggcgtttatggaggtaaacatcgcctttgccgccgcaatcatcggtatggcgacgacggtgatggtggcggtcgggctgacggcgggaagggctttgggcgtattgttcggcaggtgtgcggaatttgccggaggtttggtgttgattgccatcggcacatggacgctcttgtcgcatttgggtttgattcaatga

SEQ ID NO: 43404 - DNA, 4116 bp, Neisseria meningitidis; identical to SEQ ID NO: 42922
  misc_feature 4101, 4102, 4103, 4104, 4105: 'n' is a, c, g or t

SEQ ID NO: 43405 - DNA, 1839 bp, Neisseria meningitidis
atgtgcggtatcgtcggcgccatccgcgcccatcacaacgtcgtcgattttctgaccgacggtctcaaacgcctcgaataccggggttatgactcatcaggcattgccgtcaacaccgacggcaaaatcaaacgtgtgcgccgcgtcggacgcgtgcagcttatggaggacgcggcacgcgaaaaaggcatcagcggcggcatcggcatcggacatacgcgttgggcgacacacggcggcgttactgagccgaacgcccacccgcacatcagcggcggtatgattgcggtcgtacacaacggcatcatcgaaaactttgaaagcgaacgcaaacgtttggaaggtttgggataccgttttgaatcgcaaacggataccgaagtcatcgcacacagcatcaatcacgaatacgcgcaaaacggcggcaggctgtttgaagcggtacaagaagcggtcaaacgtttccacggcgcatacgccatcgcggttattgcccaagacaagcctgatgaattagttgtggcgcgtatgggctgcccgcttttggtcgctttgggcgacgatgaaacctttatcgcttcggacgtatccgccgtcatcgcctttacgcgccgcgtggcgtacctcgaagacggcgacatcgcgctgctggcttcagacggcatcaaaaggctgaccgataaaaacggcctgcctgccgaacgcaaagtcaaggtatccgaactctcgctcgcctctttggaactgggactgtacagccactttatgcaaaaagaaatccacgagcagccccgcgcgattgcagacacggcggaggttttcctcgacggcggcttcatccccgaaaacttcggcaaagatgccaaaagcgtgtttgaaagcatccgcagcgtcaaaatccttgcctgcggcacgtcctattacgccgcgctgaccgccaaatattggttggaatccatcgcaaaaatcccgtccgacgtcgaaatcgccagcgaataccgataccgcagcgtgattgctgattccgaccaactggtcattaccatttcccaatccggcgaaacgctggacacgatggaggcgttgaaatacgccaaatccttgggacaccgccacagcctctccatttgcaacgtgatggaatccgccctgccgcgcgaaagcagcctcgtgctttatacccgtgccggtgcggaaatcggcgtcgcctcgaccaaagcgtttaccacgcaactggttgcgctgttcggtttggcggtaacgctggcgaaagtgcgcggtttggtttccgaagaagacgaagcgcgttacaccgaagaactccgccagcttcccggcagcgtgcagcacgctctgaacctcgaacctcaaattgccgcatgggcgcaacagtttgccaagaaaaccagcgcgctgtttttagggcgcggcatccattacccgattgccctcgaaggtgcgttgaagctgaaggaaatcacctacatccacgccgaagcctatcctgccggcgaactgaagcacgggccgcttgccctggtggacgaaaatatgcccgtcgtcgtcatcgcacccaacgacagcctgttggacaaagtcaaagccaatatgcaggaagtcggcgcgcgcggcggcgaacttttcgtctttgccgacctcgacagcaattttaatgccaccgaaggtgtgcacgttatccgcgcaccgcgccacgtcggcaaactgtcccccgtcgtgcatactatccccgtgcagctcctcgcctaccacaccgccctcgcacgcggtaccgatgtggacaagccgcgcaacctggcgaaatccgtaaccgtcgaataa

SEQ ID NO: 43406 - DNA, 1089 bp, Neisseria meningitidis
atgaatgactacacgcagcagcttcaaggtaaaaaagactaccttaaaaccctttttgcaggtttggatgttcctgagtgggaagtgtacgaatctccggacaaacattaccgtatgcgtgccgagttccgtatttggcacgaaggcggggaaatgttttatgccatgtttgaaaaagggcagaaagccagcggcgcaagcatgatacgctgcgaccgttttgaagcagcttccgaggctgtcaaccgcctcatgcccgagctgatcgccgccgccgcgcaatcccccgaactcaaaaaacgctggtatgccgtcgaatttctgtccacgctcagcggggaaatgctggttaccatgatttaccacaaaaggcttgatgctgagtggatgcaggcggcgcaagcgttacagcaacagttggatatttccgttattgggcggagcaggggacagaaaatagtcttaaaacaggactatgtaacggaaactttgaaggtcggcaaccgggatttccgttatcggcaaattgaaggcagttttacccaaccgaatgccgccgtgtgtcagaaaatgcttgaatgggcgtgccgcacggcggaaggcttgggcagcgacctgctcgaactgtattgcggaaacggcaatttcaccctgccgctgtcccgatatttccgacaggttttggcaaccgaaatctccaaaacctccgtcagcgcggcgcaatggaatatcgaagccaaccgcatcggcaacatcaaaatcgcccgtctgtctgctgaagaatttaccgaagcctataccggaaaacgtgagtttaaacgccttaaggatggcggtattgctttgacggattacgcattttccactattttcgtcgatccgccgcgtgccggtatcgatgaggaaactttgaagctggtgtcgcagtttgacaacatcatctacatttcctgcaatcccgaaacgttgcgcgccaatttggacaccttggcggaaacccatgcggtcgaacgtgccgccctgttcgaccaattcccgtttacgcaccatatcgaaagtggtgtattgttgaaaaagaaaatcctttga

SEQ ID NO: 43407 - DNA, 672 bp, Neisseria meningitidis
ttgaaaaacatcgatatggaaaagtcaggcattgtctatctgatgaaaaccgtcatcaagggcgtgtataaaatcggcatttcggatgtaagcaattttgaaggcagaatgcgccatttggaaaacaacggttatgcgaacgttgccggattggaacgcatcctcgccgtcaaaaccgacaattacaaagaaaaagaaaacctgctccatgaaattttcagcaaaagcaggataggcgataccgaattgttcgccgtggacgaaaaccttgtgaaacgtttgtttttatcgcttcgcggcgaaatcgtgttcccgaaaaacgaaacggcggaatcggaatttgaaaaaagcgtccacgaacgcaggcaggaagggaatgccgggtcaggccgcaaacaactgcttgatttggtacggcgcggacaccgggaatacccttacgcgctgccccggcttttggcgggcgcggcatcctacaagccgaaaaaatcgaaaatccgcctttttaaagaagcatatttcggcaaaagcggcacgaggctgaccgacgaaattgcagacggcatccatatttacacctgtttttcgcgggcggatttggaaaaagcctattccgaatatttggaacttttcaaatccgaatcggatgccgaaggcagaaagccgcagtaa

SEQ ID NO: 43408 - DNA, 603 bp, Neisseria meningitidis
atgaatatgaaaaaattgatttccgcaatttgtgtttcaattgttttatcagcctgcaaccaacaatcaaaaacggcacaagccgaagaacctgtccaaagtatccaggctgctgattgtaccgccccaatggacatcacagttgaacaatatctcatcaatttggagcaagcatttaaaactcagaacgtctcaacaaaaatccataataaaaatattgtcaagaccgattgtggttatgaccttactttggtaatggattttggggcgattgcgctcaaactggacgagcagcaaaaaattagagctatctcagtaggctacattttaaaaaccgacggagagaaaggacaaaatctagtcaataatgccataaatggattacacagtattcaggcagttctgtctttaactaccacagacaaattgggcgaatcggaagcaggaaaacaactttttacagctttaaccgaagtcgtcaaagaatccaatcagacaggagcaacagcgcaaaaagacgttccggcagatggtattttatatagcgttgtttttgaaaaagaaacaaacaccattgcaataatcggcagaaaacaaccctaa

SEQ ID NO: 43409 - DNA, 162 bp, Neisseria meningitidis
atggcatattttggcggctttgttcgcgctttgttcgatcttggcgtgtttgaacgcggcggcgtgaaaggaagggggaaatggttttcccgcgtttggcggcggtcggaggtgctgtgcctgatgtgcggcggcatattttcggtgaaattgattttatag

SEQ ID NO: 43410 - DNA, 1125 bp, Neisseria meningitidis
atgcagaatacttcctttgataatgaatccgattatagcgacgattcagactttgcgtcagcttccgaaactgaaaaccgtatcggtctgaccgttccgctcgagcttgccggcgggcggttggatgcggtgttggcgaaacttctgcccgactactcgcgcagccgcctgacatcatggattaaagaaggcgcggttattgtaaacgataaaccttcgcaacccaaagacaaaatgataggcggcgagcaaatttgtgtaaccgtccgtccgagtgaggaaaatctggcgtttgttccagagcctatggctttggatattgtttacgaagacgataccgtcatcgtcgtcaacaaaccggccggactggtggtgcatccggcggcgggcaactggacggggacgctgctcaacggcctgttggcgcactgtcccgaattgagccaagtaccgcgcgcgggcatcgtacaccgtttggacaaggaaaccagcgggctgatggtggttgccaaaaccctgccggcgcaaaattccctcgtgaggcagcttcaagagcgcacggtcaaacgcatctaccgcgccgtcgccaacggcatcgtccccttcgacggtaaaatcgaaacccaaatcggacgcgatccgcacaaccgcctgaaaatggcagtcgtcaaattcggcggcaaaccagccgttacccacgtcaaagtgttggaacgctatcttacccacagctatatcgaatgctcgctcgaaacgggcaggacgcaccaaatccgcgtccatatgcgcgaggccaaccatccgcttgccgccgacccggtttacggcaacccgcgccatccgtgcggcgacacggtgaaagaagccgttaaaagtttgggcgcgcgtcaggcgttgcacgcctaccgcttgagtttcacccatccggaaagcggcgaaaccgtttcgtttgaggcaccgattccggacgacatatatcatttgttgtctgtcctccgtcttgaagccggtttggattcgtctttgagcaatgaagaggaatggcaggacaaattcggcgcggacgacgatgacgattggaacgaagacgactacgatgtcgaagtggtttatgtaagggagtag

SEQ ID NO: 43411 - DNA, 393 bp, Neisseria meningitidis; identical to SEQ ID NO: 39912

SEQ ID NO: 43412 - DNA, 603 bp, Neisseria meningitidis
atgaccgacaaaatttctcccgacgcgctgattgaagccgcactgctgacccaaaccgaaccgctgaccgaaaaatctatgcgcgaactgtgtgtgccgccgttgtcgcaagacaaactgattgatgtgttggcgcagttgaaaacgcgttggcaggatagggcgttgcaactggtgcatacgcaagagggctggcgttttcagattgttcagacggcattcgagcggctgggcagcctgcaagaacagcgtgcgccgcgctactcccgcgccgtgatggaaacactggcgattatcgcctaccagcagcccgtaacgcgcggcgacatcgaaggcatacgcggtgtggcggtgtcgcagaacgtgatccagaccttgcaggatcgggggtggattgaagtcatcggacatcgggacacattgggaaaacccgcattgtgggcaacaacggcaacgtttctcagcgatttgcgcttggacggtctggaagaacttcctccgctgaccgaactgggcgaactggttttgcccgatttgatagaaatgccgcctacggatgaagaagagccgacaaccgtaccatccgataccctgcccaactga

SEQ ID NO: 43413 - DNA, 1311 bp, Neisseria meningitidis
atgaccgatttgtttgcccgagaacccgacgcgccgcttgccgaacgattgcgtccgcatacgcttgacgacgtggtggggcaggaacacctcatcggcgaaggtaaacctttgcgcgtggcggtagaaggcggcaagccgcattctatgttgctgtgggggccgccgggcgtgggcaagacgacgttggcgcggattttggcgcagagtttcaacgcccagtttttgcctgtttccgccgtattttccggcgtgaaggacatccgcgaggcaatcgataaagccgaaatcgctttgcagcagggacgcgcgacgattttgtttgtcgatgaagtccaccgcttcaacaaggcgcagcaggacgcgtttttgccgcatgtcgaaagcggtttgctaacctttattggtgcgacgacggaaaatccgtcgtttgaagtcaatcccgcgctgttgagccgcgctcaggtgtatgttttgcaacccttgtcttcagacgacctgaaaaagctgattgccaaggtattggctttgcctgaataccaagagtttacgattgaaacggatgcgcaaaaattactcgtgaataccgccgacggtgatgcgcgcagattgttgaatttgttggaacaacttttacgcgccgccgatacacgtcgtctgaaaaacttaaccgccgaatttctcgccgacagtctcggggcgcaaatccgccgtttcgacaaaggcggcgagagtttctacaaccaaatctccgccctgcacaaatccgtgcgcggttcgcatccgaacgccgcgctgtattggttctgccgtatgctcgacggcggcaccgacccgcgctacctcgcccgccgcatcgtgcgtatcgcttgggaagacatcgggcttgccgacccgcgcgccttccaaatcgccaacgatgccgccgccaccttcgaacgcttaggctcgcccgaaggcgaactggctttggcgcaagcggtattgtatcttgccgccgccgcgaaatccaacgcgggctacaaggcatacaaccaaatgcgccacttcgtcaaagaaaacgctagcgacgaagtgcccgtccacctgcgcaacgccccgaccaagctgatgaaggaattgggctacggacgcgaataccgctacgcccacgacgaaccgaacgcctactccgccggcgaaagctatatgcccgacggcttggacgaaccggacttctaccaacccgtcccgcgcgggttggaaatcaaaatcggcgaaaagctggaatggttgaaatcgctggacgaagaagtattaaaggcaaaatga

SEQ ID NO: 43414 - DNA, 1155 bp, Neisseria meningitidis
atggatacgcacacggacgaaacaaaacttcaaaacacgcaagccaaacgcaaacgccgcctgacggcattgacgctgctgttcgcgcttgccgccgcagccgccgggtcggcgttttttttatggtggcagcacgaagaggaaacggaagacgcttatgttgccggacgcgtggttcaggttacgccgcaaaagggcggtacggtgcggaaggttttgcacgacgatacggatgccgtgaaaaaaggcgacgtgctggcggtattggacgacgataatgatgtgctggcttacgagcgggcaaaaaacgagctggttcaggcggtgcggcaaaaccgccggcaaaatgccgccacttcgcaggcgggggcgcaggttgccttgcgccgggcggatttggcacgcgcacaggatgatttgcgccgccggtctgctttggcggaatcgggcgcggtgtccgccgaagagctggcacacgcccgtgcggcagtgtctcaggcgcaggcggcggtcaaagcggctttggcggaagaatcttcggcacgtgcggctttgggcggtcaggtttctttgcgcgaacagccggcggttcagacggcaatcggcaggttgaaagatgcgtggttgaaccttcagcggacgcaaatccgcgcgccggcggacggtcaggtggcgaagcgttcggtgcaggtcgggcagcaggtggcggcaggcgcgccgctgatggcggtggtgccgctgtcggatgtgtgggtggatgctaattttaaagagacgcagttgcggcatatgaaaatcggacagcctgccgagctggtgtccgatttgtacggcaaacaaattgtttatcgcggcagggtggcaggtttttcggcaggtacgggcagcgcgttttcgctgattccggcgcaaaacgcaacgggcaactggattaaagtggtgcagcgcgtccccgtccgtatcgtgctgaaccgcgaagatgtggacaggcatccgttgcgtatcggtttgtcgatgacggttaaagtggatacttccgccgcaggcgcgcctgtttcaaaaacgccgggtgcggcattgccggaaatggaaagtaccgactggtcggaagtcgatcggacggtcgatgaaatcctcgggcaatccgcgccctga

SEQ ID NO: 43415 - DNA, 1212 bp, Neisseria meningitidis
atggcatttttaaaactgaccgaacaaaacgtgcagggcaaaaccgtcctcatccgcgccgatatgaacgtaccgttcaaagacggcaaaatcagcgacgacacccgtatccgcgcctcgctcgcgtccattaaatactgcgtggacaacggtgcgtccgttatcgtgatgacccatctcggccgcccgaccgaaggcgagttccaccccgaagacgatgtcgcccccgttgccgcgcacttgggcagcctgttgggcaaagacgtgaaagtattgaacgactggcgtgaaaacaaacccgccctgaacgcgggcgatgtcgtcatgctgcaaaacgtgcgcatcaacaaaggcgagaagaaaaacgatttggaactgggtaaagcctacgcttctttgtgcgacgtgttcgtcaatgacgcgttcggaaccgcccaccgcgcccaagcctcgaccgaagccgtcgcccaagccgcgcccgttgcctgcgccggcgtattgatggcgggcgaactcgacgctttgggcaaagccttgaaacagcccgcgcgcccgatggttgccatcgttgccggcagcaaagtgtccaccaagctgaccatcctcgaatcgctggcggacaaagtcgaccaactcatcgtcggcggcggtatcgcaaacaccttcctgttggcggaaggcaaagccatcggcaaatctttggcggaacacgatttggtggaagaatccaaaaaaattatggcgaaaatggcggcaaaaggcggttctgtgccgctgccgaccgatgtcgtcgttgccaaagcctttgccgccgatgcggaagctgtggtgaaagacattgccgccgatgcggaagctgtggtgaaagacattgccgacgttgccgaagacgagatgattttggacatcggtccgaaatccgctgccgcgcttgccgatttgcttaaagccgccggtacggtcgtttggaacgggccggtcggcgtgttcgagtttgaccaattcgcaggcggtacgaaagcccttgccgaagccattgcccaaagcaaagcgttctcgattgcgggcggcggcgacacgctggcggcgattgccaaattcggcgttaccgaacaaatcggctacatctccaccggcggcggcgcgttccttgagttcttggaaggcaaagagctgcctgccgtagccgctttggaaaaacgcggcgcgtaa

SEQ ID NO: 43416 - DNA, 168 bp, Neisseria meningitidis
atgggggaatacctggaatttgaagaaagcggtacgaaaattaccgttgaaatcggcagcgcgtggcattttaatgaaactataagaaatattaatacacatttaagaggtacgaaacttccaggttctaactggagagttcaagataaggggcattttcatctttga

SEQ ID NO: 43417 - DNA, 549 bp, Neisseria meningitidis
atgaaaaaacaaattaccgcagcgatgatgattctgacaatgattgccgctccggcgatggcaaacagcatggacaatcagatatttgaaaaccaagtattccatacgcgggcagatgcgccgatgcagttggcggagctttctcagaaggagatgaaggagactgagggggcgtttcttccattggctatcttgggtggtgctgccattggtatgtggacacagcatggttttagttatgcaacgacaggcagaccagcttctgttagagatgttgctattgctggcggattaggcgcaattcctggtggtgtaggcgccgcaggaaaggttgtttcctttgctaaatatggacgtgagattaaaatcggcaataatatgcggatagcccctttcggtaatagaacaggtcatcctattggaaaatttccccattatcatcgtcgagttacggataatacgggcaagactttgcctggacagggaattggtcgtcatcgcccttgggaatcaaaatctacggacagatcatggaaaaaccgcttctaa

SEQ ID NO: 43418 - DNA, 1251 bp, Neisseria meningitidis
atgatcaaactgacacgaagacaaatcatccgccgcaccgccggcacactgttcgccctaagccccatcgcatccgccgttgccaaaacggtacgcgccccgcaattcaccgccgcacggatatggccgtcgcacacctacacccgcctgacgctggaaagcaccgccgcgctcaaataccagcacttcacgctcgacaacccgggcaggctggtcgtcgacatacaaaacgcgaacatcaataccgtattgcacggactgtctcagaaagtcatggcagacgacccctttatccgcagcatacgcgcgggtcagaacacgccgaccaccgtccgcctcgtcatcgatttgaaacagcccacccacgcacaagtcttcgcgcttccgcccgtcggcggctttaagaaccgcctcgtcgtcgacctctatccgcacgggatggatgccgacgatccgatgatggcactgctcaacggtagcctgaataaaaccctgcgcggctctcccgaagccgacctcgcccaaaacaccacgccccaacccgggcgcggcagaaacgggcgcagacccgtcatcatgctcgatccgggacacggcggtgaagaccccggcgccatcagcccgggcggtctacaggaaaaacatgtcgtcctatccattgccagggaaaccaaaaatcagttggaagcattaggttacaatgtatttatgacgcgcaacgaagacgtgttcatcccattgggcgtgcgtgtcgccaaagggcgagcacggcgggcggacgtatttgtctccatccacgccgatgccttcaccagcccctccgcgcgcggcacgggggtttatatgttaaacaccaaaggcgcaaccagctctgccgccaaattcttggaacagacgcaaaacaatgccgacgcggtcggcggcgtaccgaccagcggcaaccgcaatgtcgataccgccctgctcgacatgacccaaaccgccacgctgcgcgacagccgcaaactcggcaaactggtgcttgaagaattgggcaggctcaaccatctgcacaaaggcagggtggacgaagccaatttcgccgttttgcgcgcacccgatatgccgtctatcctggtcgaaaccgccttcctgtccaatcctgccgaagagaagctgctgggcagcgaatccttccgccggcagtgcgcccaatccattgcctcgggtgtccaacgctacatcaatacatccgtattgaagcggggttga

SEQ ID NO: 43419 - DNA, 1620 bp, Neisseria meningitidis
atggacaatctcgtatgggacggcgttcccgacatccgcacactcgaccaaaccatccgcaaacacgcacacccgctcaacctgattgtctgcctccccgataatcagattcccgattttcaaaccgcacaagatgcttcggacgcggaatgccgtctgaagcaccgtttggatcaggcaacgcagtgcctccagttcgacagcatcaacctcatcgaacacatcctgcccgatgtccgcttctggctggttcccccttcacgcacccgccgcctgcacgaacacttccaccacatttcctggcagaccgaagccatcccgcaaaccgaaagcaagtccgacaaaccctggtttgcacttccacaaacatccgaacggcaaaaaccggaacacatcctcgttatcggagcgggcatatccggcgcggcaaccgcccacgccttagcatcatacggcatttccgttaccgtattggaagcccgaaaagccgcccaagccgccagcggcaaccgccaagggctgctctacgccaaaatctcgccgcacgacaccgaacaaaccgaactgctgcttgccggctacggctacaccaaacgcctgctcggacatatcctgcccgaatccgaaacctggggcggcaacggcatcatccacctcaattacagccgcaccgaacaacaacgcaatcacgaattgggtttgcaaaaacaccataaccacctctaccgcagcatcacgcaggcagaagccgaaaaaatcgccggtatcccactgtccgtcccatacgaccacccttcatgcggactctactggcaacacggcgtatggctcaatccacccgcactcgtccgcgccctcctcaaccatccgctcattggactacacgaagacacaccgttaaccgacatttcccacgacggggaaaagtggattgcaagcacgccaaacggcatattttccgccacacacatcatctactgcaccggcgcgcacagcccccgcctgcccgaaaccaacctcgccgccctgcctctcaggcaaatacgcggacaaaccggcctcacaccgtccaccccgttttccgaacaactgcgttgcgccgtttcaggcgaaagctacatcagcccgtcgtggcacggactgcactgctacggcgcgagttttattcccaacagcagccataccggatggaacgaagccgaagaagcctcaaaccgccaagcattggcacaccttaaccccgccctttccgaatcattgtttgccgccaacccaaacccccaaaaacaccaagggcacgccgccatacgctgcgacagccccgaccaccttcccctagtcggcgcactcggcgacattgccgccatgcggcagacctacaccaaactcgcgctggacaaaaactaccgcatcgacaccccatgcccatacctgcctaatgcctacgtcaacaccgcgcacggcacccgcggactcgccaccgcccccatctgcgccgccgccattgcagcccaaatcctaggcttgccccatcccttttcacaacgcctgcgccacgccctacaccccaaccgcaccatcatccgcgccatcgtcagaaggaaggatctaaccccttaa

SEQ ID NO: 43420 - DNA, 2967 bp, Neisseria meningitidis
  misc_feature 6, 7, 8, 9, 10: 'n' is a, c, g or t
gtgtgnnnnntccgcaccgccaccggttgggtttctgccgatgacggtctgcttgtgcgcgatttgaacggcaacggcatcatcgacaacggcgcggaactcttcggcgacaataccaaactggcagacggttcttttgccaaacacggctacgcggctttggccgaattggattcaaacggcgacaacatcatcaacgcggcagacgccgcattccaatccctgcgtgtatggcaggatctcaaccaggacggcatttcccaagctaatgaattgcgtacccttgaagaattgggtatccaatctttggatctcgcctataaagatgtaaataaaaatctcggtaacggtaacactttggctcagcaaggcagctataccaaaacagacggtacaaccgcaaaaatgggggatttacttttagcagccgacaatctgcacagccgcttcaaagacaaagtggaactcactgccgaacaggcaaaagccgccaatcttgcgggcattggccgtctgcgcgatttgcgcgaagctgccgcattgtccggcgatttggccaatatgctgaaagcttattctgccgccgaaactaaagaagcacagttggcattgttagataatttgattcacaaatgggcggaaaccgattcgaactggggcaaaaaatcgccaatgcgactttcaaccgattggacgcaaacggctaatgaaggtattgcactgacaccatcccaagtagcacaactaaaaaagaacgctttagtttccctttctgataaagctaaagcagctattgacgccgcccgcgaccgcattgccgtgcttgatgcctacacggggcaggattccaacacactctattacatgagcgaggaagatgcgcttaatatcgtcaaagtaaccaacgatacatacgaccatctcgccaaaaacatctaccaaaacctgttgttccaaacccgtttgcagccatatttgaatcaaatcagtttcaaaatggaaaatgatacgttcactttggattttagtggtcttgttcaagcatttaaccatgtcaaagaaactaatccgcaaaaagcttttgtggatttggccgagatgcttgcatatggcgaacttcgttcttggtatgaaggccgaagactaatggccgattatgtggaggaggcaaaaaaagcaggtaaatttgaagattaccagaaagtgttgggtcaggagaccgttgcattattagctaaaacatcgggtacgcaagcagatgatatcctgcaaaatgtaggctttggtcataataaaaatgtttctttatatggtaatgacggcaacgacactctaatcggcggtgcaggcaatgattacttggagggcggcagcggttcggatacttatgtcttcggcgaaggcttcggtcaggatacggtctataattacgactacgctaccggacgcaaagacatcatccgctttaccgacggtattacagccgatatgctgacttttacccgagagggcaaccatcttcttatcaaggcaaaagacggcagtggacaagtgactgttcagtcctatttccagaacgatggctcaggtgcttaccgtatcgatgagattcatttcgataacggcaaagtactggatgttgccactgtcaaagaactggtacagcaatccaccgacggttcggacagattgtatgcctaccaatccggaaataccttaaatggcggattgggcgatgactatctgtacggtgccgacggggatgacctgctgaatggtgatgcaggcaacgacagtatctacagtggcaatggcaatgatacgctcgatggaggagaaggcaacgacgccctgtacggctataatggtaacgatgcactgaatggtggcgaaggcaatgatcatttgaacggcgaagacggtaacgacactctaatcggcggtgcaggcaatgattacttggagggcggcagcggttcggatacttatgtcttcggcaaaggcttcggtcaggatgcggtctataattacgactacgctaccggacgcaaagacatcatccgctttaccgacggtattacagccgatatgctgacttttacccgagagggcaaccatcttcttatcaaggcaaaagacggcagtggacaagtgactgttcagtcctatttccagaacgatggctcaggtgcttaccgtatcgatgagattcatttcgataacggcaaagtactggatgttgccactgtcaaagaactggtacagcaatccaccgacggttcggacagattgtatgcctaccaatccggaaataccttaaatggcggattgggcgatgactatctgtacggtgccgacggggatgacctgctgaatggtgatgcaggcaacgacagtatctacagtggcaatggcaatgatacgctcgatggaggagaaggcaacgacgccctgtacggctataatggtaacgatgcactgaatggtggcgaaggcaatgatcatttgaacggcgaagacggtaacgacactctgatcggcggtgcaggcaatgattacttggagggcggcagcggttcggatacttatgtcttcggcgaaggcttcggtcaggatacggtctataattaccatgtggataaaaactctgacactatgcactttaaaggatttaaagcagcagatgttcattttatccgttccggaagtgatttggtgcttagcgcttctgaacaagacaacgtacgtatttccggatttttctatggtgaaaaccatcgtgtagatacatttgtctttgatgatgcagctatcagtaatccagattttgccaagtatattaatgctggcaataatttggtacagtctatgtctgtgttcggttctaatactgctgcgacaggaggaaatgtggatgccaatatacaatccgtacagcagccgttattggtaacgccatctgcataa

SEQ ID NO: 43421 - DNA, 483 bp, Neisseria meningitidis; identical to SEQ ID NO: 38977

SEQ ID NO: 43422 - DNA, 1281 bp, Neisseria meningitidis
atgtcaatttctattttcttgaaacgggtaatattccgacaccacgaaaggcaaatcatgtctgcgcaatcacaaaacaatcatacgtccccattggtcgtcttgaccacgctgttcttcatgatgggttttattacctgcatgaacgacatccttatccctcatttgaaagaaattttcgacctgtcttacgttcaggcgatgctgatccaattctgtttctttaccgcctatgcggtgatgtccatcccgatgggggcttttgtcggcaaagtcggctacaaaaacggcgttatcggcggctttctgctgacggcggtcggatgcctgctgttttatcctgctgcgggcagccattcttacgcggtatttttgggcgcgttgtttattttggcttccggcgtaacgctgcttcaggtcgccggtaatccttatgttaccctgctggcgaaacccggcaaggaatcggcaacactgacgctggttcaggcgtttaacgctttgggtacgaccattgcgccgcaaatcggcgcgttcctgattctggcggacgcaacccaaaccgtcagcaaggcggaacagatttcttccgtacagattccctatttgggactggcggggctgctgattatccttgccgttttcgtgaaaatgatccggctgcccgacgcgcgcaaaattgccgccgaggaaagcgcgcacaaccacgacggcaaaaccagcgtatggcaatacaaacatctcgtgttcggtacggcaggcattttctgctatgtcggcgcggaggtgtctatcggttcgttgatggtcaacgtattgggttatctgaaagggctggatcatgcttctgccgcgcattacctgtcgttctattggggcggcgcgatggtcggacgtttcctcggttcggcggtgatggcgaaattcgcgcccaaccgttatttggcgtttaacgcatcggctgcggtcgtactgcttgccgtcgcgatggcgacgggtagcggcaatgcggatgtggcgatgtggtcgctgcttgccatcggttttttcaactcgattatgtttccgacgattttctctttggcaaccaaaggattgggaaaatttaccaacgcggcttccggtgtactgtgtaccgcgattgtcggcggtgcggtcgttcctgtcgtgcagggctgggtggcagatacttacaccctgatgtcttcgtttgtcgtttccgtcatctgttatctgtatatcgtgttttttgcggtgtacggatatagggcggacaaataa

SEQ ID NO: 43423 - DNA, 687 bp, Neisseria meningitidis
atgagatggattcttagttttagcagcaaaaaaaccgataagaaacagcatactgatttggaaggcatcggggaatacgccctatttcttttgataattgtttgtattttaaatagaaaatttgtcatgccgacagcttttgcatacaatgcacgcatcccgaatagcgacacagatgctgttcagacataccgaaaaccaagttacagaaagagagatattatgcaaggcaatcaagctgttgttgattatatgaacgaattgctgtctggcgagctggcggcacgcgaccaatactttatccactcccgcctctactccgaatggggctacaccaaactttttgaacgtctcaaccacgagatggaagaagaaaccacacacgccgaagacttcatccgccgcatcctgatgctgggcggtacgccgaaaatggcacgcgccgaactgaatatcggcacggacgtggtttcctgcctcaaagccgacctgcaaaccgaatatgaagtacgtgatgcgttgaaaaaaggcatcaaactgtgcgaagaggctcaagactatgttacgcgcgacctgatggttgcccaactgaaagataccgaagaagaccacgcccactggctggaacagcagcttcgcctgatcgagttaattggcgaaggcaactactaccaaagccaactgtaa

SEQ ID NO: 43424 - DNA, 180 bp, Neisseria meningitidis
atggccgttcaacaaaacaaaaaatccccttccaaacgcggtatgcaccgttcgcacgacgcgctgaccgcgcctgcactgtctgtcgacagcacaaccggcgaagtacaccgcccgcaccacatctcccccaacggtatgtaccgcggtcgcaaagtggtcaaagccaaaggcgaataa

SEQ ID NO: 43425 - DNA, 747 bp, Neisseria meningitidis
atgagcacacaagatttaaacggcaaaatcgctttggtaacaggcgcatcgcgcggtatcggtgcagcaattgccgacacgctggcggcagccggtgccaaagtcatcggtacggcgaccagtgagagcggtgcggcggcgattagcgagcggttggcgcaatggggcggcgaaggccgcgtattaaattccgccgaacctgaaaccatcgaaagcctgattgccgacatcgaaaaagcgttcggcaaactcgatattctggtcaacaacgccggcatcacccgcgacaacctcctgatgcgcatgaaagaagaagagtgggacgacatcatgcaggtcaacctcaaatccgtgttccgcgcttctaaagccgttttgcgcggtatgatgaaacaacgttccggccgcatcatcaacatcacatccgtcgtcggcgtgatgggcaatgccggtcaaaccaactatgccgcggcaaaagcaggcttaatcggtttctccaaatccatggcgcgcgaagtcggcagccggggcattaccgtcaactgcgtcgcccctggctttatcgataccgacatgacacgcgccctgccggaagaaacccgccaaacctttaccgcccaaaccgccttgggcagattcggcgacgcgcaagacatcgccgatgcggttctgttcctcgcttccgaccaagcaaaatacatcaccggccaaacgctgcacgtcaacggcggtatgctgatgccttaa

SEQ ID NO: 43426 - DNA, 1635 bp, Neisseria meningitidis
atggcagcaaaagacgtacagttcggcaatgaagtccgccaaaaaatggtaaacggcgtgaacattttggcaaacgccgtgcgcgtaaccctgggtcccaaaggccgcaacgtagtggttgaccgcgctttcggcggcccgcacatcaccaaagacggcgtaaccgtcgccaaagaaatcgaactgaaagacaagtttgaaaatatgggcgcgcaaatggtgaaagaagttgcgtccaaaaccaacgacgtggcgggcgacggtacgactaccgccaccgtactggcacaatccatcgttgccgaaggcatgaaatatgttaccgcaggtatgaatccgaccgacctgaaacgcggtatcgacaaagccgtcgccgctttggttgacgagctgaaaaacatcgccaaaccttgcgatacttccaaagaaatcgcccaagtcggctcgatttccgccaactctgacgaacaagtcggcgcgattatcgccgaagcgatggaaaaagtcggcaaagaaggcgtgattaccgttgaagacggcaaatctttggaaaacgagctggacgtggttgaaggtatgcagttcgaccgcggctacctgtccccttacttcatcaacgatgctgaaaaacaaatcgctgctttggacaatccgtttgtattgctgtttgacaaaaaaatcagcaacatccgcgacctgctgcctgttttggaacaagtggcgaaagccagccgcccgctcttgattatcgctgaagacgtagaaggcgaagccttggcgactttggtggtgaacaacatccgaggcatcctgaaaaccgttgccgtcaaagctccgggcttcggcgaccgccgcaaagcgatgctgcaagacatcgctatcctgaccggcggcgtggtgatttccgaagaagtcggcctgtctctggaaaaagcgactttggaagacttgggtcaagccaaacgcatcgaaatcggtaaagaaaacaccaccatcatcgacggctttggcgacgcagcccaaatcgaagcgcgtgttgccgaaatccgccaacaaatcgaaaccgcaaccagcgattacgacaaagaaaaactgcaagagcgcgtggctaaattggcaggcggcgtggcagtgatcaaagtcggcgccgctaccgaagtcgaaatgaaagagaaaaaagaccgcgtggaagacgcgctgcacgctacccgcgcagccgttgaagaaggcgtggtcgcaggcggcggcgtagccctgttgcgcgcccgtgccgctttggaaaacctgcacaccggcaatgccgaccaagacgcaggcgtacaaatcgtcttgcgcgccgttgagtctccgctgcgccaaatcgttgccaacgcaggcggcgaacctagcgtggttgtgaacaaagtgttggaaggcaaaggcaactacggttacaacgctggcagcggcgaatacggcgacatgatcgaaatgggcgtactcgaccccgccaaagtaacccgttccgcgctgcaacacgccgcgtctatcgccggcctgatgctgaccacagactgcatgattgctgaaatccctgaagacaaaccggctatgcctgatatgggcggcatgggtggtatgggcggcatgatgtaa

SEQ ID NO: 43427 - DNA, 855 bp, Neisseria meningitidis
atgttttaccaaatccttgccctgattatctggagcagctcgtttattgccgccaaatatgtctatggcggcatcgatcccgcattgatggtcggcgtgcgcctgctaattgccgcgctgcctgcactgcccgcctgccgccgtcatgtcggcaagattccgcgtgaggaatggaagccgttgctgattgtgtcgttcgtcaactatgtgctgaccctgctgcttcagtttgtcgggttgaaatacacttccgccgccagcgcatcggtcattgtcggactcgagccgctgctgatggtgtttgtcggacactttttcttcaacgacaaagcgcgtgcctaccactggatatgcggcgcggcggcatttgccggtgtcgcgctgctgatggcgggcggtgcggaagagggcggcgaagtcggctggttcggctgcctgctggtgttgttggcgggcgcgggcttttgtgccgctatgcgtccgacgcaaaggctgattgcacgcatcggcgcaccggcattcacatctgtttccattgccgccgcatcgttgatgtgcctgccgttttcgcttgctttggcgcaaagttataccgtggactggagcgtcgggatggtattgtcgctgctgtatttgggtttggggtgcggctggtacgcctattggctgtggaacaaggggatgagccgtgttcctgccaatgtttcgggactgttgatttcgctcgaacccgtcgtcggcgtgctgctggcggttttgattttgggcgaacacctgtcgcccgtgtccgccttgggcgtgtttgtcgtcatcgccgccaccttggttgccggccggctgtcgcatcaaaaataa

SEQ ID NO: 43428 - DNA, 699 bp, Neisseria meningitidis
atgaaatccagacaccttgccctcggcgttgccgccctgttcgcccttgccgcgtgcgacagcaaagtccaaaccagcgtccccgccgacagcgcgcctgccgcttcggcagccgccgccccggcagggctggtcgaagggcaaaactataccgtccttgccaacccgattccccaacagcaggcaggcaaagtcgaagtccttgagtttttcggctatttctgtccgcactgcgcccacctcgaacctgttttaagcaaacacgccaagtcttttaaagacgatatgtacctgcgtaccgaacacgtcgtctggcagaaagaaatgctgacgctggcacgcctcgccgccgccgtcgatatggctgccgccgacagcaaagatgtggcgaacagccatattttcgatgcgatggtcaaccaaaaaatcaagctgcaaaatccggaagtcctcaaaaaatggctgggcgaacaaaccgcctttgacggcaaaaaagtccttgccgcctacgagtcccccgaaagccaggcgcgcgccgacaaaatgcaggagctgaccgaaaccttccaaatcgacggtacgcccacggttatcgtcggcggtaaatataaagttgaatttgccgactgggagtccggtatgaacaccatcgaccttttggcggacaaagtacgcgaagaacaaaaagccgcgcagtaa

SEQ ID NO: 43429 - DNA, 966 bp, Neisseria meningitidis; identical to SEQ ID NO: 42351

SEQ ID NO: 43430 - DNA, 510 bp, Neisseria meningitidis
atgaaaaagaaactgctttcgggcatcaaatttgccgttcagacggcattggtgtttttattggtgtcgctgtttttggattggatacgcaagcccgaagagccggccggtgcggcagggcggcctttgaccctgctgtcggggcagcggctgactttgggacagtttagccgggataaggcggttttggtgtatttttgggggagctggtgcggcgtgtgccgttatcagtcgccgataatcgatgatttggcggcggacggcgttccggtcgtcggcgtggcggtacgttccggcagcgcgtccgaagtggcggcgtatatggcaaagcggggcttgggctttccgacggtcaacgatgaggacgggggtttggcaaggtcttggcggattgtcgcaacgcctgccgtcgttttggtcaaaaatgggaaaatggttcactatacgacgggaatcagcagttattggggcttgcgcgcacgaatttttcaggcggatgttttcggttaa

SEQ ID NO: 43431 - DNA, 336 bp, Neisseria meningitidis
atgtttaaagattggaaagaacataccgcattggttaaaaaatcgttcggcgagctgggtaaggcgcatcctaaaatgctgcaggcctacggcgcattggaacaagcggcagctgcagaggcacttgatgctaaaacacgcgaactgattgccatcgccgttgccattactacacgttgtgagagctgcatcagtgttcacgccgccgccgccaccaaagccggtgcgaccgacagcgaaatcgcaggtgcattggcaaccgccattgccctgaatgcgggtgccgcttacacttatgccctgcgtgcattggaagcggttgaaacgcaaaaataa

SEQ ID NO: 43432 - DNA, 513 bp, Neisseria meningitidis; identical to SEQ ID NO: 40766

SEQ ID NO: 43433 - DNA, 597 bp, Neisseria meningitidis
atgaaacagacagtcaaatggcttgccgccgccctgattgccttgggcttgaaccgagcggtgtgggcggatgacgtatcggattttcgggaaaacttgcaggcggcagcacagggaaatgcagcagcccaatacaatttgggcgcaatgtattacaaaggacgcggcgtgcgccgggatgatgctgaagcggtcagatggtatcggcaggcggcggaacaggggttagcccaagcccaatacaatttgggctggatgtatgccaacgggcgcggcgtgcgccaagatgataccgaagcggtcagatggtatcggcaggcggcagcgcagggggttgtccaagcccaatacaatttgggcgtgatatatgccgaaggacgtggagtgcgccaagacgatgtcgaagcggtcagatggtttcggcaggcggcagcgcagggggtagcccaagcccaaaacaatttgggcgtgatgtatgccgaaagacgcggcgtgcgccaagaccgcgcccttgcacaagaatggtttggcaaggcttgtcaaaacggagaccaagacggctgcgacaatgaccaacgcctgaaggcgggttattga

SEQ ID NO: 43434 - DNA, 615 bp, Neisseria meningitidis
atgaactttacccgactgctcaaccaagtcttaagcacggttcaaaaaaaaggcaacacattctccgacagcccgctcaattcattcggcggaggcgcgctggttgccggtgtcgcctccatgctgctgaacggtaaaaaccgcaaaaccatcaccaaaatcggttcgaccgccgctttgggctacctcgcctaccggggctatcagatgtggcagcaaaacaaagggcgggcaaccgtaacacaaagcgatttccaacctgccggagaaactgaagaaacatacagccgtaccgtattgcgcaccatgatagccgccgccgcttcagacggcatgatagacgaagccgaacgccggactatcgaacaggaaagcggcacagaccccgaaactgccgcatggctcgccgccgaataccgccttcccgcaagcatcgaagacatcgccgccgccgtcggcaacgatgaggcgttggcggcggaggcctatctggcggcaaggttggtctgtgccgatttgtcgcggaaagaaaccgtcttcctcgcccgcctgtcgcaggctttgaaactggatgacaatctggtggagagtttggaaaggcaattggggttttga

SEQ ID NO: 43435 - DNA, 1092 bp, Neisseria meningitidis
atgcagacatttaatcgtgagagactggaatttgcgctggataaacgtggttgtacgcaaacaaaattagctgagttattaggtattaccgctcgacaggttagaaactatgtaaaagatgagcaaatacctgatttaaatgaattagccaatttattagagtttccagttcatttctttactaatgacgaaagactgcctgagttgaaatctcaggcagtaagttttcgtgctcgttcacgcacctcgaagaggcttgaaaaacaagcattaaatcatagcattacggcttttttgttaaatgactggctcgagacagaatttacactaagtcaagccgtattgcctgatttttctgatatttctcctgaagaggctgctcaggaactaagattagaatgggggcttggcaatgaacctattccgaatatgatcaccctacttgaagttaagggtgttcgtgtattttcattatctttagatacaaaggacattgatgccttttgtacttggtatgaaaatcatccatttgtatttttaaatacacaaaaatctgcagaacgtagtcgatttgatgctgcccatgaattagggcacttaatccgtgataaatacagtatggaacatagtaaaaatagtgaaattacagaagatgaacctcgtgatattatcgaaaaagaggctaatgcctttgcttcagcttttttaatgccggaggctgcactacgcttatatcgtcatgttcctatcactattgaaaatttattaaaaatcaaaagacgatttggtgtatcacttgttgccttagcatatcggatgcataaattaggaatgattactgataggatgtatatacacaatctttgtcctttgtttgcaaagaaaaaatatcgaactatcgaaccagagccaatggaaagggaaatatcaagcgcattacgtaaaatgcttactattttaaaaaatgatggcattggtattgaacagattgctgaaaatttaaacgtatcccccaaagatgttgctgatttaacttttggattagttgagagggacttaaatagatataggaaacttcgattagtcaaataa

SEQ ID NO: 43436 - DNA, 1638 bp, Neisseria meningitidis
atggattttaaaagactcacggcgtttttcgccatcgcactggtgattatgatcggatgggaaaagatgttccccactccgaagcccgtccccgctccccaacaggcagcacaacaacaggccgtaaccgcttccgccgaagccgcgctcgcccccgcaacgccgattaccgtaacgaccgatacggtcaaagccgttatcgacgaaaaaagcggcgacctgcgtcaaatgaccctactcaaatacaaagcgaacggcaacgaaaacaaacccttctccctgtttgacgacagcaaagaatacacctacgttgcccaatccgagcttttagatgcacaaggcaacaacatcctgaaaggcgtcaactttaccgccgcccaaaaacaatacagtctcaacggcgacaaagtcgaagtccgcctgagcgcccccgaaaccaacggactgaaaatcgacaaagtctatactttcaccaaagacagctacctcgtcaacgtccgtttcgacatcaccaacaccagcggcaagcccgccaacctgagcgcggactaccgcatcgtacgcgaccacagccaacccgaaggccaaggctacttcacacgttcctacctcggccccgtcgtatacactcctgaagacaaattccaaaaagtcagcttctccgacttggacgacgatgccaaatcaggcaaaaacgaagccgaatacgcccgcaaaacccaaaccggctggctcggcatgattgaacaccacttcatgtccacctggatcctccaacccaaaggcggacaaagcgtttgcgccgctggcgactgccgtatcgacatcaaacgccgcaacgacaacctgtacagcaccagcgtcagcgtgcctttagccgctatccaaaacggcacgaaatccgaagcctccatcaacctctacgccggcccgcagaccacatccgttatcgcaaacatcgccgacaacctgcaactggcaaaagactacggcaaagtacactggttcgcatcgccgctcttctggctcctgaaccaactgcacaacatcatcggcaactggggctgggcaatcgtcgttttgaccatcatcgtcaaagccgtactgtatccattgaccaacgcctcttaccgctcgatggcaaaaatgcgcgccgccgcacctaaactgcaagccatcaaagagaaatacggcgacgaccgtatggcgcaacaacaagcgatgatgcagctttacaaagacgaaaaaatcaacccgctgggcggctgtctgcctatgttgttgcaaatccccgtcttcatcggcttgtactgggcattgttcgcctccgtagaattgcgtcaggcaccttggctgggctggattaccgaccttagccgctccgacccctactacatcctgcccatcattatggcggtaaccatgtttgcccaaacattcctcaatccgccgccgaccgacccgatgcaggcaaaaatgatgaaaatcatgccgctggttttctccgttatgttcttcttcttccctgccggtctggtattgtactgggtagtcaacaacctcttaaccattacccagcagtggcacatcaaccgcagcatcgaaaaacaacgcgcccaaggagaagtcgtttcctag

SEQ ID NO: 43437 - DNA, 1116 bp, Neisseria meningitidis
atgatttatcaaagaaacctcatcaaagaactctcttttaccgccgtcggcattttcgtcgtcctcttggcggtattggtctccacgcaggcaatcaacctgctcggccgtgccgccgacgggcgtgtcgccatcgatgccgtgttggcattggtcggcttctgggtcatcggtatgacgccgcttttgctggtgttgaccgcatttatcagtacgttgaccgtgttgacccgctactggcgcgacagcgaaatgtcggtctggctatcctgcggattggcattgaaacaatggatacgcccggtgatgcagtttgccgtgccgtttgccgttttggttgccgtcatgcagctttgggtgataccgtgggcagagctacgcagccgcgaatacgctgaaatcctgaagcagaagcaggaattgtctttggtggaggcaggcgagttcaacagtttgggcaagcgcaacggcagggtttattttgtcgaaaccttcgataccgaatccggcatcatgaaaaacctgttcctgcgcgaacaggacaaaaacggcggcgacaacatcatcttcgccaaagaaggtaacttctcgctgaacgacaacaaacgcacgctcgaattgcgccacggctaccgttacagcggcacgcccggacgcgccgactacaatcaggtttccttccaaaaactcaacctgattatcagcaccacgcccaaactcatcgaccccgtttcccaccgccgtaccattccgaccgcccaactgattggcagcagcaacccgcaacatcaggcggaattgatgtggcgcatctcgctgaccgtcagcgtcctcctactctgcctgcttgccgtgccgctttcctatttcaacccgcgcagcggacatacctacaatatcttgattgccatcggtttgtttttaatttaccaaaacgggctgaccctgctttttgaagccgtggaagacggcaaaatccatttttggctcggactgctgcctatgcacattatcatgtttgccgttgcactcatcctgttgcgcgtccgcagtatgcccagccagcccttctggcaggcggttggcaaaagtctgacattgaaaggcggaaaatga

SEQ ID NO: 43438 - DNA, 507 bp, Neisseria meningitidis
atgcccctactagacagtttcaaagtcgatcacacccgtatgcatgcccccgccgtacgcgtggcgaaaaccatgactacgcccaaaggcgacaccattaccgtgtttgacctgcgcttttgcgttcccaacaaagaaatcctgcctggaaaaggcatacacacgctggagcatttgttcgcaggttttatgcgcgaccacttgaacggcaacggcgtggaaatcatcgacatttccccgatgggctgccgcaccggtttttatatgagtcttatcggcacgccttccgaacagcaggtcgccgatgcgtggctggcttcgatgcaggatgttttgaatgtcaaagaccaaagcaaaatccccgagttgaacgaataccaatgcggcacttatcaaatgcactcgctcgccgaagcgcagcaaatcgcgcaaaacgtgttggcgcgcaaagtggcggtgaacaaaaatgaagagctgacgctggatgaagggctgctgaacgcctaa

SEQ ID NO: 43439 - DNA, 561 bp, Neisseria meningitidis
atgagctatcaagacatcttgcggggcctgttgccccccgtgtcgtatgcccgcaatgccccgcgtgtgcgggcgcaggcagaaatagacggcgcagcgctggatgcggtggcggaatcggctcaaagcgttgccgatgccgtcgacccgcgcagcgccggccaaatgctggccgattgggagcgcgtattaggtttggacggtacgggcaaaaaccgccagcaccgtgtgttggccgtcatggccaagctaaacgaaacaggcggcttgagtattccttattttgtgcgtttggccgaggcggcgggctatcaaatccaaatcgacgaaccgcagccgttccgcgccggtgtaaaccgcgccggcgaccgtcttgcgccgcaggaaatcatgtgggtgtggcacgttaacgtgcgcggcggcaacaaccgcattacccgattccgcgccggtatctcggcggcgggcgacaggctgaccgattacagcgatgccgtgatcgagagcctgttcaaccgcctcaagcccgcccacaccgctatccgatttacctaccgctaa

SEQ ID NO: 43440 - DNA, 438 bp, Neisseria meningitidis
atggtggaagctaaaatttttattctatacggtgcagccaacaaaggtaagagtacgacactcaatacgctttttaatcagatttgtcggaaattttctaaatttctagtcttttttgaaagacatggaaacggcttagattttgttgcagtatttgatcatgaaggtcagagaattggtttttattcatctggtgataatgaatacgaggttaggggaaatttatacaaactttattcgcataattgtgattttatttttggcacgtcaaggacacggggtggtagttgcgatgcagtaggatgttatgcagagttattgcatggcgatgtaaatataattaattggtgtgaaaagtttgagcctacagatgaagacaatgagcgtgctgttaaagagttatttaagtcatttaaaaatataataaatgagttatag

SEQ ID NO: 43441 - DNA, 927 bp, Neisseria meningitidis
atgtcttttgccttcttttttcccggacaaggttcccaaagcctcggtatgatgaacggctttgccgaacacgccatcgtcaaaaacacctttgccgaagcctccgccatattggggcaggacttgtgggcgatgataaacggcagcgatgccgaaatcatcggtcaaaccgtcaacacccagcccattatgctcgccgccggcgttgccgtttaccgcgcctatttagaagcgggcggcaaaacgcctgccgccgttgccggacacagcctcggcgaatacaccgcactcgttgccgccggcgcattgaattttgccgacgcggtcaaactcgtgcgcctgcgcgccgaactgatgcagtccgccgtaccgcaaggcgtgggcgcaatggcggcgattctcggcttggaagatgagcaggttaaagccatttgtgccgaagccgcccaaagcgaagtggtcgaagccgtcaacttcaactcacccggacaaatcgtgattgcaggcaacgccgccgccgtcggacgcgccatggctgccgccaaagaagccggtgccaaacgcgccctgccgctgcccgtgtccgtaccttcccattgcagcctgatgaaacccgccgccgacaaacttgccgaagccctgaaaaccgttgaaatcaagcagccgcaaatccgcgttatccacaacgccgacgttgccgcctacgatgatgccgacaaaatcaaagacgcgctcgtccgccagctttacagccccgtacgctggacggaaaccgtcaacgccctcgtttcagacggcattgccgaatccgccgaatgcggcccgggcaaagtgttggcgggcttggcaaaacgcatcaacaaagccgccgcgtgcagcgcactgaccgatgccggacaggttgccgcctttatcgaagcgcactga

SEQ ID NO: 43442 - DNA, 1335 bp, Neisseria meningitidis
atggcaaaaaaatatttcggcacggacggcgtgcgcggcgaagtggggcaatttccgattacgcccgatttcgtattgaaactcggctatgcggcggggcaggttttggtgcagcacgacaccgaccagaaaccgaccgtcctcatcggcaaagacacgcgcatttccggctatatgctggaagccgctttggtggccggttttacggcggcgggtgtgaatgtggtacagaccggaccgctgcccacgcccggcgtggcttatctgacccgcgcgttgcgcctgtccgccggcgtgatgatttccgcgtcgcacaacgcctattccgacaacggcatcaaattcttcgccgaaggcggcgtgaaactttccgatgaagtcgagttggaaatcgaagccaaaatcgacggcgaaatgaaaacccaaccgtccgcccgtctcggtcgcgcacgccgcatcagcggtgcggacgaccgctatatcgaattttgcaaatccacctttcccagccattccgaccttcggggtttgaagttggttgtcgataccgccaacggcgcggggtacggtgtcgcccccaaggtgtttcacgaactgggcgcacaggtcgtcagcatcggcaacgaacccaacggctacaacatcaacgaaaaatgcggtgcgacttataccaagacactccaggccgccgttttacagcatgaagccgactacggcatcgccttagacggcgacggcgaccgcctgatgatggtcgataaaaacgggcaggtttacgacggcgacagcctgatttacgtcattgccaaagcccgcgcccgagaaggtatcaacatcggcggcgtggtcggcacggtcatgaccaatatggcgatggaaatcgccctgaaagagcagggcgtggatttctgccgcgccaaagtcggcgaccgctatgtgttggaacagctgaaccaacgcggctggctcatcggcggcgaagccagcggccatattttgtgtatggacaaacacaacaccggcgacggcattatttccgcgctgcaagttttggcggcactgcaaacgctgaaccaagacctcgccaccgtttgcgccgattggcagccgtatccgcaaacgatgattaacgtgcgcatccaaaaaggtcagcaatggcaggaagcttcgaaagacgtgttggcggaagtggaaaaagaactcgaaggcaaagggcgtgtcgtgttgcgcgcttcgggaaccgaacccgtcgtgcgcgtgatggtggaggcgcggcaggcggattgggcgcgcgaaggggcggaacgcattgccgccgccatcggcggcatttag

SEQ ID NO: 43443 - DNA, 1284 bp, Neisseria meningitidis
atgactgcatcgaaatcaggttttatcgggcaaatcttttcccgcaatatgcttgtctgtatttttacggggtttacctcggggctgccgctgtactttctgattaacctgattccggcgtggttgcgcagcgagcaggtggatttgaagagcatcgggctgatggcgttaatcggtctgccgtttacttggaaatttttgtggtcgccgctgatggacgcggtcaggctgcccgttttggggcggcggcgcgggtggatgctgctgacgcaggcagggttgctggcggctttggcggcatatgcctttttaaacccccgtaatcatctgccgttgattgctggcttgtcggtgcttgttgcttttttttccgccagtcaggacattgtattggatgcgttcaggcgcgagattttgtcggacgaagaattgggtttgggcaactcggttcatgtgaacgcctatcgggttgccgccctgattcccggttcattgagtttggtgctggcagacaggatgccgtggtcagaagtatttgttatcacctcattatttatgctgcccggccttctgatgacgctgtttctcgcgcgcgaacccgtgttgccgccttccgttcctaaaacgttgaagcagaccgtggtagagccgtttaaagaattttttacacgcaagggcatcgcttcggcggtatgcgtgctgctgtttatcttcctttacaaactcggcgacagtatggcaaccgcgttagcaacgccgttttatctggatatgggtttcagcaagacagacatcggtttgattgcaaaaaatgcaggactgtggccggcagtggcggcaggtatcttgggcggcgtgtggatgctgaaaatcggcgtaaacaaagccttgtggatatttggcgcggtgcaggctgtaaccgttttggggtttgtatggctggcagggttcggacatttcgacacggtcggcacaggagaaaggctgatgctggcggcagttatcggcgcggaagcggtcggcgtggggttggggacggcggcgttcgtatcgtatatggcgcgcgagaccaatcccgcatttaccgcaacgcagcttgcgctgtttaccagcctgtccgccgtcccgcgcacggtcatcaattcctttgccggttatctgattgaatggctcggttatgtaccgtttttccaactgtgtttcgcactcgccctaccgggtatgctgctgctgctgaaagttgcgccttggaacggggagaaaactcaggatgcaggcagatga

SEQ ID NO: 43444 - DNA, 171 bp, Neisseria meningitidis; identical to SEQ ID NO: 39149

SEQ ID NO: 43445 - DNA, 303 bp, Neisseria meningitidis; identical to SEQ ID NO: 36626

SEQ ID NO: 43446 - DNA, 360 bp, Neisseria meningitidis
atgtattttgttgaccgcaccgccgtcgtcctcaagccgaccgcgcgctttttggaatggctcaaaagcaccgacgaaaatatgcccgacctgaccatagagcagcttcgtgccaactgttccgtcttcctcgttccgcagttcgacgaaccggaagccgtcgtttcctacttcgacgaacgctaccggcagattttcgaggcggagctggcaggttgggacatcgataaggataaatggccgcaagatatggggctgaaggcgttttgggaatttttcgacatcgaaatccacgatatggtgttgaacatggaagaagcggaattgaacattacccccgtgttcgacaacatgatgtaa

SEQ ID NO: 43447 - DNA, 486 bp, Neisseria meningitidis
atgaacgattacacagccatgccgtctgaagacggaggaatcggctcattatcgcttccgccgcactcaatggaggcggaacaatccgttttgggcgggttgatgctggaaaatccggcttgggacaggattgccgatgtggtttcgggagaggatttctaccgccacgaacaccgcctgattttccgatccattgccaaactgatcaatgagagccgtcctgccgatgtcatcacggttcaggaagatttgcagcggaacgaagagctggaagcggcggggggattcgaatatctgattacgctggcgcaaaatactccgtctgccgccaacatccggcgccatgccgaaatcgtgcgcgagcgttccattatgcgccaactcgccgaagtgggaacggaaattgcccgcagcgccatacccaaaatatcggcagcggaacgggcggtagcttggagtacgaaaaattcaagcagtttcttttga

SEQ ID NO: 43448 - DNA, 2391 bp, Neisseria meningitidis
atgactgaacaaaaacacgaagaatacggcgccgacagcattcaggtgctcgaaggcttggaagcggtacgcaaacgccccggcatgtacatcggcgacacgcaggacggcagcggtctgcaccacatggtgttcgaagtattggacaacgccattgacgaagcactcgccggacattgcgacaaaatcacggtaacgatacacgccgaccattccgtcagcgtcgccgacaacgggcgcggtatgcccaccggcatccacccgaaagaaggacgctccgccgccgaagtcatcatgaccgtattgcacgcgggcggtaaattcgacaacaacagctacaaaatctccggcggcctgcacggcgtgggcgtgtccgtcgtcaacgcgctgtccgactgggtaacgctgaccatctaccgcgacggcaaagaacacttcgtccgcttcgtgcgcggcgaaaccgaagagccgttgaaggttgtcggcgattccgataaaaaaggcacgaccgtgcgcttcctcgccagtacggaaaccttcggcaacgtcgaatacagcttcgacatcctcgccaaacgcatccgcgaactttcgttcctgaacaacggcgtggacatcgaattgaccgacgagcgcgacggcaaacacgaaagcttcgccctttccggcggcgtggctggattcgtgcaatacatgaaccgcaaaaaaacgcccttgcacgaaaaaatcttctacgcgttcggcgagaaagacggcatgagcgtcgaatgcgcaatgcaatggaacgacagctatcaggaaagcgtgcagtgcttcaccaacaacatccctcagcgcgacggcggtacgcacctgaccgcgttgcgccaagtgatgacgcgcaccatcaacagctacatcgaagccaacgaagtcgccaaaaaagccaaagtggaaaccgccggcgacgatatgcgcgaaggtttgacctgcgtgttgtccgtcaaactgcccgaccccaaattttcgtcccaaaccaaagacaaactggtttccggcgaaatcggtcccgtcgtcaacgaagtcatcagccaagccctgaccgacttcctcgaagaaaatccgaacgaagccaaaatcatcaccggcaaaatcgtcgatgccgcccgcgcgcgcgaagccgcccgcaaagcacgcgaaatcacccgccgcaaaggcgtgatggacggcttggggctacccggcaaactcgccgactgccaagaaaaagaccccgcattgtcagaactttatctggtcgagggcgattctgcaggcggttccgccatgcaggggcgcgaccgcaaattccaagcgattttgccgcttaagggcaagattttgaacgtcgaaaaagcgcgctttgaaaaaatgctcgccagtcaggaagtagccgctttgattaccgcgttgggcgcgggcatcggcaaagaagaattcaatgccgagaagctgcgttaccaccgcatcattatcatgaccgatgccgatgtggacggcgcgcatatccgcaccttgcttttgaccttcttctaccgccaaatgcccgaactggtcgagcgcggctacatctatatcgcccagccgcctttgtataaagcgaaatacggcaaacaggaacgttacctcaaggacgagttggaaaaagaccaatggctgctcggtcttgccttggaaaaagccaaaatcatttcagacggccgcaccatcgaaggcgcagaacttgccgacaccgccaaacaattcctgttggcaaaaaccgtcatcgaacaggaaagccgcttcgtagacgaactcgtcctgcgcgccatgctacacgcgtcgcccattgatttgacgtcgtctgaaaacgccgataaagccgttgccgaactttccggtctgcttgacgaaaaagaagtcgccctcgaacgcatcgaaggtcatgaaggacaccggttcatcaaaatcacgcgcaagctgcacggcaacgtcatggtcagctacatcgaacccaagttcctcaacagcaaagcctaccaaaccctcacccaaaccgccgccgcgctcaaaggcatggtcggcgagggtgccaagctttacaaaggcgaaaacgggtacgacgcggacagctttgaaaccgctttggacatcttgatgagcgttgcccaaaaaggtatgtccatccaacgatacaaaggcttgggcgagatgaaccccgagcagctgtgggaaaccacgatggatcccgccgtgcgccgcctgttgaaagtgcgcatcgaagatgccattgccgccgacgaagtgttcgttacgctgatgggcgacgaggtcgagccgcgccgtgcctttatcgaaaacaacgcgctgattgcccaaaatatcgacgcataa

SEQ ID NO: 43449 - DNA, 891 bp, Neisseria meningitidis
atgtttcccgtttttcatctttcaggcgagagccgccgccagatgcttcagacggcattgcgttttccccatgttttcaaagcccgtgcggaagattcgcacaaagggactttcggcacgctcgccgtagtcggcggatcggcagggatgagcggcgcgcccgtattggcggcatcggcggcaatgtatctcggctgcggcaaagtgtgggcgggtttcaatcaggatacgctaccttttgccgttattgccggttttcccgagattatgctggatacggcggacagtttggccaaacgtcaagatataaacgcctgggttgtcggttgtggattgggtacaggtagggcggcggtcggaacgcttgccggaattttgacggaacacacggacaagcccgtcgttttggatgcggatgcgctgaacatattatcaaccgatgccgaaacccgaaatctggcgcgcgggtgtaaaaacctgattttaacgccacaccccgccgaagccgcgcgcctgcttggaacgacggttgcgcaggttcaggcggatcggacggcggcagtgaggaagataggggcaattttcggcgcaaccgtggttttaaaggggcacaaaacattggttgcctcacccgatacggaaatctatgtcaacgaaagcggcaacgcgggattggcaacggcgggcagtggcgacgtattgggcggcatcatcggcagtctgctcgcacagggcgtgccggtttttgaagccgcctgcgcgggcgcgtggctgcacggcgcggcggcggatgtcataaaagaatcggcaggcattgcggcagggctgttggcaggggaaatcgctccggcggcaaggtggctgcgcaaccggataactaaaagtatgtaa

SEQ ID NO: 43450 - DNA, 279 bp, Neisseria meningitidis
atgcatacagaactcaaaaacggaatattgcacatcggcggcgacatcaccgtcaaaaccctgaccgccgccgcttttacccgcttcagacagcaatgtcgtctgaaagacacctgcgcggttgatttgagcggcgtcggacgcgccgattccgcctgcgtgtcgctgctgctcgaagtgctgcgcggttgcaaaggcagcgtcaggctgaccggcattcccgaatccgtgcgcgcgctgtccgaactgtacgaaatcaaagactggctgaaatcatga

SEQ ID NO: 43451 - DNA, 435 bp, Neisseria meningitidis
atgcccgcctgtttctgcccccactgcaaaacccgtctctgggtcaaagaaacccaactcaatgtcgcccaaggcttcgtcgtctgccaaaaatgcgaaggactgtttaaagccaaagaccatctggcaagcacgaaagaacccatattcaacgatttgcccgaggctgtttcggatgtcaaactcgttcaccgtatcggcacgcgcgccatcggcaagaaacagatttcccgtgacgaaatcgccggcatcctcaacggcggtacaacccagcccgatattccgcccgcaaccgccgccacccctgctgccgcaccgcaggttaccgtaccgcccgccgcgcccgcccgtcaggatgggttcaactggacgattgcaaccctgtttgcccttatcgtcctcattatgcagctttcctacctcgtcatcctatga

SEQ ID NO: 43452 - DNA, 669 bp, Neisseria meningitidis
atgttaccctcgaaatatgaagataacgcactgcaaattaaagaaaaaagtacagaaagaactgctccgttttttgtactggaagttaccgcccgttctgccgccgatattttgggtatccatcccaattcggcagcactgttctaccgtaaaatccgcacggttatcaaccatcatttggccttggctgccgatgaggtttttgagggccctgtcgagccggacgaaagcgatttcggcggacggcgtaaaggcagacgtggtcgcggtgcggcaggaaaagtggttgttttcggcattctgaaacgcaacggacgggtctataccgttgtggtggataatgccaagtctgaaacgttactccctgtcatcaaaaagaaaatcatgccggatagtattgtttataccgatagtctgagcagctacgacaagttggacgtgagcggttttatccattaccgcatcaaccattccaaggagtgtgcagaccgtcagaaccacattaacggcattgagaacttttggaatcaggcaaaacgcgtcttgcgaaaatacaacggaatcgatcgtaaatctttcccgctgttcttgaaagaatgcgaatttcgatttaacttcggcacaccgtctcaacagcttaaaatcctgcgggattggtgtggaatttag

SEQ ID NO: 43453 - DNA, 330 bp, Neisseria meningitidis
atgtttgatggcgaagtagaagcagatgaaagttattttggcggacaacgcaaaggcaaacgcggtcgcggtgctgccggtaaagtcgccgtattcggtcttttgaagcgaaatggtaaggtttatacggttacagtaccgaatactcaaaccgctactttatttcctattatccgtgaacaagtgaaacctgacagcattttttatacggattgttatcgtagctatgatgtattagatgtgcgcgaatttagccattttagcttcgctgaaacttcgttttcgtatcaatcacagcacacattttgccgaacgacaaaaccatattaa

SEQ ID NO: 43454 - DNA, 459 bp, Neisseria meningitidis
atggaaaccccgaaactcagtgtcgaagccattgaaaaaggtacggttatcgaccatattcccgccggcagggggctgaccatcctgcgccagttcaaacttttgcactacggcaacgcggtaaccgtgggcttcaacctgcccagcaaaacccaaggcagcaaagacatcatcaaaatcaaaggcgtgtgcttggacgacaaagccgccgaccgcctcgccctgttcgcccccgaagcggtggtcaacaccatcgacaatttcaaggtcgtgcagaagcggcatttgaacctgcccgacgaaatcgccgaagtgttccgctgtccgaacacgaattgcgccggccacggcgagccggtcaaaagccggttttatgttaaaaagcacaacgggcagacgcggctgaaatgccactactgcgaaaaaacctacagccgggattcggtggcggaagcctga

SEQ ID NO: 43455 - DNA, 2061 bp, Neisseria meningitidis
atgacccaaacccttttaatcgaactccttaccgaagaactcccgcccaaagccctgaataatctgggcaaccatttcgccgcttccgttgccgaaggcttggaaaaagcgcaactggttgacggcgcagccgaatttacggcttatgcctcgccgcgccgtttggcggttcaagtcaaaaacgtcaaagccgttcaggctgatcaaaaaattgtgaaaaaaggccctgccgtagcgaatgccatgaaagacggtgcgccaaccaaggctttggaaggtttcgcacgcggtgcgggcgcgaaaatcgaagacttgaccatcgtccacgacggcaagcaggacgtgtacgcctacgaatacgtccaaatcggcaaaccgttgggcggacttttggaagacattatcaatcaagcggttaagaagctgccgattcccaaagtaatgcgttggggcagcagcacgtttacctttgtgcgccccgttcacgggctagttgtactgcacggcggcgacattgtgaacgtcagcgttttgggtctgcaaagcggcaacaaaaccttgggacaccgcttcctctccgacggcgaaattaccattgaaaacgccgacagctacgccgcacaaatgcgcgagcaaggcaaagtcgtcgcttcgtttgccgagcgcaaagccgcgattcagacggtattggaagggcaggcacgccgtctgaacgcgaccgccgccgccgatgaagccttgttggacgaagtaaccgcgctggtcgaatggcctgtggtattggaagccggttttgaagaacacttcctcgccgtaccgcaagaatgcctgattctgacgatgcagcaaaaccaaaaatacttcccgctgctcgaccaaaacggcaagctgatgaaccgcttcctgctggtgtccaatctgcaaaccgaagatccgtcacacatcatccaaggcaatgaacgtgtcttgcgcgcgcgcctgtctgatgccgagttcttctacaaacaagaccaaaaagcgactttggaaagccgcctgcccaaactgacgaacgtggtttatcacaacaaaatcggttcgcaagccgaacgcatcgaacgcctgcaaagcatcgccgcccatatcgccaaggctttgggcgcggatgccgccgcagccgaacgcgccgcgcgtttggcaaaagccgacttagtaaccgaaatggtcggcgagttccccgaactgcaaggcacgatgggcaaatactacgcccgcttggacggcgaaaccgaagaaattaccgaagccgtcgagcaacactaccaaccgcgttttgccggcgacaacctgcctgagggcaaaattgccgccgccgttgcgcttgccgacaaactggaaaccttggtcggcatttggggtatcggcctgattccgaccggcgacaaagacccatacgccctgcgccgcgccgcattgggtattttgcgtatgctgatgcagtacggtttggacgtaaacgaactgattcagacggccttcaacagcttcccgcaaggtttgctcaacgaaaaaacgccgtctgaaaccgccgacttcatgcaggcgcgccttgccgtattgctgcaaaacgattatccgcaagacatcgttgccgccgtacttgccaagcagccgcgccgtttggacgatttgaccgccaaactgcaggctgtcgccgcgttcaaacaactgcccgaagccgccgcgctcgccgctgccaacaaacgcgtgcaaaacctgctgaaaaaagccgatgccgagttgggcgcggttaacgaaagcttgctgcaacaggacgaagaaaaagccctctttgccgccgcacaaggcttgcagccgaaaattgccgccgccgttgccgaaggcaatttccagaccgccttgtccgaactggcttccgtcaaaccgcaagtcgatgccttcttcgacggcgtgatggtgatggcggaagatgccgccgtgaaacaaaaccgcctgaacctgctgaaccgcttggcagaacaaatgaacgcggtagcggatatcgcgcttttgggcgagtaa

SEQ ID NO: 43456 - DNA, 750 bp, Neisseria meningitidis
atgcttatccaggcagttaccattttccccgaaatgttcgacagcattacccgctacggcgtaacgggacgcgcgaacagacagggaatctggcagtttgaagcagtcaatccccgaaagtttgccgacaacagattgggctacatcgacgaccgcccgttcggcggcggcccgggaatgattatgatggctccgccgcttcatgcggcaatagaacacgccaaaacacaatcctcccaagctgcaaaagtcatctacctcagcccccaagggaaaccgctgacacaccaaaaagcggtagaactggcagaacttccgcatctgattctgctgtgcggacggtatgagggcatagacgaaaggcttctgcaaagcagcgtcgatgaagaaatcagcatcggagacttcgttgtttccggcggagagcttcccgccatgatgctgatggatgcggtattgaggctcgtacccggcgtattgggcgatatgcagtctgccgaacaggattcgttctcaagcggcattttggactgcccccactacaccaaacccttagaatttcaaggtatggctgttccggaagtattgcgttccggcaatcatggcttgatagcggaatggcggttggaacaatcgctgcgccgcaccttggagcgcagacccgatcttttggaaaagcgcgttttaatcccaaaggaatcccgcctcttagaaaccatccggcaagagcaacgggaaatccaatcataa

SEQ ID NO: 43457 - DNA, 669 bp, Neisseria meningitidis
atgacgacccatctgtccaatgtcgcaccggacctgcaaaactatttgaacgccatcggcgaacccgaacatcccgttttgacgcggctgcgcgagaagaccgggcatcaccgtatgggcaaaatggcgattgcgcgcgaacaggcggcagttttggtttggctggcaaagctgatccgtgcggaaaaatatctggaaatcggcgtatttaccggatacagcagcaccgcgcttgcattggcactgcccgaacacgggcggattaccgcctgcgacatcaatgtaacctttaccgatacggcgcgtcaggtttggaacgaggccggtgtggcacataaaatcagcctgcacctgcaacccgcattgctgacattggatgatttgattgcacagggtgaagccggaagctacgatttggcactgatagacgcagacaaaccgcccacgccgcaatatttcgagcgttgcctcaaactcgtccgtcaaggcggcatcatcgccatcgacaatattttgctgaacggaagggtgatgcgcgaagcggcttccgatgcgccgcccagcgtcggcatcctcaaagatttcaatcaaaacctgccgaacgacccgcgcatcgtccccatcaccctgcccgtcggcgacggcttgaccctgcttctgaaaaaataa

SEQ ID NO: 43458 - DNA, 345 bp, Neisseria meningitidis
atgctgccgaataaggttttgggtaaatatgattggaatgtggacggaaaaacaggaataggcgcggcatgggtcgtcgctgcgtttatcctgcccatgttggtgtgggcgatatttatgttgtcgcggatgcaaggctggcttgcgccgaccaaggcaaacccgatatgggcgttggtgtggctgctgatttgcctgccctgcctgctgattgcgtccaaatgtttgggttggaaaggctggcggcgggtggtgaatatttttgcctgcctgaccgtctgcgccatattgagcgtacccgcttcgctgctcatcgcctttaccctccgggacctgctgaaatag

SEQ ID NO: 43459 - DNA, 1194 bp, Neisseria meningitidis
atgacagaggacgaacgtttcgcgtggctgcaattggcgtttacgccctatatcggcgcggaaagtttcctgctgctgatgcgccgtttcggcagcgcgcaaaatgccctgtccgcaccggcggaacaggtggcggcactgatacggcacaaacaggcgcttgaggcttggcgcaatgcggaaaaacgcgctctggcgcggcaggcggcagaagcggcattggaatgggaaatgcgggacggatgccgcctgatgctgcttcaggatgaagattttcccgaaatgctgacgcaggggctgaccgcgccaccggttttgtttttgcgcggcaacgtgcaactgctgcacaaaccttccgccgccatcgtcggcagccgtcatgccacgccgcaggcgatgcggattgccaaagatttcggcaagtcgttgggtgggaaaggcattcccgttgtgtcgggtatggcttcgggcatcgataccgccgcccatcagggtgcgttgcaggcagaaggcggcaccatcgccgtgtgggggacgggcatagaccgcatttatccgccggtcaacaaaaaccttgcctatgaaatcgccgaaaaaggattgattgtcagcgagttccccatcggcacgcggccgtatgccggcaattttccgcgccgcaaccgcctgattgccgccctgtcgcaagtaacgctggtggttgaagccgcgttggaatccggttcgctgattactgccagattggcggcggagatggggcgcgaagtgatggcggtacccggctcgatagacaatccacacagtaaaggctgccacaaactgattaaagacggcgcaaaattggtggaatgcctggacgacatcctgaacgaatgcccggggctattgcaaaatacgggtgcttcatcatattctataaataagggaatacctgaaaagcgcatcactgccgttcagacggcatccgaccagctgtctctgcctgaaggcaaaatgccgtctgaaaagacggagaaccgacccgtcggcggcagtatcttggacaggatgggtttcgacccagttcatcccgacgtgcttgccggacagttggctatgcctgccgcagatttgtatgccgcactgttggaattggaattggacggcagcgttgccgcaatgcccggcggcagataccagcgtatccgaacttga

SEQ ID NO: 43460 - DNA, 297 bp, Neisseria meningitidis
ttgactgtggaatattttatgttgctggcaacagacggggaggatgtgcacgaggcgcgtatggcggcacgtcccgaacacctcaaacggctggagacgctgaagtcggaaggccggctgttgacggcaggcccgaatcctttgccggaggactccaaccgcgtttcgggcagtttgattgtggcgcagttcgagtctttggatgcggcgcaggcttgggcggaagacgatccctatgttcatgcaggcgtgtacagcgaagtgctgatcaagccgtttaaagcggtgttcaaataa

SEQ ID NO: 43461 - DNA, 1170 bp, Neisseria meningitidis
atgccgcaaattaaaattcccgccgtttactaccgtggcggtacatcaaaaggcgtgtttttcaaacgttccgacctgcccgaggcggcgcgggaagcgggaagcgcacgcgacaaaatcctcttgcgcgtactcggcagcccggatccctacggcaagcagatagacggtttgggcaacgccagctcgtccaccagcaaggcggtgattttggacaagtccgaacgcgccgatcacgatgtcgattaccttttcgggcaagtttccatcgacaaaccttttgtcgattggagcggcaactgcggcaacctcaccgctgccgtgggcgcattctccatcgaacagggcttggtcgataaaggcaagattccttcagacggcatctgcacggtcaaaatctggcagaaaaacatcggcaaaaccattattgcccatgtaccgatgcaaaacggcgcagttttggaaacaggcgattttgagctcgacggcgtaacgttcccggcagccgaagtacaaatcgaatttcttgatccagccgacggcgaaggcagtatgttcccaaccggcaatttggtcgatgaaattgatgtgccgaatataggccgtttgaaagccacgctcatcaacgcgggcattccgaccgttttcttgaatgccgccgacttgggctacacaggcaaagagttgcaagacgacatcaacaacgatgccgcggctttggaaaaattcgagaaaatccgcgcttacggtgcgctgaaaatgggtctgatcagcgacgtatccgaagctgccgctcgcgcgcacacgccgaaagtcgccttcgtcgcgcccgccgccgattacaccgcctccagtggcaaaaccgtgaacgccgccgacatcgatttgctggtacgcgccctgagcatgggcaaactgcaccacgcgatgatgggtaccgcctctgttgccattgcgaccgccgccgccgtacccggtacgctggtcaaccttgccgcaggcggcggaacgcgtaaagaagtgcgcttcgggcatccttccggcacattgcgcgtcggtgcagccgccgaatgtcaggacggacaatggacggccaccaaagcggtcatgagccgtagcgcacgcgtgatgatggaaggttgggtcagggtgcctgaggattgtttttaa

SEQ ID NO: 43462 - DNA, 252 bp, Neisseria meningitidis
ttgcctgccaataacggtataattcgggcgttatcaccgccttttaccggtataaacatcagactttttgccgccttgggtctcctgtccctttccggcgcggtggcgcaagcctccgtataccattgcaactcaaatggcaaaagcgtatatacatcagccccagcaggattgtgcgccgatgcggatttacctaaaatcagcagccatcagggaggcggataccgcctgaaaattaaaaaactcagttaa

SEQ ID NO: 43463 - DNA, 474 bp, Neisseria meningitidis
atgaaaggcgaccgtttggttatccgcgagctgaacaaaaacttaggcttgctgctggtaaccatcaaccaatatttccttcacgcccgtattttgaaaaactggggctttgaagaactgggcgaacatttcttcaaacagtccatcgttgaaatgaaagctgccgacgatttgatcgagcgcattctgttcctcgaaggtctgccgaacctgcaagaactgggcaagcttctgattggcgagtccaccgaagaaatcatcgcctgcgatttgaccaaagaacaggaaaaacacgaagccctgcttgccgccatcgccacagcagaagcgcaacaggattacgtcagccgcgatttgttggaaaaacaaaaagacaccaacgaagaacatatagactggctggagacccagcaagagcttatcggcaaaatcggtctgccgaactacctgcaaacagcggcgcaagaggactaa

SEQ ID NO: 43464 - DNA, 966 bp, Neisseria meningitidis
atgagctacacgcaactgacccaaggcgaacgataccacatccaatacctgtcccgccactgcaccgtcaccgaaatcgccaaacagctgaaccgccacaaaagcaccatcagccgcgaaatcagacggcaccgcacccaagggcagcaatacagcgccgaaaaagcccagcggcaaagccggactatcaaacagcgtaagcgacaaccctataagctcgattcgcagctgattcagcacatcgacccccttatccgccgcaaactcagtcccgaacaagtatgcgcctacctgtgcaaacaccaccagatcacgctccaccacagcaccatttaccgctaccttcgccaagacaaaagcaacggcagcacgttgtggcaacatctcagaatatgcagcaaaccctaccgcaaacgctacggcagcacatggaccagaggcaaagtacccaaccgtgtcggcatagaaaaccgacccgctatcgtcgaccagaaatcccgtatcggcgattgggaagccgacaccattgtcggcaaaggacagaaaagcgcattattgaccttggtcgaacgcgttacccgctacaccatcatctgcaaattggatagcctcaaagccgaagacactgcccgggcagctgttagggcattaaaggcacataaagacagggtgcacaccattaccatggataacggcaaagagttctaccaacacaccaaaataaccaaagcattgaaagcggagacttatttttgtcgtccttaccattcttgggagaaagggctgaatgagaacaccaacggactcatccggcaatacttccccaaacaaaccgatttccgtaacatcagtgatcgggagatacgcagggttcaagatgagttgaaccaccgaccaagaaaaacacttggctacgaaacgccaagtgttttattcttgaatctgttccaaccactggtaccttag

SEQ ID NO: 43465 - DNA, 282 bp, Neisseria meningitidis
ttgacaaaaggccgtctgaaaaacagctttgacaaagacgcggttgccaaagagatcgacctacaaagggaagtaacgcaggcgttcggcaaaacgccgcccaagccgcagcggccgttgccgacgaactcggcaatacccgaagttacggacggtatcaggcagcccgaaccctgccggaggccgaactgcaaaacaaatccgacacaaaaaaccgtccgtccgacacaaaaaaccgcccgaaaaatctggacggcggttcaaacaggctgccccgtttaa

SEQ ID NO: 43466 - DNA, 612 bp, Neisseria meningitidis
atgcgccgcaccgccctcctgctgctcgcactcgccgccggcacgtccctcgctgccggcttcagccaaaaagacacgccgatcaacacccgctaccgcgaaacgcccgaagaggccgccgcccgcgaatttaaagaacataccgccaaactgccgccgctgcccgatacgcactcggacggctggttcgacatttatgtggatgaaaattacggcaaacagccgaaaatcctgctcgacagcctgcaaattatgcccgcgcccgacggcagcatccgctacattctcaatatccgctccgacaaaggctacgacaacctgactgccaaaggcatattctgcgcccgcttctccatcaggttcggcaacggcaaaccttcctcctataaagtgttcggctacggcgacacggtcaaccgccgctggatacagccccgaaacgccgaatggaaaccgataggcggtacattaagccgcaacgacgcactgcgcaccgtcctgtatcaggcattctgcgagggcggtgtacccgccgacacgaaaggtttggtacaacgcctgaaagaacgtgccggacgctatgccccatcgataaagccgcacaacaaataa

SEQ ID NO: 43467 - DNA, 8112 bp, Neisseria meningitidis
atgaaccgcaccctgtacaaagttgtatttaacaaacatcgaaactgcatgatagccgttgctgaaaatgccaaacgcgagggcaaaaacacagccgacacccaagctgtaggtattttgccaaatgatattgcgggctttgcgggttttatccattctatctctgttatctcattctccctttcattactgctcggttctgcccttatcctgacttcttcttctgctactgcccaaggtatcgttgccgacaaatccgcacctgcacagcaacagcctaccatcctgcaaacaggtaacggcataccgcaagtcaatattcaaacccctacttcggcaggggtttctgttaatcaatacgcccagtttgatgtgggtaatcgcggggcgattttaaacaacagtcgcagcaacacccaaacacagctaggcggttggattcaaggcaatccttggttggcaaggggcgaagcacgtgtggttgtaaaccaaatcaacagcagccattcttcacaactgaatggctatattgaagtgggcggacgacgtgcagaagtcgttattgccaatccggcagggattgcagtcaatggtggtggttttatcaatgcttcccgtgccactttgacgacagcccaaccgcaatatcaagcaggagaccttagcggctttaagataaggcaaggcaatgttgtaatcgccggacacggtttggatgcacgtgataccgattacacacgtattctcagttatcattccaaaattgatgcacccgtatggggacaagatgttcgtgtcgtcgcgggacaaaacgatgtggccgcaacaggtgatgcacattcgcctattctcaataatgctgctgccaatacgtcaaacaatacagccaacaacggcacacatatccctttatttgcgattgatacaggcaaattaggaggtatgtatgccaacaaaatcaccttgatcagtacggtcgagcaagcaggcattcgtaatcaagggcaatggtttgcctcagccggcaatgtggcagtgaatgctgagggtaaactggtcaacacgggcatgattgcagcgacgggagaaaatcatgcggtttcacttcatgcccgcaatgttcataatagcggtacggttgcctcacaggatgatgccaatattcacagccagacgctggacaattcaggtacggtcttatcctcaggtcgattgactgttcgtaatttaggccgtctgaaaaaccaaaacaacggtacgatccaggctgcccgcttagatatgtcaacaggtggtttggataacacaggtaatattactcaaacaggttcacaagcattggatttggtatctgccggcaaattcgataacagtggcaagattggtgtaagtgacgttccacagaccggtttgaatcccaatccatcagtcataccacagattccgagtactgcaacaggttcaggcagcagcactgtctcggtatctaagcctggttcaaacaatcccgtttcacctacagcacctgcaaaaaactacgccgtaggacgcattcaaacaacaggagcatttgacaatgcaggatcaattaatgcgggtgggcaaattgacattgccgcccaaaacggtttgggaaattcgggtagtctgaatgcggctaaactacgagtatcaggcgattcatttaacaatacggtaaaaggcaaactccaggcacacgatctggctgttaacactcaaactgctaaaaacagcggtcacttattaactcaaaccggcaagattgataaccgtgaactgcataatgccggagaaattgccgccaacaatctgacactcattcattcgggccgcttgagcaatgataaaaaaggcaatattcgagctgcacatttacagcttgataccgccggtttacataatgcaggtaacattcttgccgatagtggaaccgttaccaccaagaataatcttcgcaatacaggaaaagtttctgttgcacgactgaataccgaaggtcagactctagataatacgcgcggacgtatagaggctgaaacggttaacatccaaagtcagcaactgactaaccaaagcggccatattactgctaccgaacaactgactatcaatagtcgaaatgtagacaaccaaaacggcaaactcctatctgcaaaccaagcacaattagctgtttcagacggcctatacaaccaacatggtgaaattgccaccaaccggcagttgtctattcacgataaaaatcaaaacactttggcgttaaacaatgcggatggcacgattcaatctgccggtaatgtatcgctacaagccaaatcactcgccaacaatggcacattaacagccggtaacaaactggatattgctttgacggacgatttcgtcgtagagcgcgacctcactgcaggcaaacaattaaatctaagcataaaaggccgtctgaaaaatacccataccctacaagcaggccatacgctcaaactcaatgccggcaatatagataaccaagttacaggcaaaattattggtggagaacaaacggacatcacatccgaacagcatgttgacaacaggggcttgatcaacagcgacggtttgacccacatcggtgcaggtcaaaccctgaccaacaccgggacaggcaaaatctatggcaaccatattgccctggacgcgcaaatactgcttaaccgggaagaaacgacggaaggcagtaccaaagcgggggcaatagctgcaaggaaacgtttggatattggagcgaaagagattcataaccaagaaggtgccctactatccagcgaaggtatttttgccgtaggtaatcgactggatgaacaacatcatgcggcaggcatggccgatacctttgttaatggcagtgccggtttggaagtacaaggtgatgcattgatgtccgttcggaatatgcagaatatcaataatcactttaaaacagagacatacttagccaaagcggaaaagcaagtccgcgactacaccgtactggggcaaaatacctactatcaggcgggaaaagacggtttattcgacaactcgcaaggacaaaaagaccaaactactgctacgttccatttaaaaaatggttctcgtattgaggccaaccaatggcatgtccgagactaccacatcgagacttataaagaacgcatcatcgaaaaccggccggcacacattactgtgggcggtgatttgactgcctcaggtcaaaattggctgaacaaagacagccggattgtagtaggcgggcgtattatcactgatgatttaaaccagaaagaaattaccaatcaaagtacaacaggcaaaggtcgcacagatgctgtcggcacacagtgggattcagttacaaaaaaaggatggtacagcggtagaaaaagacaacgccgtactgaaagaaaccatactccttaccatgatacccaactatttacccacgacttcgacacgcctgtatccgtcatccaacagaatgccgcctccccttcctttcaacccgccgcatctgcaatcaaactgattgacggagtatccacggcagccgtcaatggtcagcgcatccataccggtaatgtggtctcgttaaataacgctactgttactctgcctaacagcagcctctataccacccatcctgacaataaaggctggttggttgaaaccgatcctcaatttgcagactaccgccgctggttgggcagcgactacatgttgcaacaactgcaattggacaccaatcatctacacaaacggcttggcgacggctactacgaacaaaaacttgttaatgaacaaatccatcagttaacaggctaccgccgactcgacggctacaggagtgatgaagaacaattcaaagctctgatggacaacggccttactgctgccaaaacattcggtctcaccccaggtatcgccttgagtgcagagcaagttgcccgcttaacttcagatatcgtttggatggaaaatcaaaccgtcaccctgtctgacggttcgactcaaaccgtactggttcctaaagtctatgccctggcgcgcaaaggtgatctcaatacctccggtggcctgattagtgccgaacaagtcttacttaaactgcaaaacggcaacctgactaacagcggtaccattgcggggcgacaggccgtactcatccaggcacggaatattaacagcaacggtaacattcaagccgaccaaatcggcttaaaagctgaaaaaagtatcaatatcgacggcgggcaggtacaagcaggcagactgctgactgcccaagcgcaaaatatcaaccttaacggtacaacccaaacttccggtaatgaacgtaacggcaataccgccatcgatcgtatggccggcattaacgtggtcggaagccatactgaacaagtagataacagaacttcagacggcatcctatccctgcatgccagcaacgatatcaacctcaatgcggccaccgtctctaaccaagttaaagacggcactacccaaattaccgccggcaataatctcaacctcggcaccatccgtaccgaacatcgcgaagcctatggtacattagatgacgagaaccatcgccatgtccgccaaagtaccgaagtcggcagcagtatccgcacgcaaaacggcgcactgcttagagccggtaacgacttaaaaatccgccaaggcgaactggaggccgaagaaggcaaaaccgtccttgccgcaggacgtgatgtcactatcagcgaaggacgccaaataaccgaactggatacctcggtaagcggaaaaagcaaaggcatcctttccagtaccaaaacacacgaccgctaccgcttcagtcatgatgaagcagtcggcagcaacatcggcggcggcaaaatgattgttgcagccgggcaggatatcaatgtacgcggcagcaaccttatttctgataagggcattgttttaaaagcaggacacgacatcgatatttctactgcccataatcgctataccggcaatgaataccacgagagcaaaaaatcaggcgtcatgggtactggcggattgggctttactatcggtaaccggaaaactaccgatgacactgatcgtaccaatattgtccatacaggcagcattataggcagcctgaatggagacaccgttacagttgcaggaaaccgctaccgacaaaccggcagtaccgtctccagccccgaggggcgcaataccgtcacagccaaaagcatagatgtagagttcgcaaacaaccggtatgccactgactacgcccatacccaggaacaaaaaggccttaccgtcgccctcaatgtcccggttgtccaagctgcacaaaacttcatacaagcagcccaaaatgtgggcaaaagtaaaaataaacgcgttaatgccatggctgcagccaatgctgcatggcagagttatcaagcaacccaacaaatgcaacaatttgctccaagcagcagtgcgggacaaggtcaaaacaacaatcaaagccccagtatcagtgtgtccattacctacggcgaacagaaaagtcgtaacgagcaaaaaagacattacaccgaagcggcagcaagtcaaattatcggcaaagggcaaaccacacttgcggcaacaggaagtggggagcagtccaatatcaatattacaggttccgatgtcatcggccatgcaggtactgccctcattgccgacaaccatatcagactccaatctgccaaacaggacggcagcgagcaaagcaaaaacaaaagcagtggttggaatgcaggcgtagccgtcaaaataggcaacggcatcaggtttggaattaccgccggaggaaatatcggtaaaggtaaagagcaagggggaagtactacccaccgccacacccatgtcggcagcacaaccggcaaaactaccatccgaagcggcggggataccaccctcaaaggtgtgcagctcatcggcaaaggcatacaggcagatacgcgcaacctgcatatagaaagtgttcaagatactgaaacctatcagagcaaacagcaaaacggcaatgtccaagttactgtcggttacggattcagtgcaagcggcagttaccgccaaagcaaagtcaaagcagaccatgcctccgtaaccgggcaaagcggtatttatgccggagaagacggctatcaaatcaaagtcagagacaacacagacctcaagggcggtatcatcacgtctagccaaagcgcagaagataagggcaaaaacctttttcagacggccacccttactgccagcgacattcaaaaccacagccgctacgaaggcagaagcttcggcataggcggcagtttcgacctgaacggcggctgggacggcacggttaccgacaaacaaggcaggcctaccgacaggataagcccggcagccggctacggcagcgacggagacagcaaaaacagcaccacccgcagcggcgtcaacacccacaacatacacatcaccgacgaagcgggacaacttgcccgaacaggcaggactgcaaaagaaaccgaagcgcgtatctacaccggcatcgacaccgaaactgcggatcaacactcaggccatctgaaaaacagcttcgacaaagacgcggtcgccaaagagatcaacctgcaaagggaagtaacgaaggagttcggcagaaacgccgcccaagccgtagcggccgttgccgacaaactcggcaatacccaaagttacgaacggtatcaggaagcccgaaccctgctggaggccgaactgcaaaacacggacagcgaagccgaaaaagccgccttccgcgcatccctcggccaagtaaacgcctatcttgccgaaaaccaaagccgctacgacacctggaaagaaggcggcataggcaggagcatactgcacggggcggcaggcggactgacgaccggcagcctcggcggcatactggccggcggcggcacttcccttgccgcaccgtatttggacaaagcggcggaaaacctcggtccggcgggcaaagcggcggtcaacgcactgggcggtgcggccatcggctatgcaactggtggtagtggtggtgctgtggtgggtgcgaatgtagattggaacaataggcagctgcatccgaaagaaatggcgttggccgacaaatatgccgaagccctcaagcgcgaagttgaaaaacgcgaaggcagaaaaatcagcagccaagaagcggcaatgagaatccgcaggcagatactgcgttgggtggacaaaggttcccaagacggctataccgaccaaagcgtcatatcccttatcggaatgaaaggcgaagacaaagccttgggttatacttgggactaccgcgactacggcgcaagaaatccgcaaacctacaacgatccgaagctgtttgaggaataccgccgacaggacaaacccgaataccgcaacctgacctggctgcacagcgggacgaaagacaccaaaatcaggcagggagagcggaaaaacgaagagtttgcactgaacgttgccgaaggactgacgagccttgtcaaccccaatccgaggataaaagtcccgattcttgcaggcatccgcaacctgaaaaacatcaagccgacagttaccggcagcgatcccttattggcgggtgcggggaatatccgtatccctgcaaacggcaatgttgcgaagggggacaggattccggatacggcattggctagcaagggaatcaaacataaaaatcgtaaagatcaactggaaaaaaataaaaaatctggtgaggattttgagatggaaatttatcagaagaaagttaaacaaggctttaaaccgcaaagacagattacagttaaaacaaaaagtggtgtaaaaactaggcttgatattatttcgaaagaaggtggtcttgatgtttgtacagagtgtaaggcttcaataactgcgccacttactaaaaatcagaaaaaagcttttcctgaaattgaaagaacgggagcaacagtggtcggtaagggaaaaccgggctatccaaaggggaccaaaattgaacctactaaagttataattgaaaggaaaagataa

SEQ ID NO: 43468 - DNA, 477 bp, Neisseria meningitidis
atgaacaccatcgcccccaacctcgacggcaaacacctccgcatcggcatcgtacaggcacgcttcaccaacgaaatcggcagcgaaatgctcaaagtctgctgccgcaccctccaagaattgggcgtggcagacgaaaacattaccgtcgccaccgtacccggcgcgcttgaaatccccatcgcgctgatgaactttgcctcttccgaaaagtttgacgcactgattgccatcggcgtcgtcatccgtggcgaaacctaccatttcgagctggtttccaacgaatccggagcaggcgtcagccgcgtcgcactcgactacaatatcccgattgccaatgccgtcctaaccaccgaaaacgacgcgcaggcaatcgaacggattgaagaaaaagcctcggatgccgccaaagtcgccgtcgaatgcgccaacctcgtcaacctgctgctcgaagaacagtttgaagacgaagaataa

SEQ ID NO: 43469 - DNA, 1083 bp, Neisseria meningitidis
atgtttttatggctcgcacatttcagcaactggttaaccggtctgaatatttttcaatacaccacattccgcgccgtcatggcggcgttgaccgccttagcgttttccctgatgttcggcccgtggacgatacgcaggctgaccgcgctcaaatgcgggcaggcagtgcgtaccgacggtccgcaaacccacctcgtcaaaaacggcacgccgacgatgggcggttcgctgattctgaccgccattaccgtgtccaccctgttgtggggcaactgggcaaacccgtatatctggattctcttgggcgtattgctcgccacgggcgcactcggtttttacgacgactggcgcaaagtcgtctataaagaccccaacggcgtgtccgccaaattcaaaatggtgtggcagtcaagcgttgccattatcgccagtttggcattgttttaccttgccgccaattccgccaacaatattttgattgtcccgttcttcaaacaaatcgccctgccgctgggcgtggtcggctttttggtgttgtcttacctgaccatcgtcggcacatccaatgccgtcaacctcaccgacggcttggacggccttgcgaccttccccgtcgtcctcgttgccgccggcctcgccatcttcgcctatgccagcggccactcacaatttgcccaatacctgcaattaccttacgttgccggcgcaaacgaagtggtgattttctgtaccgccatgtgcggcgcgtgcctcggtttcttgtggtttaacgcctatcccgcgcaagtctttatgggcgatgtcggtgcattggcattgggtgccgcgctcggtaccgtcgccgttatcgtccgccaagagtttgtcctcgtcattatgggcggattatttgtcgtagaagccgtatccgttatgcttcaggttggctggtataagaaaaccaaaaaacgcatcttcctgatggcgcccatccatcaccactacgaacaaaaaggctggaaagaaacccaagtcgtcgtccgcttttggattattaccatcgtcttggtgttgatcggtttgagtaccctcaaaatccgctga

SEQ ID NO: 43470 - DNA, 714 bp, Neisseria meningitidis
ttgcggcggcaatttgcagcatcggatgcctgccgcacgggtttgaaggagggggaaataatgggattgggcatggaaatcggcaagctgattgtggcttttttggtgctgattaatccgtttagcgcgttgtcgctttaccttgacctgaccaacgggcacagcacgaaggagcgcaggaaggtcgcgcggacggccgccgttgccgtgtttgccgtgattgcggtatttgcgctgatcggcggtacgctgctgaaggttttgggcatcagcgtcggttcgtttcaggtcggcggcgggattttggtgctgctgatcgccatttcgatgatgaacggcaacgacaatcccgccaagcagaatctcggcgcgcagccggaaacggggcaggcgcgccccgcccgcaatgccggagcgattgccgtcgtgcccatcgccataccgatcaccatcggcccgggcggtatttcgaccgtgattatttacgcttcggcggctaaaacatacggcgacatcgcgttgattatcgcggccggtttggtggtcagtgcgatttgttatgccattttaatcgttgccgggaaggtcagccgcctgctgggcgcgacggggctgacgattttaaaccgcattatgggtatgatgctggcggcggtatcggtggagattattgtgtcgggactgaaaacgatattcccgcaactggcaggttga

SEQ ID NO: 43471 - DNA, 1218 bp, Neisseria meningitidis
atggcgttaatcgtacataaatacggcggcacatcagtaggctcgcccgaacgcatcaaaaacgtagccaaacgtgtcgccaaagcccgcgccgaaggacacgacatcgtagtcgtcgtatccgccatgagcggcgaaaccaaccgactggtcgcactggcgcacgaaatgcaagagcatcccgatccgcgcgagctggacgtcgtcttagctaccggcgaacaagtaaccatcggccttttggcgatggcattgaaagacatcggcgtggatgccaaaagctacacaggctggcaggtcgccctcaaaaccgataccgcccacaccaaagcccgcatcgaaagcattgatgacgaaaaaatgcgtgccgaccttaccgccggcaaagtcgtcatcgttgccggcttccaaggcatcagcagtgaaggcgatatttccacgctcggacgcggcggttccgacacttccgccgtcgcgcttgccgccgcgctcaaagccgacgagtgccaaatctataccgacgtagacggcgtttacacaaccgacccccgcgtcgtacccgaagcgcgccgcatggatacggttacatttgaagaaatgatcgaactggcaagcctcggttcgaaagttttgcaaatccgttcagtagaattcgccggaaaatacaaagtgcgcctgcgcgtactgagcagcctgcaagacggcggcaatggcaccttaattacctttgaagaggacgacaacatggaaagagctgccgtaaccggtatcgcattcgataaaaaccaagcccgcatcaacgtgcgcggcgtacccgacaaacctggcgtcgcctatcagattttaggcgcggttgccgatgccaacatcgaagtcgatatgattatccaaaatgtcggcagcgaaggcacaaccgatttttcctttaccgtaccgcgcggcgattacaagcagactttggaaatcctgtcggaacgccaagacagtatcggcgcggcttctattgatggcgacgacaccgtatgcaaagtctccgcagtcggtttgggtatgcgttcgcacgtcggtgtagccgccaaaatcttccgcacgctcgccgaagagggtatcaacatccaaatgatttccacctccgaaatcaaagtttccgtattgattgatgaaaaatacatggaactggcaaccagggtattgcataaagcctttaatttgggctga

SEQ ID NO: 43472 - DNA, 393 bp, Neisseria meningitidis
atgaacggtaaatactactacggcacaggccgccgcaaaagttcagtggctcgtgtattcctgattaaaggtacaggtcaaatcatcgtaaacggtcgtcccgttgacgaattcttcgcacgggaaaccagccgaatggttgttcgccaacccttggttctgactgaaaacgccgaatctttcgacatcaaagtcaatgttgttggcggcggcgaaaccggccagtccggcgcaatccgccacggcattacccgtgccctgatcgacttcgatgccgcgttgaaacccgccttgtctcaagctggttttgttacccgcgatgcccgcgaagtcgaacgtaaaaaaccgggtctgcgcaaagcacgccgtgcaaaacaattctccaaacgttaa

SEQ ID NO: 43473 - DNA, 159 bp, Neisseria meningitidis
atgaaaacccccctccccatctgcaccctgtcggcactcgccgcctgcaccctttccggacaaggcggcagcagggtttacggcgaaatcaaagcccgagacctttgcgttaccgctcctatcctgctttctgctttctgtcttgcctgctctcgttga

SEQ ID NO: 43474 - DNA, 1173 bp, Neisseria meningitidis
atgaaacaaattaatcaagcattgcaacaaaaactggttgaatttaaagaaaaatcaggcatgaaccaaacccaactggcacgcggtatcggtacttcgccggcatccatcagtatgtatctgaacggcacttatgcggaaaaaggcggcaattatgaaaccatcgagccgaaaatcgaggcgtttttggagatgcaggacagtaaagcgcaacgcgaagagctggtgttgggttttgtatcgactaagacgacccgccgtattgcagaagtgatgcgcgatgcgcacgaaggcggcgaaacagtggtgatctacggtcaggcgggattgggcaagactcaggcggtcaaaaactactgcgagaaaaaccctgcggccatcttgattgaggctaatccgagctttacggctttggtcttgatgcgcaagttggcgactgcggcgaaggtatcggcgatgggcagcctgaatgatttgtttgagtctgtatctgaccgcctgcgcgattcgggccgtctgattgtggtcgatgaagcggaaaacctgcctttacgcgcccttgaaattgtacgccgtctgcacgacgagactggctgcggcttggtgttgagcggtatgccccgactggtggccaacctgcgcggtaagcatggcgaactggtacagctttacagccgcgtgtctgttgcgctgaatttgggcgaatctttgccggatgacgaactctttgagattgcgaaagcggctttgcctgatgcggtcaagcatctgctccctgatagtgtacaagcgttgattacggtcatcgggtttaatgaaacgctggagctggtgcgcctgatgggcggtacgacttatcctttgcggcagggttatacgaaaaacagtcaatcccgtgttgcatacttggaagagattatcggcagtgaggcggccggtcggctggtggaggcaatggctccgtgcaatctgtttataccccgttgcgagacggccttgtatgagttgcgaaaccgtaaaatccgcagtcagtttgaccggcagacggcaggcggtacccctgcttatgaggccgttaacgatttggccttggcacaccgcctaagcgaccgccatgtgtggcgaattttaaagcaggcggataaggaagcggagcaggagaatttgttttag

SEQ ID NO: 43475 - DNA, 603 bp, Neisseria meningitidis
atgttcaacataccggctgttgctgtttcctatctgatcggctcactttctttcgccgtcatcgtgtccaagtattacggcatggacgacccgcgcacctacggatcgggcaatccgggggcaaccaatgttttacgcagcggcaaaaaaaaggcggccgcgctgacgctcttgggcgatgccgccaaaggtttagttgccgttttgcttgcacgcgtgcttcaagaaccgctcggtttatccgacagcgcaatcgcggccgtcgcactcgccgcgctggtcgggcatatgtggccggtgtttttcggatttaaaggcggcaaaggcgtggcaacggcattgggcgtgcttctggcactctctcccgcaactgccttggtctgcgcgttgatttggcttgttatggcattcggcttcaaggtgtcctcccttgccgcattaaccgccacaatcgccgcaccggtcgccgcatccttctttatgccgcacgtctcgtgggtttgggcgaccgtcgccattgctttgctggtgttgttccgccacaaaagtaatatcgtcaagctgctcgaaggcagagaaagcaaaatcggcggcagccgctga

SEQ ID NO: 43476 - DNA, 1314 bp, Neisseria meningitidis
atgatgaacacgccgcatccgcgcccgaaaatcgccgtcatcggcgcaggctgggcaggactgtccgccgccgtcaccttggcgcggcacgccgacgttaccctgtttgaagccggccggcaggcgggcggcagggcgcgcacactggccggaaataccgacggtttcggttttttggacaacgggcagcacattttgctcggcgcataccggggcgtgttgcgcctgatgaaaaccatcggttcggatccccgtgccgcctttttgcgcgtaccgctgcactggcatatgcacggcggtttgcagttccgcgccctccccctgcccgcgccgctgcatattttgggcggcgtgctgcttgcccggcgtgcaccgactgcattcaaagccaaactgcttgccgatatgtccgatttgcagaagtccgcacgcctcggacagcccgacacgacagtggcgcaatggctgaaacagcggaacgtgccgcgtgccgccgtgatgcagttttggcagcccttggtttggggcgcgctcaacacgcctttggaaaccgcaagcctgcgcgtgttgtgcaacgttttgtccgacggcgtgctgacgaaaaaatccggcagcgactatctcctacccaagcaggatttgggcgcaatcgtcgccgaacccgccttggcggatcttcaacggctcggcgcggacatccgcctcgaaacgcgcgtatgccgtctgaacaccctcccggacgggaaagtgctcgtcaacggcgaagctttcgatgccgccgtccccgccaccgcgccctaccacgccgccgcgctcctgcccgaaggcacgcccgaacacgttcagacggcatatcaaaaccttcgctaccacgccatcaccaccgtctatctgcgctacgccgaacccgtccgcctgcccgccccgctgaccggccttgccgacggcacggtgcaatggctgctttgccggggcaggctcggactgcctgaaaacgaagtgtccgccgtcatcagcgtttccgaccgcgtcggcgcgtttgcaaaccgggcgtgggcggacaaagcccacgccgacctcaaacgcatccttccgcatttgggcgaacccgaagccgtgcgcgtcatcaccgaaaaacgcgccacaaccgcagccgatgccccgccgccggacttgtcgtggttgcaccggcaccgcatcttccccgccggcgactacctccacccggactaccccgccacgctcgaagccgccgtacaatcaggtttcgcgtcggcggaagcctgcctgcaaagcctgagcgatgccgtctga

SEQ ID NO: 43477 - DNA, 1158 bp, Neisseria meningitidis
ttgaatatccggaaaacctattataataatccagtgttgatgccgtctgaacattcaggcggcgtttgttatggaagaattatgaagccgtctatcttagaaaaactacaacaactcagcgaccgactggaagaagttacccaccttctcggacagcccgaagccacgtccgacatggacaactaccgcaagctcacgcgcgaacacgccgaactgacccccgtcgtcgaagtgttccaaaactatcggcttgcccaaagcgacttggcggatgccgaagaaatgttgtccgaccccgaaatgaaagactttgccgccgaagaaatcgaagcggccaaagccaaaatcggcgaactcgataccgaactgcaaaaactgctgctgcccaaagatgccgacgacgacaaaaacatcttcatcgaaatacgcgccggaacgggcggcgacgaagccgcgctgtttgccggcgatttgctgcgtatgtacagccgctacgccgagcgcaaccgttggcaggttgaaatcgtgtccgccaacgaaagcgaattgggcggctataaagaagtcatcgcccgtattgtcggactcggggcgtacagccgtttgaaatttgaatcgggcggacaccgcgtgcagcgcgtccccgccaccgaaagccaaggccgcatccacacctccgcctgcaccgttgccgtcatgcccgaagcggacgaactggaagacatcgaactgaacccagccgacctgcgcatcgacaccttccgcgcatccggcgcgggcggtcagcacatcaacaaaaccgactccgccgtccgcatcacccacctgcccaccggcatggtggtcgaatgccaagacggccgcagccaacatgccaacaaagcgcaggcaatgaaagtcctcgccgcccgcctgaacgacgcgcaaaaacgcgaagcccaagccaaagaagccgccgagcgcaaatccctcatcggcagcggcgaccgcagcgaacgcatccgcacctacaactatccccaaggccgcgtaaccgaccaccgcatcaaccttaccctgcacaagctggattttgtgatggacggcgacttggaagaaatcaccaatgccctgattgccgagcatcaggccgagcttctggcggcaatgggcgattga

SEQ ID NO: 43478 - DNA, 2829 bp, Neisseria meningitidis
atgatggacgaaaaactcaatttctcttacctgttcggttcaaacgcaccttacattgaggaattgtacgaggcttttttggaaaaccccgatgcggttgatgaaaaatggaagcagtatttcaccgatttgagcaaacagccggggacggttgctgtcgatgtcgcacacacaccgattcgcgaatcatttgttactttggcgaaaaagaaaattgcatctgccgttgcgggcggtgcggatgaggcaatgctgaaaaagcaagtcagcgttttacggctgatttccgcctatcgtatccaaggcgtgggtgcagcccaacttgatccgctcaaacgtatccccccgcgcgatattgaagccctcgatccgaaattccacggtctgtcagatgccgatatggcgcttcaattcaatatgggcgagggcgattttgccaatcgcggcaaactgcctttgtcccaaatcatcagcaacctcaaacaaacctactgcggccacatcgcattggaatatatctatattcccaataccgaagagcgccgctgggtacgcaattattttgaaagcgtattgtccacaccgcattacaatgccgatcaaaaacgccgtatcttgaaagagatgactgctgccgagactttggaacgttatctgcataccaaatatgtcggtcagaaacgtttcggtgtcgaaggcggcgaaagcgcgattgccggtttgaactacctgattcaaaacgccggtaaagacggtgtggaagaggtcatcatcggtatggcgcaccgtggccgtctgaatgttttggtgaacattttgggcaaaaaacccggcgatttgtttgccgaatttgaaggtcgtgccgaaatcaaactgcccagcggcgacgtgaaataccatatgggcttcagctccgatattgccacgccgcacggcccgatgcacgtttctttggcgttcaacccgtcacacttggaaatcgtcaacccggtggtggaaggttctgcgcgcgccaaacaaaaacgtttgggcgaaaacggccgcgacaaagtcttgccggtattgattcacggcgactccgcatttatcggtctgggagtcaaccaagcgacattcaacctgtctaaaacgcgcggttataccaccggcggtacggttcatatcgtcatcaacaaccaaatcggctttaccacttccgatatccgcgatacccgttcaaccgtacactgtaccgatatcgcaaaaatggtttccgccccggttatccatgtgaacggcgatgatcccgaacgcgtttgctttgctatccaagccgctttggattaccgcaaaaaattccataaagacatcgtgattgacgttgtctgctaccgtaaatggggtcacaacgagggcgatgatccgaccttgacccaaccgatgatgtacaaaaaagtatcgcaacaccccggtgcgcgtgctttgtacaccgagcaactgattgccgaaggcgtggtaacccaagccgaggctgacggttacatccaagcttaccgtgatgctttggacaaaggcgagcacgtcgagcaaacaacgttgagcaacttccaacgcacgcaaatcgactggagcaaataccaaggcaaagattggcgcgaacacatcgaaaccggtttgcctgccgcagatattgaacgtctcactgagaagtttaccgccgtaccggaaggctttgccctgcatccgactgcaaaacgtgtgattgaagcgcgtaaagccatggcatccggcaaacaggccatagattggggtatggccgaaaccttggcatacgccagcctcgtaaccaaaggtcacggcgtgcgtatttccggcgaggactcgggacgcggcacgttctcgcaccgccacgccgtattgcacgatcaaaaacgcgaaaaatgggacgacggtacttatgttcctctgcgccatatgggcgaaggcatgggcgagttcctggttatcgactccattttgaacgaagaagccgtgatggcgttcgagtacggctttgcctgctccgcacctgacaaactgaccatttgggaagctcaattcggtgacttcgccaacggcgcgcaagtgactattgaccaattcctgtcttcaggcgaaaccaagtggggtcgtttgtgcggtctgactaccatcctgccgcacggctacgacggtcaaggccccgagcactcttctgcacgcgtagaacgttggttgcaactgtgttctgagaacaatatgcaagtcattatgccgtctgaagcgtcgcaaatgttccacctcttgcaacgtcaagtcttgggttcataccgcaaaccgctggtgattttcatgtccaaacgcctgttgcgcttcaaaggtgcaatgagcccgctggaaaacttcaccgaaggttcgaccttccgtccggttatcggcgataccgcagaacgcgcaagcaacgacagcgtgaaacgcgtggtattgtgtgccggtcaggtttactatgacttggaagccggccgtgccgagcgtaaactggaagatgatgttgctattgtccgcgttgagcagctgtatccgttcccatatgacgaggttaaagctgaactggcgaaatatccgaacgcaaaatctgtggtttgggcacaagaagagccgaaaaaccaaggcgcgttctaccaaatccgccaccgcatcgaagatgttattagcgaagagcaaaaactgtcttatgccggtcgtccaagcagcgcatcgcctgcagtgggctactcaagcaaacacattgctcaattgaaacaattggttgaagacgctttggcattgtaa

SEQ ID NO: 43479 - DNA, 1881 bp, Neisseria meningitidis
atgaatattttttacgaagagtccggccaattcaaaatcgccgccatcatccaaaaaaacgatgccacctaccaagtcgataccccacacggcaaacgcaccaaagtgaaggcgaacaacgtctttgccgagtttgacggcgatatggcggcgtttttggaaaacgcgcaggcacaggcggcggacatcgacaccgatttattgtgggaagtatgcggcgaagaggaatttaccgccgaagccatcgccgaagaatattacggccatgcgccgaccaaaaccgagctggcggcaactttgattgcgctttacgccgcgccgatgtatttctacaaaaaagccaaaggcgtgttcaaagccgcgcccgaagaaactttaaaacaagcacttgccgccatcgaacgcaaaaaacagcaagacgcgcaaatcgacgcttgggcagaagccttgaaacgcggcgagatgccgtctgaaatcgcggcggatttgaaaaccatcctgcacgcgcccgacaagcagtcgctgacctacaaagcctttaccaaagccgccgacgcgctgaaaacctctgcctacgaattggcgaaaaaaacgggcggcattacgtccattccccaatacctgcaagacgggtttgaaatcaaatacttccctaaaggaacaggcttccccgaccttgcccttcccgaaatgcccgacctgcccaaggccgacgttaccgccttttccattgacgacgaatcaaccaccgaagtggacgacgctttaagcctgaccgacttggacaacggcacgaagcgtgtcggcatccacatcgccgcgccgtcacttgccgttaaaccgggcgacaaaatggaaaaaaacatcatggaacgcttgagcacggtttatttccccggcggcaaaatcacgatgctgcccgaaaactggattgccgcgttcagccttgatgcaggcgcacaccgccctgccgtcagcatttatttcgatgtggacggcgagttcaacgtcggcgcgccgacctgcaaaatcgaagcggtcaacatcgccacaaacctgcgtatccaagccatcgagccgcatttcaacgccgaaaccggcttggacgaagccggcgaaatgatgttcgcccaccatcaagacctgatttggttctatcaattcgccaccgccctgcaaaaagcgcgcggcaaatacgaacccgaccgcgcgccgcaatacgattacagcatcgaattggatgaggaaggcaaggtatccgtcgtccgccgcgaacgcggctcacccatcgatacgctggtcagcgagatgatgattcttgccaacagcacttgggcacaaatgctccatgacaacgacctgcccggcctcttccgcgtccaacccaccggaaaagtacgcatgagcaccaaatccgagccgcatatcggcatgggcgtgcagcattacggctggtttacctcgccgctgcgccgcgccgccgactacatcaaccaaaagcagctgatcagcctgatagacgacactgccgagccgctgtatcaaaacagcgatgccgagcttttcgccgcactgcgcgactttgatgccgcctataccgcctacgccgatttccaacggcagatggaagcctactggagccttgtgtacctgcaacagcaaggtacaagcgagctgaccgcgaccatcctcaaagaagacctcgtccgcatcgaaggcctgccgctggtcacgcgcgcgaccggtattccgtttgacgcactgcccaaatcacaggcattgttcaaaatcaccgaattggatgccgagaagcagtttgtctcgctcaactacatcaaggcagtcgcacccgcgggtacaacggcaggcaatgccgtctga

SEQ ID NO: 43480 - DNA, 207 bp, Neisseria meningitidis
atgaagttcggaaaatcccttgaaggcaggcttgatgcccgtctgattgaatccgcattggattatattcattattcggaacgttttttggcttttgaaatcctgtgtacttatatcgaagatttcgatgtccggctgacggaacaagaatcccgggaaatttcttttatcaacaaggaatttgagatagaaagcacgtccgattaa

SEQ ID NO: 43481 - DNA, 966 bp, Neisseria meningitidis
atgagctacacgcaactgacccaaggcgaacgataccacatccaatacctgtcccgccactgcaccgtcaccgaaatcgccaaacagctgaaccgccacaaaagcaccatcagccgcgaaatcagacggcaccgcacccaagggcagcaatacagcgccgaaaaagcccagcggcaaagccggactatcaaacagcgtaagcgacaaccctataagctcgattcgcagctgattcagcacatcgacacccttatccgccgcaaactcagtcccgaacaagtatgcgcctacctgtgcaaacaccaccggatcacgctccaccacagcaccatttaccgctaccttcgccaagacaaaagcaacggcagcacgttgtggcaacatctcagaatatgcagcaaaccctaccgcaaacgctacggcagcacatggaccagaggcaaagtacccaaccgtgtcggcatagaaaaccgacccgctatcgtcgaccagaaatcccgtatcggcgattgggaagccgacaccattgtcggcaaaggacagaaaagcgcattattgaccttggtcgaacgcgttacccgctacaccatcatctgcaaattggatagcctcaaagccgaagacactgcccgggcagctgttagggcattaaaggcacataaagacagggtgcacaccattaccatggataacggcaaagagttctaccaacacaccaaaataaccaaagcattgaaagcggagacttatttttgtcgcccttaccattcttgggagaaagggctgaatgagaacaccaacggactcatccggcaatacttccccaaacaaaccgatttccgtaacatcagtgatcgggagatacgcagggttcaagatgagttgaaccaccgaccaagaaaaacacttggctacgaaacgccaagtgttttattcttgaatctgttccaaccactaatacactag

SEQ ID NO: 43482 - DNA, 1641 bp, Neisseria meningitidis
ttgtctttaccgtacaaacgctggcactatttcaacctgataaaaaacagccttcaaaaaggttgtttaaaacagcagcagacacttaccgccacaaccttgaaaaggaacacaatcatgaccgtcatcaaacaggaagactttatccaaagcatttgcgatgccttccaattcatcagctactatcatcccaaagactacatcgacgcgctttataaggcgtggcagaaggaagaaaatcctgccgccaaagacgcgatgacgcagattttggtcaacagccgtatgtgtgcggaaaacaaccgccccatctgccaagacacaggtatcgcaaccgtcttcctcaaagtcggtatgaacgtccaatgggatgcggacatgagcgtggaagagatggttaacgaaggcgtacgccgcgcctacacttgggaaggcaatacgctgcgcgcttccgtcctcgccgatccggccggcaaacgccaaaacaccaaagacaacacccccgccgtcatccatatgagcatcgtgccgggcggtaaagtcgaagtaacctgcgcggcaaaaggcggcggctctgaaaacaaatccaaactcgccatgctcaatccttccgacaacatcgtcgattgggtattgaaaaccatcccgaccatgggcgcgggctggtgtcctcccggcatcttgggtatcggcatcggcggcacgcccgaaaaagccgtgctgatggcaaaagagtccctgatgagccacatcgacattcaagaattgcaggaaaaggccgcgtccggcgcggaattgtccaccaccgaagccctgcgcctcgaactctttgaaaaagtcaacgcgctgggcatcggcgcacaaggcttgggcggactgaccaccgtgttggacgtgaaaatcctcgattatccgacccacgccgcctccaaaccgattgccatgattccgaactgcgccgccacccgccacgtcgaatttgaattggacggctcaggccctgtcgaactcacgccgccgcgcgtcgaagactggcccgatttgacttacagccccgacaacggcaaacgcgtcgatgtcgacaagctgaccaaagaagaagtggcaagctggaaaaccggcgacgtattgctgttgaacggcaaaatcctcaccggccgcgatgccgcacacaaacgcctcgtcgatatgctcaacaaaggcgaagaattgcccgtcgatttcaccaaccgcctgatttactacgtcggccccgtcgatccggtcggcgatgaagtcgtcggtccggcaggtccgaccacagccacccgcatggacaaattcacccgccaaatgctcgaacaaaccgacctcttgggcatgatcggcaaatccgagcgcggcgtggccacctgcgaagccatcgccgacaacaaagccgtgtacctcatggcagtcggcggcgcggcgtatctcgtggcaaaagccatcaaatcttccaaagtcttggcgttccccgaattgggcatggaagccatttacgaatttgaagtcaaagacatgcccgtaaccgtcgccgtagatagcaaaggcgaatccatccacgccaccgccccgcgcaaatggcaggcgaaaatcggcatcatccccgtcgaatcttga

SEQ ID NO: 43483 - DNA, 291 bp, Neisseria meningitidis
atggcgaaatactttaccgagacgggtattagcgtccgtgagcattttgatttcttcggtgagtttgtcgtttcgccggcagcacgttcgggtgatttggcacttacttacggtttgaggctggaagcgggcgaagagggtttgagccttgccgagcttttcgataagcgttccgatagtcaggagccggtcgagggcggccgtattgacatcggcggctttatgctgaccgcaaaggaggttgacggtggcggcaatatcgggtctatggggctgaaagtgctgcgttag

SEQ ID NO: 43484 - DNA, 531 bp, Neisseria meningitidis
atgaaattcgtcagcgaccttttgtccgtcatcctgtttttcgccacctataccgttaccaaaaacatgattgccgcaacggcggtcgcattggttgccggtgtggttcaggcggcttttctgtattggaaatataaaaagctggatacgatgcagtgggtcggattggtgctgattgtggtattcggcggcgcaaccattgttttgggcgacagccgcttcattatgtggaagccgagcgttttgttttggctgggcgcgctgttcctgtggggcagccacctcgccggtaaaaacggcttgaaggcgagtatcggcagggagattcagcttccggatgccgtatgggcgaaattgacgtatatgtgggtcggtttcctgatttttatgggtatcgccaactggtttgtgtttacccggttcgagtcgcaatgggtcaactataaaatgttcggctcgactgcactgatgcttgttttctttattattcagggtatttatctgagtacctgtctgaaaaaggaggattga

SEQ ID NO: 43485 - DNA, 1101 bp, Neisseria meningitidis
atgacccgtatcgccatcctcggcggcggcctctcgggaaggctgaccgcgttgcagcttgcagaacaaggttatcagattgcacttttcgataaaggctgccgccggggcgaacacgccgccgcctatgttgccgccgccatgctcgcgcctgcggcggaagcggtcgaagccacgcccgaagtggtcaggctgggcaggcagagcatcccgctttggcgcggcatccgatgccgtctgaacacgcacacgatgatgcaggaaaacggcagcctgattgtgtggcacgggcaggacaagccattatccagcgagttcgtccgccatctcaaacgcggcggcgtagcggatgacgaaatcgtccgttggcgcgccgacgacatcgccgaacgcgaaccgcaactcggcggacgtttttcagacggcatctacctgccgaccgaaggccagctcgacgggcggcaaatattgtctgcacttgccgacgctttggacgaactgaacgtcccctgccattgggaacacgaatgcgtccccgaaggcctgcaagcccaatacgactggctgatcgactgccgcggctacggcgcaaaaaccgcgtggaaccaatcccccgagcacaccagcaccctgcgcggcatacgcggcgaagtggcgcgggtttacacacccgaaatcacgctcaaccgccccgtgcgtctgctccatccgcgttatccgctctacatcgccccgaaagaaaaccacgtcttcgtcatcggcgcgacccaaatcgaaagcgaaagccaagcccccgccagcgtgcgttcagggttggaactcttgtccgcactctatgccatccaccccgccttcggcgaagccgacatcctcgaaatcgccaccggcctgcgccccacgctcaaccaccacaaccccgaaatccgttacaaccgcgcccgacgcctgattgaaatcaacggccttttccgccacggtttcatgatctcccccgccgtaaccgccgccgccgccagattggcagtggcactgtttgacggaaaagacgcgcccgaacgcgataaagaaagcggtttggcgtatatccgaagacaagattaa

SEQ ID NO: 43486 - DNA, 1083 bp, Neisseria meningitidis
atgccgtctgaagccgcttcagacggcattttgccgctttaccctacccgcactatttttcagaaaccgatcatgcttccattctttccagaaccctccctttcctatacgcaacaaaaccgtaccgccgttttgctgttgaacctcggcacgcccgacgcgccgaccgcgcaggcggtacgaccttatctgaagtcctttctgaccgaccggcgcgtcgtcgaactgcccaaatggctgtggtatcccattctgcatggtctggtactgacgctccgccccaaaaaaagcgcgcacgcctatgaaaaaatctggtttaaggaaggttcgcccttagaagtttacacagcacgccaagctgccgcgcttgccaaacgtatgcccgacctcatcgtccgccacgccatgacctacggcaatccttcggtggcagacgtattgtcggaactgaaggcgcaaggcgcgggcagactgctggtcatcccgatgtacccgcaatatgccgcttccagcagcggagcggcagtagataaggtgtgcgaacaattactgctgcaacggaaccaaatgagcgtccgcaccgtttcgcgcttttatgacgataccggctacattgatgcgatgaaaaaccacatcctccgatattgggcggaacacgggcgcgggaaaaaactgatgttgagttttcacggcgtaccgcagaagcaccacgacctcggcgacccctatcccgacgagtgccgccacaccgccaaactgcttgccgaagcactggaactgaccgaagaccaatatgtcgtatcgttccaaagccaattcggcagggcaaaatgggttacaccgagcacgcaggatttgttcggcaaactgcccaaacagggggtaaccgagctggacgtattttgcccgggctttttggcagactgtttggaaaccatggaagaaatcgccctgatggggcgggaacagttttatgaagcaggcggcaaaagctaccgctacatcccctgcctcaacgacaaccccgactggatagatgcactcgtcgcacttgccgaagaaaaccttggcagctggcgttga

SEQ ID NO: 43487 - DNA, 1578 bp, Neisseria meningitidis
atgcgcgccaaccccaaaacacaggcaatgccgtctgaaaccatatccctgatgaaaacacgcagcctaatttcccttttatgcctccttctctgttcatgttcttcatggttgcccccactggaagaacggacggaaagccgtcatttcaatacttccaaacccgtccgcctggacaacatcctgcaaatccggcacacccctcataccaacgggctatccgatatctatctgttgaacgacccccacgaagcctttgccgcccgcgccgcccttatcgaatctgccgaacacagcctcgatttgcaatactacatctggcgcaacgacatttccggcaggctgctgttcaacctcgtgtaccttgccgcagaacgcggtgtgcgcgtacgcctgctgttggacgacaacaacacgcgcggattggacgacctcctgcttgccctcgacagccatcccaatatcgaagtgcgcctgttcaaccccttcgtcttacgaaaatggcgcgcactcggctacctgaccgacttcccccgcctcaaccgccgcatgcacaacaaatcctttaccgccgacaaccgcgccaccatactcggcggacgcaatatcggcgacgaatacttcaaagtcggtgaggacaccgttttcgccgatttggacatcctcgccaccggcagcgtcgtcggcgaagtatcgcacgacttcgaccgctactgggcaagccattccgcccacaacgccacgcgcatcatccgcagcggcgacatcggcaagggtcttcaagcactcggatacaacgacgaaacgtccagacacgcgctcctgcgctaccgcgaaaccgtcgaacagtcgcccctctaccaaaaaatacagacaggatgcatcgactggcagagcgtccgaacccgcctcatcagcgacgaccctgcaaaaggactcgaccgcgaccgccgcaaaccgccgattgccgggcggctgcaagacgcgctcaaacagcccgaaaaaagcgtctatctggtttcaccctatttcgttcccacaaaatccggcacagacgcactggcaaaactggtgcaggacggcatagacgttaccgttctgaccaactcgctgcaggcgaccgacgttgccgccgtccattccggctatgtcaaataccgaaaaccgctgctcaaagccggcatcaaactctacgagctgcaacccaaccatgccgtccccgccacaaaagacaaaggcctgaccggcagctccgtaaccagcctgcacgccaaaaccttcattgtggacggcaaacgcatcttcatcggttcgttcaacctcgacccccgttccgcgcgtctcaacaccgaaatgggcgttgttatcgaaagccccaaaatcgcagaacagatggagcgcacccttgccgataccacacccgcctacgcctaccgcgttaccctcgacaggcacaaccgcctgcaatggcacgatcccgccacccgaaaaacctacccgaacgaacccgaagccaaactttggaaacgcatcgccgcaaaaatcctatccctgctgcccatagaaggtttattatag

SEQ ID NO: 43488 - DNA, 1470 bp, Neisseria meningitidis
atggaaaaacataatgggacttatcgggatttgcaccgtccagcttcggaatttgcgacgcgggacgaatatttggaacatgaattgcagattatgcaaccaaaacgctggcggcccaacctgccctttcgcgattaccgcttcgagtgggaggatttgattcctgcgatggcgggaacgattggaaaagtggtgatggtgggggcggtggcggcggcgtttgccgcacctttggggctgcctgacagctttgtactggaaaatgtgcgctatgagcttttaatcgccgccgcgtttatcttattggtatcgggcttttttctgcccggcgccaacctgcccggtacgcacgggccgctgattccgatgattcccatcgttgtgtcggcaggcgggcatcctttggcgttcggcatttcgattgcggttttaggtctgctgatggctttatttcgcggcggcagtattatggcgaagctgacaagcaacggcgtatgcggcggattattactctatttgggctttatcggcacgacggggcaggtaaaaaaattgttttcgtgggcaggcggttttaatatgccctacatcgcttttaccgtcattattgtaacgattgtgatgtacgctttgttggagcattggaaaaaacgctggttagccgtgcctttgggatgcttgattgccggtgtggtggcatttgcattgggtgcgccgtttgagtttcacaccgcccccggcctgcctccaatgagtcctgcttattggtggggtgaaaacagcggctggcatctggggttgccgacggcagaaagttttttggttgtctttccatttgcggtattggctgttgcaatgtggtcgcccgattttttaggacatcaagtgttccaaaaaatcagctatccggaaaaaaccgataaggtattgatgaatatagacgacaccatgacaagttgttctgtccgtcaagcagtgggttctattttagggggtgcaaattttacctcttcttggggaacttatatcgtaccggcatcgattgccaaacgccccattccgggcggtgcggttttaacggcggttttatgtattatcgccgggttatggggctatccgatggacttggcgatttggcagccggtattgagcgtagccttggtcgtaggcgtatacttaccgcttttggaagcgggcatggaaatgacgcgcaaaggcaaaaccacccaatccgccgccatcgtggtgttctcttccgccttggtcaatccggttttcggctgggcgttgacgatgctgttggataatttgggcttaatcggctgcaaagagcgcagtgcgcaattaggtttcgccggacgcgtgttgatacccgcagtaggtttcttgatcttgtgtgtggcgatgggtgcggtcgggatgctgcccggtatcccgccgtttttggaacacttcaaatctttgggctag

SEQ ID NO: 43489 - DNA, 1296 bp, Neisseria meningitidis
gtgattgccatgatttacatcgtactgtttctagctgtcgtcctcgccgttgtcgcctacaacatgtatcaggaaaaccaataccgcaaaaaagtgcgcgaccagttcggacactccgacaaagatgccctgctcaacagcaaaaccagccatgtccgcgacggcaaaccgtccggcgggtcagtcatgatgccgaaaccccaaccggcggtcaaaaaaacggcaaaaccccaagaccccgccatgcgcaacctgcaagaacaggatgccgtctacatcgccaagcagaaacaggcaaaagcctccccgttcaaaaccgaaatcgaaaccgccttggaagaaagcggcattatcggcaactccgcccacaccgtttccgaaccccaaaccggacattccgcaccgaaacctgccgacgcgccggcaaaacctgcacccgttccgcaaacacctgcaaaaccgctgattacgctcaaagaactgtcaaaagtcgaattaccctggtttgacgtgcgcttcgacttcatctcctatatcgcgctgaccgaagccaaagaactgcacgcactgccgcgcctttccaaccgctgccgctaccagattgtcggctgcaccatggacgaccatttccagattgccgaacccatcccgggcatccgctatcaggcatttatcgtgggtattcaggcagtcagccgcaacggacttgcctcgcaggaagaactctccgcattcaaccgccaggtggacgcattcgcacaaagcatgggcggtcagacgctgcacaccgaccttgccgcctttatcgaagtggcttccgcactggacgcattctgcgcgcgcgtcgaccagaccatcgccatccatttggtttccccgaccagcatcagcggcgtagaactgcgttccgccgtaacgggcgtgggtttcgttttggaagacgacggcgcgttccactataccgacacgtcgggctcgaccatgttctccatctgctcgctcaacaacgagccgtttaccaacgcccttttggacaaccagtcctacaaaggcttcagtatgctgctcgacatcccgcactctccggcaggcgaaaaaaccttcgacgatttgtttatggatttggcggtacgcctgtccggccagttgaacctgaatctggtcaacgacaaaatggaagaagtttcgacccaatggctcaaagacgtgcgcacttatgtattggcgcgtcagtccgagatgctcaaagtcggtatcgaaccgggcggcaaaaccgcattgcgcctgttctcctaa

SEQ ID NO: 43490 - DNA, 1512 bp, Neisseria meningitidis
atgaaatggttgaaacgcctgacggttattgtcgggactttttaccgctatcggctggcaggtctgtgtgcttcgctgatgggtagcggttggatatgcgctctgctgaaaatgatgccgcagtcgtccaaattgaaaaacgaaccgcctgctgtccgtctgcgccttgccttggaaagcctggggccgattttcatcaagttcgggcaggttttgtccacacgccccgatttgattccgcacgattacgccgtcgaactggcaaagctgcaagacaaagtgccgccttttgacgcgcggctttcgcgtgaacaaatcgaaaaatcgttgggtcagtccatcgaaaagctgtatgcggaatttgaaaccgagcccatcgccagcgcgtccatcgcccaagtacacaaagcccgcctgcattcgggcgaacaagtggcggttaaagttttgcgccccaaccttttgcccgtgatcgaacaggatttgtcgctgatgcgctttggtgcaggctgggtcgagcgtctgtttgccgacggcaagcgtctgaagccgcgcgaagtggtggcggagttcgacaaatatctgcacgacgagttggacttgatgcgcgaagccgccaatgccagccagctcggacgcaatttccaaaacagcgatatgctgattgtgccgaaggtgttttacgactactgcaccagcgacgtgctgaccatcgaatggatggacggcacgccggtttccgacatcgccaaactcaaagcagacggcatcgatttgcacaaactcgccgattacggcgtggaaatcttcttcacgcaagtcttccgcgacggctttttccacgcggatatgcaccccggcaatattttggttgccgccgacaaccgctacatcgccctcgatttcggcatcgtcggcacgctgaccgattacgacaaacgttatctcgccatcaacttcctcgccttcttcaaccgcgattaccggcgcgtcgccaccgcccacatcgaatcgggctgggtgcccgccgacacgcgcgcggaagagttggaagcggctgtccgcgccgtgtgcgaaccagtgttcaacaaaccgatttcgcagatttccttcggcttggtgctgatgcgcctgtttgaagtcagccgccgcttcaatgtcgaaatccagccgcagctggtattgctgcaaaaaacgctgctcaacatcgaaggcttgggacggcagcttgatcccgatttggacttgtggaaaaccgccaaaccgtttttggtgaaatggatgaacgggcaggtcggccctaaagccctttggcgcaacctcaaaaacgaagcccccgactgggcgcaaatcatcccttcattgccgcgcaaaatcagtgcgttgattgatgaaaaccgccagcaggaaatgcgtgatgcctatatccatttggtcaaagtgcagcagcggcaaagcctgtggctggctgtgattgcggttgttttgctgctgattttgcttttgaaatag

SEQ ID NO: 43491 - DNA, 1179 bp, Neisseria meningitidis
atgacaggcagaacaggccgcaacggcagtacccaagcgcaacccgaacgcgtcatgctggtgggcgtaatgttggacaaagatggcacgggcagcagtgccacccgtctgaacggttttcagacggcattggcggaagctgtcgagctggtcaaagcggcgggcggcgattccgtgcgcgtggagactgccaaacgcgaccgtccgcacaccgcgctgtttgtcggcacgggcaaggcggcggagctgtcagaagcagttgccgcagacggcatcgatttggtcgtattcaaccacgaactcacgcccacgcaggaacgcaaccttgaaaaagaactgaaatgccgcgtattggacagggtagggctgattctggcgattttcgcccgccgcgcccgcacgcaggaaggcaggctgcaagtcgagttggcgcaattgagccatttggcgggacgcttgatacgcggttacggccatctgcagagccagcgcggcggtatcggcatgaaaggccccggcgaaaccaaactggaaaccgaccgccgattgatcgcccatcggatcaatgccttgaaaaaacagcttgtcaacctcaaaaaacagcgcgccctgcgccgcaagccccgcgaatcgggcacaatcaaaacgtttgcgctggtcggctataccaatgtcggcaaatccagcctgttcaaccggctgaccaagtcgggcatatatgcgaaagaccagcttttcgccacactcgacaccacggcgcggcggctgtacatcagtcccgaatgcagcattatcctgaccgataccgtcggattcgtcagtgatttgccgcacaaactgatttcggcattttccgccacgctggaagaaaccgcgcaagccgatgtgctgctgcacgtcgtcgatgccgccgccccgaacagcggacagcagattgaagacgtggaaaacgtactgcaagaaatccatgccggcgatattccgtgcatcaaggtgtacaacaaaaccgacctgctgccgtctgaagaacaaaacacgggcatatggcgcgacgctgcgggaaaaattgccgccgtccgcatttccgttgctgaaaataccggtatagacgcactgcgcgaagccattgccgagtcttgtgccgccgcaccaaacacagacgaaaccgaaatgccatga

SEQ ID NO: 43492 - DNA, 534 bp, Neisseria meningitidis; identical to SEQ ID NO: 37691

SEQ ID NO: 43493 - DNA, 546 bp, Neisseria meningitidis
atgaaacactatgccttactcatcagctttctggctctctccgcgtgttcccaaggttctgaggacctaaacgaatggatggcacaaacgcgacgcgaagccaaagcagaaatcatacctttccaagcacctaccctgccggttgcgccggtatacagcccgccgcagcttacagggccgaacgcattcgacttccgccgcatggaaaccgacaaaaaaggggaaaatgcccccgacaccaagcgtattaaagaaacgctggaaaaattcagtttggaaaatatgcgttatgtcggcattttgaagtccagacagaaagtctccggcttcatcgaggctgaaggttatgtctacactgtcggtgtcggcaactatttgggacaaaactacggtagaatcgaaagcattaccgacgacagcatcgtcctgaacgagctaatagaagacagcacgggcaactgggtttcccgtaaagcagaactgctgttgaattcttccgacaaaaacaccgaacaagcggcagcacctgccgcagaacaaaattaa

SEQ ID NO: 43494 - DNA, 702 bp, Neisseria meningitidis
atgttcagacggcatcggcatttgaaaaatatgcagattaaaaaaatcatgaaatggcttcccgtcgccctgtcgcttttgggtgcgttgggttatacggggtacggcagcgaggcggtgcggacggcggttgccgtactcgacgtactcggcgcggcaggggacgcgggttccgacgcgcccgcccgccgccgagcatcggcgaaatccggccaccgctacacaggcacggtgtccaaagtctatgacggcgacacccttcacgttatcgacggcgacggcgcgaaacacaaaatccggatggcgtatatcgacgcgccggagatgaaacaggcttacggcacgcgttcgcgcgacaacctgcgcgcggcggcggaaggcaggaaagtcagcgtgcgcgtgttcgataccgaccgctaccagcgcgaagtggcgcaggtttctgtcggcaaaaccgatttgaacctgatgcaggtgcaggacggggcggcgtggcattataaaagttatgctaaagaacagcaggataaggcggattttgccgattatgccgacgctcaaattcaggcggaaagggaacgcaaaggattgtggaaagctaaaaatccgcaagcgccgtgggcgtaccgccgagcaggcaggagcggcgggggcaataaggattggatggatgccgtgggcgaatggttgggcatttggtaa

SEQ ID NO: 43495 - DNA, 1281 bp, Neisseria meningitidis
atggaaaactcattgaaagaagccgccctcaagttccacgaattccccgtgccgggcaaaatttccgttaccccgaccaaatctctggcgaccgacaaagatttggcgttggcgtactctccgggcgtagccgctccttgtatggaaatccatgccgatccgcaaaatgcctacaaatacaccgccaaaggcaacttggtcgctgtcatttccaacggtacggccgttttgggcttgggcgacatcggcgcgctggcgggcaaacccgtgatggaaggcaaaggcgtattgttcaaaaaattcgccggtgtggacgtgttcgacatcgaaatcgatgaaaaagacccgcaaaaactcgtggacatcatcgccgctttagagccgaccttcggcggcatcaacctcgaagacatcaaagcacccgagtgtttctacatcgaacgcgaattacgcaaacgctgcaaaatccccgtattccacgacgaccagcacggcacggccatcattaccgccgccgccgtattgaacgccctgcgttttaccggccgtaaaatcgaagaagcgactttggtgtgttccggcgcaggtgcggccgcgattgcctgcttgaaccaattgctggatttgggcttgaaacgcgaaaacgtgaccgtttgcgactccaaaggcgtgatttaccaaacccgcgaagacaaagaccgtatggacgagtccaaacagttctacgccattgaagacaacggccagcgcgtgcttgccgatgccgtcaaaggcaaagacatcttcttgggcctctccggcgcgaacctgctgacgcctgaaatactgaacaccatgaacgaaaaacccatcgtgttcgctatggccaacccgaatccggaaatcctgccgccgctggcgaaagaaacccgtccggacgtggttatcggtaccggccgctccgacttcccgaaccaagtgaacaatgtattgtgcttcccgttcatcttccgcggtgcgttggatgtcggcgcgacgaccatcaacgaagaaatgaaacgcgcctgcgtgtatgctttggcggatttggcgatggaagaagtaaccgaagaagtggttgccgcttacggtaagaaatttgaattcggcgcggaatacctgattccgactccgttcgattcccgcctgctgccgcgcgttgctacggctgccgccaaagcagcgatggaaagcggtgtggcaacccgtccgattgcagatttggaagcttacgctgccaagctgagcgaatggaagctgtaa

SEQ ID NO: 43496 - DNA, 1341 bp, Neisseria meningitidis
ttgcacaccctacttgcctttatcttcgccatcctgattttggtcagcctgcacgaattcggacactacgccgttgccagattgtgcggcgtcaaagtcgtacgcttttccgtcggcttcggcaaaccgtttttcacccgaaagcgcggcgacaccgaatggtgcctcgccccgattccgttgggcggctacgtcaaaatggtcgatacgcgcgaaggcgaagtatcagaagccgatttaccctacgcttttgacaaacaacaccccgccaagcgcatcgccatcgtcgccgccggcccactgaccaacctcgcactggcggttttgctgtacggactgagcttttccttcggcgtaaccgaactgcgcccctacgtcggcacagtcgaacccgacaccattgccgcccgcgccggcttccaaagcggcgacaaaatacaatccgtcaacggcacacccgttgcagattggggcagcgcgcaaaccgaaatcgtcctcaacctcgaagccggcaaagtcgccgtcggcgttcagacggcatcgggcgcgcaaaccgtccgcaccatcgatgccgcaggcacgccggaagccggtaaaatcgcaaaaaaccaaggctacatcggactgatgccctttaaaatcacaaccgttgccggcggcgtggaaaaaggcagccccgccgaaaaagcaggcctgaaaccgggcgacaggctgactgccgccgacggcaaacccatcgcctcatggcaggaatgggcaaacctgacccgccaaagccccggcaaaaaaatcaccctgacctacgaacgcgccggacaaacccataccgccgacatccgccccgatactgtcgaacagcccgaccacaccctgatcgggcgcgtcggcctccgtccgcagccggacagggcgtgggacgcgcaaatccgccgcagctaccgtccgtctgttatccgcgcattcggcatgggctgggaaaaaaccgtttcccactcgtggacaaccctcaaatttttcggcaaactaatcagcggcaacgcctccgtcagccatatttccgggccgctgaccattgccgacattgccggacagtccgccgaactcggcttgcaaagttatttggaatttttggcactggtcagcatcagcctcggcgtgctgaacctgctgcccgtccccgttttggacggcggccacctcgtgttttatactgccgaatggatacgcggcaaacctttgggcgaacgcgtccaaaacatcggtttgcgcttcgggcttgccctcatgatgctgatgatggcggtcgccttcttcaacgacgttacccggctgctcggttag

SEQ ID NO: 43497 - DNA, 912 bp, Neisseria meningitidis
atggacaccctgttcagcctcaaggttttccgccaagtcgtccaaagcggcggcttcacccgcgccgccgacgcgctcggcatctccaccgcaatggcaagcaaacacgtcagccacttggaaaacaccgtccaagccaaactcctgcaccgcaacagccgcaacctcagcctgaccgaagccggggaagaatactaccggcaatgcagttacgcgctcgacacgctcgacgatgccgcgcaaaaagccgccggggggacggaaaaaccgcaggggctgctgcgcgtaacgatgccgctgtggtttgccggcagccagatatgcaactggctggcggaataccgcgaacgttatcccgaagtggcattagaactgattttggacaaccgccacgtcgatttgattgccgaaggcgtggatttggcgttgcgcgtttcccaaaccctgtccccgtcgctgattgcgcgcccactggcggaaatcgaatttgccctgctcgcctcgcccgatttcctgaggcgcaacggcgtgccggaaacgccggaagaagtggcggggctgcccgccgtcctgccgacctacaccaaccagcagaaactcgacctcacccgcaaatcggacggcaaaaaataccggcttgaactgacccccgtcatccgtaccgacaacacgctgatgatgcgcgaaatgattaaggcgggcgcgtgcatcggttatcagccgctttgggcggcggaacacgatttgcgctgcggcacgctggtgaggctgctgcccggatacgccgtcccgaccgaccggctgaatgccgtttatgcagacagggcattcttaagcgcgaaagtccgcagcttcatcgattttctgaacgaaaaaatcgccagcaggaaaggctgccgaaatgccgtctga

SEQ ID NO: 43498 - DNA, 438 bp, Neisseria meningitidis
atgagccgttacctgattacctttgatatggataccaactgcctgaaagacaattaccacggaaataactataccaatgcctactccgatattaaaaccatcttggctagacatggatttgagaacattcagggcagtgtttatctaggccgtgaaggcatcagtgaagcacacggaacaatagccattcaggaactgaccgctcggtttgattggttttactcctgtatttcaaacattaagttttaccgccttgaaagtgatttgaacgcacaatttatcgctgatggtgtgtatcaagccaaacaggctttccttcaacgtgttgaacaacttcgtatatccctaacagaagctggattgtctgatgagcaaatcaatcaggttctggaaaaacagaaatttgaattggaaagtcctaacctgaaattaaattaa

SEQ ID NO: 43499 - DNA, 528 bp, Neisseria meningitidis
atggtactcttttaccggctgttgaaaaatatgtcttcatctgtttcaagtaaaacgcgctattgggtattggcacttgccgccatcgtgctggaccagtggtcgaagtgggcggtgctgtcgtcgtttcagtatcgggaacgcgtcaatgtcattccttcctttttcgatctgacgctggtgtacaacccgggtgcggcgttcagcttccttgccgatcagggcggctggcaaaaatacttttttttggtgctggcggtggcggtgagcgcgtatttggtacgcgccatcttgcgcgatgagtttgcaaccctcggcaaaacgggtgcggcaatgattatcggcggtgcgttaggcaatgtcatcgaccgcctgatacacggtcatgtcgtcgatttcttattgttttattggcaaaattggttttatcccgcctttaatattgccgacagctttatctgcgtcggtgcggtgttggcggtgttggacaacatcgtccaccgtaaaacccaagaagaaaaatattga

SEQ ID NO: 43500 - DNA, 861 bp, Neisseria meningitidis
atgaaaccctattccgccaatcccaacctgaccgaaccgcgccggctgcgcgtgttgctgattgccgccgcgctgggctttctgctgctgatgctggtcgtgccgctcgtcgccgtgttttacgaagccttaaaaggcggttgggatttgtacctgaaatccttaaacgatcccgaagcgtggtctgccatcaaattgacgctgattaccgcgctgattgtcgttcccgtcaatgccgtattgggtgtggcgatggcgtggctgctgacccgttttgattttcgcggcaagcagttgctgaccaccctgctcgatttgccgttttccgtatcgcccgtggtggccggtttgatgttcgtcttattgttcggcgcgcatacggcattgggtggctggctcgaagcgcaaggcatacagattatcttcgccatccccggtattgttttggcgacgctgttcgttaccttcccctttgtcgcacgcgaaatcatcccgctgatgcaggcacagggcgacagcgaagaacaggcggcattgatactcggcgcaagcggctggcagatgttttggcgcgttaccctgcccaacatcaaatgggcgttactctacggcatcatcctcaccaacgcccgcgcgatgggcgagttcggcgcggtcagcgtggtatcgggacacatacgcggcgaaaccaacaccgtcccgcttttggtcgaaatcttctacaacgaatacaacttcaccggcgcattcgccctctccggcgtattggcacttttggcactggcgacgctggcggtgcagaacatcattaccaaattacaagacaaaaaactcgccgccgccgaaaggaatgcaatatga

SEQ ID NO: 43501 - DNA, 636 bp, Neisseria meningitidis
ttgaacatcaaatattcgggcatcgaaaacaggtttgaaaccgccatcctgaagaaaaacggcgtaagatccggcttcgtctccttcgcccccaaccttgccgccgtcaaactgaacgattatgccaaagttagaaaacggattaccaaaaccaaacagaaagccgacatcgtcattgtgatgttccacggcggcgcggaagggaaacaggcggaacacctgccgttcgataccgaaatcttctatggggaaaacaggggcaacgtcgttgagtttgcgcggcttgccgtcgattccggcgcggatgtcgtattcgggcaggggccgcacgttactcgcgccgtcgaactttaccgcgaccgcttcatctcctacagcggcggcaactttgccacctacggcgcaatcaacacctccggcatcagcggcatcgcccccatttttaaaattatcaccgacaaacaggggcggttcgtttccggcaacattatccccatcactcaagtcggcgataaaatccccaaaatcgaccccgagaaaaccgttatcgggcggattatttatctgaaccgcagcgatttccccaaggggaacgggctggatgtctcgcccgacggcagcatcacgcgccggtaa

SEQ ID NO: 43502 - DNA, 1137 bp, Neisseria meningitidis
atggaaatgaaacaagccgattcaaccatcaaatctcgtgcggcggtggcattcgcccctaaccaacccttacaaattgtggaaatcgacgtagaaatgccgcgtaaaggcgaggtgttaatccgcaatacccacactggcgtgtgccatactgatgcgtttacgttatcaggaagcgatcctgaaggcgtattccctgtggtgcttggacacgaaggtgcgggtgtggtcgttgctgtgggcgaaggtgtgtcaagcgtaaaaccgggtgatcacgtgattccgctttacaccgccgaatgtggcgaatgtgagttttgttgttcaggtaaaaccaacttgtgcgtctcagtgcgtgatacacaaggtaaaggcttaatgccggacggcacgacgcgtttttcttatcaaggtcagccaatctatcactatatgggctgttcgactttcagtgaatactccgttgttgccgaagtttcactggcgaaaatcaaccctgaagccaaccatgaacaagtatgtttgctcggctgcggcgttaccacaggtattggtgcggtacataatacggcaaaagtgcaagaaggcgactctgttgccgtgtttggtttgggggcgattggtttggcggtggtgcaaggtgcgcgtcaagccaaagccggccgcattatcgccattgataccaatccatcaaaatttgagttggcaaaacagttcggtgcaacggattgtttgaacccgaacgattacgataaaccgatcaaagatgtgttgttagacattaataaatggggcattgaccatacctttgaatgtatcggcaatgtaaacgtaatgcgtcaggcattagaaagtgcacatcgtggttggggtcaatccattatcatcggcgtagcaggtgcaggacaagaaatttcaacgcgtccgttccagttggtaacaggtcgtgtttggaaaggttcagcatttggcggtgtgaaaggtcgctctgaactgccgaaaatggtggaagattcaatgaaaggcgacattgagttagaaccgtttgtaacccacacaatgacactcgatcaaatcaataaagcctttgacttaatgcacgaaggtaaatcgatccgcgccgttattcactactaa

SEQ ID NO: 43503 - DNA, 468 bp, Neisseria meningitidis
atgactgaactgcaacaccccgtcctcgtcgtcgatgacgaaaccgacattctcgacctgatggaaatgaccctgatgaaaatgggcttgcgcgtccataccgcgtcaggcgttgccgaagccaaaaacaagctcgacagccaacgctattcgctcgtcctgaccgatatgcgtatgccggacggctcggggctggaagtcgtccaacacatcaacagccgcctgctcgatacgccggttgccgtcatcaccgccttcggcaacgccgatcaggcacaggaagcgttgcgttgcggcgcgttcgaccccgataccatgcagatacaggactatctcgaccaaatcgaacgcgacatcatcgaacaaaccctcaaacaaaccgaaggcaaccgcacgcaggccgccaaacgcttgggcatcagcttccgttccatgcgctaccgtatggaacgcctcaacatcggctga

SEQ ID NO: 43504 - DNA, 1248 bp, Neisseria meningitidis
atgcaacttaccgctgtcggactcaatcatcaaaccgcacctttaagcatacgggaaaagctggcgtttgccgccgccgccctgcctaaagccgtccgcaatcttgcccgaagcaatgcggcaacggaggcggtaatcctttctacctgcaaccgcaccgagctttactgcgtcggtgattcggaagaaatcatccgatggcttgccgattaccacagtttgccgattgaagaaatccgtccgtatctgtacgcgctggatatgcaggagactgtgcgccatgctttccgcgtcgcctgcgggctggattcgatggtgttgggcgagccgcagattttaggacagattaaggatgccgttagggttgctcaagagcaggaaagtatgggtaagaaactcaatgccctgttccaaaaaaccttttccgttgctaaagaggtccgtaccgatactgccgtcggcgaaaactcggtttccatggcttccgcttccgtcaaattggcggaacagatttttcccgacatcggcgatttgaatgtcttgtttatcggcgcaggcgaaatgattgagctggttgccacttattttgccgccaaaagtccccggctgatgacggttgccaaccggacgctggcgcgtgcacaggagttgtgcgacaagctcggtgtcaacgccgaaccgtgcctgctgtccgatctgcctgccattctgcacgattacgacgtagtggtttcttcaacggcaagccagttgcccattgtcggcaaaggcatggtggagcgtgcattgaaacaaaggcagagtatgccgttgttcatgcttgatttggcagtgccgcgtgacattgaagcggaagtcggcgatttgaatgatgcctatctttatacggtggacgatatggtcaatatcgtccaaagcggcaaggaggcaaggcagaaggccgccgccgccgccgaaacgctggtgtccgagaaagttgccgaatttgtcaggcagcagcagggcaggcagagtgtccccttgattaaggcgttgcgggacgagggcgagaaagcgcgcaaacaggtgttggaaaatgccatgaaacagcttgccaaaggcgcaacggcagaagaggttttggaacggctgtccgtccaactgaccaacaagctgctgcattcgccgacccaaaccttgaataaggcgggggaagaagataaagatttggttcatgccgtcgcgcagatttatcatttggacaaataa

SEQ ID NO: 43505 - DNA, 357 bp, Neisseria meningitidis
atggataaaatctttttgcacggcatgaaggcagatacgcttatcggcgtgtacggctgggaacgcgaacggttgcagaccctgattgtcgatttggacatcggtgttcccgagaaagcgggttcggacgacgatattgccaatacggtgcattatgccgaggtatgcgaaacgctgcgccgacatctgaaagaacaggatttcctgcttttggaagcgttggcggaatatattgccgatttggttttgggatatttcggcgcggtgtgggtgcgcgtgaaaatcgtcaagccgggtattttggaaggcgtgcgcgaggttggcgtggaaatcgagcgcggcaagcgtgaagattga

SEQ ID NO: 43506 - DNA, 417 bp, Neisseria meningitidis; identical to SEQ ID NO: 39610

SEQ ID NO: 43507 - DNA, 291 bp, Neisseria meningitidis
atggatgatctaatactatattttttatcaggtatattcggaaatcaagttgctgaatgtattataaaaaacaaccgtgagataaaagttccctttattgtgctttacgcaatattttttacgttgatttatactgtggctttgttgtttctcagtctgatctattgggtcaatggtgcggagattgcatggaaggggataggtattttcagtatgtcggtcagtttttgtatagtcttctgtctttatttgattgacaaggcaggaagatgtaaggataagaaacaatag

SEQ ID NO: 43508 - DNA, 198 bp, Neisseria meningitidis; identical to SEQ ID NO: 36305

SEQ ID NO: 43509 - DNA, 828 bp, Neisseria meningitidis
atgcctgaattgccggaagtggaaacgacgttgcgcggcatcgcgccgcatattgaagggaaaacggtggaagccgtggtattgcgccaattgaagctgcgctggcagattaatcccgatttgggggagattttgtccggccggcaggtgttgtcctgcggcaggagggcgaaatacctgcttatccgctttcaaacgggcgtgctgctgattcacttggggatgtcgggcagcttgcggatttttacgccgtcggacggacgtatcggcaggccggacagacacgatcacgtcgatattgtgttttcagacggcacggtcatgcgttaccgcgatccgagaaagttcggcgcgatactttggtatgagggaatcgaagaacatcatccgctgttggaaaaactggggccggagcctttgtcggaggcattttgtgcggattatctgtatgcaaggctgaaggcgcagaagcgcgcggtcaaacttgccctgatggacaatgcggtcgtggtcggtgtgggcaacatttatgccaacgagagcctgttcagagcgggcatttcgccccaccgtcctgccaaccgcctgaaaaagaaagagtgcgcgcttttggttgaaaccgtcaaagcggtgttgcagcgcgccattgaaacgggcggcagtaccttgagggattttgtggacagcgacggcaaaagcggctacttccaacaggaatatacagtgtacgggcggcacaatcagccgtgcccccggtgcggcggtttggttgtgaaagaaactttggggcagcgcggcacgttttattgcccgaactgtcagaaatag

SEQ ID NO: 43510 - DNA, 369 bp, Neisseria meningitidis; identical to SEQ ID NO: 39308

SEQ ID NO: 43511 - DNA, 594 bp, Neisseria meningitidis
atggtgcgcacggttaaaagctacaacggcgaggccgacgatttggcggggcaaatccatacgctgcctgcggtttgggtaacgtatggcggcagcaaagttgagcctgccagcaccggcggcgtatgcggacgttatcaggataccgccgaatttgtggtgatggtggcggcccgcaatctgcgcaacgagcaggcgcagcggcaaggcggcatcgacagccgcgaaatcggcagcaacgatttaatccgcgctgttcgccgcctgcttgacggccagcggctcggttttgccgatagccgcggcttggtgcccaaagcggtgcgcgcgattgccaatcatgtgctggtgcaaaacgccgcagtaagcatatatgcggttgagtatgccatccgctttaacacctgcgggttggaaaatgaccgctaccccgaacgcaccgacaatcccgacgaccccaaccatatctttaccaagtatcagggtacattgagcgagccgtggcctgatttcgaggggttggacggcaaaatttacgacccgcaatccgccgatgaaatacctgtaaacctaacccttaaggataagcaatga

SEQ ID NO: 43512 - DNA, 972 bp, Neisseria meningitidis
atgacagaatatcccggcatcgggtcgccgttgttttacggcgttttttttgcggcagtgctggtcatgattgccttggatatgttttcgctgaagaaaaacggcagccataaagtcggcgtcaaagaagccttggcatggagcggcttgtgggttgccgtatcctgcctgttcgcgggctggctgtattttgaactcgccggcaatcccggctacggcgcggcagtcgcaaaagaaaaagtattggaattctttaccggctacattttggaaaaatcgttggcagtcgacaatattttcgtgttcctgatgatattcggctacttcaaagtcgcaccacagtttcagcaccgcgtgctgctgtacggcgtattgggcgcattggtattgcgcaccgtcatgattttcgtcggcgcggcactggttcagcagtttgagtggattctgtatctgtttggcgcgttcctgctctatactggtatacacatgatgaagcccgaaggcgatgagaaagaggatttggcaaacagcaggctgctgaataccgtcaagaaagtcgttccggtcggcacggaatttcacggcgagaaattttttaccgtcgaaaacggcaaaaaaatcgccacgccgctgtttttggtgctggtcatgattgaattgagcgatgtcgtgtttgccgtggacagcatccccgccgtctttgccgttaccaccgatccgtttatcgtgctgacttccaatattttcgcaattctgggcttgcgggcgatgtatttcctgctggcggatgtggcggaacgctttatcttcctgaaatatggattggcattcgtgttgggttttatcggtgtgaaaatgctggtaatgcattgggtgcatatcccgatttccgtttcgctgtcggtcgtgttcggcgcattgggtgcatcggtgttgacttctttggtttatacgaaaaaaacaggccgataa

SEQ ID NO: 43513 - DNA, 510 bp, Neisseria meningitidis
atgattatcctgcacaccaacaaaggcgacatcaaaatcgaactcgatttcgacaaagcccccgttaccgccaaaaacttcgagcaatacgtcaaagacggcttctacgacggcgtaatcttccaccgcgtcatcaaaggcttcatgattcaaggcggcggcatggatgaaaacatgaacgaaaaagaaacccgcgatccgattcaaaacgaagcgtccaacggcctgcccaacgataaatacaccatcgccatggcacgcacttccgacccccattccgccagcgcgcaattcttcatcaacactgccgacaacgctttcctgaacttccgttctaaagagctgtacggcaaaaccgtcgtccaagactggggctatgcagtattcggtaaagtcgttgacggttttgacgttgtcgatgccatcgaaggcgtatccaccaaacgccacggctaccatgacgacgtaccgagcgaacctgtcgtcatcattaaagccgaagcggtataa

SEQ ID NO: 43514 - DNA, 567 bp, Neisseria meningitidis; identical to SEQ ID NO: 41361

SEQ ID NO: 43515 - DNA, 2115 bp, Neisseria meningitidis
atggatttattatcggttttccacaaataccgtctgaaatatgcggtggccgtgctgacgatactgcttttggcggcagtcgggctgcacgcttccgtatatcgcaccttcacgcctgaaaacatccgcagccgcctacaacaaagcattgcacacacacaccggaaaatctcgtttgatgcggacattcagcgcaggctcctgccccggccgaccgtcatcctgaaaaacctgaccattaccgaacccggcggcgaccagactgccgtttccgtccaagaaaccaaaatcggattgagctggaaaaacctgtggtcggatcagatacagattgaaaaatgggtggtttcgagtgcggaacttgccctgacgcgcgacgggaaaggtgtttggaacatccaagacctgatcgacagccaaaaacgccaagcctcagtcaaccgcattatcgtcgaaaacagcaccgtccgcctcaatttcctgcaggaacagcttatcctgaaggaaatcaacctcaacctgcaatcccccgattcgtcggggcagccgtttgaaagttcgggcatactggtttggggaaagctgtccgtcccgtggaaaagcagggggctgttcctttcaaacggcatcggcccgcccgaaatctcaccgttccattttgaagcttccacttcgctggacggacacggcattaccatttccaccaccggcagcccttctgtccgcttcaacgccggcggagcggatgccgccggcctcggcctgcgtgcagacacttccttccgcaacctccacctgaccgcccaaatccccgcgctggcactcaggaacaacagcattaaaattgaaaccgtcaacggcgcatttaccgccggcggcgaatatgcccgatgggacggttcgttcaaactcgacaaagccaacctgcactccggcatcgccaacatcggcaacgccgaaatctccggcagcttcaaaacaccgcgccaccagaccaacttctccctcaattcgccgctcgtatggacggaaaacaaagggctggacgcgccgcgcctgtatgtatcgacccttcaggataccgtcaaccgcctgccgcaaccccgtttcatcagccggctcgacggttcgctgtccgtaccgaatctgcaaaattggaatgccgaattaaacggcacattcgaccgccaaaccgttgccgcgaaattcagatacacacatgaagacgcaccgcatctggaagccgccgtcgcactgcaaaaattgaacctgaccccctatcttgacgacgtgcggcaacaaaacggcaaaatatttcccgacaccctcgccaagctgtccggcgacatcgaggcgcacctgaaaatcggaaaagtccaacttcccggcctgcaactggacgatatggaaacctacctccacgccgacaaaggccatatcgcgctcagccgtttcaagtcagggctttacggcggccataccgaaggcggcatcagcatcgccaacacccgtcccgccacttaccgcctgcaacagaatgcaagcaacatccaaatccaaccgctgctgcaagacctgttcggcttccacagcttcagcggcaacggcgacgcggtcatcgacctgaccgcgggcggcgaaacccgaaaagagcttatccgctcgcttcagggcagcctgtcgctaaatatttccaacggtgcatggcacggtatcgacatggacaatatcctgaaaaacggcatttcgggcaaaactgccgacaatgccgcacccagcacacccttccaccgattcacgctcaacagcgaaatttcagacggcatcagccgccacatcgataccgaactcttctccgacagcctctatgttaccagcaacggctataccaatctggatacgcaggaattgtctgaagatgtccttatccgcaacgccgtccatccgaaaaacaaaccgattcccctgaaaatcaccggcacggtggacaaaccgtccattaccgtcgattacggcaggctgaccggcggcatcaattcgcgcaaagagaaacagaaaatcctcgaagacaccctgctggaacaatggcagtggctcaaacctaaagaaccgtaa

SEQ ID NO: 43516 - DNA, 2016 bp, Neisseria meningitidis
atgaaatcctaccccgacccctaccgccattttgaaaacctcgattccgccgaaacgcaaaacttcgctgctgaagcgaatgccgaaacgcgcgcgcgttttttagaaaacgacaaggcgcgcgcgctttcagacggcattttggcgcagttgcaggacacgcggcagattccgttttgtcaggaacaccgcgcgcggatgtaccatttccatcaggacgcggagtatccgaagggcgtgtaccgcgtgtgtaccgcggcgacgtatcgttccggctatcccgagtggaaaatcctgttttcggtggcggatttcgacgaattgcttggcgacgatgtgtatttgggcggcgtgtcgcacttggtggaacagcccaaccgcgcgttgttaacactgagcaaattgggcagcgatacggcgtacacgctggaagtggatttggaagcaggggagttggtcgaaggcggttttcactttccggcaggcaaaaaccatgtgtcgtggcgcgatgaaaacagcgtgtgggtgtgtccggcttggaacgaacgccagttgacccaatcgggctatccgcgcgaagtatggctggtggaacgcggcaagagtttcgaggaaagcctgcctgtgtatcaaatcggcgaagacggcatgatggtgaacgcgtggcgttatctcgatccgcagggttcgccgattgatttgattgaagcgtcggacggtttttacaccaaaacctatttgcgggtctcagccgaaggcgaggcgaaaccgttaaacctgcccaacgattgcgacgtggtcggctatctggcggggcatcttttgctgacgctgcgcaaggactggaaccgcgcgaaccaaagctatccgagcggcgcgctggtggcggtgaagctgaatcggggcgaactcggggcggcgcagcttttgtttgcgcccgatgaaacgcaggcattggaaagcgtggaaacgaccaagcgttttgtggtggcgagcctgttggagaacgtacaaggccgtctgaaagcatggcggtttgccgacggcaaatggcaggaagtcgaattgccgcgcctgccttcgggcgcgttggaaatgaccgaccaaccttggggcggcgacgtggtttaccttgccgccagcgatttcaccacgccgctgacgctgtttgcgctggatttgaacgtgatggaactgaccgtcatgcgccgccagccgcagcagtttgattcagacggcattaacgtgcagcagttttggacgacttcggctgacggcgagcgcattccttatttccacgtcggcaaaaacgccgcgcccgacatgccgacgctggtctatgcctacggcggtttcggcattcccgaattgccgcattatctgggcagcattggcaaatattggctggaagagggcaatgcctttgtattggcgaacatccgcggcggcggcgagttcggcccgcgctggcatcaggcggcgcagggaatcagcaaacataaaagcgttgatgatttattggcagtcgtgcgcgatttgtccgaacgcggtatcagttcgcccgaacacatcggcttgcagggcggcagcaacggcggactgattactgccgccgccttcgtgcgcgaaccgcaaagcatcggcgcgctggtgtgcgaagtgccgctgaccgacatgatccgttatccgctgctctccgccggttcaagctggacagacgaatacggcaatccgcaaaaatacgaagtctgcaaacgccggttgggcgaattgtcgccgtatcacaatctttcagacggcatcgattatccgcccgcgctcattaccaccagcctgtccgacgatcgcgtccatcccgcccacgcgctcaagttctacgccaaactgcgcgaaacctccgcgcaatcttggctctactcgcctgacggcggcggccataccggcaacggcacccaacgcgaatccgccgacgaactcgcctgcgtcttgctgtttttgaaagagtttttgggctaa

SEQ ID NO: 43517 - DNA, 816 bp, Neisseria meningitidis
atgactactctcaaacccgccctgcccgcttatctggacaacatccgcatcatcctcacgcgcaccagccatcccgccaacatcggctctgccgcgcgcgcgatgaaaacaatgggtctgcacaaactgaccatcgtcgccccaaatctgatggcaacgccgatgacggaaaacccgcccgtgtttgacccggagcatcctcaatcgtttaaattaccggaagaaagcttcatcctcgcttccggcgcggcagacgttttggaaaatgccaccattgccgcttctttggacgaagcccttgccgacaccaccatcgcctgcgccctgaccagccgccgccgcgaaattactgcgccgctgcaaaccccgcgcgatttggtatccgaattactgcagaccgcaaaccgaggcgagaaagtggcactggttttcggcaacgagactttcggcttgagcatcgaagaagtccaagcctgcaaccgactgatgaccatcaacggcaatcccgactatttctcgctcaacctcgcccaagccgtgcaggtcgtgtgctacgaaatcttcagccaaaccggttcgcccatgacccatcttcaacaagaagaccacgctgcgacccacgagcaaatcaaaggcatggtcgcccacatggaaagcgtgatgaacgacatcggctttttcaaccgccgcaacggcgagcgtctgatgcgccgtatgcagagcctgttcggacgcgccaacacgcaaaccgaagacatcgacatcctgcgcggttttttcaataccgtcagccatcgcatccataaaaaagactga

SEQ ID NO: 43518 - DNA, 291 bp, Neisseria meningitidis; identical to SEQ ID NO: 42317

SEQ ID NO: 43519 - DNA, 1134 bp, Neisseria meningitidis
atgaaaagaattctttgcattacaggtaccagagccgacttcggcaagctaaaacctttattagcctatattgaaaatcacccagaccttgaattgcatttgattgtaactggtatgcatatgatgaaaacatatggcagaacctgcaaggaagtaactcgagaaaactatcaacatacatatctgttttcaaatcaaatccaaggtgaaccaatgggtgccgttttaggcaataccattacgtttatctctcgtctatctgatgaaattgaacctgatatggtcatgattcacggcgaccgtttagaagcactagcaggcgcaactgtaggtgcattaagcagccgtttagtttgccatatcgaaggtggtgaactatctggtacagtagatgactccattcgtcattctattagtaaactttctcatatccacttggtagcaaatgaacaagctgtcactcgcctagtgcaaatgggagaaaaaagaaagcatattcacatcatcggctcccccgatttagatgttatggcctcttccaccctcccatccttagaagaagtcaaagaatattacggtttaccatacgaaaattatggtatttctatgtttcaccccgtgactacagaagcacatttaatgccacaatatgcggcccaatatttcaaagcattagaattaagtggccaaaatatcattagcatctaccctaataatgacactggcactgaaagtattctgcaagaattattaaaatatcaatctgataaatttattgcatttccttccattagatttgaatattttttagtcttattgaaacatgctaaatttatggtcggcaactcaagtgcaggtattagagaagctcctctctacggtgtcccttcaattgatgttggtacacgccaaagtaaccgccatatgggaaaatctattattcatacagattatgaaactaaaaatatctttgatgcgattcaacaagcatgcagtttaggcaaatttgaagcagatgatacctttaatggcggagatactcgcaccagcacagaaagatttgctgaagtaatcaacaatcctgaaacgtggaatgtttctgctcaaaaacgttttatcgatttgaatctttaa

SEQ ID NO: 43520 - DNA, 219 bp, Neisseria meningitidis
atgcttaaaaccctgacttttgccgcactgcatttcagcgtcgccttcagtgtaacctatgtactgacgggcagtataggcgtatcgggagcagttgcgctggtcgaacccctaatcaacaccgtcgttttctatttccatgaaaaagcatggaacctttacgaaaaaaataaaacagtcaaacaaacacagccgtttcagctgcaccgatgcagctga

SEQ ID NO: 43521 - DNA, 453 bp, Neisseria meningitidis
atgtttatggctattgcgaacaataaaaaagcatttcacgattttttcattgaagaccggattgaagccggtttggtcttggaaggctgggaagtcaaagcaatccgcgccgcgcgcgtacagcttaaagagagttatatctattggaaaaaagacgcgttttatctggtcggctgccatattacggctttgcccacagcctcgacacacattaaaccagatgccgtacgtccgcgcaagctcttgttgaaccagtcggaaatcaacaaattaatcggcaaaaccgaacgtgccggctacaccatcgtgccgctggatttgcatttttcacgcggaaaaatcaagatggaaatcggtttggcaaaaggtaagaaacagcacgacaaacgccagagtatgaaagaggcggattggaaacgcgagaaacagcggttgattaagcatacgcgctga

SEQ ID NO: 43522 - DNA, 315 bp, Neisseria meningitidis
atgaaacttatctataccgtcatcaaaatcattatcctgctgctcttcctgctgcttgccgtcattaatacggatgccgttaccttttcctacctgccggggcaaaaattcgatttgccgctgattgtcgtattgttcggcgcatttgtagtcggtattatttttggaatgtttgccttgttcggacggttgttgtcgttacgtggcgagaacggcaggttgcgtgccgaagtaaagaaaaatgcgcgtttgacggggaaggagctgaccgcaccaccggcgcaaaatgcgcccgaatctaccaaacagccttaa

SEQ ID NO: 43523 - DNA, 654 bp, Neisseria meningitidis
atgaagttcaaatatgtttttctgttggcgtgtgttgtcgtttctttatcttatcgtttgaatgctgcaccgatgtttaacgataatcctgttgtttacggaaaaatcaaagtgcagagttggaaagaaaggcgggatttcaatattgtaaagcaggatttggatttttcctgcggggcggcttcggtggcgacacttttgaacaatttttacgggcaaaagctgacggaagaagaagtgttggaaaaactggataaggagcagatgcgcgcgtcgtttgaggatatgcggcgcattatgcctgatttgggttttgaggcgaagggctatgccctgtctttcgagcagctcgcgcagttgaaaatccccgtcatcgtgtatctgaaataccgcaaagacgaccatttttcggtattgcgcggtatagacggcaatacggttttgcttgccgacccgtcgctggggcatgtttcaatgagcagggcgcagtttttggatgcttggcaaacccgtgagggaaatttggcaggtaagattttggctgtcataccgaaaaaagccgagacaatttcaaataaattgtttttcacacaacacccaaaacggcagacggagtttacagtcggacaaatcaggcaagcacgtgcagagtaa

SEQ ID NO: 43524 - DNA, 270 bp, Neisseria meningitidis
gtgaacaagtctgaattgatcgaagcgattgctcaagaagccgacatttccaaagccgccgcacaaaaagctttggatgccactaccaatgcagtaaccaccgccctgaaacaaggcgacaccgttactttggtcggtttcggtactttctacgtgggcgaacgtgcggaacgccaaggccgcaaccccaaaaccggcgagcctctgaccattgccgccgccaaaacgcctaaattccgcgccggcaaagctttgaaagacgcactgtaa

SEQ ID NO: 43525 - DNA, 156 bp, Neisseria meningitidis
gtgttatgggtcaaacgtatccaacgccaaatcgacggcagcctactcttgatttctgacaattcaacctatccacccatgcccttggcactggcggaacaccccgatattcaaatcatcgggcaggtagtgcaggtatcaaaagacttgaactag

SEQ ID NO: 43526 - DNA, 567 bp, Neisseria meningitidis
atgccgtctgaagcctgttggcgtttcagacggcatattctgattgaaaagatgatgacactgaaaaccgccccgctcaaacgccgctttgccgccatgctgtacgaaatgctgctggtcggtgcggcaacctgtttggcagcattgattgccggtattgccgccatttttctgaatcccgtttctatcgcggtttctgcattggtaacaagtatcctgataatgggagcatggtggctttatttccgcgccaactggcatggtcaggggcagaccttggcgatgaggacatggaaaatcggcttgtgcgaccttaacggcatacagccgtctttgcacctgctgcgcctgcgctttatttgggcgtgcatatttatcgtatttatccctatgttagcctatgccggattacgccacttcctcggcattccgcccaagggcgcggccggcgcggcattgatttggctgattttaccgtgggggttcgcactgctgaatcccgatcggcagtttctgtatgattttcttgcaggaacaagattggtggcggtcaaaggaaagccttaa

SEQ ID NO: 43527 - DNA, 645 bp, Neisseria meningitidis
atgaagctcaaacatctgttgccgctgctgctgtcggcagtgttgtccgcgcaggcatatgccctgacggaaggggaagactatcttgtgttggataaacccattcctcaagaacagtcgggtaaaattgaggttttggaatttttcggctatttctgcgtacattgccatcatttcgatcctttgttattgaaactgggcaaggcattgccgtctgatgcctatttgaggacggagcacgtggtctggcagcctgaaatgctcggtttggctaggatggcggctgccgtcaatttgtcgggtttgaaatatcaggcaaaccctgctgtgtttaaagcagtttacgaacaaaaaatccgcttggaaaacaggtcggttgccggaaaatgggctttgtctcaaaaaggctttgacggcaaaaaactgatgcgcgcctatgattcccccgaagctgccgccgccgcattaaaaatgcagaaactgacggaacaataccgcatcgacagcacgccgaccgttattgtcggcggaaaataccgcgttatcttcaataacggctttgacggcggcgttcatacgattaaagaattggttgccaaagtcagggaagaacgcaagcgtcagacccctgctgtacagaaatag

SEQ ID NO: 43528 - DNA, 1779 bp, Neisseria meningitidis
atgacggttttgaagctttcgcactggcgggtgttggcggagcttgccgacggtttgccgcaacacgtctcgcaactggcgcgtatggcggatatgaagccgcagcagctcaacggtttttggcagcagatgccggcgcacatacgcgggctgttgcgccaacacgacggctattggcggctggtgcgcccattggcggttttcgatgccgaaggtttgcgcgagctgggggaaaggtcgggttttcagacggcattgaagcacgagtgcgcgtccagcaacgacgagatactggaattggcgcggattgcgccggacaaggcgcacaaaaccatatgcgtgacccacctgcaaagtaagggcagggggcggcaggggcggaagtggtcgcaccgtttgggcgagtgtctgatgttcagttttggctgggtgtttgaccggccgcagtatgagttgggttcgctgtcgcctgttgcggcagtggcgtgtcggcgcgccttgtcgcgtttaggtttggatgtgcagattaagtggcccaatgatttggttgtcggacgcgacaaattgggcggcattctgattgaaacggtcaggacgggcggcaaaacggttgccgtggtcggtatcggcatcaattttgtcctgcccaaggaagtagaaaatgccgcttccgtgcaatcgctgtttcagacggcatcgcggcggggcaatgccgatgccgccgtgctgctggaaacgctgttggtggaactggacgcggtgttgttgcaatatgcgcgggacggatttgcgccttttgtggcggaatatcaggctgccaaccgcgaccacggcaaggcggtattgctgttgcgcgacggcgaaaccgtgttcgaaggcacggttaaaggcgtggacggacaaggcgttttgcacttggaaacggcagagggcaaacagacggtcgtcagcggcgaaatcagcctgcggtccgacgacaggccggtttccgtgccgaagcggcgggattcggaacgttttctgctgttggacggcggcaacagccggctcaagtgggcgtgggtggaaaacggcacgttcgcaaccgtcggtagcgcgccgtaccgcgatttgtcgcctttgggcgcggagtgggcggaaaaggcggatggaaatgtccgcatcgtcggttgcgctgtgtgcggagaattcaaaaaggcacaagtgcaggaacagctcgcccgaaaaatcgagtggctgccgtcttccgcacaggctttgggcatacgcaaccactaccgccaccccgaagaacacggttccgaccgctggttcaacgccttgggcagccgccgcttcagccgcaacgcctgcgtcgtcgtcagttgcggcacggcggtaacggttgacgcgctcaccgatgacggacattatctcgggggaaccatcatgcccggtttccacctgatgaaagaatcgctcgccgtccgaaccgccaacctcaaccggcacgccggtaagcgttatcctttcccgaccacaacgggcaatgccgtcgccagcggcatgatggatgcggtttgcggctcggttatgatgatgcacgggcgtttgaaagaaaaaaccggggcgggcaagcctgtcgatgtcatcattaccggcggcggcgcggcaaaagttgccgaagccctgccgcctgcatttttggcggaaaataccgtgcgcgtggcggacaacctcgtcatttacgggttgttgaacatgattgccgccgaaggcagggaatatgaacatatttaa

SEQ ID NO: 43529 - DNA, 1248 bp, Neisseria meningitidis
atgttttctctagaggcttggataggcttgaggtatctcagggcgaaaaagcgcaacggctttatgtcgtttatcacgatggtttcgattgccggaatcgccttgggcgtaaccgcgctgattgtcgtcttgtcggttatgaacggctttcagaaagaaatacgcgggcagctcctgaatgtcgcgccgcacgccgaaatcggctatatcgataatacggatacggattggcgcaacctgcttcggtttaccgaaaaccgcaaaggtattttggctgccgcgccctatgtttccaatcaggcattgctggccaatgcgggcgaaatcaggggcgtgcagatgcgcggcattttgccgtctgaagaacgcaaagtggtggaatacggcgacaaaatgccggcaggcaaatttgaagatctgattccgggcgagtttgacattatcctcggtgtcggcttggcggaggctttgggggcggaagtcggcaataaagttaccgtcatcacgccggagggcaatgttacgcccgccggagtcgtaccgaggttgaaacagtttaccgtggtcggtctggttaagacgggcgtttacgaagtggacaactcattggcaatgacgcatatccaagacgcgcgcgtgctgtaccgtttggataaggaagttgcggggctgcggctgaagctcgccgatccgcaaaacgctcccgccttgacggcaacactgattccggaggcgcaaagggacgcggtttgggtgcgcgattggacgtacagcaaccgcagctattttgaagcggtcgaactggaaaaacggatgatgttcatcatcctgacgctgattatcgctgtggcggcgttcaaccttgtctcttccctggtgatggcggttacggaaaagcaggcggacattgcgattttgcggactttgggtctttcccctgctggcgtgatgaagatttttatggtgcagggcgcgttttcaggctttttcggcacgctggcgggtgtggtctgcggcgtgcttttgggttggaacgtcggcagggtcgtggcgttttttgaaaacctgctcggtgtccacctcatcaattcgcaggtttattttatcgactacctgcccagcgatgtcgatatgggcgacgttgccctgattgcctgcatttctttgggactgtctttcgttgccacgctctacccgagccggcgcgcgtcaaaaacccaaccggcggaggctttgcgttatgagtga

SEQ ID NO: 43530 - DNA, 891 bp, Neisseria meningitidis
atgaacagcccttttcacaacatcggcatcgtaacccgccccaacacgcccgacatccaagacaccgcacacacgctgattacctttttgaagcagcacggctttaccgtctatctcgacgaagtcggcataaaggaaggctgcatctatacccaagacaccgtcggctgccatatcgtcaacaagaccgaactggggcaatactgcgacctggtcgccgttttaggcggagacggcacctttctctccgtcgcccgcgaaatcgccctgcgcgccgttccgattatcggcatcaaccaagggcatttgggcttcctgacccaaattccccgcgaatatatgacggacaagctattgcccgttttagaagggaaataccttgccgaagagcgcatcctgattgaggccgcactcatccgcgaaggcaaaaccgccgaacgcgccatcgccctcaacgatgccgtcctctcccgtggcggtgccggacagatgattgagtttgaagtcttcgtcaatcgggaattcgtctatacccagcgttcggacgggctgattgtctccacccccaccggatcgaccgcctattcgcttgccgccggcggccccatcatgcaggcaggattacacgccttcacgctcgtccccatctgcccacaatccatgaccaaccgccccatcgccattccagacacgtccgaaatcgaaatcctcgttacccaaggcggcgacgcgcgcgtccatttcgacggtcaaacccatatcgacgtgcaaaacctcgaccgcatcaccatccgccgctaccgaaatcccttacgcattttgcacccgaccgactaccaatatttcaaaaccctgcgccaaaaactgcactggggcgagcaattagtctaa

SEQ ID NO: 43531 - DNA, 1455 bp, Neisseria meningitidis
atgactacgcaaaccatcaaatttcacatgaagccggaaactttcaagcaaaacgccgcaatttcccttcaagacaagcctttgcgcaaaagcctgcgtaccgcgatggatatgctgatgaccaaacgcaaagccgttttgaccgacgaagaagagctgcaaagcctgcgcgatttgtgcgaacacgtccgtcagcgctcattgtctaaattgccagccctgctggagcagctggaagaaaacctgactaagttgggcgtgaaagtgcactgggcagaaaccccgaccgaagcctgccaaattatccacgacatcatcacagccaaaaacggcaagctgatggtcaaaggcaaatcgatggtcagcgaggaaatcgagctgaaccattatcttgaagcaaaaggcattaaagcggtagaaagcgacttgggcgagttcatcgtccaaatggcaggcgaaaaaccgacccatatcgtgatgcctgctatccacaaaaccaaagaacaggttagcgaactgttccaccaaaacctcggtacgccgctgacagacgatgtagaccaactgaccggcttcgcccgtaaagcactgcgcgatatttacagcactgccgatgtcggtttgagtggcgtaaactttgccgttgctgaaacaggtacgctgtgtctggtggaaaacgaaggcaacggtcgcttgagtaccaccgtaccgcccgtgcatatcgctattaccggcattgaaaaagtggtggcgaaattgtccgacatcccacccttgtacagcctgctgccgcgttctgccattggtcagaacattaccacttatttcaatatgattaccggcccgcgccgcagtgaagaattagacggtccgcaagaaatgcacttggttctgctcgacaacggccgcagccaggcttatgccgaagaccaaatgcgccgcaccctgcaatgtatccgttgcggcgcgtgtatgaaccattgcccggtttatacccgcatcggcggcgcggcatacggcacaacctatcccggtccgattggcgagattatttccccgcacctgttaggcttggatgccactcgcgacctgccgaccgcctgcacgatgtgcggcgcgtgcgtggaagtttgtccggtacgcatcccgattaccgaacaaatgcagcgtttgcgcgttgaagcgcaacgttcgccgaccgaaaccgtgccgcaccccatccgggggcaaggcgcatcgcataccttcggcgaacaaatggcgtggcgcacattcaacggtattttcagcggcagcaaaacctaccgcgccttcggttgggcagccaccaagttccgcaacctgaccccgcgcaaacagttgggttggacgcaaaaccgcgtgccgatgaaaccggcgaagaaaaccctgcacgaactaatggcagaaaaaatgcgccaaaaagaacaggcataa

SEQ ID NO: 43532 - DNA, 192 bp, Neisseria meningitidis
atgaatacccccttttccttttttatgaactgtttttcaataccggaaacccccgaacggagtgattccagactgagatacgcccaaaaaaaatcagacattcgggtcgcaacagaaacctttaccaaaacctgcgaccccaataaaatcagatacggcaaaggcgataagcttcaagccctgaatgagtaa

SEQ ID NO: 43533 - DNA, 2832 bp, Neisseria meningitidis
atgaataagaaacacggttttccgctgactctgactgccttggccattgcaaccgcttttccggcttatgctgcccaagcggggggggcgacacctgatgccgcgcagacccaatccctgaaagagattaccgtccgtgccgccaaagtgggacggcgatcgaaagaggcgaccggtttgggcaaaatcgtcaaaacgtcggaaacgttgaacaaagaacaggtactcggtatccgcgacctgacgcgctacgatccgggcgtggcggttgtcgaacagggcaacggcgcgagcggcggctactcgatacgcggcgtggataaaaaccgtgtggcggtttcggtcgacggtgttgcccaaatacaggcgtttaccgtgcagggatcgttgagcggatacggcggacgcggcggcagcggtgcaatcaacgaaatcgaatatgaaaacatcagcacggtggaaatcgacaaaggtgccggttcgtccgatcacggcagcggcgcactcggcggcgcggtcgccttccgcaccaaagaggcggcagacctgatttcagacggcaaaagttgggggatacaggcaaaaaccgcctacggcagtaaaaaccgccaatttatgaagtcgctcggcgcggggttcagcaaagacggttgggaagggctgttaatccgaaccgaacgccaagggcgggaaacgcgcccgcacggcgatattgcggacggggtggaatacggcatagaccgtttggacgcgttccgtcagacatacgatattaaacgcaagacaagagagccatttttctcagtagagggcgagcgtgaatccaagcccgtggcaaaattggcgggctacgggaaatatttgaacaaccagctcaaccgctgggtaaaagaacgtattgaacaaaatcagcctttaagtgctgaagaagaggcgcaggtgcgggaggcgcaggcgcgccacgaaaatctgtccgcccaagcttacacgggcggcggcaggatattgcccgatccgatggattaccgcagcggctcttggcttgccaagctgggctaccgcttcggcggcaggcattatgtcggcggcgtgtttgaggataccaaacagcgttacgatatccgcgatatgacggaaaaacagtattacggtacggacgaggcggaaaagtttagagacaagagcggggtgtacgacggcgacgatttccgcgacggcttgtattttgtgccgaatatagaagagtggaagggcgataaaaatttggtcaggggcataggtttgaaatattcccgcaccaaatttattgacgaacatcaccgccgccgccgtatgggtttgctgtatcgttatgaaaacgaagcgtattctgacaattgggcggataaggcggtgttgtcgtttgacaaacagggcgtggcaaccgataacaacacgctgaagctgaattgcgccgtgtatcctgctgtggacaaatcctgccgcgcgtcggcggacaaaccgtattcctacgacagcagcgaccgtttccactaccgcgaacagcacaatgttttgaatgcctcgtttgagaaatcgctgaaaaacaaatggacgaaacaccatctgactttgggcttcggttacgatgcttccaaagcgatttcccgccccgaacagctttcccacaatgcggcaaggatttcggaatccacgggattcgatgaaaacaatcaagataagtatcttttgggtaagcccgaagtcgtcgaagggtcggtctgcggctacatcgaaaccctgcgttcccgcaaatgcgtgccaagaaaaatcaacggcagcaatatccatatttctttgaacgaccgtttttcaatcggcaaatatttcgatttcagcttgggcggcaggtacgaccggaaaaacttcaccacgtcggaagaactcgtccgcagcgggcggtatgttgaccgttcgtggaacagcggcatcttgttcaaaccgaaccggcatttttccgtgtcttaccgtgcctccagcggcttcagaacgccctcattccaagaacttttcgggatagacatttatcacgattatccgaaaggctggcagcgtcccgccctgaaatcggaaaaggcagccaaccgggaaatcggtttgcagtggaagggcgatttcggctttttggaaatcagcagcttccgcaaccgttataccgatatgattgccgttgccgatcacaaaaccaaattgccgaatcaggcaggacaattgacagagattgatatacgcgattattacaatgcccaaaatatgtcgcttcaaggcgttaatatattgggaaaaatcgactggaacggcatgtatggcaaactgcccgaaggtttgtacaccacattggcgtacaaccgcatcaaaccgaaatcggtatccaaccggccgggactgtccctccgcagctatgctttggatgcggtacagccgtcgcgttatgttttggggttcggatacgaccagcctgaggggaaatggggcgcaaacattatgctgacctattccaaagggaaaaaccctgacgagcttgcttatctggcaggcgatcaaaaacgatattcgacaaaaagagcgtcgtcttcttggtcgacggcagacgtttccgcctatctgaatctgaaaaaacggctgaccttgagggcggctatctacaatatcggcaactaccgctacgttacttgggaatccttgcgccagactgcggaaagcacggcaaaccggcacggcggcgacagcaactatggaaggtatgccgcaccgggcaggaacttcagtctcgcgctcgaaatgaagttttaa

SEQ ID NO: 43534 - DNA, 717 bp, Neisseria meningitidis
atgacagacaccgccgagaaccaaacacaaaacaactggcaagccggacacccccgcagcatccgcagcttcgtcctccgccaaagccatatgaccgccgcgcagcaacgcgccatcgataccttatgggacagcttcggcatcgactaccaagcaacaccggccgatcttgatgcccgtttcggaagcagccgacccaaaatcctcgaaataggcttcggtatggggacggcaaccgcagaaatcgcccgccgcctgcccgaaaccgacttcctcgccatcgacgtacacggtcccggcgtaggcaacctgctcaaactcatagacgaaaaccatttagaaaacatccgcgtgatgcggcacgatgccgtagaagttgtcgaaaatatgctgcaagacggctcgctcgacggcatccacatattcttccccgacccgtggcacaaaaaacgccaccacaaacgccgtctgatacaagcccccttcatcgccaaactactgcccaaactcaaaaccggcggctatatccacctggcgacagactgggaagaatatgcacagcagatgcttgaagtcctcagtagcttcgacagcctgcaaaatacggcggcagactacgcccccaccccggactaccgccccgaaaccaaattcgaagcgcgcggcaaacgcctcggacacggcgtttgggacttggtattcaaacggatcggataa

SEQ ID NO: 43535 - DNA, 924 bp, Neisseria meningitidis
atggaaaaccaaaggccgctcctaggcttcgcgttggcacttttggcggcgatgacgtggggaacgctgccgattgccgtgcggcaggtattgaagtttgtcgatgcgccgacgctggtgtgggtgcgttttaccgtggcggcggcggtattgtttgttttgctggcactgggcgggcggctgccgaagcggcgggatttttcttggtgctcattcaggctgctgctgctcggcgtggcgggcatttcggcaaactttgtgctgattgcccaagggctgcattatatttcgccgaccacgacgcaggttttgtggcagatttcgccgtttacgatgattgttgtcggtgtgttggtgtttaaagaccggatgactgccgctcagaaaatcggcttggttttgctgcttgccggtttgcttatgttttttaacgataaattcggcgagttgtcgggtttgggcgcgtatgcgaagggcgtgttgctgtgtgcggcaggcagtatggcatgggtgtgttatgccgtggcgcaaaagctgctgtcggcgcaattcgggccgcaacagattctgctgttgatttatgcggcaagtgccgccgtgttcctgccgtttgccgaaccggcacacatcggaagtttggacggtacgttggcgtgggtttgttttgcgtattgctgcttgaatacgttaatcggttacggctcgttcggcgaggcgttgaaacattgggaggcttccaaagtcagcgcggtaacaaccttgctccccgtgtttaccgtaatattttctttgctcgggcattatgtgatgcctgatacttttgccgcgccggatatgaacggtttgggttatgcaggcgcactgatcgtggtcgggggtgcggttacggcggcggtgggggacaggctgttcaaacgccgctag

SEQ ID NO: 43536 - DNA, 1923 bp, Neisseria meningitidis
atgcaactgctggcagccgaaggcattcaccaacaccaattgaatgttcagaaaagtacccgtttcatcggcatcaaagtgggtaaaagcaattacagcaaaaacgagctgaacgaaaccaaactgcccgtacgcgttatcgcccaaacagccaaaacccgttccggctgggataccgtactcgaaggcaccgaattcaaaaccaccctttccggagccgacatacaggcaggggtgggtgaaaaagcccgagccgatgcgaaaattatcctaaaaggcatcgttaaccgcatccaaaccgaagaaaagctggaatccaactcgaccgtatggcaaaagcaggccggaagcggcagcacggttgaaacgctgaagctaccgagctttgaagggccggcactgcctaagctgaccgctcccggcggctatatcgccgacatccccaaaggcaacctcaaaaccgaaatcgaaaagctggccaaacagcccgaatatgcctatctgaaacagcttcagacggtcaaggacgtgaactggaaccaagtacagctcgcttacgacaaatgggactataaacaggaaggcctaaccggagccggagccgcaattatcgcactggccgttaccgtggtcacctcaggcgcaggaaccggagccgtattgggattaaacggtgcggccgccgccgcaaccgatgcagcatttgcctctttggccagccaggcttccgtatcgttcatcaacaacaaaggcaatatcggtaacaccctgaaagagctgggcagaagcagcacggtgaaaaatctgatggttgccgtcgctaccgcaggcgtagccgacaaaatcggtgcttcggcactgaacaatgtcagcgataagcagtggatcaacaacctgaccgtcaacctggccaatgcgggcagtgccgcactgattaataccgctgtcaacggcggcagcctgaaagacaatctggaagcgaatatccttgcggctttggtgaatactgcgcatggagaggcagcaagtaaaatcaaacagttggatcagcactacattgcccataagattgcccatgccatagcgggctgtgcggcagcggcggcgaataagggcaagtgtcaagatggtgcgatcggtgcggcggtcggtgaaatccttggcgaaaccctactggacggcagagaccctggcagcctgaatgtgaaggacagggcaaaaatcattgctaaggcgaagctggcagcaggggcggttgcggcgttgagtaagggggatgtgagtacggcggcgaatgcggctgctgtggcggtagagaataattctttaaatgatatacaggatcgtttgttgagtggaaattatgctttatgtatgagtgcaggaggagcagaaagcttttgtgagtcttatcgaccactgggcttgccacactttgtaagtgtttcaggagaaatgaaattacctaataaattcgggaatcgtatggttaatggaaaattaattattaacactagaaatggcaatgtatatttctctgtaggtaaaatatggagtactgtaaaatcaacaaaatcaaatataagtggggtatctgtcggttgggttttaaatgtttcccctaatgattatttaaaagaagcatctatgaatgatttcagaaatagtaatcaaaataaagcctatgcagaaatgatttcccagactttggtaggtgagagtgttggtggtagtctttgtctgacaagagcctgcttttcggtaagttcaacaatatctaaatctaaatctccttttaaagattcaaaaattattggggaaatcggtttgggaagtggtgttgctgcaggagtagaaaaaacaatatacataggtaacataaaagatattgataaatttattagtgcaaacataaaaaaatag

SEQ ID NO: 43537 - DNA, 444 bp, Neisseria meningitidis; identical to SEQ ID NO: 38644

SEQ ID NO: 43538 - DNA, 1080 bp, Neisseria meningitidis
atgaaaacactgaccgtacacaccccgtcccacagctaccccatctttatcggcaacggactgctgccgcaggcaggaagcctgctcaaaccgcatttgggcaaacgcgccgccatcatcgccaacgaaaccgtcgccccgctctacctcggcacgcttcagacggcattggatgcggcaggcgtatcccatttcagcatcatcctgcccgacggcgaggcgcacaaaaactggcagacgctcaacctcatctttgacgggctgatgcaaaaccgcgccgaacgcaaaaccacattaatcgcactgggcggcggcgtgatcggcgacatggtcggctttgccgctgccacctaccagcgcggcgcaccgttcgttcaaataccgaccacgctgttgagtcaggtcgactcatcggtgggcggcaaaaccgccatcaaccacccgctcggcaaaaatatgattggcgcgttttaccagccgcaggcggtgcttgccgacttggacacgctgcacaccctgcccgcccgcgaattgtccgccggtatggcggaagtcatcaaatacggcgcgctcggcgacatcggcttttttgaatggctggaacagcatatgcccgaactgatgacgctcgatcgggaaaaactcgcccaagccgtgtaccgctgctgccaaatgaaggcagacatcgtcgcccaagacgaaaccgaacagggcatacgcgcatggctcaacctcggacacaccttcggacacgccattgaaaccgagatgggttacggcacttggctgcatggagaagccatcgccgccggctgcgtgttggcggcgcgtttgtccgaacaactgggcaaaacctccgccgcagataccgcgcggctcgccgccctgctcgaagccgccggactgccgtccgcgccacccgtgtttgcctttgaaaaatggctggaacacatgagccacgataaaaaagtcagcggcggcatcatgcgctttatcggtctgaaccggctgggcgaagccaacatcaccgaaattaccgacacggacatcctccgccgcaccctgcaaccgtatctctga

SEQ ID NO: 43539 - DNA, 237 bp, Neisseria meningitidis
ttgcgtatcttgcggcaaacggctttgaaatggcgggggggcgattgcggcgatttttcgtgcctgtttcaaaaatccggtgcccgaagcttgggagaaaccgagaaaaaagccattatctcttggctggcagaccgcgaagatgttgccactttgtacgccaccccgctggttgacggtttttatggggatgacggctgggaaaattacagcgaaacctataaacaggcagattaa

SEQ ID NO: 43540 - DNA, 987 bp, Neisseria meningitidis
atgcaataccgaatcagaagagaaaacgaagcacccgaagcaaaaaatgcgggggaaaccttatgggagcgcgacatcatgcgcgaagtgctgttgtccgcctatcaggacaggcgcagggagcggatgtggaaaaacatctggcgcgccgtcagcaccctgattttggttgccctgattgcaggcattttccgaaaagacgaagccgcattgcagttggcgggcaacacgccgcataccgcagtcgtcaatctgtacggcgaaatcggcaacggtgtagaagaccaggtcaaaaaactcaaagacggtatggaggccgcctacaaaaacccgcaggcaaaagccatcgtcatccgcgccaacagccccggcggttcgcccgtcgtgtccaacaccgcttttgaagaaatacgccgtctgaaggcgcagcaccccggcattcccgtttatctcgtggcggaagatatgtgcgcgtccggctgctactacatcgcggcggcggcggacaaaatctatgccgacccgtccagcatcgtcggcagcatcggcgttatcggcagcagtttcgacgcgaccggcctgatggaaaaaatcggcgtgaaacgcagggttaaaattgcaggcagcaacaaaggcatgggcgatccgttttcgcccgaaacgcccgaacagtcaaaaatctgggaagaaatgctgaccggcatacacggcgagttcatcaaagccgtcaaaaccggacgcggcggccgcctcaaattccgacaatatcccgacgtgttcagcggtcgcgtgtacacaggcgcggatgcgctgaaagtcgggctggtggacggactcggcaatatttacagcgtggcgcgagacgtggtcaaagcccccgatgtggtggattacactccgaaggacgatttcggcagaatcttgggcagacgcttcggcgcagaactcaaagcaagcgtgcgcgaagccctgcaggccgtccggtag

SEQ ID NO: 43541 - DNA, 867 bp, Neisseria meningitidis
atgatgaaaaccttactgccctttttcggcgtggtgcgcgtcagcggcgaagaccgccaaaccttcctgcacggacagctttccaacgacatcaaccaccttcagaccgggcaggcgtgttatgcgacttacaacacgcccaaaggccgcgtcatcgccaatatgattgtcgtcaaccgaggcggcgatttgctgctgattatggcgcaagacctgcttgaagcaacggtcaaacgtttgcggatgtttgtgttacgcgccaaagccgtttttgaaatccttgaagattacgccgtcggcgcggaattagaagcatccgccgaaccgcttgccgcgcaagaacccagcctcgcctttaccgccgaatgcggttcagacggcatctgttccgtcgtcctgccacatcggggcattttgcacatcgcccccaaaaacgccttgccgccttatgatgccgccgccgaaaacgcgtggcggctgcacgaaatccgtagcggttatccgtggatatgcgcggctaccaaagaaaccgccgtcgcccaaatgctcaaccagcacatcatcggcggcgtacacttcaaaaaaggctgctatccgggacaggaaatcattgcccgtgcccagtatcgggggcaggtcaaacgcggcttggcggtattgtcgggaaattcggccgtcgaagcaggaaccctgctgacggcggacggcgaagaggccggcatcgtactcgacagcgttcaagattcggaaaactttaccgcccttaccgtgattaaattctccgccgcacaaaaaacactgaccgtcccaaacggcggtatcttcaaagcggttcatctcttctttaaaaccgaaaatgcagaataa

SEQ ID NO: 43542 - DNA, 1467 bp, Neisseria meningitidis
atggctgaagcgacagacgttgtcttggtgggcggcggcattatgagcgcgactttgggcgttttgctcaaagaactcgaaccgtcttgggaaatcaccctgattgaacgcttggaagatgtggcgttggaatcgtcaaacgcgtggaacaacgccggcacggggcattccgcgctgtgcgaattgaactatgcgccgttgggtgcaaatgggattatcgatccggcgcgcgccctcaatattgccgaacagtttcatgtcagccgccagttttgggcgacgctggtcgcggaaggcaagttggaagacaattccttcatcaatgccgtgccgcatatgtctttggtgatgaatgaagaccattgttcttatcttcaaaaacgttatgacgcgtttaaaacccaaaaactttttgaaaatatggaattttccaccgatcggaacaaaatttccgattgggctccgctgatgatgcgcggccgggacgaaaaccaacccgtcgccgccaactactccgccgaaggtacggatgtcgatttcggacggctgacgcgccaaatggtgaaatatttgcagggcaagggcgtaaaaaccgagttcaaccgccacgtcgaagacatcaaacgcgaatccgacggcgcgtgggtgctcaaaaccgccgatacccgcaaccccgacgggcagctcaccctccgtacccgcttcctcttcctcggcgcgggcggcggcgcgctgaccctgctgcaaaaatccggcatccccgaaggcaaaggctacggcggcttccccgtgtccggcctgttcttccgcaacagcaaccccgaaaccgccgaacaacacaacgccaaagtgtacgggcaggcttccgtcggcgcgccgccgatgtccgtcccgcacctcgacacacgcaacgtggacggcaaacgccaccttatgttcggcccttacgcaggcttccgttccaacttcctcaagcaaggctcgcttatggatttgccgctgtccatccatatggacaacctctatcctatgctgtgcgccggctgggcgaatatgccgctgaccaaatacctgctgggcgaattgcgtaaaaccaaagaagaacgcttcgcctccctgctggaatactaccccgaggcaaaccccgacgactgggaactcatcaccgcagggcaacgcgtccaaatcattaaaaaagactccgaaaaaggcggcgtgctccagtttggtacggagattgtcgcccacgccgacggctcactcgccgcattgctgggcgcgtcgccgggcgcatcgaccgctgtgccgctgatgatccggctgatgcaccaatgcttccccgagcgcgccccgtcttgggaagaccgtctgaaagagctggtaccgggttacggcatcaagttgaacgaaaaccctgaaagggcggatgaaattatcgcctataccgcgaaagtattggatatttaa

SEQ ID NO: 43543 - DNA, 1455 bp, Neisseria meningitidis
atgagcatcgaaccaacccctccgaaccttgaaaacgacggtatcgaaaacgatgtagaacgcgtttccgccgatttcgaccgtgtccactccctctgcgaaatcctcgaacctgcttttgaacaaatcgaaaacggtacaccgctcgaagacgcgccgctgcgcgacaagctgaccgagctgaccgtcctcttgagcgagctgcaccctgccgacgtggcggcggtattggaatcgctaccgccgcgcgaacgcaatatcgtctggattctggtcaaaccggaagacgacggcgaagtattgctggaagtatccgacgcggtgcgcgaaacgctgatcgagtcgatggacaaagacgaattgttggcagcggtcgatgatttggacgcggacgaattggcggaactggcagacgatttgccgcaccaagtggtttacgaagcgctacaaacccgcgatgaggaagaacgcgcccaagtcaaagcggcaatgtcctacgaagacaaccaagtcggtgcgattatggacttcgagttggtcagcatccgcgccgatgtcgcctgtgaagtggtgctgcgctatctgcgccgcttcgacagcctgcccgaccataccgacaagatttttgtggtcgatgaaaacgacgtactgcagggcgtgctgcccatccgcaaacttttggtcgccgatcccgaagacttggtggaaaacgtgatggcgaaagatgtcgtgcgtttccgcgccgaagatgacgtggaagaagcggcgcaggcgtttgaacgctacgacttggttaccgcgcccgtcgtcgatgaaaacaaaaagctcatcggcaggattaccatcgacgagatggtggacgtgatccgcgaagaatcggaagcggatatgctgaatatggcgggtttgcaggaagaggaagacctgttcgcccccgtgtgggattcggtgaaaaaccgctggatgtggctcgccgtcaacctctgcaccgccttcctcgccagccgtgttatcggcgcgtttgaaggcagcatcgaaaaaatcgtcgcactcgccgcgctgatgcccatcgtcgccggcataggcggtaactcgggcaaccagacgattaccatgattgtccgcgcgatggcgatggggcagctgacggatatgcaggcggggcgtttgctgaaaaaagaagtcggtgtcgccttggtcaacggcatcatttggggaacggtcatgggcgcagtatcttggctgctttacggcagcctcggcatcgggctggttatgattgccgcgatgacgctcaacctcctgctggcggcaaccgtcggcgtattaattcccgtggtaatggaaaagttcggacgcgatcccgcactgggcagctcggtgctgattaccgccgttaccgactccggcggcttcctgattttcttggggctcgccaccctattcctgctttaa

SEQ ID NO: 43544 - DNA, 285 bp, Neisseria meningitidis; identical to SEQ ID NO: 42876

SEQ ID NO: 43545 - DNA, 1911 bp, Neisseria meningitidis
atgaatatattatctgtagaaaacgcttcttttgccatcggccacgttgccttgctcgacaaaacttcttttcaactcgacagcggcgaaaaagtcggcttaatcggacgcaacggcgcaggcaagtcttcgtttttaaaaatcctcgccggtttgcaaaagctcgacgacgggcagattattgttcaaaacaacctcaaaatcgtttatgtaccgcaggaatccttttttgataaggacgcaaccgtatttgataccgttgccgaaggtttgggcgaaattcgcgatttattgcgccgttatcatcatgtcagccatgatttggagcacaattcagacgacgttttattaaaagaactcaacgaattacaactcgaaatcgaagcgaaggacggctggaagctggatgcggcagtcaagcagactttgggcgaactcggtttgccggaaaacgaaaaaatcggcaacctttccggcggtcagaaaaagcgtgtcgccttggcgcaggcttgggtgcagaagcccgacgtattgctgctggacgaaccgaccaaccatttggatattgacgcgattatctggttggaaaacctgctcaaggcgtttgaaggcagcttggtcgtgattacccacgaccgccgttttttggataatatcgccacgcggattgtcgaacttgaccgcggcattctacgttcctatcccggctcgttctctaaatacagtgagaaaaaagcgcaagagttggcagtcgaggcggaacataaccgcttgtttgacaaatttcatgctcaggaagaagcgtggatacgcaaaggcattgaagcgcgccgtacccgtaacgaaggccgcgtgcgccgcttggaagagctgcgccgccaacgtgcagaacgccgcaacgtgcagggacaggtcaactttaagctcgacagcggtgagaagagcggcaaaatcatcgccgaattggagcacgcttcgtttgcctacggcggcaaagtcattatggacaaattctccgccatcttgcagcgcggcgacaaaatcggcttaatcggtccaaacggcatcggcaaaaccacatttttaaaactgattttgggcgaattgcagccgacctacggcagaatccgtatcggcagcaagcaggaagtcgcctatttcgaccagttccgcagcgcgttgaatgaaaacgacaccgtgttttacaccctcggacagggaaacgattacgttgaagtcggcggtaagaaaaaacacgtcatgagctatttggaagatttcctgttccatccagcccgtgcgcaaagccctgtttcatcgctctccggcggagaacgcaaccgccttttgctggcaaaactctttacccgtcctgccaatatcctggtcttggacgaaccgaccaacgacttagacatcgacacccaagagctgctcgaagacctgttgcgcgattatcaaggcacagtattccttgtctcgcacgaccgtatgttccttgataacgtaattacccaaagcattgttttcgaaggacaaggccgtctgaaagaatacatcggcggctatcaggactatatcgacgcaaaatcgcgggaagataaaattcagacggcatccgcacccaaagcatccgatgccgaacccgccaaagaaaaacccaaagccaaccgcacggtcaaactgtcctacaaagagcagcgcgaactcgatgccctgcccgacgaaatcgccgctttggaagccgagcaggctgaaatcaatacccaactttcctatcctgaaattttcaaagattacgaaaaagcaggtgcattgcaaaaccgcgccgaagaaatcgaaatgctgcttttggaaaagctggaacgctgggagctgctggaaaccaaacggaacggcaatgccgtctga

SEQ ID NO: 43546 - DNA, 345 bp, Neisseria meningitidis; identical to SEQ ID NO: 36580

SEQ ID NO: 43547 - DNA, 933 bp, Neisseria meningitidis
atgtatgagataaaacagccttttcatagcggatacttgcaggtgtctgaaattcatcaaatttattgggaggaatcgggcaatcccgacggtgtgccggttatttttttacatggcgggccgggcgcgggggcttcgcctgaatgtcggggttttttcaatcccgatgtgttccgcatcgtcatcatcgaccagcgcggttgcggacgttcgcgcccgtatgcttgtgcggaagacaatacgacttgggatttggtggcggatattgaaaaagtccgtgaaatgctgggtatcgggaaatggctggtgttcggcggttcgtggggcagcactttgtcgctggcttatgcccaaacccatcctgaacgggtaaagggattggtgttgcgcgggatatttttgtgcaggccgtctgaaacggtgtggctgaacgaggcgggcggtgtgagccggatttatccggaacaatggcaaaaatttgtcgcgccgattgctgaaaatcggcggaaccggctgattgaggcgtatcacggattgctgtttcatcaagatgaagaagtgtgcctgtctgccgcgaaggcttgggcggattgggaaagctatctgatccgtttcgagccggaggaagtggatgaagatgcttatgcctcgctggcaatcgcgcgtttggaaaaccattattttgtcaacggcggttggttgcagggcgatagggcgattttgaacaatatcggcaaaatacggcatatcccgactattatcgtacaggggcggtatgatttgtgtacgccgatgcagagtgcgtgggcgctgtcgaaagcctttcccgaagcggaattgagggtggttcaggcagggcatcgtgcgttcgatccgcctttggtggatgcgttggttcaggcagttgaggatattttgccccatttgttgtaa

SEQ ID NO: 43548 - DNA, 444 bp, Neisseria meningitidis
atgccgttccgcctgtttttagggatattatgcggcctgtcaatggttgcccccgtatatgcacaggggcagccggatacggtcggcgactttatccaaaagaaaaaagtcatcgtcgatacatccaaagcggaactctgtttcgctgacgaccgtcagtgccaccccgtcctcatcggtgttgccacgcccaaggggacgttcgggctgacgctgaacagtaccgacaagcccggatacggcggcgaagtcatcggtttcaagcaggagggtgattttcttttcgccctgcaccgcgtttggaatcagataccgtcggaaaggcggaacgaacgcatcgcctccccgtccgtgtccgacaggattatgaccaacggctgcatcaacgtcagcgatgcggtgtacgaaaaactgcgtcattattttgtgttggaagtgatttga

SEQ ID NO: 43549 - DNA, 324 bp, Neisseria meningitidis
atgatgaccgaaagcgagtttatccgcgcgagcgaagcattatttgaacacatcgaagaccaaatcgacgaaaacggctgggatttcgactgccggtttgccggaaacgtcctgaccatcgaagccggagacggcgcccaaatcatcgtcaaccgccacacgcccaatcaggaattgtggattgccgcaaaaagcggcggctaccatttcgccgagcaaaacggcaaatggctggcaacgcgcgacggacgcgatttttatgacgttttaaacgaagccctgagcgcggcttcgggcgaagcggtggaaattgcggaattgtga

SEQ ID NO: 43550 - DNA, 1215 bp, Neisseria meningitidis
atggaatgggaattcaacagttattacacactgattgccgccacgctcgtgttgctggttggtaaatttctggttcaaaaaatcaaattcttacgagacttcaatattcccgagccggtagccggcggtttgattgccgctatcgtcctgttcgccctgcacgaggcgtacggcgtgagcttcaaatttgagaaaccgctgcaaaatgcgtttatgctgatttttttcacgtccatcggcttgagcgcggatttttcccgtttgaaggcgggcggtttgccgctggtggtttttaccgcgattgtgggcggatttatcttggtgcaaaactttgtcggggtcggactggctacggctttgggtttggatccgctcatcggtctgattaccggttcggtgtcgctgacgggcggacacggtacgtcaggtgcgtggggacctaattttgaaacgcaatacggcttggtcggcgcaaccggtttgggtattgcatcggctactttcgggctggtgttcggcggcctgatcggcgggccggttgcgcgccgcctgatcaacaaaatgggccgcaaaccggttgaaaacaaaaaacaggatcaggacgacaacgcggacgacgtgttcgagcaggcaaaacgcacccgcctgattacggcggaatctgccgttgaaacgcttgccatgtttgccgcgtgtttggcgtttgccgagattatggacggcttcgacaaagaatatctgttcgacctgcccaaattcgtgtggtgtctgtttggcggcgtggtcatccgcaacatcctcactgccgcattcaaggtcaatatgttcgaccgcgccatcgatgtgttcggcaatgcttcgctttcgcttttcttggcaatggcgttgctgaatttgaaactgtgggagctgaccggtttggcggggcctgtaaccgtgattcttgccgtacaaaccgtggtgatggttttgtacgcgacttttgttacctatgtctttatggggcgcgactatgatgcggcagtattggctgccggccattgcggtttcggcttgggtgcaacgccgacggcggtggcaaatatgcagtccgtcacgcatactttcggcgcgtcgcataaggcgtttttgattgtgcctatggtcggcgcgttcttcgtcgatttgattaatgccgcgattctcaccggttttgtgaatttctttaaaggctga

SEQ ID NO: 43551 - DNA, 558 bp, Neisseria meningitidis
atgaaacccaaattcaaaaccgttttaaccgcgctgcttttggcggtttccctgccgtctatggcggcaacccatgttttgatggaaaccgatatgggcaatatccgtttggttttggacgaatccaaagcccccaaaaccgttgctaatttcgtgcgctatgcccgaaaaggcttttacgacgacaccgtttttcaccgcgttatcgacggttttgttatccagggcggtggattgaccgaggacttggcacaaaaggcaagcgataaggccgttgccaacgaatccggcaacggcttgaaaaacaccgccggcaccatcgccatggcgcggacgacagcccccgattccgccaccagccaattctttatcaatctggcggacaacgcttcgctcgactacaaaaacggacaatacggctataccgttttcggcagggtcgaaagcggcatgaacaccgtttccaaaatcgcccgcgtcaaaaccgccacgcgcggcttttatcaaaacgtacccgtacagcccgtcaaaatccgtcgcgttgttgtcgggcagtaa

SEQ ID NO: 43552 - DNA, 2304 bp, Neisseria meningitidis
atgaatacgcaagcgcacgccccacataccgattccaatacgctgatgctcggccgatacgccgaacgcgcctatctcgaatacgccatgagcgtggtcaaaggccgcgcgctgcctgaagtttcagacggccagaagcccgtgcagcggcgcattttgtttgccatgcgcgatatgggtttgacggcgggggcgaagccggtgaaatcggcgcgcgtggtcggcgagattttgggtaaataccacccgcacggcgacagttccgcctatgaggcgatggtgcggatggcgcaggattttaccttgcgctatcccttaatcgacggcatcggcaacttcggctcgcgcgacggcgacggggcggcggcgatgcgttacaccgaagcgcggctgacgccgattgcggaattgctgttgtccgaaatcaatcaggggacggtggattttgtgccgaactacgacggcgcgtttgacgaaccgctgcacctgcccgcccgcctgcctatggtgttgctcaacggcgcgtcaggcattgcggtgggcatggcgaccgagattccgccgcacaatttgaacgaagtgacgcaggcggcgattgcgttgttgaaaaagccgacgctggaaaccgccgacctgatgcaatatattcctgcccccgattttgccggcggcggtcaaatcatcacgccggcggacgaattgcgccggatttatgaaaccggcaagggcagcgtgcgcgtgcgtgcgcgttatgaaatcgaaaaattggcgcgcggacagtggcgcgtcatcgtaaccgagctgccgccgaacgccaattccgccaaaatccttgccgaaatcgaagagcaaaccaacccgaaaccgaaagcgggtaagaaacagctcaaccaagaccagctcaataccaaaaagctgatgctggatttaatcgaccgcgtgcgcgacgagtccgacggcgaacatcccgtgcgactggtattcgagccgaaatccagccgcatcgataccgataccttcatcaacacgctgatggcgcaaacttcgctggaaggcaatgtgtcgatgaacttggtgatgatgggtttggacaaccgccccgcgcagaaaaacctgaaaacgattttgcaggaatggctggatttccgcaccgtaaccgtaacacgccgtctgaaattccgtttgaaccaagtggaaaaacggctgcacatcctcgaaggccgtctgaaagtctttctgcacatcgacgaagtgattaaagtcatccgcgaatcagacgacccgaaagccgatttgatggcggcgttcgggctgaccgaaatccaagccgaagacattttggaaatccgcctgcgccagttggcgcgtttggagggtttcaaactcgaaaaagaattgaacgagttgcgcgaggaacaaggccgtctgaacatccttttgagcgacgaaaacgaaaaacgcaagctgattgtcaaagagatgcaggcggatatgaaacaatacggcgacgcgcgacgcacgctggtggaagaggccggacgcgccgtgctgacgcagaccaccgccgacgaacccatcacgctgatcctgtcggaaaaaggctggatacgcagccgcgccggacacaatctcgatttgagccaaaccgcgttcaaagaaggcgactgcctcaaacaaaccctcgaaggcagaacggttttacccgtcgtcatcctcgattcatcgggcagaacctacacgctcgatgccgccgaaatccccggagggcgcggcgacggcgtaccggtttcctccttaatcgagctgcaaaacggcgcgaaacccgttgcgatgttgacaggattgccggaacaacattatttattatcaagcagcagcggctatggcttcatcaccaagctgggcgatatggtcgggcgcgtgaaagcgggcaaagtggtgatgaccgcagacagcggcgaaaccgttttgccgccggttgccgtctatgcctcctcgttcatcaaccccgactgcaaaatcattgccgccaccagtcaaaaccgcgccctcgccttccccatcggcgaattgaaaattatggcgaaaggcaaagggctgcaaatcatcggattaaacgccggcgaatcgatgacgcataccgccgtttcttccgagctggaaatcctgattgaaagcgaaggcaggcgcggcgcggcgcacaaagaccgcatccccatctccctgcttgaggcaaaacgcggcaaaaaaggcagactattgcccatatcgggcagcctgaaacagctttcttcccctaaataa

SEQ ID NO: 43553 - DNA, 1110 bp, Neisseria meningitidis
atgaagttgccgattaagcggcacactctgtttaacccgtccgaagccgctcaacattttaaggcttcgacaaccatttaccttaaaggaaatcaaatgcaagtctattacgataaagatgccgatctgtccctaatcaaaggcaaaaccgttgccatcatcggttacggttcgcaaggtcatgcccatgccgccaacctgaaagattcgggtgtaaacgtggtgattggtctgcgccaaggttcttcttggaaaaaagccgaagcagccggtcatgtcgtcaaaaccgttgctgaagcgaccaaagaagccgatgtcgttatgctgctgctgcctgacgaaaccatgcctgccgtctatcacgccgaagttacagccaatttgaaagaaggcgcaacgctggcatttgcacacggcttcaacgtgcactacaaccaaatcgttccgcgtgccgacttggacgtgattatggttgcccccaaaggtccgggccataccgtacgcagtgaatacaaacgcggcggcggcgtgccttctctgattgccgtttaccaagacaattccggcaaagccaaagacatcgccctgtcttatgcggctgccaacggcggcaccaaaggcggtgtgattgaaaccactttccgcgaagaaaccgaaaccgatctgttcggcgaacaagccgtattgtgcggcggcgtggtcgagttgatcaaggcgggttttgaaaccctgaccgaagccggttacgcgcctgaaatggcttacttcgaatgtctgcacgaaatgaaactgatcgttgacctgattttcgaaggcggtattgccaatatgaactactccatttccaacaatgcggagtacggcgaatacgttaccggccctgaagtggtcaatgcttccagcaaagaagccatgcgcaatgccctgaaacgcattcaaaccggcgaatacgcaaaaatgtttatccaagagggtaatgtcaactatgcgtctatgactgcccgccgccgtctgaatgccgaccaccaagttgaaaaagtcggcgcacaactgcgtgccatgatgccttggattactgccaacaaattggttgaccaagacaaaaactga

SEQ ID NO: 43554 - DNA, 864 bp, Neisseria meningitidis
atgagaatcctattgacaggctcgaaaagccaactggcacgctgcctgcgcgaccgtcttccggaagactgggaaaccattgcgacggattccgcatccctagacattaccgatgccgatgccgtctgcaacatggtcaaaagtttccaacccgacgccattgtcaacacggctgcctatactgccgtcgacaaggcggaaggcgatgcggcagcggcatttgccgtcaatgcttccgccgtttacaaccttgccttggcagcacatcgcgcccatgcccgattcatccacatctcaaccgactatgtctttgacggtaaagggaaaagaccctatcaggaaagcgactttaccaatccttccaatgtatacggacaatccaaaaccgcaggcgagctgctcgcactgtctgccaatcccgacagccttatcctgcggacttcttggctgtttagcgaatacggggacaactttatccgcacgatgctgaaccttgcgcgggaacgttccccgctgtccgccgtccacaaccaaatcggctgcccgacctatgccggcgacttgtccgccaccatcatccgcctgttgcagcactccaatcccgttcgcggcatttaccactacgccggcagcaaatccgtatcctggtacgaatttgcccaacatattttccaagcggcatcgcaacagcagacatccttccccgttcccgaattgactgccgtttcagacaaggaatatccgaccgccgcccccaggcccgcatacagcattttggactgccgcaaaatcgaaaacgacttcggcatcaaaccgtcagactggcaaaaagcccttgcacaggtcgtttccaagctgctctga

SEQ ID NO: 43555 - DNA, 693 bp, Neisseria meningitidis
atgaacgaaatcctcaggcagcccagcgttctgcttttcctcacgcttgccgtgtacgcgcttgcgattatcgtgcgcacgcgcacgggcaatatcttctgcaaccccgtactcgtcagcactatcgtgctgattgcctacctgaaaatcctcgacatcgattatgcggtgtaccacaacgccgcgcaattcattgatttttggctaaaacccgccgtcgtcgtgcttgccgtgccgctctaccaaaaccgccgtaaaatcttcaaccagtggctgcccgtcatcgtttcacagcttgcgggcagcgttacgggcattgttacggggatgtattttgccaaatggctgggcgcggaacgcgaagtcgtcctctcgctcgcgtccaaatctgttaccaaccccatcgccattgaaatcacccgctccatcggcggcattcccgccattaccgccgccaccgtcatcattgccggtctggtcggacagattgccggttacaaaatgctgaagaacacagtcgtcatgccctcgtccgtgggtatgtcgctcggcacggcttcgcacgcgatggggattgccgcctcgctcgaacgcagccgccgtatggcggcatacgcggggctggggctgacgttcaacggcgtactgaccgcgctgattgcgccgctgctcatccccgttttgggattttga

SEQ ID NO: 43556 - DNA, 2115 bp, Neisseria meningitidis
atgttcctcttttcagacggcctacaatccattaataacaataatcgacgaaaacgcattgtgaaaaacgcctacatcccctctcgcggcatccgcaaaatcccccatctctccaccctattgcctgaatttcatatctgcaaagacgggaaagaagcagaggctgttgtcggctggggtttgcgcccgacgacacacaaagcgcgtgcttttgccgctgaacaccagcttccctttattgctttggaagacggctttttacgatcgctcggactgggtgtcgccggttatccgccctactctatcgtctatgacgacatcggcatctactacgacaccacacgtccttcgcgtttggaacaactgattcttgccgccgataccatgccgtctgaaaccttggctcaggcgcagcaggcgatggatttcatcctgcaacaccacctgtccaaatacaaccacgcgcccgaactttcagacgaccatcctttacgttccccatccaaacccgaaaccgtcctcatcatcgaccaaaccttcggcgatatggccatccaatatggcggcgcagacgcctctacgtttgaactgatgtttcagacggccttaaatgaaaacccgcaagccgatatctgggtaaaaacccatcccgatgttttgtgcggcaaaaaacaaggctatctgacccaactggcgcagcaacaccgcgtccatcttttggcagaagacatcaatccgatttctttgttgcaaaacgttgataaagtttattgcgttacctcgcaaatgggttttgaggcgcttttgtgcggcaaaccgctgaccactttcggcctgccgtggtatgccggatggggtgtaagcgacgaccgccatcctgaaatcaaccgccttgttcaaacccaacgccgcgccacccgcaacttgctgcagctcttcgccgcagcctatctgcaatacagccgctacctcaaccccaataccggcgaagcaggcagcctctttgatgtcatcgactatctggcgacggtcaaacgtaaaaacgacaaattgcgtggcgagttatattgcgtcggtatgtctttgtggaaacgcgcggttgccaaaccgttctttaacgtaccctcttgccgtctgaaatttatctcttccacccaaaaactggcaagggtcaaactgtccgacgatgcacgcatcctggcttggggcaacggcaaagaggccatcgtccgctttgccgaacaacaccacatccccctgctgcgcatggaagacggctttatccgctcggtcggactcggctccaacttagtgccgccgctgtcgctcgttaccgacgatatgagcatttatttcaatgccgaaaccccgtcccgtcttgaatacatcctacaaaaccaaaacttcgacgatcaagactttcagacggccttgaagctgcaaaaaatgctgaccgaaaaccacatcagtaaatacaacgtcggcagctcagacttcaccgccccgtcaaccgacaaaaccgtgatcctcgttcccggccaggttgaagatgatgcgtctatccgctacggttcgccccaaatctaccgcaatctggatttgctccgtaccgtacgcgaacgaaaccccaatgcctatatcatctacaaaccgcatcccgatgtagtcagcggtaaccgcatcggccatatttcccctgaagatgctgcacgatatgccgaccaaaccgccgaacaagccgacatcctgacctgtctccaatacgcagacgaaatacataccatgacttcgctgaccggttttgaagccttgttgcgcggcaaaaaagtcagctgctacggcctgcctttttacgcaggctgggggcttacccaagatctgctccccatcccgcgccgtagccgcagacttgagctttggcagctgattgccggcacgctcatccactatcccgactacatccaccccgaaacccatcaggccataaatgcagaaaccgcagcccaaatcctgatacgacaaaaaaatatgcaaaaaaacaacaacggattacatcgcgggtgctttgccaaaaaattaggtaaaatcaaacaactatatcgatctttcaaataa

SEQ ID NO: 43557 - DNA, 495 bp, Neisseria meningitidis
atgaacaacagacattttgccgtcatcgccctgggcagtaatcttgaaaaccctgcccaacaggtacgcgccgcattggacacgctgtcgtcccatcctgacatccgtcttaaacaggcttcctcactgtatatgaccgcgcccgtcggttacgacaatcagcccgattttgtcaatgccgtctgcaccgtttccaccactctggacggcattgccctgcttgccgaactcaaccgtatcgaggctgatttcggacgcgaacgcagcttccgcaacgcgccgcgcacattggatttggacattatcgactttgacggcatctccagcgacgacacccgactcaccctgccgcatccgcgcgcgcacgaacgcagtttcgtcatccgccctttggcagaaatcctccctgattttgttttaggaaaacacggaaaggttgccgaattgtcaaaacggctgggcaatcaaggtatccgtcttttaccggacaggtaa

SEQ ID NO: 43558 - DNA, 1377 bp, Neisseria meningitidis
atgaaacacatccatattatcggtatcggcggcacgtttatgggcgggcttgccgccattgccaaagaagcggggtttgaagtcagcggttgcgacgcgaagatgtatccgccgatgagcacccagctcgaagccttgggtatagacgtgtatgaaggcttcgatgccgctcagttggacgaatttaaagccgacgtttacgttatcggcaatgtcgccaagcgcgggatggatgtggttgaagcgattttgaacctcggcctgccttatatttccggcccgcaatggctgtcggaaaacgtgctgcaccatcattgggtactcggtgtggcggggacgcacggcaaaacgaccaccgcctccatgctcgcatgggtcttggaatatgccggcctcgcgccgggcttccttattggcggcgtaccggaaaatttcggcgtttccgcccgcctgccgcaaacgccgcgccaagacccgaacagccaatcgccgtttttcgtcatcgaagccgacgaatacgacaccgcctttttcgacaaacgttctaaattcgtgcattaccgtccgcgtaccgccgtgttgaacaatctggaattcgaccacgccgacatctttgccgacttgggcgcgatacagacccagttccactacctcgtgcgtaccgtgccgtctgaaggcttaatcgtctgcaacggacggcagcaaagcctgcaagatactttggacaaaggctgctggacgccggtggaaaaattcggcacggaacacggctggcaggccggcgaagccaatgccgacggctcgttcgacgtgttgctcgacggcaaaaccgccggacgcgtcaaatgggatttgatgggcaggcacaaccgcatgaacgcgctcgccgtcattgccgccgcgcgtcatgtcggtgtcgatattcagaccgcctgcgaagccttgggcgcgtttaaaaacgtcaaacgccggatggaaatcaaaggcacggcaaacggcatcaccgtttacgacgacttcgcccaccacccgaccgccatcgaaaccacgattcaaggtttgcgccaacgcgtcggcggcgcgcgcatcctcgccgtcctcgaaccgcgttccaacacgatgaagctgggcacgatgaagtccgccctgcctgtaagcctcaaagaagccgaccaagtgttctgctacgccggcggcgtggactgggacgtcgccgaagccctcgcgcctttgggcggcaggctgaacgtcggcaaagacttcgatgccttcgttgccgaaatcgtgaaaaacgccgaagtaggcgaccatattttggtgatgagcaacggcggtttcggcggaatacacggaaagctgctggaagctttgagatag

SEQ ID NO: 43559 - DNA, 270 bp, Neisseria meningitidis; identical to SEQ ID NO: 40667

SEQ ID NO: 43560 - DNA, 477 bp, Neisseria meningitidis
atgcaaaaaatccccctgaccgtacgcggtgcggaattgctgaaacaggaattgcagcagctcaaaagcgtggcgcgtcccgaagtgatcgaagcgattgccgaagcccgttcgcacggcgatttgtccgaaaacgccgaatacgaagccgccaaagaacgccaaggctttatcgagggccgcatttccgagctggaacacaaactttccgttgcccacatcatcaatccgaccgaaatccacgccgaaggcaaaatcgtgttcggtacgacggttacgctggaagatttggaaacggaagaacacgttatctatcaaattgtcggcgaagacgaagccgacatcaaacagggcaaaatctatgtcggctcacccatcgcccgcgccttaatcggcaaggaagagggggatacggcggaagtccaagccccgggcggcgtgcgcgaatacgacattatcgaagtccgatatatttga

SEQ ID NO: 43561 - DNA, 486 bp, Neisseria meningitidis
ttggctgattttaaacctgactttgcgtggctgttgaaacggccgttgtgttttttggctttcggtttcggcagcgggctggctccgttcgcgccgggcacattcggcactttggcggcactgcctttggcgtttgtgctgattttgctcggcatagacgggctactgctggcttttttgtgtatcgtgctgtttatgtggggcatacgcatttgcgcttatgcggaacgtgaaacgggtgtcagcgaccacggtgggattgtttgggacgagattgtcgccatgctgtttgtgctggcgtttgtgccgttcaggtggacgtggtggctggcggcatttgtcctattccgtctgtttgacgcgctcaaaccgtctcccgtcggttggtttgacaagaatctgcacggcggtttgggcattatggcggacgatatggcggctgcggtgatgactttgattgtcttgaggattgcaatgctgttttaa

SEQ ID NO: 43562 - DNA, 282 bp, Neisseria meningitidis
atgaacacaataccgctccacaccatactcaaacttatggcgcatcccgaacgtatggcgatactgattcaattgttggacagcgaacgcaatatcgccgaactggcaaaatccttatccctgccggccaccgcagtttccaaccatttgaaccgcctgcgcgtggaaggtctagtcgattttacgcgttaccaccgcattatcgaataccgcctggtttccgaagaagcggcggcgattctgcacacggttcgcgatttggaaaacaaacgcgtggcatag

SEQ ID NO: 43563 - DNA, 502 bp, Neisseria meningitidis
atgagaaaaagtcgtctaagccagtataaacaaaataaactcattgagctatttgtcgcaggtgcaactgcaagaacggcagcagagttagtaggcgttaataaaaataccgcagcctattattttcatcgtttacgattacttatttatcaaaacagtccgcatttagaaatgtttgatggcgaagtagaagcagatgaaagttattttggcggacaacgcaaaggcaaacgcggtcgcggtgctgccggtaaagtcgccgtattcggtcttttgaagcgaaatggtaaggtttatacggttacagtaccgaatactcaaaccgctactttatttcctattatccgtgaacaagtgaaacctgacagcattatttatacggattgttatcgtagctatgatgtaattagatgtgagcgaatttagccattttagcttcgctgaaacttcgttttcgtatcaatcacagcacacattttgctgaacgacaaaaccatattaa

SEQ ID NO: 43564 - DNA, 909 bp, Neisseria meningitidis
  misc_feature 894, 895, 896, 897, 898: 'n' is a, c, g or t
atgcgaaaaaaacttaccgccctcgtattgtccgcactgccgcttgcggccgttgccgatgtcagcctgtacggcgaaatcaaagccggcgtggaaggcaggaacttccagctgcagttgaccgaaccgccctcaaagagtcaacctcaggtaaaagttactaaggccaaaagccgcatcaggacgaaaatcagtgatttcggctcgtttatcggctttaaggggagtgaggatttgggcgaagggctgaaggctgtttggcagcttgagcaagacgtatccgttgccggcggcggcgcgacccagtggggcaacagggaatcctttgtcggcttggcaggcgaattcggtacgctgcgcgccggtcgcgttgcgaatcagtttgacgatgccagccaagccattgatccttgggacagcaacaatgatgtggcttcgcaattgggtattttcaaacgccacgacgatatgccggtttccgtacgctacgactctccggacttttccggtttcagcggcagcgtccaattcgttccgatccaaaacagcaagtccgcctatacgccggctcattatactaggcagaacaatgctgatgttttcgttccggctgttgtcggcaagcccggatcggatgtgtattatgccggtctgaattacaaaaatggcggttttgccgggagctatgcctttaaatatgcgagacacgccaatgtcggacgtgatgcttttgagttgttcttgctcggcagcacgagtgatgaagccaaaggtaccgatcccttgaaaaaccatcaggtacaccgcctgacgggcggctatgaggaaggcggcttgaatctcgccttggcggctcagttggatttgtctgaaaatggcgacaaagccaaaacnnnnncacacacttaa

SEQ ID NO: 43565 - DNA, 225 bp, Neisseria meningitidis
atgatgaaaaacaaatatattttaataaaagcagcaatcagcataaccgccatatctatattttatcttctaactcaagaaagcagcggcaaaactgaagaaccatcatatttcttgatgtttatgtttctcaacttgctttggtttgaagaaaataaaacagttatggctgccgttacggcaatgattgccgcccactttatatttgtcgcactatccgattaa

SEQ ID NO: 43566 - DNA, 423 bp, Neisseria meningitidis
atggcatacgcgacggttgaggatatggttgcgcgtttcggtgagctggaagtcttgcagctcaccgaccgcaacaacgaggggctgattgaccgcgaggtcgcacaaaccgcgctggtggacgccactgccgaaatcgacgcgtatctggggcggttcagacgaccttttgaggatctgccgcccatcttggtgcgcctttgctgcgacattgcccgctaccgtctgacggcggctcagggcgtgttgattaccgacgaaatccgcaaccgctacaaaatcgacgtgctcgacctgctgcgtgctatggccaaaggcgaagtgcagctgggcgtggatgatagcggcgaagaagtggccgcgggcgaagacggtattgtgtttgtaaacggtaaaaataaggtgttcgggcgtgatcactga

SEQ ID NO: 43567 - DNA, 1368 bp, Neisseria meningitidis
atgcttgaccttcataccgaattttcccgactcctaccggcagatgaaattgccgaaccttctccgacgcttttaaaagaccagcgcaaccgctttacgtctgcaccagacatcattttgcagccgctcagcgttaaaagcgtgcaaaccattatgcgtttctgccaccaacaccgtattccggttacgccgcaaggcggcaatactggtttgtgcggcgcggcagtatcggaaaacggcgtattgctgaacctttccaaactcaaccgcatccgcagcatcaatttgtcagacaactgcataaccgtcgaagcaggttccgtactccaaaccgtccaacaggcagccgaagcctcaaacaggctgttcccactcagtctcgccagcgaaggctcgtgccaaatcggcggcaacatcgcctgcaatgccggaggtttgaacgtattgcgttacggcacgatgcgcgacctggttatcggtttggaagtcgtcctccccaacggcgaactggtttcccatctccatcccctgcataaaaacaccaccggctacgacctgcgccatctgtttatcggtagcgaaggtacattgggcattatcactgccgccacgctcaagctgtttgccaaccccttagacaaagcaaccgcatgggtcggcatacccgacatcgaatccgccgtccgcctgctgaccgaaacccaagcacactttgccgaacgcctatgcagttttgagctgatcggccgttttgccgccgaattgtcttccgaattcagcaaactccccctgccgacacattcagaatggcatattttacttgagttgaccgactcattacccgacagcaatcttgatgatcggcttgtcgaatttctttataaaaaaggctttaccgacagcgtgttggcgcaaagcgaacaagaacgtatccatatgtgggcgttgcgcgaaaacatctccgcatcgcaacgcaaactgggcaccagcatcaaacacgatattgccgttcctatcgggcgcgttgccgactttgtccgccggtgcgccaaagatttggaacagaatttcaaaggcatacaaatcgtctgcttcggacatctgggcgacggcagcctgcactacaatactttcctgcccgaaatcctcagcaatgaagtctatcgttacgaaaacgacatcaacagcacagtctatcgcaacgtccttgcctgcaacggcacgattgccgccgaacacggcataggtatcatcaaaaaacagtggctggacaaagtacgcacgcctgccgaaatcgccctgatgaaaagcatcaaacaacaccttgatccatataacattatgaatccgggcaaactgcttccgtaa

SEQ ID NO: 43568 - DNA, 768 bp, Neisseria meningitidis
atggcactggcaaaacgcatcatcccctgtctcgacgtaaaagacgggcgcgtcgtcaaaggcgtgaacttcatcggtttgcgcgacgcgggcgaccccgtcgaagccgccaaacgctacaacggcgaaggcgcggacgaattgaccttcctcgacatcaccgcctcatccgacaaccgcgacaccatcctgcacatcatcgaagaggttgccggacaagtcttcatccccctgaccgtcggcggcggcgtacgcaccgttgccgacatccgccgcctgctcaatgccggcgcggacaaagtcagcatcaacaccgccgccgttacccgtcccgatttaattgacgaagccgccggatttttcggttcgcaagccatcgtcgccgccgtcgatgccaaagccgccaaccccgaaaacacacgctgggaaatctttacccacggcgggcgaaatccgaccggtttggatgcggtggaatgggcggtcgaaatgcaaaaacgcggcgcgggcgaaatcctgctcaccggtatggacagggacggtacgaaacagggtttcaacctgccgctgacccgcgccgttgccgaagccgtcgacatccccgtcatcgcctccggcggggtcggcaatgtccggcacctgattgaaggcataaccgaaggcaaagccgatgccgtacttgccgccggcattttccatttcggggaaatcgccatccgcgaagccaaacgcgctatgcgcgaagccggcatcgaagtgcgcctctga

SEQ ID NO: 43569 - DNA, 618 bp, Neisseria meningitidis
atgaaaaagaccatttttaacattaccaaaatggactgcccgtccgaagaacagctcattcgcatgcgtttaaaagatgtgtctgatatttatgaattacagtttgatattgctgggcggtgcttaaccgtctatcacgataatcaagatacaacgattttacaagtacttgaaccgcttaattttgatagtcatatcatttccaccgaagtgattgttgataagatagtgtttaacaagcctgatgagcacttagaaaaaagattattatatcaagtgctcatgattaactttgtgttttttatcatagagtgttcggttggtatttttgctaattctatggggctgattgctgatagtctagatatgctggcggacagctttgtctatatattggcgctatcagccattggtatgacgctggcgtataaaaaacgtgtggcatttttggcggggataacgcagataatattggcgttatttggggtgatagaagtgattaggcgttttatcggtgctgagcagctgcccaattatcaactgatgattggcacggcatttttggcattgattgcaaactggctgtgcttatatctactgagcaaaaatcaaaaataa

SEQ ID NO: 43570 - DNA, 2586 bp, Neisseria meningitidis
atgttagaagcctatcgtaaagccgccgccgagcgcgccgccctcggcattcccgccctccctttgaacgcgcagcaaaccgccgatttggttgagctgctgaaaagcccgcccgcaggcgaaggcgagttcttggtcgaactgcttgcccaccgtgttccgcccggtgtggacgatgccgccaaagtcaaagcctcattcctggctgccgttgccgaaggcagcgcgtccagcccgctgatctcccccgaatatgcgaccgaactcttaggtacaatgctcggcggttacaatattcacgccttaatcgaactcttggacgacgacaaactcgcgtccattgctgccaaaggcttgaaacatacgcttctgatgttcgattccttccacgacgttcaagaaaaagccgaaaaaggcaacaaatacgcgcaagaagttttgcaatcttgggcagatgccgaatggttcgcctcacgcgccaaagttcccgaaaaaatcaccgttaccgttttcaaagttgacggcgaaaccaatacagacgacctctcccccgcgcccgacgcgtggagtcgtcccgatattccgctgcacgcgctggccatgctgaaaaacccgcgcgacggcatcacgcccgacaaaccgggcgaagtcggtccgattaaattgttggaagaactcaaagccaaaggccatccggttgcttacgtcggcgacgtggtcggtactggttcttcacgcaaatccgcgaccaactccgtcatttggcataccggcgaagacattccgttcgtgccgaacaaacgcttcggcggcgtatgtttgggcggcaaaatcgcgccgattttcttcaatacccaagaagattccggcgcgctgccgattgaagtcgatgtatctgctctaaaaatgggcgatgtcgtcgatatcctgccttatgaaggcaaaatcgtgaaaaacggcgagactgttgccgagtttgaattgaaatcacaagtattgctggacgaagtgcaagccggcggccgtatcaacctgattatcggccgaggtctgaccgccaaagcgcgcgaagccctgaaactgcctgcctctactgcattccgcctgccgcaagcgcctgccgaaagcaaagccggtttcaccttggcgcaaaaaatggtcggccgcgcctgcggtctgcccgaaggacaaggcgtgcgcccgggtacttactgcgaaccgcgtatgacgacggtcggctcgcaagacacgaccggcccgatgacccgcgacgagttgaaagacttggcttgtttgggcttctccgccgatatggtgatgcagtctttctgccacaccgccgcctatccgaaacctgtcgatgtaaaaacccataaagaactgcccgcctttatttccacccgtggcggcgtgtcactgcgtccgggcgacggcgtcatccactcgtggctcaaccgcctgctgctgcccgataccgtcggcaccggcggcgacagccatacccgtttccccatcggtatttccttccccgccggctccggcttggttgcctttgccgccgcaacgggcgtaatgccgctcgatatgcccgagtctgtattggtacgcttcagcggcaagctgcaaccgggcgtaaccctgcgcgatttggtgaacgccatcccgctgtacgcaatcaaacaaggtttgctgaccgttgccaaagccggtaagaaaaacatcttctccggccgcatcctcgaaatcgaaggcctgcctgatttgaaagtggaacaagcctttgaattgaccgacgcatccgccgaacgctccgccgccggctgtaccgtgaagctcaacaaagagccgattatcgagtacatgaaatccaacgtcgtgttgatgaaaaacatgattgccaacggctatcaagacccgcgcactttggaacgccgcatcaaagctatggaaaaatggctggcaaatcccgagttgctcgaagcggataaagatgccgaatacgccgccgtgattgaaatcaacatggacgacatcaaagagccgattatcgcctgcccgaacgacccggacgacgtgtgcttcatgtccgaacgctccggcaccaaaatcgacgaagtattcatcggttcgtgtatgaccaacatcggccacttccgcgccgcctccaaacttttggaaggcaaggcagacacccccgtccgcctgtggattgcgccgccgaccaaaatggacgcgaaacaattgtccgacgaaggacactacggcgtactcggacgtgccggcgcgcgtatggaaatgccgggttgctccttatgtatgggtaatcaggcgcaagtacgcgaaggtgcgaccgttatgtccacctccacccgcaacttcccgaaccgtttgggtaaaaacacctttgtttacctcggttcggcggaattggcagcgatttgctccaaactgggtaaaatcccgaccgttgaagaatatcaagccaatatcggcatcatcaacgaacagggcgataaaatctaccgctatatgaacttcaacgaaatcgacagctacaacgaagtagccgagaccgtgaacgtttaa

SEQ ID NO: 43571 - DNA, 825 bp, Neisseria meningitidis
atgttgaaaaaattcgtactcggcggtattgccgcattggttttggcggcctgcggcggttcggaaggcggcagcggagcatcttccgcgcctgcacaatcggcagtttccggttctttaatcgagcgcatcaacaataaaggcacggttaccgtcggcacggaaggcacttacgcaccgtttacctaccacgacaaggacggcaaactgaccggttacgatgtggaagtaacccgcgccgtggcggaaaaactgggcgtgaaagtcgagtttaaagaaacgcaatgggattcgatgatggcgggtttgaaggcggggcgtttcgacgtggtggcaaaccaagtcggtctgaccagccccgaacgccaagcgacattcgacaaatccgatccttacagctggagcggtgccgtattggttgtccgtaacgacagcaacatcaaatctatagccgacatcaaaggcgtgaaaaccgcacaatccctgaccagcaactacggcgaaaaagccaaagctgcaggcgcagatttggtggctgttgacggtttggcgcaatcgctgaccctgattgaacaaaaacgtgccgatgcaaccctgaacgacgaattggcggttttggactatctgaagaaaaacccgaatgcgggcgtgaaaatcgtttggtccgcacctgccgatgaaaaagtcggttccggcctgattgtcaacaagggcaatgacgaagccgtggcgaaattcagtacggcaatcaacgagctgaaagccgacggtacgctgaaaaaactgggcgaacaattcttcggaaaagacatcagtgttcaataa

SEQ ID NO: 43572 - DNA, 2277 bp, Neisseria meningitidis
atgacaacattacatttctcaggcttcccgcgtgtcggcgccttccgcgaattgaaattcgcacaagaaaaatactggcgcaaagaaatcagcgagcaagaattgctggctgttgctaaagacttgcgcgagaaaaactggaaacaccaggccgctgccaacgccgatttcgttgccgtaggtgatttcactttctacgaccacatcctcgacctgcaagtcgccaccggcgcgattcccgcccgcttcggcttcgacagccaaaacctgtctttggaacaattcttccaactggcgcgcggcaacaaagaccaattcgctatcgaaatgaccaaatggttcgacaccaactaccactacttggtgcctgaattccacgccgataccgaattcaaagccaatgccaaacactatgttcaacaactgcaagaagcccaagccctcggtctgaaagccaaaccgaccgttgtaggtccgttgactttcctgtgggtgggtaaagaaaaaggcacagtcgaattcaaccgcctgagcctgttgcaaaaactgctgcctgtttacgttgaaatcctaaacgctttggttgaagccggtgcagaatggattcaaatcgacgagcctgctttggctgttgacctgcctaaagaatgggtggaagcctacaaagacgtttacgctactttgagcaaagtcaacgccaaaatcctgttgagcacttacttcggttctgttgccgaacacgccgcattgctgaaagccctgcctgttgacggtctgcacatcgacttggtacgcgctcccgagcaactggacgcgttcgccgactacgacaaagtcctgtccgccggcgtgattgacggccgcaatatttggcgcgccaacctgaacaaagttttggaaactgttgagcctctgcaagccaaactgggcgaccgtttgtggatctccagctcttgctctctgctgcacactccatttgacttgtcagttgaagaaaaactgaaagccaacaaacccgacctgtactcttggttggcatttaccctgcaaaaaacccaagaattgcgcgttctgaaagccgcattgaacgaaggtcgcgattccgttgccgaagaactggccgccagccaagctgctgccgattcacgcgccaacagcagcgaaatccaccgtgcagacgttgccaaacgcctggccgatttgcctgccaacgcagaccaacgcaaatctccatttgccgaccgtatcaaagcgcaacaagcatggttgaacctgcctctgctgccgacgaccaacatcggttctttcccgcaaactaccgaaatccgccaagcacgcgcagccttcaaaaaaggcgaactgtctgccgccgattacgaagccgcgatgaaaaaagaaatcgccttggtggttgaagaacaagaaaaactggatttggacgtactggtacacggcgaagccgagcgtaacgacatggtcgaatacttcggcgaattgttgagcggttttgcattcacccaatacggctgggtacaaagctacggctcacgttgtgttaaaccaccgattatcttcggtgacgtaagccgtcctgaagccatgactgtcgcctggtctacttacgcacaaagcctgaccaaacgcccgatgaaaggtatgttgaccggccctgtaaccattctgcaatggtcttttgtccgcaacgatattcctcgctctaccgtgtgcaaacaaatcgcactggctctgaacgacgaagtattggatctggaaaaagcaggcatcaaagtcatccaaattgacgaacctgccatccgcgaaggcttgccgctgaaacgcgccgattgggatgcctacctgaactgggcgggcgaatccttccgcctgtcctctgccggttgcgaagacagcacacaaatccacactcatatgtgctactccgagttcaacgatatcctgcctgcgattgctgcaatggatgcggacgtgatcaccatcgagacttcacgttccgacatggaactcttgaccgcgttcggcgaattcaaatacccgaacgacatcggcccgggggtttacgacatccacagcccgcgcgtaccgacagaagccgaagtggagcacctgttgcgcaaagccatcgaggttgtaccggttgaacgtctgtgggttaacccggactgcggcctgaaaacacgcggctggaaagaaactctggaacaactccaagtgatgatgaacgtaacccacaaattgcgtgccgaattggcgaaataa

SEQ ID NO: 43573 - DNA, 903 bp, Neisseria meningitidis
atggaaaatatggtaacgttttcaaaaatcagaccgcttttggcaatcgccgccgccgcgttgcttgccgcctgcggcacggcgggaaataatgctgtccgcaagccggtgcaaaccgccaaacccgccgcagtggtcggtttggcactcggtggcggcgcatctaaaggatttgcccatgtaggtattattaaggttttgaaagaaaacggtattcctgtgaaggtggttaccggcacatcggcaggttcgattgtcggcagcctttttgcatcgggtatgtcgcccgaccgcctcgaattggaagccgaaattttaggcaaaaccgatttggtcgatttaaccttgtccaccagtggttttatcaaaggcgaaaagctgcaaaattacatcaaccgaaaagtcggcggcaggcagattcagcagtttcccatcaaatttgccgccgttgctactgattttgaaaccggcaaggccgtcgctttcaatcaggggaatgccgggcaggctgtgcgcgcttccgccgccattcccaatgtgttccaacccgttatcatcggcaggcatacatatgttgacggcggtctgtcgcagcccgtgcccgtcagtgccgcccggcggcagggggcgaatttcgtgattgccgtcgatatttccgcccgtccgggcaaaaacatcagccaaggtttcttctcttatctcgatcagacgctgaacgtaatgagcgtttctgcgttgcaaaatgagttggggcaggcggatgtggttatcaaaccgcaggttttggatttgggtgcagtcggcggattcgatcagaaaaaacgcgccatccggttgggtgaggaggcagcacgtgccgcattgcctgaaatcaaacgcaaactggcggcataccgttattga

SEQ ID NO: 43574 - DNA, 1302 bp, Neisseria meningitidis
atggctatttaccaatcaggcgtgatttttgaccaagtggataccgccaatcccgattgctggacattggacgaatacgtcaaacgcggcggctataccgccctgcgtaaaattctgtccgaaaacatctcgcaaaccgatgtgattgacgaagtcaaaacctccggtttgcgcgggcgcggcggtgcgggcttcccgaccggtttgaaatggagctttatgccccgttctttcccgggcgaaaaatatgtggtttgcaacaccgacgaaggcgaaccaggtacgtttaaagaccgcgacatcatcatgttcaatccgcatgccctgatcgaaggcatgattatcgccggttacgcgatgggcgcgaaagccggttacaactatatccacggcgaaatttttgaaggctaccaacgctttgaggccgctttggagcaggcgcgtgccgcaggctttttgggtaaaaatattttgggttcggattttgaatttgaactcttcgcccaccacggctacggcgcatatatttgcggcgaggaaaccgcattgctcgaatcgctggaaggcaaaaaaggccagccgcgctttaagccgccattccctgcttcgttcggcctgtacggcaaaccgactaccatcaacaatactgaaacgttctcctccgttccattcattatccgtgacggtggacaggcatttgccgataaaggtattccgaatgcaggcggtaccaaattattctgtatttccggccatgtcgagcgtccgggcaactatgaagtgccattgggtacgccgtttgccgaagtcttgaaaatggcgggcggtatgcgcggcggtaaaaaactcaaagccgtcattcccggcggttcgtccgcgcccgtattgcctgccgacatcatgatgcagaccaatatggactacgactcgatctccaaagcaggctccatgctcggttccggcgcgattatcgtcatggacgaagacgtgtgcatggtcaaagcccttgagcgtttgagctacttctactacgacgagtcttgcggccaatgtaccccctgccgagaaggtacgggctggctttaccgcatcgtccaccgcatcgtagaaggcaaaggtaaaatggaagatttggatttgctggattccgtcggcaaccaaatggcaggccgcaccatctgcgccctcgccgatgctgccgtcttccccgtccgcagctttaccaagcatttccgtgatgagtttgtgcattacatcgaacacggcgggccgatgaaagagcataagtggggagggtggtaa

SEQ ID NO: 43575 - DNA, 1302 bp, Neisseria meningitidis
atgccgtctgaaaccgcccgccccctttatgcggacacgtgcgccgcacacacgctcgtctggttccgccaaaacctccgcatccgcgacaacgccgccttatgcgccgccgttgccgaaggtttgcccattatcggcatttggattgacgatgccgaaacagacaaccctcgccgcgccgcgttctaccgccaatccgccgccgaactcgcccaagggcttgcagggcgcggcatcccgctctacacggcggcatctcctgccgagctcgtccggctcgccgtccgcctcaatatccgcaccgtcatcgccgacgaatcccatacttttgccgacaaactcgccgacaacgccctttggcacgaattggacaaacacggcatcgcgttaaccttcgtcaacgaccgcgccgttttcggcaaaaccgacctgatacccgacggcggcacggcatatgccgatttcgaccgctaccgcgaagtatggctcgaccgcttttccaagcagccccccgccggtccggacctattcgcggcataccgccaacccttccccgaaaacctttccgccccgcagcctgccgcgctttcagacggcatcttcctgccgcaaaacagcggcgaaacggcggcttggcggcagtggcggcggtttctcgaacaggcggattcctactccgttttaaaggatttcccctcgcgcaaacacacttcgctgatgggcgcgtatttgagtgccggctgcatctcgccgcgcctgctcgcgcgggaaagcctcgaacgccgtctgaacgcgtgggcggacaacatcatccgccgcgattttttccttcaacttgccttgcagcacacggatgacgacccttcagacggcaatcctgaacacaccctgcgcctgacgctttggcagcagggccggaccggcattccgattatcgatgccgcgatgcgctgtttgcacaaaaccggcagcctccaccccgccctgagacgcttgagcgcggattttttctgccacgttttaaacctcccccgccgcgaaggcgagatatggtttgcccgacagctgaccgatttcgatgcagcaatcaaccaaggcaactggcggcttgccgcctcacggcacacctgccccgacattgccgccgccgcacacaaaaccgaccccgacggcacctttgtcagacggcacattcccgagcttgcccacctgtccgccgacaccgtccacacgccttggcggtttgcctgttcggtcgatacccacggctatcccgcccatcctgtcgccggtattccctaa

SEQ ID NO: 43576 - DNA, 1929 bp, Neisseria meningitidis
atgtccagaaaccaaaatcacgaagaatatcaagacgacacccgtccgttaagcattgaagagcaacgcgcgcgcctgcgtcagctcatcatcatgggtaaagaacgcggctacatcacctactccgaaatcaacgacgccctgccagacgatatgtctgatgccgaccaaatagacaatatcgtcagcatgatttccggtttgggcatccaagttaccgaacacgcccccgatgcggaagacatattgttaagcgacaatgccgccgttaccgacgatgatgccgtcgaagaagccgaggccgccctttccagtgcagattccgagttcggcagaaccaccgaccccgtccgtatgtatatgcgcgaaatgggacaggtcgacctgctgacccgcgaagacgaaatcatcatcgcaaaaaaaattgaaaacgccctgaaaaatatggttcaggccatctccgcctgcccgggatccattgctgaaatcttagaactcatcgaaaaaatccgcaaagacgaaatccgcgtcgacgaagtcgtagaagccattatcgacccgaatgaagtattgctcaacgaattgggcttggggcacttggaaaccacagcgcccgagaaaccttccaacgacaattcggacgaaaacgaagacgacgaagaatcggaagaagatgcggatgaaatctcggcagccaatctcgccgaattgaaacaaaaagtcatcggccactttgcccaaatcgaaaaagactacaaaaaaatgattggccgtttggaaaaacaccacagccggcacaaagactatctcgcctaccgcgacgcgattgccaacaaactgctggaagtccgtttcgccacccggcaaatcgacagcctcagcagcagcctgcgcgggaaagtagaaaacatccgcaaactcgaacgcgaaatccgcgacatctgcctcgaccgcgtccatatggaacgcgactacttcatccaaaacttcctgcccgaaatcaccaatctagaatggattgaagaagaaatcgccaaaggcagggtttggagcgacgcgctcgaccgcttccgccacgccatcctcgaaaaacaaaccgagttggcggatatggaaaaagaaacccgcatttccatcgaagagttgaaagaaatcaacaaaaatatggtgtcgagcgaaaaagaaaccgcagccgccaaacaggaaatgattcaggcaaacttgcgcctcgtgatttccatcgccaaaaaatataccaaccggggcttacaattccttgatctgattcaggaaggcaacatcggtttgatgaaagcggtcgataagttcgaataccgcagaggctataaattctccacctacgcaacctggtggatccgccaggcaattacacgctcgattgccgatcaggcgcgtaccatccgcattccggtacatatgattgaaaccatcaacaagatgaaccgcatctcgcgccaacaccttcaagaaaccggcgaagaacccgattccgccaaacttgccgaactgatgcagatgcccgaagacaaaatccgcaaaatcatgaaaatcgccaaagagccgatttcgatggaaacccccatcggcgacgacgacgattcgcacttgggcgacttcatcgaagatgccaacaatgttgcgccggccgatgcggcaatgtacaccagcctgcacgaagtaaccaaagaaatcctcgaaagcctgacaccgcgtgaggcaaaagtcctgcgtatgcgtttcggcatcgatatgaacaccgaccacacgctggaagaagtcggcagacagtttgacgtaacgcgcgaacgcatccgacaaatcgaggcaaaagcactccgcaagctgcggcatccgacaagaagcgaccgtttgagaagtttcttggacagcgaagacagcaagctgtaa

SEQ ID NO: 43577 - DNA, 348 bp, Neisseria meningitidis
atgcgcctaaaccacaaacagggcgaggcaggggaagatgccgcgcttgccttcctccaatcccaaggctgcacgctgcttgcccgcaactggcactgcgcctacggcgaaatcgacctgattgtcaaaaacggcggcatgattctgtttgttgaagtaaaataccgcaaaaatcggcaattcggcggtgtcgcatacagcatttccccatccaaattattgaaactgcaacgaagtgtagagtattatctgcaacagaacaggttgacaaacgtaccgtgccgcctcgatgcggtacttatcgaaggcagccgcccgcccgagtggatacagaatattacaggttga

SEQ ID NO: 43578 - DNA, 1770 bp, Neisseria meningitidis
atgcatgcacacgcctcagatttggcaaacgattcttttatccggcaggttctcgaccgtcagcatttcgaacccgacgggaaataccacctattcggcagcaggggggaacttgccgagcgcagcggccatatcggattgggaaaaatacaaagccatcagttgggcaacctgatgattcaacaggcggccattaaaggaaatatcggctacattgtccgcttttccgatcacgggcacgaagtccattcccccttcgacaaccatgcctcacattccgattctgatgaagccggtagtcccgttgacggatttagcctttaccgcatccattgggacggatacgaacaccatcccgccgacggctatgacgggccacagggcggcggctatcccgctcccaaaggcgcgagggatatatacagctacgacataaaaggcgttgcccaaaatatccgcctcaacctgaccgacaaccgcagcaccggacaacggcttgccgaccgtttccacaatgccggtagtatgctgacgcaaggagtaggcgacggattcaaacgcgccacccgatacagccccgagctggacagatcgggcaatgccgccgaagccttcaacggcactgcagatatcgttaaaaacatcatcggcgcggcaggagaaattgtcggcgcaggcgatgccgtgcagggcataagcgaaggctcaaacattgctgtcatgcacggcttgggtctgctttccaccgaaaacaagatggcgcgcatcaacgatttggcagatatggcgcaactcaaagactatgccgcagcagccatccgcgattgggcagtccaaaaccccaatgccgcacaaggcatagaagccgtcagcaatatctttatggcagccatccccatcaaagggattggagctgttcggggaaaatacggcttgggcggcatcacggcacatcctatcaagcggtcgcagatgggcgcgatcgcattgccgaaagggaaatccgccgtcagcgacaattttgccgatgcggcatacgccaaatacccgtccccttaccattcccgaaatatccgttcaaacttggagcagcgttacggcaaagaaaacatcacctcctcaaccgtgccgccgtcaaacggcaaaaatgtcaaactggcagaccaacgccacccgaagacaggcgtaccgtttgacggtaaagggtttccgaattttgagaagcacgtgaaatatgatacgaagctcgatattcaagaattatcggggggcggtatacctaaggctaagcctgtgtttgatgcgaaaccgagatgggaggttgataggaagcttaataaattgacaactcgtgagcaggtggagaaaaatgttcaggaaataaggaacggtaatataaacagtaactttagccaacatgctcaactagagagggaaattaataaactaaaatctgccgatgaaattaattttgcagatggaatgggaaaatttaccgatagcatgaatgacaaggcttttagtaggcttgtgaaatcagttaaagagaatggcttcacaaatccagttgtggagtacgttgaaataaatggaaaagcatatatcgtaagaggaaataatagggtttttgctgcagaataccttggcaggatacatgaattaaaatttaaaaaagttgactttcctgttcctaatactagttggaaaaatcctactgatgtcttgaatgaatcaggtaatgttaagagacctcgttataggagtaaataa

SEQ ID NO: 43579 - DNA, 495 bp, Neisseria meningitidis
atgaaaaaaaccctgttggcaattgttgccgtttccgccttaagtgcctgccggcaggcggaagagggaccgccgcctttaccccggcagattagcgaccgttcggtcggacactattgcagtatgaacctgaccgaacacaacggccccaaagcccagattttcttgaacggcaaacccgatcagcccgtttggttctccaccatcaagcagatgttcggctataccaagctgcccgaagagcctaaaggcatccgcgtgatttacgttaccgatatgggcaatgttaccgattggacgaatcccaatgccgacacggagtggatggatgcgaaaaaagccttttacgtcatcgacagcggctttatcggcggtatgggtgcggaagacgcgctgccgttcggcaacaaagagcaggctgagaaatttgcaaaggataaaggcggtaaggttgtcggtttcgacgatatgcctgatacctatattttcaaataa

SEQ ID NO: 43580 - DNA, 273 bp, Neisseria meningitidis; identical to SEQ ID NO: 37320

SEQ ID NO: 43581 - DNA, 2025 bp, Neisseria meningitidis
atgaacgatatgactttatatttgataattgcccttgttccgttggcaggctcgctgattgcgggtttgttcggcaacaaaatcggacgtgccggtgcgcatacggttacgatactcggcgtggcggtgtccgccgtgctgtcggcttatgtgctgtggggctttattgacggcagccgcgccaagtttgacgagaatgtctatacctggctgacaatgggcggcttggatttctccgtcggcttcttggtcgatacgatgacggcgatgatgatggtcgtggtaacgggcgtgtcgttgatggtgcatatctataccatcggctatatgcacgatgaaaaagtcggctaccaacgcttcttcagctatatttctttgtttacattcagtatgttgatgctgattatgagcaacaacttcattcagctcttcttcggttgggaagcggtgggcttggtgtcgtatctcttgatcggtttctatttcaaacgcccgagcgcgacatttgccaacctgaaagcctttttgatcaaccgtgtcggcgacttcggctttttgctcggtatcggcttggtgcttgcctatttcggcggcagcttgcgctatcaagatgtattcgcttatctgcccaacgtgcaaaatgccactatccaactgttccccggtgtggaatggtctttgattactgtaacctgtttgctcctgtttgtcggtgcgatgggtaaatcggcacaattcccgctgcacgtctggctgcctgattcgatggaaggcccgaccccgatttctgcattgattcacgccgcaaccatggttaccgccggtttgtttatggtgtcgcgtatgtcgccgatttatgaaatgagcagcaccgcgctgtcggtcattatggtgatcggcgcgattaccgccctgtttatgggctttttgggcgtgattcaaaacgacatcaaacgtgtagttgcgtattccaccctgtcgcaattgggctacatgaccgtggctctgggcgcgtctgcctattccgtggcgatgttccatgtgatgacccacgccttctttaaagccctgttgttcttggcggcaggcagcgcgattatcggtatgcaccacgaccaagacatgcgccatatgggcaatctgaaaaaatatatgccggttacttggctgaccatgctgatcggtaacttgtcgctgattggtacgccgttcttctccggcttctactccaaagattcgattatcgaagcggcgaaatacagcacactgccgggcagcggctttgcctattttgccgtcctcgccagcgtgtttgttaccgcgttttacgcgttccgccaatactttatggtgttccacggcgaagagaaatggcgcagcctgcccgaacaccattcagacggccacggcgaagaacatcacggtttgggtaaaaacgacaatccgcacgaaagcccgttggtggttaccctgcctttgattttgcttgccgttccgtccgtcatcatcggctacatcgccatcgaacccatgctctacggcgatttcttcaaagacgtgattttcgtcaacgccgacgcgcatccgactatacacatcatgaaggaagagttccacggcgcattggcaatggtgtcccacagcctgcattcgcccgtactctaccttgctatcgcaggcgtgttgagcgcatggcttttgtacgtcaaactgccgcacctgccagcgaaaattgcacagacgttccgtccgatttacgttttgtttgaaaacaaatactacctcgacgccctgtatttcaacgttttcgccaaaggcacacgcgcattgggcactttcttctggaaagtcggcgataccgccattattgacaacggtattgtcaacggctctgccaaactggtcggcgcgattgccgcgcaagtgcgtaaagcccaaaccggctttatctacacctacgccgccgctatggtgttcggcgtattggtcttgctcggcatgaccttctggggattgttccgataa

SEQ ID NO: 43582 - DNA, 279 bp, Neisseria meningitidis; identical to SEQ ID NO: 37183

SEQ ID NO: 43583 - DNA, 759 bp, Neisseria meningitidis
atgggcgattccgtcatttattatgtagaacaggcagacgaaccggtaaaccgtgccgacgaacgcgcccgtaaaacattcaaatatttttggcgcgagcttttttgggaacgccgccgcattatttccgccttggattttgccatggtcaaagtcccttttttccaagacggcgaagacggcgaaatttgcgaacatatgtggatcgacgatatttattttgacggtctttatatttacggtgtgctgaacaatgaacccggcgaactgaccaatgtcgaacaaggcgaaagcgtttgcgttccggttgacgacatcagcgactggatgttcgtgtgcaacggcatcccctacggcggctttaccatacaggcaatgcgcgggcagatgacggaagaggagcgcaccgaacacgatgccgcatggggaatcgatttcggcgatcccgggcagatattgctggtgtatgaagaaaaagaacatcccgaaaatctggaagagcatccgatgtgccggaactgtattgacgattttcggcaacagttgtcccaaaactcggattatctgcgggaacaggacgaagacggctatacgccgcttcatcatgaagccatcgcaggaaatgcacttatggttcaagccatgcttgaatacggcgcaaatcctgcctcaacgacatcggaaggctataccgccctcgattttgcctgcctgacgggctggcaaaatgttgccgacctgctcgaaccgcgacattag

SEQ ID NO: 43584 - DNA, 120 bp, Neisseria meningitidis
ttgcctgatgtattgatgctatttgtgctgttcttatatatgttgatgctggttacgtcgcgttttttcggaaaattcaaccggcagggagccgatacgctgtttcatctctttgcttag

SEQ ID NO: 43585 - DNA, 717 bp, Neisseria meningitidis
atgtccgacaaaaaatataatgtcgatgagggggaaatcgccaaattcagccggattgccgacaaatggtgggacaagtcgggcgagttcaaaaccttgcacgacatcaatccgctgcggctggattatatcgacggacacgcggatttgtgcggcaaacgggttttggacgtgggctgcggcggcggcatcttggcggaaagtatggcgcggcgcggcgcggcgtttgtaaagggcatcgacatggcggagcagtcgttggaaaccgcccgcctgcacgcggctttgaacaatgtcgccgatatcgaatacgaatgtatccgcgtggaagaccttgccgaggcggaaccgcactcgttcgatgtggtaacgtgcatggaaatgatggaacacgtccccgatcccgccgccatcgtgcgtgcttgtgccaatctggtcaaaccggacggcatggtgtttttttccaccatcaataaaaacccgaaatcgtacctgcatctgattgtggcggcggaatatctgttgaagtttgtccccaaaggcacgcacgactggaaaaaattcatcgcacctgccgagctggcgcgaatgtgccgtcaggcaggcttggatgtggcggatacgaagggtatgacttaccatgtgttgtcgcaaacttatgccctgtgcgattcgaccgatgtgaattatatgtttgcctgccgtccggcgttctga

SEQ ID NO: 43586 - DNA, 1284 bp, Neisseria meningitidis
atgaaccgtaacgaaattttattcgaccgcgccaaagccatcatccccggcggcgtgaattcccccgtccgcgcattcggcagcgtcggcggcgtaccgcgctttatcaaaaaagccgaaggcgcgtatgtttgggacgaaaacggcacgcgctataccgattacgtcggctcgtggggacctgcgattgtcggacacgcgcaccccgaagtcgtcgaaaccgtatgcgaagccgcattgggcggtttgtcgttcggcgcgcctaccgaaggcgaaatcgtcattgccgaagaaatcgccaaaatcatgccgtccgtcgaacggctgcgcctcgtcagctccggtaccgaagcgaccatgaccgccatccgtctggcacgcggttttaccgggcgtgacaaaatcatcaagtttgaaggctgctaccacgggcattccgacagcctgctggtgaaagccggcagcggtctgctgacgtttggcaacccgtcttccgccggtgtgcctgccgactttaccaaacacactttggtactcgagtacaacaatatcgcccaactcgaagaagcctttgctcaaagcggcaatgaaatcgcctgcgtgattgtcgaacccttcgtcggcaatatgaacctcgtccgcccgaccgaagcctttgtcaaagccttgcgcggattgaccgaaaaatacggcgcggtgttgatttacgacgaagtgatgaccggcttccgcgtcgcgctcggcggcgcgcaatctttgcacggcatcacgcccgacctgaccacgatgggcaaagtcatcggcggcggtatgccgcttgccgcgtttggcgggcgcaaagacattatggaatgtatttccccgctgggcggcgtgtatcaggcaggcaccttgtcgggcaacccgattgctgtcgccgcaggcttgaaaacgctggaaatcatccagcgcgaaggcttctatgaaaacctgacggcgcgtaccgaacagttggttcaaggttttcggacggcagcggatgcggcgggcatcgagttcaccgccgacagcgtgggcggtatgttcggtctgtatttcgccgcacacgcgccgcgaaactatgccgatatggcgcgttccaatattgaaggcttcaaacagtttttccacgggatgctcgaccgcaatgtcgccttcggcccgtccgcttatgaagcaggtttcgtttccgccgcgcatacgcccgagctgattgacgaaacggttgcggttgcggttgaagtgttcaaggcgatggctgaatga

SEQ ID NO: 43587 - DNA, 369 bp, Neisseria meningitidis
atgagcaccttcttccggcaaaccgcacaagccatgattgccaaacacatcgaccgcttcccactattgaagttggaccaggtgattgattggcaaccgatcgaacaatacctgaaccgtcaaagaacccgttaccttcgagaccaccgcggccgtcccgcctacccgctgttgtccatgttcaaagccgttctgctcggacaatggcacagcctctccgatcccgaactcgaacacagcctcattacccgcatcgatttcaacctgttttgccgttttgacgaactgagcatccctgattacagcaccttatgccgctaccgcaaccggcggcgcaagacgacaccctatccgaattgctcaaactga

SEQ ID NO: 43588 - DNA, 279 bp, Neisseria meningitidis; identical to SEQ ID NO: 36930

SEQ ID NO: 43589 - DNA, 888 bp, Neisseria meningitidis
atgtacacaggacgttttgcccccagcccgaccgggctgctccacatcggctcgctgctgaccgccgtcgcttcctatgccgatgcgcgcgcgcacggcggcaaatggctgatccgcatggaagacctcgatccgccgcgcgaaatgccgggggcggcaagccatatcctgcacacgcttgaggcattcggattcgagtgggacggagaagtcgcctatcagagccgccgttacgccctgtatgaagaaaccctatgccgcctgaaaaccgccggactggtctatccctgccattgcagccgcaaagactggcaggccggggcaaggcggggcgcagacgggttcgtctataacggacgttgccgccaccccggccaacgccctgcactgcaaggcaaacagccggcgtggcgcatccgcgtccccgaccgcattatcggtttttcagacggcatcgtcggcggttacgcccaaaacctcgcccgcgacatcggcgatttcgtcctgcttcgtgcagacggttactgggcataccagctcgccgtcgttgccgacgatgccgaacagggcgttacccacatcgtccgcggacaagacctgctcgtttccacgccgcgccaaatctatttgcagcagtgtttggacgttccgacaccgcaatatgcccacctgccgctgctgaccaacgcacaagggcagaaatggtcgaaacagacgctcgcccccgcattggatttaaaccgccgcgaacaactcctccgccaagtgttccgttacctcaagctgcccgaagcaccggaaaccgaccgccctgccgaactgctcgactgggcggtggcacactgggatatggacaaagtgccgaaacacgccgttaccgccccctaa

SEQ ID NO: 43590 - DNA, 693 bp, Neisseria meningitidis
atgaaacttatcaaatacctgcaatatcaaggcataggaagccgcaagcagtgccaatggctgattgccggcggttatgttttcatcaacggaacctgcatggacgacaccgatgcagacatcgattcctcatccgtcgaaacgttggatattgacggggaagcagtaaccgtcgttcccgaaccctatttctacatcatgctcaacaagcctgaagattacgaaacttcgcacaaacccaagcactaccgcagcgtattcagcctgttccccgacaatatgcggaacatcgatatgcaggcggtcggcaggctggatgcagatacgaccggcgtattgctgattaccaacgacggcaaactgaaccacagcctgacttcgccgagcagaaaaattcccaagctgtacgaagtaacgctcaaacaccccacaggagaaacgctctgcgaaaccttgaaaaacggcgtgctgctccacgacgaaaacgaaaccgtttgtgccgccgatgccgttttgaaaaacccgaccaccctgctgctgaccattaccgaaggaaaataccaccaagtcaaacgcatgatcgccgccgccggcaaccgcgtgcaacaccttcatcgccggcgattcgcacatctggaaacagaaaacctcaaacccggggaatggaaatttatcgaatgtccaaaattctga

SEQ ID NO: 43591 - DNA, 612 bp, Neisseria meningitidis
atgtttctgatgctgatgagcgacagcccgcagctgcgcgagtttctggtgcgcaatatcgacaacatcgccaacgatacagaagccttcgtaaaccgatacgacctcaaccgtcatatgatttacaatactctgctgatggtagagggtaagcagcttgatcggttgaaacaacgtagcgagaaagtcttggcgcatcccacccctagcaaatggctgcaaaagcggttgtacgattaccgcttcttcctcgctttcgccgaacaggatgccgaggcgatgaaggccgccttagagccgcttttcgataaaaaaaccgcgcgtatggctgccaaagaaacattgtcctatttcgatttctacctgcagccgcaaatcgttacctacgccaaaatcgcatccatgcacggtttcgatttgggcatagatcaagaaatcgcaccgagggatttgattgtttacgatccgctgccggcagacgaatatcaagacatcttcgattttatgaaacagtatgacttgtcttacccgtatgaatatctgcaggattggatagattactatacgttcaaaaccgataagctggtatttggtaacgcgaagcgagagtga

SEQ ID NO: 43592 - DNA, 1047 bp, Neisseria meningitidis
atgtcagacgacaaaagcaaagcacttgccgccgcactggcgcaaatcgaaaaaagtttcggcaaaggcgccatcatgaaaatggacggcagccagcaggaagaaaacctcgaagtcatttccaccggatcgctcggattagacctcgccctcggagtcggcggtctgccgcgcgggcgcatcgtcgaaatcttcggcccagaatcctccggcaaaaccaccctctgcctcgaagccgtcgcccaatgccagaaaaacggcggcgtgtgcgcctttgtcgatgccgaacacgccttcgatcccgtttacgcccgcaaactcggcgtaaaagtcgaagagctttacctgtcccagcccgataccggcgaacaggctttggaaatctgcgacacactcgtccgttcgggcggcatagatatggtagtcgtcgattccgtagccgcactcgtccccaaagccgaaatcgaaggcgatatgggggacagccatgtcggactgcaggcgcgcctgatgagccaggctttgcgcaaactgaccggacacatcaaaaaaaccaacacgctggttgtgttcatcaaccaaatccggatgaagatcggcgtaatgttcggcagccccgagaccacgaccggcggcaacgcgctgaaattctattcttccgtccgcctcgacatccgccgcaccggatccatcaaaaaaggtgaagaagtattgggcaacgaaacccgcgtcaaagtcatcaaaaacaaagtcgcgccgccgttccgtcaggcagagtttgacatcctctacggagaaggcatcagttgggaaggcgaattgatcgacatcggcgtgaaaaacgacatcatcaacaaatccggcgcgtggtacagctacaacggcgcgaaaatcggtcagggcaaagacaacgtccgcgtctggctgaaggaaaatcccgaaattgccgacgaaatcgacgcaaaaatccgcgccctcaacggcatagaaatgcacatcaccgaagggacgcaggacgaaaccgacggcgaacgccccgaagaataa

SEQ ID NO: 43593 - DNA, 342 bp, Neisseria meningitidis; identical to SEQ ID NO: 39758

SEQ ID NO: 43594 - DNA, 267 bp, Neisseria meningitidis; identical to SEQ ID NO: 39635

SEQ ID NO: 43595 - DNA, 648 bp, Neisseria meningitidis
atggcttctaaatcatctaaaaccaacttggatctcaacaaccttcacctgctcaaccttcctgccaggctttttatcgccctgctggccgttgccgccgtgctggggctcggttatgccggattgttcaaaagccagatggaatcccttgaggaatacgaagcaaaagaaaccgaactgaaaaacacctacaaacagaaaagtatcgacgcggccagcctgaacaacctgagggacgaacttgcctcaatccgctctgccttcgatatcatgttgaaacagctgccgacagatgcagaaattcccaatctggttcaagagcttcatcaggcaggttcgagcaacggtctgcgcttggacagcgttatgccccaacctcccgtagatgacggccccatcaaaagattaccctattccatttccattaccggaaattacgaacagatcagccaatttacccgcgatgtcggcagcctctcccgaatcattacccttgagtcgctgaaaatcgcccaatctccggaaaacggcggcaatcctgacggcaagagcagcatcctgaacctcagcgccattgccaccacctaccaagcaaaatccgtagaagagcttgccgcagaagcggcacaaaatgccgagcaaaaataa

SEQ ID NO: 43596 - DNA, 1335 bp, Neisseria meningitidis
gtgggcgaacctgaaaacaaatcatccgaacccgtacgcgagatacaggcatcaaaagaaatgccgtctgaaacctcttccccacgcaaagaaaacgaaacagaagtacacattcctgccgctccttttatcgtcaaacagtccggcagcaacgctttggcagtctgcgccctggtattggcggcattgggtttgggtacaagtggttttttgtttgtccaaggacagaatgtcttgaaaaaccaagagctggcattcaaccaaaaaatcgacaaagccgccttgggcgagtcggaaaacgccgccctgttgaaagacaacctcaaccggcaagccgccatacaatcagagctcgaccgtttggacggaaacgtcaaagcaaacggcgaacaaatcttggaaatgcaaaaatcctatcgcgagttgaccaaaggacgcgccgattggctggtggacgaaaccgagaccatactcaatctggcggcgcaacagctggtgttgactggcaatatccaaacggcagtcggcgtattggagcatatcgacagccgcctgtcccgtttcaatcaggcagagcttctgccgatcaagcaggcggtcagcagcgacttggcggaactgaaaaaccgtccctatgtcgatatttccggcacggcattgcgcctcgacaggctggaaaccgccgtatccggactgccgctgatgctcgacggcgtgctgaaaccgggcgtacaggtgaagaacgaagccgcttccgcttcatggtggcagaacgtatgggaaaaatccctcggcacattgaaggggctggtcgaaatccgacgtttggaaaacaacgatgccatgctgatttctcccgaacaggcatattttgtgcgtgaaaacctgcgcctccgccttttggatgcgcgcactgcattaatgcagcgcaacagcgaagtctatcagggcgatttgaacaatgccgaagccgccgtcagacagtatttcgatgccaagtctcccgccacgcagtcgtggctgaaagaactggcggaattgaaggcgttggatgtgcggatgactgcggatgacggtttgaaaaacagcctaaatgccgtccgcgcctatcgcgacggtacgcgcatgacggcggcggaaaatcaagaagcggaacaggcggcttccgaaccggcaaacgaaaaaacagcttccgaaccggctgccgcatcggatgtgaagaccatagaagcaccgtccctgccttcggaacgcaaaccggaacagcctgcaaaaaaacagaccgtaccggaaaaggcagggcgttcgccgtccgctaaaggagaacgcgcatga

SEQ ID NO: 43597 - DNA, 807 bp, Neisseria meningitidis
atgaagaaaacattgacactgctcgccgtttccgccctatttgccacatccgcccacgcccaccgcgtctgggtcgaaaccgcccacacgcacggcggcgaataccttaaagccgacttgggctacggcgaatttcccgaactcgaacccatcgccaaagaccgcctgcacatcttcagcaaaccgatgcagctggttaccgaaaaaggcaaggaaaacatgattcaacgcggcacatacaactaccagtaccgaagcaaccgtcccgttaaggacggcagttacctcgtcatcgccgaatatcagcctactttctggtcaaaaaacaaagcaggctggaaacaggcgggcatcaaagaaatgcctgacgcaagctattgcgaacaaacccgaatgttcggcaaaaacatcgtcaacgtcggacacgaaagcgcggacaccgccatcatcaccaaaccggtcggacaaaacttggaaatcgtcccgctggacaatcccgccaacattcacgtaggcgaacgcttcaaagtccgcgttctgttccgtggcgaaccgctgcccaatgccaccgttaccgccacctttgacggcttcgacaccagcgaccgcagcaaaacgcacaaaaccgaagcacaggctttctccgacagcacagacgacaaaggcgaagtggacatcatccccttgcgccaaggcttctggaaagccaatgtcgaacacaaaaccgacttccccgatcaaagcgtgtgccaaaaacaggcgaactactcgactttaaccttccaaatcggtcattcgcaccattaa

SEQ ID NO: 43598 - DNA, 438 bp, Neisseria meningitidis
atgatagggcttttaatcatcacacacgaaaccataggcgaagcctaccgcaagctggcgcatcatttttttccgggcggactgcctgaaaacgtccgcatactcggcgtgcagccgacggaagaccaagacgacatcaacaacaacgccattgccgcgcttcaggaatttcccgacaacgacggcgtgctgattatgaccgatattttcggtgcgaccccctgcaatgccgcccgccgcctcgtgcgcgaaaacaaatcggcgattttgaccgggctgaacgcgccgatgatggttaaggccgtccaatattcgccggcggcggaagaccttgccgcctttaccgaatgcgtcagggaggcggcggtaaaaggcattttcgccatcacgtccgcgcccgaagatttggtgtgccggcgcagcggcgatgccgtctga

SEQ ID NO: 43599 - DNA, 231 bp, Neisseria meningitidis; identical to SEQ ID NO: 42542

SEQ ID NO: 43600 - DNA, 117 bp, Neisseria meningitidis; identical to SEQ ID NO: 42842

SEQ ID NO: 43601 - DNA, 630 bp, Neisseria meningitidis
  misc_feature 4, 5, 6, 7, 8: 'n' is a, c, g or t
gtgnnnnnagacgacaccctgtccgaattgctcaaactgattaactgccaactgaccgaaaaaggtttaaaaatagagaaagcatccgccgccgtcgttgacgccaccattattcagaccgccggcagcaaacagcgccaggccatagaagttgacgaagaaggacaaatcagcagccaaaccacaccgagtaaggacagcgatgcccgttggatcaagaaaaacggcctctacaaactcggttacaaacaacatacccgtaccgatgcggaaggctatatcgagaaactgcacatcacccccgccaatgcccatgagtgcaaacacctgtcgccgttgttggaaggtctgcccaaaggtacgaccgtctatgccgacaaaggctatgacagtgcggaaaaccggcaacatctgaaagaacatcggctgctggacggcattatgcgcaaagcctgccgcaaccgtccgctgacggaaacgcaaaccaaacgcaaccggtatttgtcgaagacccgttatgtggttgaacaaagcttcggtacgctgcaccgtaaattccgctacgctcgggcagcctatttcggactgatttgcgcccgctgccgcctaaaaggcagcccggatgcctga

SEQ ID NO: 43602 - DNA, 279 bp, Neisseria meningitidis; identical to SEQ ID NO: 36778

SEQ ID NO: 43603 - DNA, 966 bp, Neisseria meningitidis
atgttacgtttgactgctttagccgtatgcaccgccctcgctttgggcgcgtgttcgccgcaaaattccgactctgccccacaagccaaagaacaggcggtttccgccgcacaatccgaaagtgcgtccctgaccgtcaaaacggcgcacggcgatgttcaaataccgcaaaaccccgaacgtatcgccgtttacgatttgggtatgctcgacaccttgagcaaactgggcgtgaaaaccggtttgtccgtcgataaaaaccgcctgccgtatttagaggaatatttcaaaacgaccaaacccgccggaactttgttcgagccggattacgaaaccttaaatgcctacaagccgcagctcatcatcatcggcagccgcgccgccaaggcgtttgacaaattaaacgaaatcgcgccgaccatcgaaatgaccgccgataccgccaacctcaaagaaagtgccaaagagcgtatcgacgcgctggcgcaaatcttcggcaaacaggcggaagccgacaagctgaaggcggaaatcgatgcttcgtttgaagcggcgaaaactgccgcacaaggcaaaggcaaaggtttggtgattttggtcaacggcggcaagatgtccgccttcggcccgtcttcacgactgggcggctggctgcacaaagacatcggtttgcccgctgttgacgaagccatcaaagaaggcagccacggtcagcctatcagctttgaatacctgaaagagaaaaatcccgactggctgtttgtcctcgaccgaagcgcggccatcggcgaagagggtcaggcggcgaaagacgtgttggataatccgctggttgccgaaacaaccgcttggaaaaaaggacaggtggtttaccttgttcctgaaacttatctggcggccggcggcgcgcaagagctgctgaatgcaagcaaacaggttgcggatgcgttcaacgccgcgaaataa

SEQ ID NO: 43604 - DNA, 624 bp, Neisseria meningitidis
atggaacgcaaagaacgcctgcgtgcaggcattgccgcgatggggctggatatttcggaaacggcacaggacaggcttttggcctatgtggatctgttgaaaaagtggaacaaaacctacaatctgaccgccctgcgcgacgaggaaaaaatgattgtccatcatcttttggacagcctgacgctgctgccccatatcgagggtgtgcaaacgatgctggatgtcggttcgggcggcggtcagcccggcattccggcggcggtgtgccgtccggatgtgcagataacccttttggatgcgaatacgaagaaaacggcttttttacagcaggcggttatcgagttggggttggacaatgtgcgcgtggtatccggacgcgtggaggcggtttcggacgtgcgtgccgatgtggttaccagccgtgcgtttgcagaactggcggattttgtgtcgtggacggtgcatctgttgaaagacggcggctactgggcggcgatgaagggcgtatatccgcaggaagaaatcggccgcctgccgcaggatgtgtgcgttgaaaaagtccaaaggctcgacgtgccgggcttggatgcggaacgccatatcgtcatcctgagcaagcgttga

SEQ ID NO: 43605 - DNA, 1065 bp, Neisseria meningitidis
atgaaagcagcacgtttttacgacaaaggcgacatccgcatcgaagacatccccgaaccgaccgtcgcccccggcactgtcggcatcaatgtcgcctggtgcggcatctgcggtactgacctgcacgaattcatggaaggcccgattttcattccgccttgcggtcatccgcacccgatttccggcgagtccgcacccgtaacgatgggacacgagttctccggcgtggtctatgccgtcggcgaaggcgtggacgacatcaaagtcggccaacacgtcgtggtcgaaccctacatcatccgcgatgacgtaccgaccggagaaggcagcaactaccacctctccaaagatatgaactttatcggcttgggcggctgcggcggcggtctgtccgaaaaaatcgccgtcaaacgccgttgggtgcatccgatttccgacaaaatcccgttggatcaagccgctttgatcgaaccgctgtctgtcggacaccacgcctatgtacgcagcggcgcgaaagaaggcgacgtcgcattggtcggcggtgcaggtccgatcggtttgctgttggctgccgtgttgaaagccaaaggcatcaaagtcatcatcaccgagttgagtaaagcacgcaaagacaaagcgcgcgaatccggcgttgccgactacatcctcgacccgtccgaagtcgatgttgttgcagaagtgaaaaaactgaccaacggcgaaggcgtggacgtggcatttgagtgcaccagcgtcaacaaagtgttggatactttggtcgaagcctgcaaacctgccgccaatttggttatcgtatccatctggagccaccccgccaccatcaacgtccacagcgtcgtgatgaaagagttggacgtgcgcggcacgattgcctactgcaacgaccacgccgaaaccatcaaactggtcgaagaaggcaaaatcaaccttgagcctttcatcacccagcgcatcaagctggacgagctggtttccgaaggcttcgagcgtctgattcacaacaacgaatccgccgttaaaattattgtgagtccaaacctgtaa

SEQ ID NO: 43606 - DNA, 1416 bp, Neisseria meningitidis
atgaacctgcatgcaaaggacaaaacccagcatcccgaaaacgtcgagctgctcagtgcgcagaagccgattaccgactttaagggtctgctgaccaccattatttccgccgtcgtctgtttcggcatttaccacatcctgccttacagcccggatgccaataaaggtatcgcgctgctgattttcgttgccgcactttggtttaccgaagccgtccacattaccgtaaccgcactgatggtgccgattctcgccgtcgtactcggtttccccgacatggacatcaaaaaggcgatggctgatttttccaacccgattatctacatttttttcggcggcttcgcgcttgccaccgccctgcatatgcagcggctggaccgtaaaatcgccgtcagcctgttgcgcctgtcgcgtggcaatatgaaagtggcggttttgatgttgttcctcgttaccgcctttctgtccatgtggatcagcaacaccgccaccgccgcgatgatgctgcctctagcaatgggtatgctgagccacctcgaccaggaaaaagaacacaaaacctacgtcttcctcctgctcggcatcgcctattgcgccagcatcggcggcttgggcacgctcgtcggctcgccgcccaacctgattgccgccaaagccctaaatctggacttcgtcggctggatgaagctcggcctgccgatgatgctgttgattctgcccttgatgctgctctccctgtacgtcatcctcaaacctaatttgaacgaacgcgtggaaatcaaagccgaatccatcccttggacgctgcaccgcgtgatcgcgctgttgattttccttgccacagccgccgcgtggatattcagctccaaaatcaaaaccgccttcggcatttccaatcccgacaccgttatcgccctgagtgccgccgtcgccgtcgtcgtcttcggcgtggcgcaatggaaggaagtcgcccgcaataccgactggggcgtgttgatgctcttcggcggcggcatcagcctgagcacgctgttgaaaacatccggcgcgtccgaagccttgggacagcaggttgccgccaccttttccggcgcgcccgcatttttggtgatactcatcgtcgccgccttcattatttttctgaccgagttcaccagcaacaccgcctccgccgcattgcttgtaccgattttctccggcatcgctatgcagatggggctgcccgaacaagtcttggtattcgtcatcggcatcggcgcatcttgtgccttcatgctgccggttgccacaccgcctaacgcgattgtgttcggcacgggcttaatcaagcaacgcgaaatgatgaatgtcggcatactgctgaacatcctctgcgtagtattggttgctctgtgggcttatgctgtactgatgtaa

SEQ ID NO: 43607 - DNA, 1041 bp, Neisseria meningitidis
atgaaagcaatggtttatcacggcgcaaacgacatccgttttgaagaaaaaccccgtccgcagattatcgatccgaccgatgcggtggtgaaaatcgtcaaaaccacgatttgcggtaccgatttgggtatttggaaaggcaaaaaccccgaagttgccgacggccgtattctcggtcatgagggcatcggtattgtagaagaagtcggcgaggctgtaaaaaacatcaaagtcggcgataaagtcattatttcatgcgtcagcaaatgttgcacttgcgacaactgcaaaacccaactctattcacactgccgtaacggcggttggattttgggttacatgattgacggtactcaggccgaatacgtccgtacgccttatgccgacaacagcctcgttccgctgcccgataatgtcaacgaagaaatcgccctgttgttgagcgacgctttgccgaccgcccacgaaatcggcgtgcaatacggcgatgtcaaacccggcgacaccgtattcatcgctggggcaggccctgtcggtatgtccgccctgttgaccgcccaactgtacagtcccgccgccatcatcgtttgcgatatggacgaaaaccgtttgaaactggcgaaagaattgggtgcgacccataccattaaccctgcttccggcgaagtatccaaacaagtctttgccatcgtcggcgaagacggcgtggattgcgccatcgaagccgtcggtatccctgctacatggaatatgtgccaagacattgtgaaacccggcggccatatcgctgtggttggtgtacatggtcaatccgttgatttcaaactggaaaaactctggattaaaaagcttgccatcactaccggtctggtaaacgccaataccaccgaaatgctgatgaaggcgatttccagcagctccgtcgattacaccaaaatgctgacccatcatttcaaattcagtgaattggaaaaagcctacgacgtgttcaaacacgccgccgaaaaccaagtgatgaaagtggttttggaagcggattaa

SEQ ID NO: 43608 - DNA, 672 bp, Neisseria meningitidis
atgactttccaactgattttattttatatttttgcagtgataattctttatggcgcgctcaaaaccgtcaccgctaaaaaccctgttcacgccgctttgcatctggtgctgaccttctgcgtgagcgcgatgctttggatgctgatgcaggctgagtttttgggcgtgacgctggtggtggtttacgtcggcgccgtgatggtgttgttcctgttcgtcgtgatgatgttgaacatcgacattgaagaaatgcgtgccggtttctggcggcacgcgcctgttgccggtgtggtcggcacattgttggcggttgcgctgatcctgattctggtcaacccgaaaaccgaccttgccgcatttggtctgatgaaagacattcctgccgattacaacaatatccgcgatttgggcagccgtatttataccgactatctgttgccgtttgaattggcggcggtattgctgttgttgggtatggtggcggcgattgcgctggttcaccgtaaaacggttaatccgaaacgcatggatcctgccgaccaagtcaaagtacgcgccgaccagggccgtatgcgtctggtgaaaatggaagcggtcaaaccgcaagtcgaatctgccgaagaaagcgaagtttcagacgacctcaagccgaaagaggagggcaaagcatga

SEQ ID NO: 43609 - DNA, 1470 bp, Neisseria meningitidis
atgccgtctgaaaccgatatgttctgtgtcggcaatgtttcagacgaaaacggaaggacaaagattatgaaaaaaattcaagcggatgtcgtcgtaatcggcggcggtactgccggtatgggtgcgtttcgcaatgcccgtttacattcggataatgtttacctgattgaaaacaatgtgttcggcacgacctgcgcgcgggtgggttgtatgccttccaaactcttgattgccgccgcagaagcgcgccaccacgcactgcataccgacccgttcggcgtgcatttggacaaagacagcatcgtcgtcaacggtgaagaagtaatgcggcgtgttaaatccgagcgcgaccgttttgtcggctttgtcgttgctgatgtggaagagtggcctgccgacaagcgcatcatgggctcggctaagtttatcgacgagcataccgtccaaatcgacgaccatacccaaattacggcaaaaagtttcgtgattgctaccggttcgcgtcccgtcatcctgccgcaatggcagtctttgggcaatcgtttgattatcaacgatgacgttttctcatgggatacgctgcctaagcgcgttgccgtgttcggaccgggtgttatcggtttggaactgggtcaggcattgcaccgtttgggcgtgaaagttgaaattttcggtttgggtggcatcatcggcggcatttccgaccccgtcgtttcagacgaggcgaaagccgtgttcggtgaagaattgaaactgcatttggatgctaaaaccgaggccaaactcgacgcagacggcaatgtagaagtccattgggagcaggatggcgaaaaaggcgtatttgttgccgaatatatgctggcagccgtaggccgccgtccgaacgttgacaatatcggtttggaaaacatcaatatcgaaaaagatgcgcgcggcgtacccgttgccgatccgctgactatgcagaccagtattccgcatatctttattgcgggcgacgcgtccaaccaactgcccctgctgcatgaagccgccgaccaaggcaagattgccggcgataacgcaggccgctacccgaatatcggcggcggtttgcgccgcagcaccatcggcgtagtgttcaccagtccgcaaatcggctttgtcggtttgaaatacgcgcaggttgccgcgcaataccaagccgacgaatttgtcatcggcgaagtatcgttcaaaaaccaaggccgcagccgcgtgatgctggtaaacaaaggccatatgcgcctgtatgccgaaaaagccaccggccgcttcatcggcgcagaaatcgtaggtccggccgccgaacatttggcgcacctgttggcttgggcacatcaaatgaagatgaccgttccgcaaatgctggatatgccgttctaccatcccgttatcgaggaaggtttgcgtaccgcgttgcgcgatgccgatgcgaaattgaaagcctga

SEQ ID NO: 43610 - DNA, 1911 bp, Neisseria meningitidis
atgaatctggaaactctgatcgccctgccgcgcaacatcaagaaaatctgtttcctcatacacgattttctgatgattttcattgccttttggttcacccaaagcctaaaggccgactactcggacgaatggttcgattttgccaactggcagtcttttttgctgactgccttgctgaccatcacattatttatccgaatggggctttaccacgccgttacacgcttcgtcagcttccgcatcctcaccaccgcactggcgggcagcctcgcctccgccgtgttgtttttcctcaatacgctgatatttgaagaaaggctgcgcctcgccctgccgattgtctatttcttactgctgtttgtttccgtgaccggctcgcgtatggttttgcgcggactgttgtccgaacaccccaaaaaacagatgatccctgtcatcatttacggcgcgggacggtcgggcagacaactgcttgaggccgtcaaacaaatgcgcgaatattccgccgccgcctttgtagacgacgaccccaaactgtggcacaccgtcatctacgaccttgccgtttaccagcccgatgccatcgccttcctcatcgaacgctacggcgtggaaaaaatcctgctcgccatccccggcgcgacccaggaacaacgccgccgaatcatcaacaaactggaagcctatccgtgcgaagtgttgaccattcccggaatgaaagacctgatggacggaaaaatcagcatcggcacgctcaaaaaaatctctgtgtccgacctgctcgggcgtgattccgtcgcgcccgacgaccgcctgatgagtgccgacatcgaaggcaaaaccgtcatggtaaccggcgcgggcggctccatcggttcggaactctgccgccagattatccgccgccgccccgaaaagctgctgctgttcgagttatccgaattcgccctgtacgccatcgaaaaagaattgcgcgaaacctgcatccaaaaacgcctcgacaccgaaatcctgccctttctcggttcggtgcaaaaccgcacgctgctcgaacacgtcatgaccgccttttccgttgcgaccgtctatcacgccgctgcctacaaacacgtccccatggtcgagttcaacaccgtcgaaggcatacgcaacaacatcttcggcacactcgagtgcgcgcttgccgccacgacatcgggcgtaagaactttcgtcctcatctccaccgacaaagccgtccgccccaccaacaccatgggtgccagcaaacgcatggcggaactctgccttcaggcactcgccgccgaacccggacaaaaaacccgcttcagcatggtacgtttcggcaatgttttaggttcgtccggctccgttgtcccgctgtttgaaaaacagattgcagaaggcggcccgcttaccctgacccaccccgaaatcacacgttatttcatgaccatacccgaagccgcccaactcgtcatacaggcaggcgcgatgggtacgggcggcgacgtattcgtcctcgacatgggtgaatccgtcaaaatcatcgaccttgcccgccaaatgattaccctaagcggcctcaaacccaacacacccgaacaacccgacggcgacatcgaaatcctcattaccggactgcgtcccggagaaaaactctacgaagagctgctcatcggcgacaacgtccgcaaaaccggccatccgcgcatcatgaccgccaacgagaccatgctgccgtggcacgagctctccgccctgctcgaccgcatccgtgcggcctgcgaccgttacgaccagcaggcaatccgcaccctgctcatcaacgccccgaccggctttgccccgagcgacggcatctgcgacctgctttgggtacgagaaacacacagaaaaaatgccgtctga

SEQ ID NO: 43611 - DNA, 798 bp, Neisseria meningitidis
atgaaccgtctttacccccacccgattatcgcccgtgagggctggccgattattggcggcggtttggctttgagcctgctggtgtcgatatgttgcggctggtggtctttgccgttttgggtgtttaccgtatttgcattgcagtttttccgcgaccctgcgcgtgagattccgctaaatcctgaagcggtgttgagcccggttgacggccgtatcgtggtggtcgaacgcgcacgcgatccgtatcgtgatgtcgatgctttgaaaatcagtatttttatgaacgtgttcaacgtgcattcgcaaaaatcgcctgccgattgtacggtaacgaaagtggtctataacaaaggcaaattcgtgaatgcggatttggacaaagccagcacggaaaacgaacgtaatgcggtgttggcgactacggcttcaggtcgtgaaattacttttgttcaagtggccggtttggtggcgcgccgtattttgtgctacacccaagcaggtgcgaaactgtcccgcggcgaacgttatggctttatccgcttcggttcgcgcgtggatatgtatctgcctgtcgatgcgcaggcgcaagtggcgattggcgataaagtaaccggcgtcagcactgtattggcgcgtttgccgctgactgcgccgcaaactgaatctgagcctgaatctgagcctgctttacaaactgctccggttgaaacagcggcaaacccatctgccgaacaacggcaaatcgaggcagcggcggctaagattcaggcggctgtgcaagatgtgttgaaagattaa

SEQ ID NO: 43612 - DNA, 378 bp, Neisseria meningitidis
atgatttacggcatcggcacagacattgtttccctcaagcgcatcatccgcttaaacaaaaaattcggacaggcgtttgccgggcgcatcctcactccggaagagctgcttgaatttccgcaagcgggcaaacccgtcaactacctcgccaaacgctttgccgccaaagaagcctttgccaaagccgtcggcacgggcatacgcggcgcggtttccttccgcaacatcggcatcgggcatgacgcattgggcaagcccgaatttttctacggccccgccctgtccaaatggctggaggaacaaggcatcagccgcgtcagcctcagcatgagcgacgaagaagacaccgtattggcgtttgtcgttgccgaaaaataa

SEQ ID NO: 43613 - DNA, 648 bp, Neisseria meningitidis
atgaaacctttgattttagggcttgccgccgtgttggcgctgtctgcctgccaagttcaaaaagcgcccgatttcgactacacgtcattcaaggaaagcaaaccggcttcaattttggtggttccgccgctgaacgaatcgcccgatgtcaacggaacatggggtgtactggcttcgaccgccgcgccgctttccgaagccggctattacgtcttccccgccgcagtcgtggaggaaaccttcaaacaaaacggcttgaccaatgccgccgatattcacgccgtccggccggaaaaactgcatcagattttcggcaatgatgcggttttgtacattacggttaccgaatacggcacttcatatcaaattttagacagcgtgacgaccgtatccgccaaagcacggctggtcgattcccgcaacggaaaagagttgtggtcgggttcggccagcatccgcgaaggcagcaacaacagcaacagcggcctgttgggggctttggtcagcgcagtggtcaatcagattgccaacagcctgaccgaccgcggttatcaggtttccaaaaccgccgcatacaacctgctgtcgccctattctcacaacggcatcttgaaaggtccgagattcgttgaagagcagcccaaataa

SEQ ID NO: 43614 - DNA, 903 bp, Neisseria meningitidis
ttgaaagatgcctgtaacaacctttttgaacgccaattcagttttatcgaaaaaacaccaaaaggggaaaaggtagtacggacaaggtgggtatctcaagtcgcctatattgaacaacaggcaacggtagagttagtttttgcaccaaatgttgcccctttgattacgatgctagaaaaaaacttcacaagctacgagcttgatcaggtctcatcgttgagcagtaaatacgcggtgcggctctacgaaattattatttcatggcgtgcagccggtaagacaccgatgttcagtacaatggagttgcgcgaacgtttgggtatgatgcctgacgagtatcaaaaaatggagctattcaaacgtaaggttttggatttcgccgtcaagcagatcaatgataaaacggatatttccattacctacgagcagcataaagaaggacgaaaaattgtaggttttacattctcaatcctacataaaatagggtcgaaagacatccctcttgaaaatcaatcggaactttttgccggaatgactgatttggaagccggaacgatacgggtcagggcggaagcatatatcgcttcgctcattgcaaaaggtcagaacgtgactaaagcccataggctgaatattctgaaaaaagccgtagaggaacgttggggatttgaagatgtggctaaagataatggggccaaaaatcctgaaaacaaaaatgcaaaagtcgttttaaacgaatgggaaaagatttctaatggcacacgttttaaggacaaggatggaacaatttgggttaaagattcaggtatgcttaggactgaagggacaaacaggtggatagccgattctcagattgccaaattatttcctatgttaactgtgatggttgaggaaggtatttaa

SEQ ID NO: 43615 - DNA, 1059 bp, Neisseria meningitidis
atgcgccctttgaacgtgcagatcaggttgggcaaccttaggcacaattatcggattttgaaggaaatgcacggaggcaaactgttggcggtagtgaaggccgacgcatacggacacggtgcggtcagatgtgctttcgcgctggcagacttggcagacggctttgccgtggcgacaatcgatgaaggaatcaggctgcgggagagcggcattacccatccgattgtccttttggaaggcgtatttgaagcatcggaatacgaagcggtcgaacaatactcgctttggccggcagtcggaaaccaatggcagcttgaggctttgctgatccgccattggaaaaaaaccgtcaaagtctggttgaaaatggattcggggatgcaccgtaccggttttttccctcatgattacgcttcggcatatgcggcattgaagcagtcggaatatgtggacagtattgtcaaattctcgcatttctcctgtgcggacgaacccgaaagcggtatgacggaaatacagatggaagcattcgatttgggtacggaagggctggaaggcgaagaaagccttgccaactccgccgctattttgaatgttcccgaagcacgcagggactgggggcgcgccggtctggcgttatacggcatttccccgttcggaggaggcgatgacaggctgaagcccgtgatgaggctttcaacccgtattttcggcgaacgcgttttacagccgcactcccctatcggttatggcgcaacattttataccagcaaatctacgcgcgtcggcctgattgcctgcggttatgcggacggttatccgcgccgcgccccaagcaattcccccgtcgctgtcgacggcaaattgacccgggtcatcggcagggtctctatggatatgatgaccatcgagctggatgcttcgcaagaaggtttgggacacgaggtcgaactgtggggcgatacggtcaacatcaataccgttgccgaagcggccggaaccatcccttacgaattgatgtgcaatatcaaacgtgcaaaattcacttatatcgagtaa

SEQ ID NO: 43616 - DNA, 1647 bp, Neisseria meningitidis
atgaaacaccttcacgacttacccgcatggtcgaaattgtggaatcactttgacgacagcaaaacattgcatatgcgcgaaatgttcgagcaagacccgcagcgtgcggaacgctactggctgcaagtcggcggactgacgctggactactccaaaaaccgcatcaacgacgaaaccatgtcgcttttgttcgagcttgcccgagaagcaggcgtgccggagcggatgcggcagatgttccacggcgaaaaaatcaataccaccgaaaaccgcgccgtcctgcatgtcgcccttcgcaaccgcaccaattcgccgattgtggttgacggtgaagatgtgatgcccaaagtcaaccgcgttttgcaacgtatgggcgaatttgcacacgaagtccgcagcggaagctggctgggctataccaaccaagtcattaccgacgttgtcaacatcggcatcggcggatcggatttgggtccgctgatgatgtgtaccgcgctcaaacctttcggtcatccgcgcctcaatatgcacttcgtctccaacgtggacggctcgcaactgcgcgacgtattgtccaaagtccaccccgaaaccacgttgttcatcatcgcctccaaaacatttaccacgcaggaaacgctgaccaacgcgctgaccgcgcgcgaatggtttttgaatcatgcgggcgacgaagaagccgttgccaaacacttcgccgccgtttccaccaatcaaaaagccgtcgccgaattcggcatcgacaccgccaatatgtttgaattttgggattgggtcggcggtcggtacagcctgtggtccgccatcggattgccgattatgctgtatctcggcgaagaaaacttcattgaaatgctcaacggcgcgcacctgatggaccaacacttcatcaacacaccgctcgagcgcaacctgcccgtcattctcgccctcatcggcatctggtatatcaactactacggcggcggcagccacgtcatcgcgccttacgaccaacatttgcaccgcctgcccaaattcatccagcagctcgatatggaaagtaacggcaaacaggttacgttggacggcaaagcagtcggacacgaaacctcgccgattatctggggcgaaacgggcattaacggccagcacgcctttttccaactgctgcaccaaggcacgcacattacccccatcgacctgattgcctcgcttgaaaaacgcagcaacctgcccggacaccacgaaatcctgcttgccaacgtcttcgcccaagcagaagcctttatgcgcggcaaaacccccgacgaagtccgcgccgaactcaaagcgcagggtatggatgaggtgcgcatcgaagagctggtcccgcacaaaaccttctccggcaaccgcccgaccaacctcattctcatggacaaggtcaacccgcgcaatatgggcagcctgattgccatgtacgaacacaaaaccttcgtacaaggcatcatttggggcatcaacagcttcgaccagtggggcgtggaactcggcaaacaactggctaaaaccattttgggcgaactgaccggcgaaaccgggccgcaaaagcacgacagttcgaccgaacgcctgatcaacctctacctgcagaccaaccgcaaataa

SEQ ID NO: 43617 - DNA, 864 bp, Neisseria meningitidis
atgaaaaccttcttcaaaaccctttccgccgccgcactcgcgctcatcctcgccgcctgcggcggtcaaaaagacagcgcgcccgccgcatccgcttctgccgccgccgacaacggcgcggcgaaaaaagaaatcgtcttcggcacgaccgtcggcgacttcggcgatatggtcaaagaacaaatccaagccgagctggagaaaaaaggctacaccgtcaaactggtcgagtttaccgactatgtacgcccgaatctggcattggctgagggcgagttggacatcaacgtcttccaacacaaaccctatcttgacgacttcaaaaaagaacacaatctggacatcaccgaagtcttccaagtgccgaccgcgcctttgggactgtacccgggcaagctgaaatcgctggaagaagtcaaagacggcagcaccgtatccgcgcccaacgacccgtccaacttcgcccgcgtcttggtgatgctcgacgaactgggttggatcaaactcaaagacggcatcaatccgttgaccgcatccaaagcggacatcgccgagaacctgaaaaacatcaaaatcgtcgagcttgaagccgcgcaactgccgcgtagccgcgccgacgtggattttgccgtcgtcaacggcaactacgccataagcagcggcatgaagctgaccgaagccctgttccaagaaccgagctttgcctatgtcaactggtctgccgtcaaaaccgccgacaaagacagccaatggcttaaagacgtaaccgaggcctataactccgacgcgttcaaagcctacgcgcacaaacgcttcgagggctacaaatcccctgccgcatggaatgaaggcgcagccaaataa

SEQ ID NO: 43618 - DNA, 1257 bp, Neisseria meningitidis
gtggccaataaattaagaaactacaccatcaacttcggcccgcaacaccctgcggcgcacggcgtattgcgtatgattttggagctggacggcgaacaaatcgtccgtgccgacccgcatatcggcctcttgcaccgaggtaccgaaaaactggcggaaaccaaaacctatctgcaagccctgccctatatggaccgcttggactatgtttccatgatggtcaatgagcaggcgtattgtttggcagtagaaaaacttgtcggtatcgatgtgcccatccgcgcccaatacatccgcgtgatgtttgccgaagtaacgcgcatcctcaatcacttgatgggcatcggttcgcatgccttcgacatcggcgcgatgaccgccattctttacgccttccgcgaccgcgaagagctgatggacttgtacgaagccgtgtccggcgcgcgtatgcacgccgcctacttccgtcccggcggcgtttaccgcgacctgcccgactttatgcccaaatacgagggcagcaaattccgcaatgccaaagtattgaagcagctcaacgaatcccgcgaaggcaccatgctcgactttatcgatgccttctgcgaacgcttccccaaaaatatcgacacactcgaaaccctcctgaccgacaaccgtatttggaaacagcgtaccgtcggcatcggcgtcgtctcccccgaacgtgccatgcaaaaaggctttaccggcgtgatgttgcgcggttcgggcgtggaatgggacgtgcgtaagacacagccttacgaagtgtacgacaaaatggatttcgacatccctgtcggcgtgaacggcgactgctacgaccgctacctctgccgtatggaagaaatgcgtcaatccgtacgcatcatcaaacaatgttccgagtggttgcgtgtcaatccgggtccggtcattaccacaaaccacaaattcgctccgcccaaacgtaccgaaatgaaaacaggtatggaagacctgattcaccatttcaaactctttaccgagggtatgcacgttcccgagggcgagacctacaccgctgtcgaacatccgaaaggcgagttcggcgtttacatcatttcagacggcgcaaacaaaccctaccgcctgaaaatccgcgcacccggcttcgcccatctgcaaggcatggacgaaatggcaaaaggccacatgctcgccgacgtcgttgccatcatcggtacgcaggacatcgtattcggggaggttgaccgataa

SEQ ID NO: 43619 - DNA, 678 bp, Neisseria meningitidis; identical to SEQ ID NO: 37180

SEQ ID NO: 43620 - DNA, 537 bp, Neisseria meningitidis
atggctgcaagcgtccgtatcttaggcatcgacccgggcagtcgcgtaacgggtttcggtgtcatcgatgtcagggggcgggatcatttttacgtcgcctccggctgcatcaaaacgcctgccgatgcgcctctggcagacaggattgccgtcatcgtccggcacatcggcgaagtcgttaccgtttacaagcctcaacaggcggcagtggaacaggtgttcgtcaacgtcaatccggcatcgacgctgatgctcggtcaggctaggggcgcggcattggcggcattggtcagccataagctgcccgtttcggaatacacggccttgcaggtcaaacaggcggtagtcggcaagggcaaggcggcaaaagaacaggtgcagcatatggtggtgcagatgttgggactttcgggaacgccccagccggatgcggcggacggtcttgccgtcgcgctgacccacgccttacgcaaccacgggcttgccgccaaactcaatccttcggggatgcaggtcaagcgcggcaggtttcaatag

SEQ ID NO: 43621 - DNA, 288 bp, Neisseria meningitidis
atgagcgatatttactatcgatccacgattgatgagcatttcaagattatagaattaatagaaaataatccaaatgaaatttatgatgatggcggtggtcaacaattttgcctagaatttcatcatgataaggtcattttttaccacaatgaatttgatgaagaagatggttatccagtattaagctgttcgctgcatacttttaaaactgctttaattgcttggaatgcttttttgcaattgcctaaaagtattcattcggtggtggagactgtgattgaggaataa
